United States Patent Application Publication US 2019/0348154 A1 - sequence listing, part 139

SEQ ID NO: 524952 - DNA, 963 bp, Stenotrophomonas maltophilia
gtgaaacgcctgttgatagccatactgctgctgttctcgggcagcggctgggcggcctgcaccgtcagtacggtgaacgcctcgtttggcagcgtcacctcattcgccctgagcagtacgggggaggtgcaaaccaccggcacgctggtggtgtcctgcgatactgttctcaacctgctaaccaacgactcggtgacgctgacctacacctcggcgtcgatagccgccaacagccgcgccaccatgaaacgtaccgataatgcggccatcgcggacgttatccccacgcgcctgtgcggtgccactggctgcggcggaaacagtgaagtacaaatcagcaaaacctatacctggaatggcaacaccctgctcgggctgctggggtcaaggcgctacaacattccgctttatttccgtactgtgccggggcagaacgtcacggccgggccgtaccaggtgttgttaacgttcagcatcaactacaacgtgtgcgccgttggcgcgggcgggctatgcctgaccccgcaaaccggcacggcaactacctccattctcctcaacatgaccgtcaccaacgattgcagcacgatgaccacgccggacgtgaattttaacagcgcgccgctggtgcaaaattttcccaccgtttcgcagtcgatcgccgtcacctgcaccaagggcagcacctacaccataggcattaataatggagcaaacgccctgaacaacgttcgtcgtatggttagcggcagcaattttatgagttacgacatctataaagaggcgaccagcaaccgctggggcggcagtggcagcgagcgctgggccagcgccagctcatcccaggtcagtaccgacgggcttttacgcacctataactacagcgctaaggtcctgaccagccaggccacgccgcctgccggaacctacaccgacacgctgatcgttgacgtcgcgttctga

SEQ ID NO: 524953 - DNA, 2385 bp, Stenotrophomonas maltophilia
atggcaatcgacgcccgtcaactgaaaccggcgatgatgatcctgctttgcgtcagtaccagcgcatttgccgaaaccggcgacgacagtttaccgccgccgccggacgcgcggacgatgaacggcgaagctgtattccagctcgccctggtgctgaaccactatgacacgggtctggtggtgccggtgacgcagcgcgagggcgcctggtttatttcaggagcggatttgcttcgcgccggactgccgcaggagcatgtgcctgccggagaggtgaacctttcaacgctctcatcggtacgcgtagagtatgacagcagcgcccagcggctcatgctgacggtcccccgggactgggttgcggcgcggatcacgtcgtttagcggtcagagcgcgcaaagcaagccgcattatggccggggcgcgctgctcaactacgacgtttataccaaccataccgagcacacgggcggccaggcgtcggtgtggcatgagttccgctatttcaacgaagactattcgttttcttcgactgggtacgcccgacagaatttcgccggaagcagcgggcagcaggaaggatacgtgcgctatgactcaaccctgctgatcaccaacgaggaggatgccaccacctggaccgtcggggacgtcatcagcgatgcgctgagctggagcaccagcgtgcggatgggcgggatcagctacgggcgcgacttctccctgcgtccggatctggtgacctggccgctgccggcgttttccggtgaggcggccgtcccgacctcggtcgatctctttattaatggctaccgttccggctccacccgccttcagccggggccgtttaccctcactaacctgccgtacatcaacggcgcaggggatgcggtactggtcaccaccgacgcgctgggacgtcaggtgagcaccacactgccgttttatgtcagcagcgatctgctgaagcaggggttaagcgacggcgccgtgacgctgggcagcctgcggcgcaactacggtatagagaattttgactatggcccggcggcgggcagcggatcgtatcgctacggggtgaccgactggctgacgctggaggggcatgcggaaggggcggagtcgctggcgctcggcggcgcgggcacggtgctgaagctcgggcgttttggcgtggtgaatacgtcttatacccaaagccggatgcgcggcgacgaagggggccagatgaactggggctatcagtacagcaccagcgagtttagcgtagcgacccagcatacccgacgcgaccgcggcttcggcaacctcgccctgtacgatcagcccaccgtttatgatgaatatgataaccccgttgccagcctgagccgcaataccgaccagtactccttaacctttaacctcggtgattacggcaatatcggtgcggcgtggatcggcgtggagagttttgacagccggaaaaccgagctgctcaacctctcctggagccgaaatctgtggcgctcaagcagtatttacctggcggccagccgtgaccagcagcgggacgactggacggttgcgctgtcgttgcaggtccctctgggcgaacgtgacagcgccgccgttacctttgaaaacacgcctgacgcaggcagcactcaacgcattaactacaaccactcgatgccgtctgacggcggctttagctggaacatggcctgggccaaccagtcgcggtcgagtaactatcaacaggccacgctcggctggcggaataacaatgttgagcttcagggcggcggctacggtgagaaggggatgatgacctggtggggcgaggcgatgggctctgtcgtcctgatggacggtgagctgtttgcggcgaacaaaatcaacgatgcgtttgtggtgataagcaccgacggacatccggacgtacccgtcagctacgagaaccagccggttggtaaaaccaataacaaaggttatctgctggtcagcggcgtttccgcctattacccggcgagctaccgcattgataccctgaacttacctgcggatacccggctgaaagagaccgagcgtcgggtggcgattcgtcggcataacggttatctggtggatttcccgatggagcaggagcgggttgccagcgtgatcctgcatgacgcgcagggcaatgcgatcccggtgggaagccaggtcaaacgcgcgtcccgcagtagcgcggttgttggctacgacggcctcgcctggctggaaaacctcaacgatgtgaatcctctggaggtcatcaccccggacggtaaacgctgtatcgcaacgttgaatgtgggcgcaaatcccgagcataagctgcaaacctacggtccgctgacctgccgggaggcgccgtga

SEQ ID NO: 524954 - DNA, 762 bp, Stenotrophomonas maltophilia
atgaagccatttttcaggcggtcaggcctgttgagtctgttggggataacggcccttacagcggttaaggcgcaagcagccgcaaccattcttctttggcctatcgatccgtggctttcggcagacgccagagcaactgaattgtggatccagaatcagggcaacagcgccacgacaatgcagatacgcattgtgcgctggaaacaggagggcggatatgagcgttacaccgcccagcaggatgtggtcgccagcccgccgatcgtgactatcgctaagggcagtaaacagcttattcgcctgattaagcaggggacgatcccgtccggcgtcgagcaagcctaccgcatcattgtggatgagattccccagccggatgccaaagcggaaccgtctatgggcctcaaactgcaaatgcgctattccattcccttatttgtttatggacaggggatccccaccctcaacgagggagagcatcacgcgctggcgaacactcatcagctcaactggcgggtcattcaggaggaggggaaacccgcgcttgaggtccgcaatcaggggaacgttcacgtcaggctcagccaggttgcggttgagcagggcgggcaaaaacgcacggttgccgaggggctgctgggttatgtgctgccaggcagcacccgaagctggccgcttccggcagggatttatcagccgaatcggatgagcgcgcaaattaatgccagggatacgcaatggcaatcgacgcccgtcaactga

SEQ ID NO: 524955 - DNA, 546 bp, Stenotrophomonas maltophilia
atgaaggcattgttatgtctgcgcgacagcgcagagggcgtcgtgcacccttttttaaccctgttggtcgggctgatgttgatcccagacgccggggcggtgacgtctcagtcattcagggtgagcgcgacggttgtgcctggatgctcggtgagcaccggcaccggcgggcgtttcggtacgctgaatttcgggacccgcagcggcgtggagagcgcaccggtcagcaccagctttgttgccgacggcgcgttgtccatcgcctgcacaccgggtgtggagctaagtatgagcattaatggcggtcagaattatagctctgtgcggcggatgacgcgttcaggcgggacagaggtggtcggttaccggctctacagcagcagctctttggccgcaaacagtgaaattggggttaaccaggcaataccgattacctataccaacagcaataacatcgcgctgcctctttttggcgtcgcgcttttgaccgggtttagcccgtcaggaacgtattcagatcaactcaccgtgaccttgtcatggtag

SEQ ID NO: 524956 - DNA, 573 bp, Stenotrophomonas maltophilia
atgaaaagaaaacttctttttatctgcgcgggcacgctgctgacggcggcaacggtcggtcaggctctcgcggtcaccagtagcggcactatcggcgcgacgttgacgctgaccaacggctgcttgatcaacggctcgccaacgcaaaacggcattaacttcgggacgctggatttcggcactcatcctgcaacattctccaccctgacaacccagttaaccggtgccagcggaggaaacacctttaccattcaatgtaccactgccagttacacggtggcgatcaccggcaacactaacgctaccgcacccggaaccgttgtcggcaccccaggtacgccgggccgctatctggtcaacaccgccaatgcggcgcagggcgttgcctacagcctgttcagcgatagcggttacaacaacgtggttgcgaacaatgccgcgttgccggtcgcctctactgcgggtggggtggatagctacaccctctacgcacgcattacgggcggcggcaatagcgtaacggtcgtaccgggaacctataccgacacgattaacgtcagcgtcacctactga

SEQ ID NO: 524957 - DNA, 1260 bp, Stenotrophomonas maltophilia
gtggcaagtgcaaacaaactcacgctcttcatcgtgattttcatgctggcgggcattctttccggtgcggcgatccatgagtatgcttcgtccgacgcgatacaggcctggtcggagaacatcaccctgctgaccgatattttcctgcggctgatcaagatggtgatagccccgctggtgttcagcaccctgacggtgggcattatgaggctgggtgaaacgtctacgattgggcgcgtcgggggtaaagcgatggtgtggtttatcagctcatccgtactttccattctggtggggctgtttattgttacccttgaacaacccggcagcggtctgaacctgagcattccgacagagacggttgataccggcctggccgtgagcgggatgtcgctgaaagcctttctgtcacacaccattccaaccagcattgccggcgcgatggccaacaatgagatcctgcaaattgtggtcttctcgatgttcttcggcattggcggcgcgtcactgggccaaaaattcaacgccccgctggtcgcggcgctggatgtggtatcccacattatgctgaaggtgacgggctacgtgatgtacgttgcgccgctggccattttcgcggcgatttcgtccgtcattgccacccaggggctgggcattttgctgaactatgcctcgtttattggcggttattatgtggcgatcctcctgacctgtctggtattgctggccgtgggttacatggtactgaagaaagagattttccgtctggtggcgatgctgaaagatccggtgctggtggcgtttaccaccagcagctctgaagcggcatacccaaaaacgctggagcagttagcgcgctttggctgttcacgtaatatcgcctctttcgtcctgccgatcggctactcgtttaacctggtcggctccatggtgtactgctcgttcgcctcaatgtttattgcccaggcgtacaacattcacctgagttttaccgaggtgacggtgctgatgttaacgctgatgctggcctcgaagggcattgcgggcgtaccgcgctcgtcgctggtggtgctggcggcaaccattccaggctttaacattccggtagccgggatcctgctgctgatggggattgaccatttcctggatatggggagatcggccattaacgtgctggggaacgggattgcgacggcgatgctgtcgcagaatgaaggggcgcgggaagcggaggcagagctggtggagcaggaggcgtaa

SEQ ID NO: 524958 - DNA, 504 bp, Stenotrophomonas maltophilia
atgaccggtatgagtaacgtaacgaaactggcgggcgagccatctgggcaggaattcctggttttcactttaggtgatgaagagtacggtatcgacatcctgaaagtgcaggaaattcgcgggtacgatcaggtaacgcgcatcgcgaacacgccagcgtttatcaagggtgtgaccaacctgcgcggtgtgattgtgcctatcgtggatctgcgcgtgaagttcagccagggcgatgtggagtacaacgataacacggtggtgattgttctgaatctggggcagcgcgtggtggggattgtggtggacggcgtgtcagatgtgctgtcgctgaccgccgatcaaatccgtcctgcgccggagtttgcggtcacgctgtcgacggaatacctgacagggctgggtgcgctcggcgagcgtatgctgattctggtgaatattgagaagctgctgaacagcgaagagatggcgctgctggatattgcggcgaatcacgtggcataa

SEQ ID NO: 524959 - DNA, 372 bp, Stenotrophomonas maltophilia
atggaatccctccagccgcgcgaagaagatctgcatccgctggcgggcggcgagcgcgtgctcgaagtgcgcggcgagtacctgccgctggtggaactgtggaaagtgttcgaagtggacggggcaaaaaccgaggccacgcagggtatcgttgtgatcctgcaaagcgccggacgccgctacgcgctgctggtcgatcagctgattggtcagcatcaggtggtggttaagaacctggaaagtaactaccgcaaagtgccggggatctctgctgccaccatcctgggtgatggtagcgtcgcgctgatcgtcgatgtatcggcacttcagggattaaatcgtgaacaacgtgtggcgaacacagccgcctga

SEQ ID NO: 524960 - DNA, 1635 bp, Stenotrophomonas maltophilia
  misc_feature (1607)..(1616): n is a, c, g, or t
gtgagcatggatattaccgatttttaccagacattttttgatgaagccgacgaattgttggccgatatggagcaacatttgctggatctggtgcccgaggcaccggactcagaacagctcaacgccatcttccgtgcggcgcattccattaaaggcggagccggaacgtttggatttaccattttgcaggaaacgacccatttaatggaaaacctgctggatgaagcacgacgcggtgagatgcagctcaataccgacattatcaacctgtttttggaaacgaaagatattatgcaggaacagctcgacgcctataaaagttcggcagagcctgatgccgccagctttgaatacatctgcaacgcgctgcgtcagttagcgctggaagccaaaggtgaggcgtctgcgcccgttgtccctgcggcaaaactgagcgttgttgacgccgcggccaaaccagacagtgcgcctgatgcgcccgcaggaaaattgcgcgtagtgctgtcacggctgaaagagaacgaggttaacctgctggaagaggagctgggtaacctggcgacgctcagcaacgtggtgaagggtaaagacagcctggccgcgacgctcgacggcgggatcggccaggatgacattgtggcggtgctgtgcttcgtgattgaagcggatcaaattgcgtttgaaaccgaggcggcggccgttgaagtgcccgcgccggcagaaattgcccctgcggtagttgctgctgctccggccctgaaagccgtgcccaaagagacggccgccccggcccgcggtgaaaaaccggcggcgcgctccagcgagtcaacgagcattcgcgtggcggtggagaaagtggatcagctgatcaacctggtgggtgaactggtgatcacccagtcgatgctggcccagcgctccaacgagctggacccggtgacccacggcgatctcatcaccagcatgggccagttacaacgtaacgcccgcgatttgcaggaatcggtgatgtccatccgcatgatgccgatggaatatgtcttcagccgcttcccgcgcctggtgcgtgacctggccagcaagctcaacaaacagatcgaactcacgctgatgggcagctccaccgagctggataagagcctgattgaacgcattatcgacccgttaacgcacctggtgcgtaacagcctcgaccacggcattgagctgccggaaaaccgcgtggcagccggaaaatcgccagtgggcaacctgatcctgtcagcagaacatcagggcggcaacatctgcatcgaagtgaccgatgacggcgcgggcctgaaccgcgagcgcattctggcgaaggcgatttcgcagggcatggcggtcaacgaaaacatgactgatgaagaagtgggcatgctgatttttgccccgggcttctcaaccgcagagcaggtcaccgacgtttccggccgcggcgtgggcatggacgtggtgaaacgtaacattcaggagatgggcggtcacgttgagatccagtctaagcagggcgcgggcaccacgatccgtatcctgctgccgctgacgctggccattcttgacggcatgtccgttaaagtggcggnnnnnnnnnngtctttattctgccgctga

SEQ ID NO: 524961 - DNA, 930 bp, Stenotrophomonas maltophilia
atgaaaaaccagtcccatccgatcgtcatcgtaaaaaaacgcaagcataaggggcacgggcacggttctcacggctcatggaagatcgcgtacgccgactttatgaccgccatgatggccttctttctggtgatgtggctgatctccatctccagcccgaaagagcttattcagattgcggaatatttcagaacgccgctggcgacggcggtcaccggcgggccgcgcatatcgaacagcgacagcccgatccccggcggcggtgacgattacacccagcagcagggcgaagtgaaaaaacagcctaacatcgatgagctgaaaaaacggatggagcaggcgcgcctgaaaaaactgcgcggtgacctggatcagctgattgaggcggaccctaaactgcgcgcgctgcgtccgcatctgaaaattgacctggtgcaggaagggctgcgtattcagatcatcgacagccagaaccgaccgatgttcaaaaccggcagtgccgacgtggagccctacatgcgcgatattctgcgtgcgattgcaccggtgctgaacggcattccgaaccgcgttagcctctccggtcacacggatgatttcccgtacgccacgggagagaagggatacagcaactgggagctttctgccgatcgcgccaacgcctcgcgtcgcgagctggtggcgggtgggcttgatgatggcaaggtcctgcgcgtggtcggcatggctgcaaccatgcgcctgaccgaccgcggaccggatgacgccatcaaccgtcgtatcagtcttttagtgctgaaccagcaggcggagcaggccatcctgcatgaaaacgccgaaagtcagaatgagtcactggacgatttaaaacagcctggggccgtcccttcggctgccgttccaacatcgccaccagccaatccgaggtga

SEQ ID NO: 524962 - DNA, 888 bp, Stenotrophomonas maltophilia
gtgcttatcttattaggttacctggtagttctcggtacagttttcggcggttacatgatgaccggcgggcaccttggagcactctatcaaccggctgaacttgtcatcatcggcggtgcaggggtaggggcttttatcgttggtaacaacggtaaatcgatcaagggcacgctgaaggcgattccgctgctgtttcgtcgctcgaaatacaccaaaagcatgtatatggatcttctggcgctgctctatcgcctgatggcgaagtcacgtcagcaaggaatgttctcgctggagcgggacattgaaaacccgaaagagagcgaaattttcgccagctacccgcgtattttggctgacgcgatgatgctcgattttatcgtcgattacctgcgactgatcatcagcggcaacatgaacaccttcgaaattgaagccctgatggacgaagagatcgaaacccacgagagcgaatccgaagtgccggccaacagcctggcgctggtgggcgactcgcttccggcgttcggtatcgtggcggcggtcatgggcgtcgttcatgccctggcctcggcggatcgcccggcggctgaactgggcgccctgattgcccacgcaatggtggggacgttcctcggtattttactggcatacggctttatctccccgctggcgagcgtgctgcgccagaagagcgctgaaaccaccaaaatgatgcagtgcgtgaaaattacgctgctctcaaacctcaacggttatgcaccaccgatcgccgtcgaatttggccgtaagacgctctactccagcgaacgtccgtcgtttatcgaactggaagagcatgtgcgcgcggtgaaaaaccccaaccaacagacgacaactgaggacgcatga

SEQ ID NO: 524963 - DNA, 579 bp, Stenotrophomonas maltophilia
atgagcgaaaaaagcattgttcaggaagcccgtgatatccagttggcaatggaactcatcacgctgggtgcgcgtttacaaatgctggaaagcgagacgcaactgagccgtggtcgtttgatcaagctgtacaaagaattgcgtggtagcccaccgccaaaaggcatgctgccgttttccactgactggttcatgacctgggagcagaacatccatgcttccatgttctgtaacgcctggcagtacctgcttaaaacgggcttatgcagcggcgtggatgccgtgattaaagcctacaaactttaccttgagcaatgcccgcagcaggaacagggacccctgctggcgctgacccgcgcatggacgctggtgcgttttgttgaaagcggaatgcttgaattgtcgcgctgcaactgctgtgacagcaattttattacccacgcgcaccagcctgcgggcagcttcgcctgtagtttatgccagcctccatcccgagccgtaaaaagacgtaaactttcccgggatgctgccgatattattccacaactgctggatgaacagatcgaacacgctgtttaa

SEQ ID NO: 524964 - DNA, 351 bp, Stenotrophomonas maltophilia
atgcatacatccgagttgctaaaacatatttacgacatcaatttgtcgtatttattgctcgcgcagcgtttgattagtcaggacaaaccgtcagcgatgtttcgtctgggtgttaacgaagagatggcaaccatgctggggggattaacacttccgcagatggtcaagctggctgaaaccaatcagcttgtctgccagttccgtttcgataacccgcagaccattacgcgtctgactcaggaatcccgcgtggacgatctgcaacagatccacaccggtattcttctctccacccgcctgctcaacgaaatcagccagcctgacgacgtagcccggaagaaaagggcttaa

SEQ ID NO: 524965 - DNA, 429 bp, Stenotrophomonas maltophilia
atgagttactcccatctgcttgtttcagttgctgtttctcccgaaagccaccagcttgtcgcccgagccgtatccatcgcccgccccgccaatgcccgcatcagcctgatcacgctggccgcggaacccgaaatgtataatcagctggctgcgccgatgctggaagatatacgtgaggtattgcaggaggaaacgcaccaattcctgcaagagttggtggagagggcagactatccgattcatcagaccgttatcgcgaccggtgaattaagcgcgcatatactcgacatctgtcagaaagagaatattgacctggttatttgcggaaatcataaccagagttttttttctcgtgcggcatgctcagcaaaatctatcgtttcgtcaagccaggttgatgtcctgctggtgcctcttgggggcaattaa

SEQ ID NO: 524966 - DNA, 1425 bp, Stenotrophomonas maltophilia
atgggtcgcttagtcgtcgtctctaatcgcatcgcaccgccggatgataaaaaagccagtgccggtggcctggcggtcggggtattaggtgccctcaaagccgcgggtggtctctggtttggctggagcggggaaatcagtaatgatgagaaaccgcttaaaaaggtgtcacggggcaatatcacgtgggcttccttcgcactcagtgagaaggactatgatgaatattattccgagttctcaaacgccgtgctgtggccagcgtttcactatcgtctggacctggtgaaattccagcgtgaatcctatgaaggctatatgcgcgttaatgcgctgctggcagataaactgctgccgctgatcgaagaagacgatattttatggatccacgactaccatctgctgcctttcgccagagagctgcgaaaacgtggtgtgaataaccgaatcggttttttcctgcacatccctttcccgacgccggagattttcacggcactgccgcagcatgaagagatccttgaggcgctgtccgattacgacctgctcggtttccagacggaaaacgacaggctggccttcctcgacagcgtgtccggtaaaacccgactagttactcacggcggcaaatctcacaccgcgtggggacgtaatttccataccgaggtctacccgattggtattgagccagacgaaattgccgagcaggcctccggtccattgcctccgaagcttgcccagcttaaggatgaactcaagcacgttaagaatatcttttcggttgaacgacttgattattccaaagggttgccggagcgattcctcgcgtacgaaaccctgctggaaaaattcccgcagcatcacggcaagattcgttatacccagatagcgccgacctcgcgcggtgaggttcaggcctatcaggatatccgtcaccagcttgagaccgaagcagggcgcatcaacgggcgctacgggcagcttggctggacaccacttttctatttgaatcagcactttgagcgcaaaattctgatgaaagtgttccgctatgcggacgtcgggctggtcacgcccctgcgcgacgggatgaatctggtggcaaaagagtatgttgcagcacaagatcctgctgacccgggtgtgctggtgctgtctcaatttgccggtgcggcaaacgagttaacctcagcgctgattgtaaacccttacgatcgcgatgacgtggcaaatgccctgaaccgtgcgttaactatgccgcttgcggaacgtatttcacgccattcggaaatgatggagaccatcatgaagaatgatattaaccgctggcaggcgcgttttattgacgatttgcgcgcgatccagccgcaaagtcaggaaggtgatctgcaaaaaaagatcgcgaccttccctaaactcgcctga

SEQ ID NO: 524967 - DNA, 804 bp, Stenotrophomonas maltophilia
gtggctgacttgttaaccgcaccgcctgtactgcccggaaaatttgctttcttttttgacctcgacgggacgctcgccggaattgaaccgcatcctgacgacgtcgttgtaccggatctggtgttagagaatttgcagcagctctcccgacagaacgagggggcactggcattgatttcagggcgctcaatggccgagctggatgtgctcgccagtccttatcactttccgctggccggtgtgcacggagcggagcgccgcgatatccatgatcaactgcatatagtttcactccccgatacgctggttcaggcgctgcatgcgcaactctcttctgctctggaactgcttcccggtacggaactggaagccaaaggcatggcctttgcgctgcactaccgtcaggcgcctcaccatgaggcggcgatcttttcggtagcaagaagcgtggcggaagcccatccggagctggcgttacagcccggtaaatgtgtggtcgagattaaaccagcaggaattaataaaggcgctgccattgcagcgtttatggcggaagcgccgtttaaagggcgtacgccagtattttttggggatgacctgaccgatgaggccgggttcagcgtggtaaaccgggccagtggcatgtctgtcaaggtagggccgggtgaaaccgttgccggatggcggctggaaaacgtcgccagcgtctggcagtggatatctgatgtcgctaaccagcaacaacaacaaatagcgcaaaacaacgggagaaatcattatgggtcgcttagtcgtcgtctctaa

SEQ ID NO: 524968 - DNA, 981 bp, Stenotrophomonas maltophilia
atgtcctctgttactacatccggagcgccgaagtcggctttcagttttggccgcatctgggaccagtacggcatgttggtggtttttgccgccctgttcgttgcgtgcgcgatttttgtgccaaacttcgcgaccttcatcaacatgaaggggctggggctggccatctccatgtccggcatggtggcctgcggaatgctattctgcctggcctccggcgattttgacctgtcggtcgcctcggtgattgcctgtgccggggtcaccactgccgtggtgatcaatatgaccgaaagcctgtggatcggcgtgctggcggggctgatgctcggcgtgctgagcggtctggtgaacggctttgtgattgcgcgcctgaagattaacgccctgatcacgacgcttgcgaccatgcaaatcgtgcgcggtctggcctatatcatctccgacggtaaggcggtggggattgaagacgagcgcttctttacgctgggctatgccaactggctgggcttgcctgcgcctatctggctgacggtagcctgtctgatcctgtttggtttcctgcttaaccgcaccacctttggtcgtaataccctggcgattggcgggaacgaggaagcggcgcgtctggcgggtgtcccggtcgtacggaccaagatcattatcttcgtgctttccgggctggtgtcggcagcggcggggattattctggcgtcgcgtatgaccagcggccagccaatgacctctatcggttatgagctgattgtcatttcagcctgcgtattggggggcgtatccctcaagggcggcatcggaaaaatctcatatgtggtagcggggatcctgattctggggaccgtggagaacgccatgaacctgcttaatatttctccgttctctcagtacgtcgtacgcggcctgatcctgctggcagcagtgatcttcgaccgttacaagcaaaaagctaagcgtaccgtctga

SEQ ID NO: 524969 - DNA, 1515 bp, Stenotrophomonas maltophilia
atgcaacagtctgatccgtatctctctttccgcggcatcggtaaaacattccccggcgtaaacgcgctgaccgatatcagcttcgactgctatgccggtcaggttcatgccctgatgggggagaacggcgcgggaaaatccacgctgctaaaaattctcagcggcaactacacgcccaccaccggcacgctggccattcgcggcgaagaggtggcctttgccgataccacggcagcgttaaacgcgggcgtcgccatcatctatcaggagcttcatctcattcctgaaatgaccgtggcggagaacatctacctgggccagcttccgcataaaagcggcgtggtcaaccgctcgctgctcaactatgaagcgggcttgcaactcaggcaccttgggctggatgtcgatccgcaaacgcccctcaagtatctctccatcggccagtggcagatggtggaaattgccaaagcgctggcgcgtaacgccaagatcatcgcttttgacgagccaaccagctcgctctcggcgcgtgaaattgaaaacctctttcgcgtgatccgcgagctgcgcaaagagggccgcatcattctgtacgtctcccaccgtatggaagagatttttgccttaagcgatgccatcaccgtgtttaaggatggccgctacgtgcgcaccttcaccgatatgcagcaggtcaatcatgaccagctggtgcaggcgatggttgggcgcgatctgggggatatttaccactggaagccgcgcgagtacggccctgagcgtctgcgtctggatagcgttaaagccccaggcgtgcgcacacctatttcactctcggtgcgcagcggcgaaatcgtcgggctgtttggccttgtcggggcagggcgcagcgagctgatgaaagggctgtttggcggtacgcgcattacccagggccaggtcttcgtcgacgggaaaaaggtcgatatacagaagcctgcgcaggcgattaacgcgggcatcatgctctgtccggaggatcgaaaggccgaaggcattattccagtgcactcggtgcgcgacaacatcaacatctctgcccggcgcaagttcatccgcgcgggatgtctgattaacgacggctgggaggcgagcaacgctgatcaccatatccgttcgctgaacatcaaaactcccggggctgaacagctgatcatgaatttgtccggcggcaaccagcaaaaagccattctggggcgctggctgtcggaagacatgaaggtcattttgctggatgaaccaacgcgcggtatcgacgtgggggcgaaacacgaaatctataacgtcatctatgagctggcaaaacgcggtgtggcggtgctgttcgcctccagcgatctgcccgaggtgctgggcgtcgccgaccgtattgtagtgatgcgtgaaggcgaaattgccggtgaattgctgcatgaacaggcgaatgaacaacaggcgttgagtctcgccatgcctaaagttagccaggctgtcgcctga

SEQ ID NO: 524970 - DNA, 990 bp, Stenotrophomonas maltophilia
atgcacaaatttactaaagcgctggcggccatcggcctggctgccgttatgtcacaatccgctatcgctgaaaatttaaagctcggttttctggttaaacagccggaagaaccgtggttccagaccgaatggaaatttgctgataaagccggaaaagatttgggatttgaggtaattaaaatcgccgtacctgacggcgagaaaacgcttaacgccattgatagcctggcggcgagcggcgcgaaaggtttcgttatctgtacgccggatccaaagctgggttcagcgattgccgcgaaagcgcgcggttatgacatgaaagtgattgcggtggacgatcagttcgtgaatgccaaaggcaaaccgatggataccgttccgctggtgatgatggcggccaccaaaatcggcgagcgtcagggccaggagctctataaagagatgcaaaaacgcggctgggatgtaaaagagaccgccgtgatggcgattaccgctgacgagctggataccgcccgtcgtcgtaccacgggctcaatggacgccctaaaagcggctggcttcccggaaaaacaaatctacaaagtcccgaccaaatccaatgatatcccgggcgcctttgatgcggcgaactccatgctcgtccagcatccggaggtgaaacactggctggtggtggggatgaacgataacaccgtgctgggcggcgtgcgtgcaacggaaggccagggctttaaagcaccggacattatcgggatcggcatcaacggcgtggacgccgtgagcgaactgtctaaagcgcaggcgaccggcttctacggctctctgctgccaagcccggatgtccacggctataaatccagcgaaatgctttacaactgggtgaccaagggggttgagccgccgaaattcaccgaagtaaccgatgtggtgctgatcacccgcgataatttcaaagaggagctggcgaaaaaaggactgggcggtaagtaa

SEQ ID NO: 524971 - DNA, 558 bp, Stenotrophomonas maltophilia
atgacaaaagttgcggtgctgctggcacctggttttgaagaagcagaagcgattatcacagtggatatcctgcgtcgcttgcagatcgaggtggaaatgctggcctgcgcggagtcccgtgcggtagtgagttaccacaatatccccatggtggctgacagtacattaacggaacgtattaatacgctgtatgacgcggtcgtgttacccggtgggccgcaggggagtatcaatcttgcggctaaccaggaggtgatccgctttgtttccgcgcatgacgagcacggcaaactcatctgcccgatctgctctgcggctgcgcgggtgctgggcgcaaacgggctactgaaggggcggcgctacgtctgttccggcgatctgtggcagatcgttgatgatggagtatatgtggatgcgccggtcgtggaggataacaacctcatcagcggcaaggggctggggcacgcttttgactttgcgctgacgctctctgcgcgtctgttgggcgacgatgcccccgtgcgcgatcatgctgaacacatctattaccgctggtaa

SEQ ID NO: 524972 - DNA, 504 bp, Stenotrophomonas maltophilia
atgactacccaaacgatgatgcaaaaactgaatgcccagatgaacctggagttttatgcttcaaatctgcatctgcatttgagcgcctggtgttccagaaaaagcctcaacggcactgccaccttctttcgtactcaggcgcaaagtaacgtcacgcacatgatgcgtgtctttaactttttgaaagccatcggcgccaatcccacagtcaaagagcttgaaacgattgaagataattactcctctctggaggaactgttccagaaaacgcttgaagagtatgagcaacgctgtacaaagctgaacaagctggccgatgaagccaaagcgcaacaggacatcattaccctcaagtttttacgtgatatggacagagagcagcagcaggatggcatgctgctgaaaacgctcgcagacgaaatccgcaacgcgaaacgcgcggggatctgtctggagcagacggaccgccatcttctcgacatagctaccgtgcaacaccactaa

SEQ ID NO: 524973 - DNA, 1344 bp, Stenotrophomonas maltophilia
atgatcaccattgagtttattgtcattatcctctgcctgctggtaggtacccgcttcggcgggatgggcctggggctgataagcggcatcggcctgtttattttgagttttgtctttggtctgcaacccggtaaaccgccggttgacgtgatgctcacgatcctcgccgtcatcggctgcgcggcaacactacagaccgccggtggcctgaacgtgatgatgcaattcgcagagcgcctgctgcgaaaacatccccagcacatcacccttctcgcgccgtttaccacctggatgttgacctttctctgcgggaccggccacgtcgtctacactatgtttcccattatcgcggatatcgccctgaaaaaaggcattcgcccggaacggccgatggcggtggcctcggtggcctcacagatggcgatcaccgcctcccccgtttccgtggccgtcgtttcgctggtctcaattctgggtgcgcagaacggtatcggccacgcgtgggggatcctcgaaatcctcgccgtttccgtaccggcctcactgtctggcgtcgccattgcggcactgtggagcctgcgccggggaaaaaacctcgcagacgatcctgaatttcaggaaaagctgaaagatccgaaacagcgggagtttatctatgggggaacggagacgttgatggatcagcgtttccctaaacaggcctacttgtcaacgtggatcttcttcgccgggattgccgttgtggtcctgctgggtgcgttgcccgagttgcgtccggcgtttgagatcaaaggcaaaatgacggccctgtcgatgaaccttgttattcaaatgatgatgcttattgccggggccatcatgctgatgacctgtaaggttaatgcgtcggccatttcaaacggagcggtatttaaggcggggatggtcgcgattttctcggtgtttggcgtggcatggatgagcgatacctttttccaggcgcatctcgacgaactgaaaatggcactggagggggtagtgaagagtcatccctggacgtatgccatcgtgttgtttctggtgtcgaaactggtcaacagccaggccgcggccttgaccgcggtcgccccgatggggttgatgttaggcatcgatccgaaaatgctggtggccttcttcccggcctcctacggctactttgtgctgcccacctatccgagcgatctggcctgtattggattcgatcgctccggcaccacccgcatcggtaaattcatcatcaaccacagctttattctgccgggtctgattggcgtcagctgtgcctgcgtggtgagctatctgctggtgcagacgttcttttga

SEQ ID NO: 524974 - DNA, 252 bp, Stenotrophomonas maltophilia
atgtcacaaaacctgagcgccgatcaggaactggtatctgacgtcgtcgcctgccagctggttatcaaacaaatccttgatgtgattgacgttatcgcgccggttgaggtacgcgaaaagatgtcgacccagctaaaaaacatcgatttcaccaatcatcctgctgcggcggacccggttacgctccgcgcgatccagaaagcgatcgcgctgattgaactgcgcttcacgccgcagggtgagtcacattaa

SEQ ID NO: 524975 - DNA, 1419 bp, Stenotrophomonas maltophilia
atgagtgaaaacgtatccgggaaagagagccgtggattatcgcctgcggcactgctggtggccggtgctttctttatggagtttctggacgggacggtgatcgccaccgcattgccggatatggcaaaaagcttcggcgtacaggccgtggatctgaatatcggcatcagcgcctacctgatcacccttgccgtgctgatccccgccagcggctggatcgccgaccgcttcggcgcgcgaaaagtatttgccctcgcgctggcgatcttcacgctggcctcggtattttgcggcctgtccaccacgctcgaggagtttgtcgcaatgcgcgtcttccagggcatgggtggcgcgctgatggtgcctgtgggtcgcctggccgtgttacgtacaacgccaaagcatcagctcatcacggcaatcgccaccctgacgtggcctgcgctggtcgcgccgatcatcggcccgccgctgggcgggttcattacaagctatgccgactggcgctggatcttctttattaatgtgccgctggggataatcgccattttgctggcactgcgaatcattccggacctgcatgaagatacgcgccgaccgtttgacttgccgggttttgtggtcaccacccttgccatggtgagcctggtttatgcgatggagttgatgggcgcagagcctctgcggacaggattaaccgccacgctgtttatcgtcggtgtcgccgcgttgagcctggcgctgcgccactttaagcgcgcaacctggccgatgatcaggctcgatgcgatgcaagtgccgacgtttcgcgtcaccctgtacggcggatcgctgtttcgcgcctccatcagcgcggttccgttcctgttaccgctgatgttccaggtcggctttggcatggacgcgttccattctggcctgctggtgctggccgttttcgtaggcaatctcaccattaaaccggcgacgacgcccctgatccgcagcctggggtttaagcggctgttgctgattaacggttcactgaatgtcctggcgctgctggcctgcgcctttcttacgccgcagactcctgtgtggctcgtcatgctgatcctctatctgggtggcgtttttcgttcgatccagtttacagccatcagtacgctggcctttgcggatgtaccctctgcgcagatgagctatgccaatacgctgttttcaaccgcaacgcagcttgccgtgggacttgggatcacgctcggggcaattggtattcgtatcggggaaaaagtcagtgagacgatggggattgccggcatgccgggaatgagcttccggctggcatttgtggcgatcgcgctgatctgcctggtgggaatggttgacacgctgcgtctgaccaaaaatgcaggcagcgcggtatcatcgaaaaagtaa

SEQ ID NO: 524976 - DNA, 639 bp, Stenotrophomonas maltophilia
atgaaaattgcactgatgatggaaaacagccaggccgctaagaatcccatcatccttaatgagctgaaagccgttgctgatgagaaaggtttcccggtctataacgtcggtatgagtgatgagaacgatcatcatctcacttatattcacctgggcatcatggcgagcattctgcttaacgctaaagccgttgattttgttgtcaccggctgcggtaccgggcagggcgcgttgatgtccctgaacatccatccgggtgtgatttgcggttactgcatcgatcctgcggatgctttcctgttcgcgcaaatcaacaacggtaacgcgctttctctgccgtttgcgaaggggttcggctggggggcagaactgaacgtacgctttatctttgagaaagcgtttaccggacgcaatggcgaaggctatccaccagagcgtaaggagccgcaggtgcgtaacgccggtattctgaaccaggtgaaagcggcggtggtaaaagaaaactatctggataccctgcgtgcaatcgatcctgagctggttaaaaccgccgtctcaggccagcgcttccagcagtgcttcttcgagaactgccaggacaaagagatcgaagccttcgtgcgcggtattgttggctga

SEQ ID NO: 524977 - DNA, 339 bp, Stenotrophomonas maltophilia
atgaaacgtgtaatcatagccggaacgatcctgttgctcgccgggtgcagcatcaaccgtcaggcagaagtcagtagtacggatgccccaaacggaattgtgcgcctcgactatggccagaccatgctgcaaaacgcctggtctgatgactatgttaataacggtacggcaacaaaggcctgccaacacatgggctacgcctccgcgtcagcctacgggcagccgattaaaacctgcaccctgatcagcggttcattctgtctgaacgaaagtgtgaccattcagtataaatgtcagggatatgccgttacctcttccagccagaatccgtggtattaa

SEQ ID NO: 524978 - DNA, 342 bp, Stenotrophomonas maltophilia
atggactacggcaagttcctttatgaaaagagtaaatcttctaaggaacagaagaagaagcaaaaagttatccaggttaaggaaatcaaattccgtcctggtaccgacgatggcgattatcaggtaaaactccgcagcctgattcgctttctggaagatggcgataaggccaagatcacgctgcgtttccgcggtcgtgagatggcccaccaacagattggtatggaagtgcttaaccgcgtccgtgaagatctgagtgaactggcagtagtcgaatccttcccaacgaagatcgaaggccgccagatgatcatggtgctcgctcctaagaagaaacagtaa

SEQ ID NO: 524979 - DNA, 357 bp, Stenotrophomonas maltophilia; identical to SEQ ID NO: 114752

SEQ ID NO: 524980 - DNA, 984 bp, Stenotrophomonas maltophilia
atgtcacatctcgcagagctggttgccagtgcaacggccgccattaaccaggcctcagatgttgccgcgttagacaatgtccgcgtcgaatatctgggcaagaaagggcatctgacccttcagatgactaccctgcgtgaactgccagcagaggagcgcccggcagcaggtgcagtgattaacgaagccaaagagcaggtacaacaggcgctgaacgcacgtaaagccgagctggaaagcgcagtactgaatgcgcgtctggcggcagaaacgattgacgtttctctgccgggtcgccgtatcgaaaacggcggtctgcatccggttacccgtactatcgatcgtattgaaagtttcttcggtgagctcggctttaccgtggcgactggcccggaaattgaagatgactaccacaacttcgatgcccttaacattcctggccatcatccggcacgcgctgaccacgacactttctggtttgacgccacccgtctgctgcgtactcagacttctggcgttcagatccgtaccatgaaggagcaggctccaccgatccgcatcatcgcgccgggtcgcgtataccgtaacgactacgatcagacccacaccccaatgttccaccagatggaaggtctgattgttgataaaaacatcagcttcaccaacctgaaaggcacactgcacgatttcctgaacaacttctttgaggaagatttgcaggttcgtttccgtccgtcctacttcccgttcactgaaccttctgcggaagttgacgtgatgggtaaaaacggtaaatggctggaagtgctgggctgcggcatggtacatccaaacgtactgcgcaacgtaggtatcgatccggaagtatactccggctttgcgttcggtatgggcatggagcgtcttaccatgctgcgctacggcgtaaccgacttacgtgcgttcttcgaaaacgatctgcgtttcctcaaacagtttaaataa

SEQ ID NO: 524981 - DNA, 2388 bp, Stenotrophomonas maltophilia
atgaaattcagtgaactgtggttacgcgaatgggttaataccacgctggacagcgacgcgctttctaaccagatcaccatggcgggtctggaagttgatggcgtggatcctgtttctggcgcctttaccggcgtcgtggtaggtgaagtggttgagtgtggtcagcaccctaacgccgacaaactgcgcgtaacaaaagtcaatgtgggcggtgaccgtctgctggatatcgtctgcggtgcgccaaactgccgacagggcctgagggtagccgtggcgaccgtcggcgcggtactgccgggcgatttcaaaatcaaagcggctaagctgcgcggtgagccgtctgaaggcatgctgtgctccttctccgagctgggcatttccgacgatcactccgggattatcgagctgccgcaggatgcaccagtgggtaccgatatccgcgaatacctgaagcttgatgacaacaccatcgaaatcagcgtgacgccaaaccgtgccgactgcttaggtatcatcggtgtagcccgcgacgtggccgtgctgaaccagaccgaactgaacgagccggagatcgctccggttgaggcaaccatcagtgatgtgctgccgattcaggttgacgcgcctgaggcctgcccgcgctacctcggtcgtgtggtgaaaggtattaacgttaaagcgccaaccccgctgtggatgaaagagaaactgcgtcgctgtggtatccgttctatcgacgctgtggttgacgtgaccaactatgttctgctggagctgggccagccaatgcacgccttcgataaagatcgtatcgaagggggtattattgtgcgcatggcgaaagagggcgaaaccctggttctgctggacggcagcgaagcgaaactgaacgccgacactctggtaattgccgatcacaacaaagcgctggcgatgggcgggatcttcggcggcgagcactctggcgtcaacgacgaaacgcaaaacgtcctgctggaatgcgcgttcttcagcccgctctccatcaccggccgcgcacgccgtcacggtctgcacactgacgcttctcaccgctatgagcgtggcgtggatcctgcgctgcaatacaaagcgatggagcgtgcgactcgcctgctgatcgatatctgcggcggtgaagcgggtccggtaattgatgtgaccaacgaagcgacactgccgaagcgtgcgaccattaccctgcgccgcagcaagctggatcgcctgattggtcaccacgttgccgatgcgcaggtgaccgacattctgacgcgtctgggctgcgaagtcactgaaggtcaggacgagtggaaagccgttgcaccatcctggcgtttcgacatggagatcgaagaagatctggtggaagaagtggcccgcgtttacggctacaacaatatccctgacgagccggtgcaggcgggtctggtgatgggcagccatcgcgaagccgatctgtcactgaagcgtgtgaaaaccatgctgaacgacaaaggctaccaggaagtgatcacctacagcttcgttgatcctaagctgcaacagctgatccacccgggtcaggaagcgctgatcctgccaagcccgatctccagcgagatgtcagcgatgcgtctgtccctgtggacgggactgctgggtactatcgtttataaccagaaccgtcagcagaaccgcgtgcgtattttcgaaagcggtttgcgctttgtaccggatactcaggccaatttaggcatccgtcaggatctcatgctggccggcgccatcagcggtaaccgctatgaagagcactgggacctggcaaaagggacggttgatttctacgatatgaagggcgatctggaagcgattctcgatctgaccggtaaattatccgaaattgaattccgcgcagaagcgattccagccctgcatccgggccagagtgcggcgatctatttagacggcaaacgtgttggttttattggggttgttcacccagagctggaacgtaagctggatctgaatggccgtaccatcgtattcgagctggagtggagcccggttgcagaccgcgtcattcctcaggcaaaggacgtctcacgcttcccggcaaaccgccgtgatatcgcggttgtggtcgctgaaaatgtgcccgcagcagatattttggccgaatgtaagaaagttggcgtaaatcaggtagttggcgtaaacttatttgacgtgtaccgcggcaagggcgtagcagaaggtttcaagagcctcgctattagccttatccttcaggataccagccgtacactcgaagaagaggagattgccgctaccgtcgccaaatgtgtagaggcattaaaagagcgattccaggcatcattgagggattga

SEQ ID NO: 524982 - DNA, 300 bp, Stenotrophomonas maltophilia
atggcgcttacaaaagctgaaatgtcagaatatctgtttgataagcttgggcttagcaaacgggatgccaaagagctggtagagctgtttttcgaagagatccgtcgtgctctggaaaatggtgagcaggttaaactctccggctttggcaattttgatttgcgagacaaaaaccaacgtccgggccgtaacccgaagacgggggaagatattcccattacagcccgccgcgtggtgaccttcagacccggacagaagttaaaaagccgtgtcgaaaacgcaacgcccaaagcagagtaa

SEQ ID NO: 524983 - DNA, 981 bp, Stenotrophomonas maltophilia
atgcttgatcttgcccgtcttcagcaccgctccgatctccgccgcctgtgtctgctcggggtgctgatgattgtcgccaccaccgtcagcctgtgtgcgggcgatcggtggctgggaccggaaagctggtttacgcctgagggacagctctttgtctggcagatccgcctgccacggacgctggctgtgcttttagtcggcgctgcgctggcgctgtgcggcacgatcatgcaggcattatttgaaaaccctctggcggaacccggacttctcggggtgtcgaatggcgcaggcgtcgggcttatcgccgccgtgatgctggggggaggcgagctctccgcctgggggattagcctcagcgccatccttggcgcgctgttgataaccctcatccttctgcgctttgctcgtcgccatttatccaccagccggctgctgcttgccggggtagcgttggggatcatctgtagcgcgctgatgacatgggccgtctacttctccacctctttcgatctgcgccagttaatgtactggatgatggggggatttggtggcgttgactggcgtcaggggtggctgatggtgctcctgatcccggtcatcctgtggacggcgttccaggcgcagccgcttaatattctcgcgctgggcgaaacgtctgctcgccagctcgggatgccgattggcttctggcgcaacgtgctggtaatcgccatcggctggatggtgggcgtaagcgtggcgctggcgggggcgattggctttattgggctggtgatcccgcatatgctgcgcctgtgcggcattacggaccaccgaactctgcttccggcctcggcggttgccggggcggcaacgctgctgattgccgatatcatcgcccggcttgcgctgacggccgctgagttgccgataggcgtggtgaccgcaacgctgggcgcaccggtctttatctggctactattaaaagctggacgttaa

SEQ ID NO: 524984 - DNA, 552 bp, Stenotrophomonas maltophilia
atgcagtctgatattctgaataccgaagtgactaccattgacggcgagaaaaccacgctggaaggctacaagggcaaggtactgctcatcgtgaacgtggcatcgaaatgtggccttacgccgcagtatgaacagctggaaaacattcataaagcctgggaaaaagacggctttaccgtactcggcttcccgtgcaaccagttcctgggccaggagccgggcagcgaagaggagattaagaccttttgcagcacaacctatggtgtgacgttcccgatgttcagcaaaattgatgtgaacggggaaaatcgtcatccgctgtatgccaaactggtggctgcggcgccgaccgccgttgcgcctgaagagagtggtttctatgagcgtatggcgagcaaaggtcgcgcgccgctctatccggacgatattctgtggaacttcgaaaaattcctgattggccgtgacggtcaggtcgtgcagcgtttctcgcctgacatgacgcctgaagatcctatcgtgatggaatcaatcaaactggcgctggcgaaataa

SEQ ID NO: 524985 - DNA, 756 bp, Stenotrophomonas maltophilia
atgacgctgctgatgcagctcacaggcgttgccgggaagggacgtcttgagcctgttaccgccgcagtcaacgcaggtgaaatccttcacctggttgggcctaacggcgccggaaaaagcacgctgctggcgcgcatggcggggctgacccgcggggaaggggagattacctttctcgggcaatcgctcgtcaactggctaccctctacactcgcctcccgtcgaagctatctggttcagcagcagattccgccctttgcaatgcccgtctggcactacctgacgctgcacctgcctgataaaaatcaggtagcattgctccatgacgttgctgcggcgctcgggttagacgataagctcacccgacaggccagccagctttccggtggcgaatggcagcgcgtgcgtctggccgccgtcatccttcaggttcatccggtgggaaatcctcacgggcggttgctgctgctggacgagccgatgagcggactggacgttgcccagcaggcagcgctggatactctgctcagcgcgctgtgtcgcaagggcatcgccattgtgatgagcagccatgatttaaaccatacgttgcgccacgcgcatcgggtgtggttgctggcgcgtggcaaactgattgccagcggaacgcgcgacagcgtgctgacggcccccaatcttgcgagtgcttaccacatgtcgttccggaggctggatattgaaggccacaagatgctcatttccacggcgcaggaataa

SEQ ID NO: 524986 - DNA, 465 bp, Stenotrophomonas maltophilia
atgcgattctggtttctccttgttgcggcgctatttcttgcaggatgcagcagccatcgtgcacctccgcctaacccacggctttccgattccattacggtcattgccagcctgaacgatcagctcagcaactggcgcggcaccccttatcgctacggcgggatgagccggggcggggtggattgctcgggatttgtgctgatgactttccgcgataaatttgacctacagcttccgcgtgaaacgcgtatgcaggcgaaaatcggcactgaaattgataaagacgagctcctgcccggcgatctggtcttttttaaaacaggttccggtgagagcggcattcatgtcggcatttatgacaccgataatcagttcattcatgcctcgaccagccgcggcgtgatgcgctcctctctcgataatgtttactggcgtaaaaatttctggcaggccaggcgtatttaa

SEQ ID NO: 524987 - DNA, 714 bp, Stenotrophomonas maltophilia
atgattattacgctagataatgcttaccagtctgaacttttactccttccggcgcgtgatagtgcaggtttgcttaaaggtttagagattttggttaactttactggcgtgggtacggacgtacgaatcccgactgaactggttatccctcatctttctcaggaagatgaattagtgctgtttcaggaaaaactgcaattactcgatacctgtaagctattttttattcagcatcagttaattgcatggatcaatattacacctgcaattgttgagtttttattaactaatgagaacgctgtttcaatccttgatcgttatccgtttcttgagtttactgttaatgagaactatccaggtttaaataacgggaaagacgatctgacgcttgcaagaatggcgatccatttccccttagtgctggctaactttggtgcaggggctgcatcccttaaaccggtttatgatggtctgttcaaacgggtgattctggataaaaactttattcatcagcgcgtctcggcgctctctttcgagccatttatgcgcgccatcctctggcagatcgcgccgcattgtcagtcggtcatggtctcgggaattgacgatcacggcatcttacaacgcgtgctgcccttcaattttggcgcaatgcagggaaccctgtggcctgccgtcccggcagaacgcgtaacgaccctcgttcagcaataa

SEQ ID NO: 524988 - DNA, 1443 bp, Stenotrophomonas maltophilia
atgaccctgtcttttactgctcactggcacgatgaattacccggcttttacaccgcgcttaagcccacgcctttacagaacgcgcgtcttatctggcataacgatgcattagcggattcgcttggcatcccttcgacactttttcagccagaaaagggcgccggtgtctggggcggcgaaacgctgcttccgggcatgaagcctctggctcaggtctacagcggacatcagtttggcgtctgggcgggacagctcggcgatggtcgcggcatcctgctgggtgaacaggttctgccgaatggcgaaacgctcgactggcacctgaaaggggcagggttaacaccgtactcacgcatgggggatggccgcgcggtgctgcgttcaaccattcgtgaaagtctggcttccgaggcgatgcatgccctggggatccccacctcacgcgcgctgtccattgtcaccagcgacacgccggtggcccgcgagacgatagagcagggggcgatgcttatccgcgtggcggaaagccatctgcgtttcggtcattttgaacacttctactatcgccgcgagccggataaagtccgccagcttgccgattacgcccttcgacgtcactggccgcacctgcaaaacgaaccggaccgctatgttctctggttccgtgatattgtcgcgcgcaccgcctcaatgattgcccgctggcaggccgttggctttgcccacggggtgatgaataccgacaacatgtccctgttagggctgacgtttgactacggtccgtacggcttccttgatgactatcaaccgggttacatctgtaaccattcggactatcaggggcgttaccgtttcgacaaccagcctgcggtggggctgtggaaccttcagcggcttgcgcaaagcctgtcgccgtttatcgacgtcgatgccctgaacgatgcgctcgatacctatcaggaggttttgctgcgggaatatggtgtgttaatgcgcaacaagctggggctgatgacgcaggaaaaaggcgataacgcgctgctgaatgggctgtttgccatcatggcgcgtgaaggcagcgactatacccgaaccttccgtatgctaagccagactgcgcaacagagcgccgcttcaccgctgcgtgacgagttcatcgatcgacaggcgtttgatgactggtttgccacttaccgggcgcgtttacagcaggaacagattgatgacgatacccgccaggcgcggatgaaggcggttaacccggcgatggtgttgcgcaactggctggcgcagcgggctattgagcaggcagagcagggggattatgccgagctgcatcggctgcatatcgccctgcgcacgccgtttgctgaccgggaggatgactatgtcagccgcccgccggactggggcaagcgactggaagtgagctgctcaagctaa

SEQ ID NO: 524989 - DNA, 780 bp, Stenotrophomonas maltophilia
atggctgaacgttatacggctgaaaatctgacttttacccggtctggccgcacgctgacagataacgtttcgctgtcactgtcgaagggagagctggttacattgatcggtcctaacggcgcggggaaatccacgctgctgcggctgctgaccggctacctgaaacccgacagcggcggctgttcgctggcggggaaagcgctggatgaatggcacccggagacgctgtcccgctatcgggcagtgatgcgtcagcatactcagcctggatttgactggctggtggaggagatcgttggaatggggcgtgcgccctggtcgcgtcaacctgaaccgtcgattgtgcgtgaggtgatgcagctgaccggttgcctgccgctggctggcagacgttatcattccctctcgggcggcgagaagcagcgcgttcagctcgcccgcgcgctggcgcagctgtggcgtgagggaacgccgcgcggctggctgtttctcgacgaacccacttcagcgctggatctctaccaccagcagcatctgctgcgcctgttgaaatcgctgacccgtctgggtcatcttcacgcctgcgtggtgctgcacgatcttaatctcgccgcgttatggtcggaccggatcctgctgttacacaacggcaggattgtttctcagggcataccggagacggtattgcaggccgacgcgctggcgcgctggtacggtgcgcaggtgcacgtcggcagacatccggcgcacgccgcgccgcaggtttttctcgccccttag

SEQ ID NO: 524990 - DNA, 993 bp, Stenotrophomonas maltophilia
atgtcccggcgcatcacgttatcgttatggcttctggcggggttgcttaccgtcatgacgttcatggctaccggttttggggcgttacgcctgccggtgaacgtgctgtggagcggcagcgatgagacgctacgccagatctggctcaccatccgtctgccccgcgtgctgctggcgctggtgattggcgggtcgctggcgctcgccggctgcgtcatgcaggggctgttccgcaatccgctggccgacccgggcctgctcgggatcagcagcggtgcggcgctggccgtcgccctgtgggtggtgctcccgctctcgctgcccgcgctggtgatgctttatgccccgatgctggcggcattttttggggcgctggcagccacaggcgtgatcttcctgctcagcaagcagcgtgacacctctctgtcacgtctgttgctggtgggtatcgccatcaatgccctgtgcggtgcggcagtgggtgtgctttcgtgggtcagcaatgacgcccagttgcgtcagctttcactctggggaatgggaagtctcggtcaggcgcagtggtcaacgctgctcgccgtgatctcgctgatggtgcctgccgctctggcgatctggcgttgtgccagcgcgttaaatttactgcaactgggtgaagaggaagcgcattatctcggcgtggacgttgcccttgtacagcgaatattactgttatgcagcgctctgctggtcgctgcggctgtcgccgtcagcggcgtgattggctttgtcggactcgtggtgccgcacctgatgcgcatgtggctgggcgccgatcaccgggcaaccctccccggcacggttctcgcgggcgcttttctgctgctggtggcggatacggtagcccgcactctggtcgccccggcagaaatgccggtcgggttgctcaccagcatccttggcgccccctggttcttatggctcatttttcgtcgtggagaacagcatggctga

SEQ ID NO: 524991 - DNA, 819 bp, Stenotrophomonas maltophilia
atgaaaaactggtttgccctgctctgcgccctgccgctggtcgccgtcgccgcgccggagagaattgtcgccctcggcagcgacgtgacggagatcgtctacgctctcggcgcggagtcttctctggttgcgcgcgacagtaccagccagtggccgcaggcgacaaacgcgctgcctgacgtggggtatctccgccagctgaatgcggagggaattctgtccgtacgcccgacgctggtgctggcaagcgaccgggcgcaaccctctctggcgctgaaacaggttgaacagagccacgtccgggtggttaccgttcccggcacgcctgacctgcgcacgattgacgaaaaagtgcgggtgatagctcaggcgacgcatcatgaggtgcaaggggaaaccctgcgcaactcgctgcgtcaggcgctggcggctctgccctcaacaccgctcaacaagcgggtgctgtttatcctcagccacggcggaatgaccgcaatggcggccgggcaacagaccggcgcggatgcggcaatacgcgccgccgggttgcagaacgccatgcagggctttacccgctatcagccgctctcccaggagggggtaatggccagccagccggatctggtggtgatttcgcaggacggccttaacgcgctgggcggcgaacaaaatctgtggaaactgcccggtctggcgcaaacgccagcgggacgaagcaagcaggtgctggctattgatgacatggccctgctgggcttcagcgtccgcacgccgaaagccatacaacagctgcgtgccagagcggagcaactgccctga

SEQ ID NO: 524992 - DNA, 1029 bp, Stenotrophomonas maltophilia
atgggtcactacacacgctggcttgagcttaaagaagaacatccgggtaagtacgcccgtgatatcgccggattaatgcacatcagcgaagcagagctggcatttgcgcgcgttggacacgacgcctggcggctgcgcggtgaaatccgcgagattctggcagcgctggagtccgtgggggaaaccaaatgcatctgccgtaacgaatacgccgttcacgaacaggttggagcgtttactcaccagcacctcggcggtcatgccgggctggtgctgaatccgcgcgcgctggatctgcgtttgttcctcaaccagtgggcgagcgcgtttcacattagcgaggcgaccccgcgcggcgaacgtcagagcattcagttcttcgatcatcagggcgacgctttactgaaggtctacaccacggatcacaccgactttgccgcctggggcgacgtgctgacccgttttatcattgccgataaccccgctctggcgctgaaggctgtcgaagcccccgcgcattccgacggtgcagatgcaggctcggtggagaaagagtggcgcgccatgaccgacgtgcatcaattctttagcttattgaagcgccataacctgagccgccagcaggcgtttcgtctggtgagtgacgatctggcctgtaaggtggataacagcgcgctggcacaactgctggagagggcgcaacaggacggaaacgaaatcatgatcttcgtcggcaaccgcggttgcgtgcagatcttcaccggtgtggtggaaaaactgacgcccatgaagggctggctgaacatcttcaacccaacctttaccctgcatctgctggaggagactatcgcggagacgtgggttacgcgtaagcccacggcagacggacacgttaccagcctggagctgtttgctgcggatggaactcagatcgcccagctctacgggcagcgtaccgaaggcgagccggagcagagccagtggcgccgccagattgacgctctgacgccagaagggctggccgcatga

SEQ ID NO: 524993 - DNA, 1011 bp, Stenotrophomonas maltophilia
gtggaaacccgcccccgcctgttcagcgactccttcgcctcgcacatgctgacctacggcggggaatactaccgtcaggagcaacaccctggcggcgcgaccaccggcttcccggacgctaaaatcgacttcagctccggctggttgcaggatgagatcaccctgcgcgacctgccggtaacgcttctcggcgggacgcgttacgacaactaccgcggcagcagcgacggttacgacgacgtggatgcggataaatggtcatcacgcgccgggttaaccgtgagtccaaccgactggctgatgctcttcggctcttacgcccaggccttccgcgcgccaacgatgggcgagatgtataacgactcaaagcacttctctatcggcagcttctacactaactactgggtgccgaacccgaacctgcgtccggagaccaacgaaacccaggagttcggttttgggctgcgttttgacgatctgctactcgccaacgacgcgctggagttcaaagccagctacttcgacaccaaagcaaaagattacatctctaccaccgtcgattttgcggcggccactaccatgtcctataacgtaccaaatgccaaaatctggggctgggacatgatggcgacctactcgaccagcctattcaacctcgacgtggcctacaaccgcacgcgcgggaaagataccgacacgggtgaatatatctccagcatcaacccggacaccgtcaccagcaagctggatatcccggtgacgcaaagcggcttctccgtgggctggatcggcaccttcgtcgaacgttcaacgcacatcagcagcagctacagcgagcagcctggctacgcagtaaatgatttctacgtcagctataaaggccagcagcagttcaaaggcgtcaccaccaccctcgtgctggggaacgccttcgacaaagcctactggtcaccgcagggcatcccgcaggatggccgcaacggcaagatcttcgtcagttatcaatggtaa

SEQ ID NO: 524994 - DNA, 1056 bp, Stenotrophomonas maltophilia
  misc_feature (992)..(1001): n is a, c, g, or t
atgccacacctgcaatccgtgtctttacgcccgtctcttctggcgctggcaattgtcagcaccctgccgggcgttgcgtttgccgccacagacgatatcaccgttaccgccaccggcaacgcccgcagcgccttcgaagcccccatgatggtaagcgtgattgacgccaccgcgccggaaaaccagaccgccagctccgccgccgacctgctgcgcaaggtgcccggcctgacgctggacggcaccgggcgcaccaacggtcaggacgttaacctgcgcggttacgaccgacgtggcgtgctggtgctggtggatggcgtacgtcagggcaccgataccggacacctgaatagcacgttcctcgatccggcgctgatcaaacgtatcgaagtggtacgtggcccttccgccttgctgtacggcagcggcgcgctgggcggcgtaatttcatatgacaccgtcgacgccagcgatctgctggacgcaggtaaaaatagcggctatcgcgtatttgctaccggtgcaacgggcgatcacagcatcgggatgggcgccagcgcctatggccgcaccgataccctggacggtgtggtctcctggtccagtcgcgatcgcggcgacattcgccagagtgacggcgcgagggcgccaaacgacgaatcgatcaacaatatgctggcgaaaggcagctggaaaattgatccggctcagacgctgagcggttccctgcgctactacaacaacgacgcgcaggagccgaaaaatccgcagaccacggatgccagcagcagtaacccgatgaccgatcgttccaccattcagcgcgatgcccagcttggctaccgcattgcgccagccggaaacgactggctgaacgccgatgcgaaaatttactggtccgaagcgcggatcaacgcccagaacatcgacgccagcggcgagttccgtaagcagaccaccaaaggcggcaaagtggaaaaccgcacccgccnnnnnnnnnnaaagtggaaacccgcccccgcctgttcagcgactccttcgcctcgcacatgctga

SEQ ID NO: 524995 - DNA, 189 bp, Stenotrophomonas maltophilia; identical to SEQ ID NO: 118883

SEQ ID NO: 524996 - DNA, 1002 bp, Stenotrophomonas maltophilia
atgaacaaaaccgacgaactgcgcaccgcgcgcattgatagcctggtcaccccggctgagctggcccggctgcaccccgtttccgccgaggtggcggaccatgtgacggcctcccgtcgccgcatcgaaaaaattctcaatggtgaagacaaacgtcttctggtagtaattggcccctgctccatccacgacctggacgcggcgatggattatgcacaacgccttcagacgctgcgcggcacgtatcaggatcgcctggagatcgtgatgcgtacctactttgaaaaaccgcgtactgtcgtgggctggaaaggattgatatccgatcccgatctgaacggtagttaccgggtgaatcacggcattgcgctggcgcgcaagctgctgttacaggttaacgagctgggcgtgccgaccgctaccgaatttctggatatggtgaccggacagtttattgccgacctcattagctggggcgcgattggcgcgcgtaccaccgaaagccagatccaccgtgaaatggcgtcggcgctctcctgcccggtgggcttcaaaaacggacgccccagccatatgttcctctccccggataaaaacggccagatgaccatctaccagaccagcggcaacccgttcggacatatcattatgcgtggcggtaaaaaaccgaattaccatgcagaagatattgccgccgcctgcgaaacgctggcggaatttgacctgccggagcatctggtggtggatttcagccacggcaactgtcagaaacagcaccgccgccagctggacgtctgcgaggaagtttgccagcagatccgcagcggctcgaccgccattgcaggaattatggcggagagctttatcaaagaaggcacgcagaagatcgtcgccggacagcaaatggtgtacggccagtcgatcaccgacccgtgcctgagctgggaagacagcgagctgctgctggagaagctggcttcagccgtggacacgcgcttttaa

SEQ ID NO: 524997 - DNA, 1017 bp, Stenotrophomonas maltophilia
atgattcctatagattccggcaaaaaccatagaaataacgccgctaatcagaaaatgaaatccacttttcaggaaaatcaaaaacaccatttcattttaaattcagataagttctttgctgtgcaattaacttttttaatttatgctttcaggcaattacgtacgctattctgggtggataaaatggataatgctgtcgatcgtcacgttttttatatttctgatgggacggcgattaccgccgaggtgctgggacacgcggtgatgtcgcagtttcccgtgtcgataaacagcatcacgctgccgttcgtggaaaacgagagccgggccaaagcggtcaaggaccagatcgacgccatttaccagcagaccggtgttcgtccgctggtgttctattccattgtgatccctgagatccgcaacatcattctgcaaagcgagggcttctgtcaggatatcgtgcaggcactggttgcacccttgcaaagcgagctgaagctcgacccgacgccgatcgctcaccgtacccacgggctgaaccccggcaacctgaccaaatacgatgcgcgtattgccgccattgactacactctggcgcacgacgacgggatctcgctgcgcaatctggaccaggcgcaggtcattttgctaggcgtgtcgcgctgcggtaaaacccccaccagcctttacctggcaatgcagtttggcattcgcgccgccaactacccctttattgccgatgatatggacaacctggtgctgcctgccgcgctcaagccgcttcagcataagctatttgggctgaccatcaacccggaacgactggcggcgatccgcgaagaacgtcgcgagaacagccgctacgcctcaatgcgccagtgccgaatggaagtctccgaagtcgaagcgctgtaccggaaaaatcagatcccctggctgaacagtaccaactattcagtagaagaaattgccaccaagatcctcgatatcatgggactgaatcgccgcatgtactaa

SEQ ID NO: 524998 - DNA, 2379 bp, Stenotrophomonas maltophilia
atgtccaacaatggctcgtcaccgctggtgctttggtataaccaactcggcatgaatgatgtagacagagttgggggcaaaaatgcctccctgggtgaaatgattacaaatctgtccggtatgggtgtctccgtaccaaacgggtttgccacaaccgccgatgcgtttaacctgtttttagaccagagcggtgtaaaccagcgcatttacgacctgctggataaaacggatattgatgatgtcaccgtgcttgccaaagccggcgcgcaaatccgccagtggattatcgacacacctttccagccggaactggaaaaagccatccatgacgcctacaaccagctctccgctgacgacgcgcaggcctcctttgccgtgcgctcttccgctaccgcggaagatatgccggatgcctctttcgccggacagcaggaaaccttcctcaacgtccagggttacgaggcggtactggtggcggtgaagcatgtgtttgcttccctgttcaacgaccgcgccatctcctatcgcgtgcatcagggctatgaccaccgcggcgtcgcgctctccgcaggcgtacagcgcatggtgcgctccgacgtaggctcttccggcgtgatgttctctatcgacacggaatccggcttcgaccaggtggtgtttatcacctccgcgtggggtctgggcgagatggtggtgcagggggcggtgaaccctgacgaattctacgtgcacaagcctacgctggcggctaaccgtccggcagtggtacgccgcaccatgggctcgaaaaaaatccgcatgatctatgccccgacgcaagagcatggcaagcaggtcaccattgaagatgtgccgcaggagcagcgggatcgcttctcgctcaccgacgccgaagtggaagagctggcgaagcaggcggtgcagattgaaaaacactatggccgtccgatggacatcgagtgggccaaagacggccacaccggcaagctgtttatcgtgcaggcgcgtccggaaaccgtccgttcgcgcggtcaggtcatggagcgctacaccctgcacgcgcagggcaaaattgtcgcggaaggccgcgcaatcggccaccgcatcggtgccggtccggtgaaagtgatccacgacatcagcgagatgaatcgcattcagcctggcgacgtgctggtgaccgacatgaccgacccggactgggagccgatcatgaagaaagcggctgctatcgtcaccaaccgcggtggccgtacctgccacgcggctattatcgcccgtgagctggggatcccggcggtggtcggctgcggtgacgcgaccgaacgcatgaaggacgaccagaacgtgacggtctcctgtgccgaaggcgataccggttacgtgtatgccgatatcctcgacttcagcgtgaagagctccagcgtggataccatgccggacctgccgctgaaaatcatgatgaacgtcggtaacccggatcgcgcgtttgacttcgcctgcctgccgaacgaaggcgtgggcctggcgcgtctggaattcatcatcaaccgcatgatcggcgttcacccgcgcgcgctgctggagtttgacgaccaggacgcgaagctgcaaaacgaaatccgcgagatgatgaagggttacgactcgccgagagagttctatgtcggccgcctgacggaaggcatcgccacgctcggcgcggccttctacccgaaacgcgtgatcgtgcgtctgtcggactttaagtccaacgaatatgccaacctggtgggcggcgaacgctacgagccggaagaagagaacccgatgctgggcttccgcggcgccggacgctacgtgtcggaaagcttccgcgactgcttcgcgctggagtgcgaagcggtaaaacgcgtgcgcaacgacatggggctgaccaacgtggaaatcatgatcccgttcgtccgtaccgtggatcaagcgaaagcggtggtggatgagctggcgcgtcaggggctgaagcgcggcgagaatgggctgaagatcatcatgatgtgtgaaattccgtccaacgccctgctggccgagcagttcctggagcacttcgacggcttctccattggttcgaatgatatgacgcagctggcgctcggcctggaccgcgactccggcgtcgtctctgagctgtttgatgagcgtaacgaggcggtgaaagcgctgctctccatggccatccgtgcggcgaagaaacagggtaaatatgtcgggatctgcgggcagggtccttctgaccatgaagactttgcggcctggctgatggatgaggggattgatagcctctccctgaacccggacaccgtagtgcaaacctggctgagcctggcagagctgaacaagtaa

SEQ ID NO: 524999 - DNA, 1401 bp, Stenotrophomonas maltophilia
atgacaatctcctctgtattacgtaccaaagataaaataggttatggcctcggtgatatggccagcgcgctggtctggcaaacggcaacgttatttctcgcgtatttctatacggacgtattcggtttgccggcggccattatgggcaccatgtttttagtggtgcgcgtgatcgatgcgtttgtcgatccgtgcattggcgcgctggtggaccgcactcagacccgccacggtcgttttcgtccctggctgctctggtttgccattccgtttggcgtgagctgcctgattaccttctacgtaccggatgccgggcagacggcgaaaattgtctatgcctgcgtaacctatgccatcctgagcctgatctactccgcgattaacgttccatactgcgccatgcccggcgcgctgacgctcgacccgcgcgagcgccactcgctgcaatcctggcgctttggcctgtcgtttatcggcgggttgattgtaacggtcatcgcgctgccgctggtctcattattaggtcaggggaatgtgcaaaaaggttatttctatgccatgagcctgatggggctgctgggtattgttttattcttctgctgcttctttatgacccgggagcgttactcgccacgcaatgacacctccggctcgatgctgacggatttaaaactgctggccgccaacagccagtggcgaattgtttttctgtttaatattttactgttaaccgccgtcgtgacgcgtggctctgcgaccatgtattacgttaactatgttctgttacgtcctgaactggtctttgcctttattgtttccggcatggtggcatccttaagcggcgcattattatctgaacgcctgctggggaaatttgatcgcgtacgtgcctatcagtggaccattatttctttcgttatttttggcacgttgattttcttcattcctccttcgcaggtgtggctgatattcggtctgaatattgtgtttagttttattcagaacctgaccacgccgctgcaatggaccatgttctccgatgtggtggactacgaagaacaccgcagcggccgccgtctggacgggctggtcttttctaccgccctgtttgccatcaagtttgggttggcgctgggtggggcggtagtcggttgggtgctgggcatggtggattacgcgcccggacaggcaaaccaggcgcctcacgtcctcgcaaccatcaatgccctgttcaccctgatcccctgcgcgctgttcctctgcatggtggcgctccttgctatctacaaactcaacagccgactggtggattccattgcccgtgagctggccagcaagcgagacattcgaaacgatgcggggcagctcagcccggtaacccaatccgcactacaggagtaa

SEQ ID NO: 525000 - DNA, 2376 bp, Stenotrophomonas maltophilia
atgactgtgatctacaaggacgcgggacgtcccgtacacgagcgtgtcgctgatttactggcgcgtatgacgccggaagagaaatttgcccagatgcacgcgtactggctgatcctcgatgaacacggcagccaccgcgagcgcagcgatttgagcgatgagttcgccggcgtgagcgaacaggcgtccctcagcgaaaggctgaagctgggcgtcgggcagatcacccgtccgctcggcacgcacattgttgatgcaaaaaccggcgtgcgtgccgctaaccgcctgcaacgtatgatgatggaggagacccggctcggcattccggcgctgtttcatgaggagtgtctggttgggctgctgtgcaaagatgcaaccctgttcccgtcgtcgctgaactacggttccacctgggacccggcgctggtgcagcgcgcggcggagcagattggcaacgaggcccggtctgtcgggtgccagcaggggctggccccggtgctggatgtctcgcgcgatgtgcgctggggacggacggaagagacctttggggaagatccgtggctggtaggggtgatggcgacggcgtacgtgaaggggttgcagggcgataagcgcgatctgctggcgaccctgaaacattacgtggggcactccttcagcgaaggggcgcgcaaccatgcgccggtccatctgggtttcagcgagctaaacgataccttcctgctgccgtttgagatggcggtgaagctggccaacgccggttcggtgatgccagcctatcatgacatcgataatcagccagggcacagcgaccatttcctgctcaccaccgtgctgcgtgaacagtggggcttcgacggcattattgtcgcggattacggcggcgtcagcctgctgcaccagcaccacgggatttctcacgatccagcagaatcggcggcgctggcgtttaacgccgggctggacgtggaattgccgaaggatgactgcgcgcgtcatctggcggaagcggtagagcgtgggcttatcccaatggcgaaagtggatgagattgtggcgcgcgtgctaagtgaaaaattccgtctcgggctgtttgaaaaaccgtacgccgacgaagaaggtatcgatttgcagaatgaggcgacccggcaggtggcgcgcgaggtggcaacaaaatcgatcacgctgctggaaaataacggcattttgcccctcggcggaaaaccccgtgtagcggtagtggggccgacggcggacgatccgctggcgttgctgagcggctacagcttcccggttcacctgatcatcagcgatatggttgaagagacctcgcaggtgacaaccccgcgcgcggcgctggaacagtaccttggtgcatcgcagatacgttacgccaaagggtgccacattatcgaaaaacggatggcgggtgcgccggtgttcccgggcgacagcggcggtaaaccgatgcagcaatcgccggtttcacaacgcacggatttgatccccgaagccgtgagcgcggcaaaagagagtgacgtggtggtggcctgcgtgggcgacctcgccgggctattccagagcggcaccgtgggggaaggatcggataccgattcgctgaatctgccgggcgtgcagcaacagctgctggaggagctggtggcaaccggcaagccggtaattgtcgtcatgacgggcgggcgtccttataaccttcaggggctggaagagaaggtggccgcgctgatgatggcctgggcgccggggcaggaagggggctgggcgattgccgatatcttaaccggccgcgcggagccgcagggcaggctggtagtcagcgtgccgaaaaacgccggggcgatgccgtactactataaccacaagctgaaaagcggcggcacgccgtttgcgttccatttcggcgcactttacccattcggttacggtcttggctggacgcagtttcgctggagtgcggcgcgtctcgctgaaagccacgtcccggtcgacggagaggtggtgttaagcgtcgatgtcagtaacatcggggagcgcagcggcagcgaagtaatacaggtatacgtgcgtgacaaagtcgcgacgcaggttcgtccgcttcaggagctgaaagcgtttcaacgcgttacgctttcaccgggagaaaccgccaccctgacctttaccttgccggtggagatgtttaatttcacccgccgggacgggaagcggattgtcgagtcaggggaatttgagctacaggttggcgcgtcctcggcggatattcgcgaggtggtgaacgtgcaggtgaccggggagacgcgggtgctggagggggaatggcagatgttgagtaggagtgaaatttgtaaaaattaa

SEQ ID NO: 525001 - DNA, 1116 bp, Stenotrophomonas maltophilia
atggtcaatcttcgtcagcccagggatgtcgcacagatactgctgtcggtgctgttcttagccattatgattattgcgtgtctgtggattgttcgtcctttcgtgctcggatttgcctgggccgcgaccgtcgtggtcgcaacctggcctttactcttacgtttgcagaaactgctgtttggtcgccgcggccttgccgtgctggtgatgacgctgctgctgttcctgctgtttattattcccattgcgctgctggttaacagcctggttgacagcagcggcccggttattcgcgcggtcaccagcggtgacatgacgctgccggatctcgcgtggctgaacagcattcctgttgtgggcgcaaaactatacagcggctggcacagcctgctggagatgggcggtagcgccctgatggccaaagtgcgcccgtacatcggcacaaccaccacctggtttgtcgggcaggctgcgcatattggtcgcttcatgatgcactgtacgttgatgctggtcttcagcgccctgctgtactggcgcggcgagcaggttgcgctgggggtacgccatttcgccacccgactggcaggtaaacgcggcgatgcggccgtgctgctggcagcccaggccgttcgcgcggtggcgctcggcgtggtggtcacagcgctggtgcaggcggtgcttggcggtatcgggctggcggtttccggcgtaccttatgccaccattttcaccgttgtcatgctgatgacctgtctggcacagcttggtccgctgctggtgctggttccctgcattatctggctttactggacgggggacacaacctggggcacggtgctgctggtctggagttgcgtggtgggcaccatggataacgtgattcgtcctctcctcatccgcatgggcgctgatctgccgctgattctgatcctgtccggggtgatcggggggttgattgccttcggcatgattggcctgtttatcggtccggtgctacttgcggtaacctggcgtctcttctctgcctgggtgcatgaagtgccgccacccggaaccgatccggacctcatcttaagcgaacttgaagagctggaagataagaacgcgcagtaa

SEQ ID NO: 525002 - DNA, 3057 bp, Stenotrophomonas maltophilia
atgatcccacagatttctcaggcaccgggcgtcgttcaactggtgcttaattttttgcaggcactggagcaacagggttttacaggtgataccgccaccgattatgccgacaggctgacgatggcaaccgataacagtatttaccagcttcttcccgatgccgtcgttttcccgcgctctaccgccgatgtggccctcatcgcccgtctggcgtcgcaggagcgtttcagctccctggtctttaccccgcgcggcggcgggacgggcaccaatgggcaggcgctgaaccagggcatcatcgttgatatgtcccgctatatgaatcgcatcattgagatcaacccggaagaggggtgggtgcgtgtggaagcgggggtaatcaaagatcagctgaatcagtttttaaaaccgtatggctatttttttgcgcccgagctttccaccagtaaccgcgcaacccttggcgggatgatcaacaccgatgcctcagggcagggctcgctggtctacggcaaaacctccgatcacgtcatgggtgtgcgggcggtgctgctggggggcgatattctcgatacccagccgttgccggtcgaactggctgaaacgctggcaaaagagagcaccaccagcggacggatttatcgcaccgtgctggagcgctgccgcgaaaatcgcgaactgatcctcgacaaattcccgaagctcaatcgcttcctgacgggctacgatctgcgccatgtctttaatgacgatctgagccagttcgatcttacccgcgtactgaccgggtcagaaggtacgctggcctttatcaccgaagcgcgtctggatatcaccccgctgccgaaggtgcgccgtctggtgaacgtcaaatacaactcctttgactccgcgctgcgtaatgccccgtttatggtggaggcgcgggcgctgtcggtggaaaccgttgattcaaaagtactgaacctggcccgggaagatattgtctggcattcggtgagcgaactgattaccgacgtgccggataaagagatgctcggtctgaacatcgtcgagttcgccggggatgacgcagagctgattgagagccaggtgagcacgctctgccagcgtctggatgagctgattgcacagggggaaggcggcgtcattggctggcagctgtgtaacgacctctccggcatcgagcgaatctacgcgatgcgtaaaaaggcggtggggctgctcggtaacgcgaaaggggcggcgaagccgattccgtttgcggaagatacctgcgtgccgccggagcatctggcggattatattgtggagtttcgtgcgctgctcgacagccatggtctgagctatggcatgttcgggcacgttgacgcgggtgtgctacacgtgcgcccggcgctggacatgtgcgatccgcagcaggagatcctgatgaaggagatctccgacgaggtcgtggcccttacggccaaatatggcggtttgttatggggagagcatggcaaaggattccgcgccgagtacagcccggcgttttttggcgaacaactctacgccgagctgcgtaaggtgaaagccgcttttgatcctgataaccgtcttaacccgggtaaaatctgcccgccagagggcgttgatgcgccgatgttgcaggtagacgccgtcaagcgcggcacctatgaccgacaaattccgattgcggttcgcgcttcctggcgcggcgcgatggagtgcaacggcaacgggctgtgcttcaacttcgatgtgaaaagcccgatgtgtccgtcgatgaaaatcaccagcaaccgcatccactccccaaaaggacgtgcgacgctggtgcgcgaatggctgcgcctgctggccgatcgcggcattgacccgctcaagctggaacaggagctgccggaaaaacgcgccagcctgcgcgggctcatcgaacggacccgcaacagctggcatgcgaataaaggcgaatacgatttctcgcatgaggtgaaagaggcgatgtccggatgcctggcgtgcaaggcgtgttcaacccagtgcccgattaaaattgatgtgccggaattccgttcccgcttcctccagctgtaccacacgcgttatctgcgcccgatgcgcgatcatctggtggcaacggtggagagttacgcgccgctaatggctcgtgcgccaaaaacctttaacttctttatcaatcagccgctggtgcgcaaactgtctgaaaaacatatcggcatggtggatctgccgctgctgtcggtgccatcgctccagcgtcggctggtggggcaccgctcggcgaacatgaccctggaacaactggaagcattaagccctgagcagaaagcgaaggtggtgctggtggtgcaggatccgtttaccagctattacgatgcgcaggtggtggctgattttgtccgtctggcagagaaaattggctaccagccggtggtactgccgttctcgccgaacggcaaggcgcagcacattaaaggtttcctgacccgcttcgcgaaaaccgcgcagaaaacttcagatttcctgaatcgcgtggcgcagctcgatatgccaatggtgggcgtcgatccggcgctggtgctctgttaccgggatgaatataagcagacgctcggcgataagcgcggtgattttcaggtcttactggtgcatgagtggctgccttcggtgctgaagcaaacggcccctcaggaggtcagcggagaatcctggtacctgtttgggcactgcactgaagtgaccgcgctgccgacggcgcctgcccagtgggcttctatcttcgcccgctttggcgcgaagctggaaagcgtcagcgtgggctgctgcggtatggccggaacctacggtcatgaagtcaaaaaccacgctaactcgctcggcatttacgagctgtcgtggcaccaggcaatgcagcgcctgccgcgtaaccgctgtctggcgacgggctactcctgccgcagccaggtgaaacgggtggaaggtaacggcgttcgccatcccttgcaggctttactggagattatcggatga

SEQ ID NO: 525003 - DNA, 411 bp, Stenotrophomonas maltophilia
atgatctggaaacgtgcggtcactctgcaggccttaaatgccatgggtgcagaaaacatggtcggtttactggatatccagtttacgcgcattggcgataacgaacttgaagcgacgatgccagtagacagccgtactcatcaaccgtttggcctgctgcacggcggcgcgtccgtcgtgctggccgaaacgctggggtcggtcgcaggttacctgtgtacggaaggggagcagaaggtggtcgggctggaggtcaatgccaaccacatccgctccgttcgcagcgggcgcgtgcgcggtgtttgccgcgcactgcacgccggaagtcgtcatcaggtatggcagattgatattctggacgagcaggatcgcctgtgttgttcatccagactgacgacggccgttgtgtaa

SEQ ID NO: 525004 - DNA, 195 bp, Stenotrophomonas maltophilia
atggatactgaaataaccccaacacagctggcaattgaatatttacgtcgcgataaaagcaatctgtctccggcgcagtacctgaaaaagctgaaacaacttgagctggaatttacggatttgctggcgctctcttcaaacgagctgaaagaagagatctactttgcctggcggttgggcgttcacgtccattga

SEQ ID NO: 525005 - DNA, 630 bp, Stenotrophomonas maltophilia
atgtcttctgacaaaccatcgcatcgcggctctccctatgcccaggaactgatttcccacttacagccgcactgcgccacgtataaaaccgatcccggtgagcaacttgatctccaggttaacgggcagagtatgtgttatttaattctcgagggcacaatcgcgatatacagaagaagcgacgacatgatgcttaccaccgcgcgcagtcccgccctgtttggcctcgctaacctgacggacatatattttaacgattatctcaaaacggtgacgccatgcctgatcggcgtgctagcaaccgatcgggtggcagaagttatcaaagagaaggcgttatgggggctgctttctaatcatctgatgtttgtctataaccgcctttatcacaacgtcatgccgaaaggtgcgccaacggcttacgagatgattcgtcagcagctcatgatgctgatgcaggaagatgacaactaccgacgcagcgtgacggcggaaaggtacatccgggataaaacccggctttcccgcagcggcgtaatgcggatactggctgacctgaaaacgggcgggttcatcgaaatggaagaaggccggctcattaaaattaacaagctgcctgccaaatactga

SEQ ID NO: 525006 - DNA, 660 bp, Stenotrophomonas maltophilia
atgaacacccgtattgcgcccgtttcaggcaatgaaataacaactgtgcttggcgctaagcctcttaagcacattgaaaaaataatcgataatgttttgccgcataccgaaagatgcatcatggctaaaggtgaagtcatccattattattccggtgatatccgccagtgctttttactgttacatggcagcgtggcattgcatcgccgaggtgacggtatcgtcttaaattccgaatccgcaccttttatactcggcgtgagcagccagttttcttctgagcacctctacgtcagagcgctggaaacttcagaggtggctagcgttacgctggagcgttttaatcacgtagtcgcacaacagaatttatgggagtccttctcgaacctgctgatctataccgcatcgcgcgtttacgaacattgtgcccagatatcgcagatgtcggcttacgacattatccgctttcagctggtagaactgatgcaggagccggaagccataagacaaagcattaccgccgcagcctatatcaaaagccgcacctatctttcacgcagcggcattatgcggatcctggcggagttgcggacggggaaatacatcactatggagcgcggcgtgctaatcgagatccatcacttaccccgcaagtactga

SEQ ID NO: 525007 - DNA, 546 bp, Stenotrophomonas maltophilia
atgagcgcggacgaaaacaacctgatttggatcgatctggagatgaccggcctggatcccgagcgcgatcgcattattgagatcgccacactggtcaccgatgctaacctcaatattctggcggaaggcccaacgattgccgtgcaccagtccgatgaccagcttgcgctgatggatgagtggaacgtgcgtacccatactggcagcgggctggtggaacgcgtgaaggccagcactctgggcgaccgcgaagcggagctggcgacgcttgagtttctgaagcagtgggtgccggcaggaaaatcgcctatctgtggcaacagcattggtcaggatcgtcgcttcctgtttaagtacatgccggagctggagtcctacttccactaccgctatctggatgtgagcaccttaaaagagctggcccgccgctggaaaccggaaattctcgacggcttcacaaagcaggggacgcaccaggcaatggacgacatccgtgagtctgttgcggagctggcgtactatcgcgaaaactttattaagctttaa

SEQ ID NO: 525008 - DNA, 1077 bp, Stenotrophomonas maltophilia
atgggcgaccaggagccagcgcgattgagtaaaaataaactctccaaagggcagcagcgccgcgtgaatgcaaatcaccagcgccgtcttaaaaccactacggagaagcccgattacgacgacaacctgtttggcgaagcgacggaaggcgtggtgattagccgcttcggtatgcatgccgatgtcgagtctgccgacggggacatccaccgttgcaatatccgtcgcaccatccgttccctggtgaccggtgaccgcgtggtctggcgtccaggcaaagcggctgcggaaggggtaacggttaaaggtatcgttgaagccgtgcatgaacgcacgtcggttctgacccgtcctgatttctacgacggcgtaaagcccattgccgccaatatcaaccagatcgtgatcgtttcagcgattttacccgaactttcgctcaacattattgaccgttacctggtggcctgcgaaacgctacaggttgagccgctcatcgtgctgaataaaatcgatctgctggatgacgaggccatggcctttgtgaatgagcagatggatatctatcgcaatattggttatcgcgttttgatggtttccagccgcaccaaagatggcctgaagccgttagaagatgcgctgaccgaccgcatcagtatctttgcagggcagtctggcgtgggtaaatcgagcctgcttaacaacctgctcggccttcagcaagaaatcctgaccaacgatgtgtcggacgtctccgggctgggccagcacaccaccaccgcctcacgtctctatcacttcccgcacggcggcgatgtgattgactccccgggtgtgcgtgaatttggtctctggcatctcgagccggaacaaatctttaacggatttgtcgaattccatgactatataggcgcttgcaaataccgcgactgtaaacatgacaacgatccgggctgcgccatccgcgaagcggtggagaacggtgaaatagcggaaacccgtttcgaaaattaccatcgtattctcgaaagcatggaccaggtaaaaacgcgtaaaaacttttctgattctgataactga

SEQ ID NO: 525009 - DNA, 969 bp, Stenotrophomonas maltophilia
ttgttaaactcatttaaactttcgcttcaatacattctgcctaaactgtggctcactcgcctggcgggctggggcgcgagcaaacgagcgggctggctgaccaaactggtcatcgacctgttcgtgaaatactacaaggtcgacatgaaagaagcgcagaaaccggatacggcaagctaccgcaccttcaacgaattttttgtgcgtccgctgcgcgacgaagtgcgcccgctgaataccgacccgaacgtgctggtgatgcctgctgacggcgtgatcagccagctgggtaaaattgaagacgacaaaattttgcaggcgaaaggccataactacagcctggaagcgctgctggccggtaactacataatggcggatctgttccgcaacgggactttcgcgaccacctatctctccccacgcgactaccaccgcgttcatatgccgtgtaacggcatcctgcgcgagatgatctacgtgccgggggatctgttctctgtaaaccacctgacggcgcaaaacgtccctaacctgtttgcccgtaacgagcgcgtcatctgcctgtttgatactgaatttggcccaatggcgcagattctggtaggtgctaccattgtgggcagcatcgaaaccgtctgggcgggcaccattacgccgccacgcgaaggcgtgatcaagcgctggacctggcctgccggggaagaagaaggttctgtggccctgctgaaaggtcaggagatgggccgcttcaagctgggctcaacggtaatcaacctgttcgcaccgggcaaagttaaccttgtcgacgagctggaaagcctgtccgtgaccaaactcggccagcctctggcagtatcgacggaggtctttgcaacgccagacgttgcgccagccccgttgccggaagaagagatcaaagccgagcacgatgccagcccgctggttgacgacaaaaaagacgaaggttaa

SEQ ID NO: 525010 - DNA, 3324 bp, Stenotrophomonas maltophilia
gtgcgcccgattatcgtattactgatggcctggtgcctcagcatgggggcgtacgcagcgacggcccccgacgccaaacagattacccaggagctggagcaggcaaaagcggcgaaacccgctcagccggaggccgttgagtcgctccagtctgcactgaacgcacttgaggaacgaaagggttctcttgagcgcgcccagcaatatcagcaggttatcgacaacttccccaaactctctcaaaccctgcgctcgcagttaaacagcctgcgtgatgaaccacgccaggtacccgcagggatgacgtccgaggcgctgaatcaggagatcctgcaagtcagcagccagctgctggaaaaaagccgtctggcacagcaggagcaggaacgggcgcgtgaaattgccgactctctcagtcagcttccacagcagcaaaccgatgcccgccgtcagttaaatgaggtggaacgccgcattgggacgcagaccggcaacaccccgcagaatcaggcccaaaatcttgggctacaggcggaatccgccagactaaaagcgctggttgatgaactggagttggcacagctttctgctaataaccgccaggagctgtcacggatgcgttcggaactggcgcagaagcagagcgaacagctggatgcgtatctccaggcgctgagaaatcaactcaacagccagcgtcagcgtgaagctgaacgtgcgctggaaagcaccgagttgttggccgaaaacagcgctaacctgcccgacagcatcgtcgcccagtttaaggttaaccgcgagctttctgccgcgctgaatcagcaggcgcagcgcatggatttggtggcctcgcagcagcgtcaggccactaatcaaaccctccaggttcgtcaggctctcaacacgctgcgtgaacagtcccagtggcttggctcatctaacctgttgggcgaagcgttacgcgcacaggtggctcgtctgccagagatgccaaaaccgcagcagcttgatacggagatggcgcagctgcgcgttcagcgtcttcattatgaagaccttcttaataagcagccgcaaatccgccagatccgtcaggctgacggacagccgctcaccggcgagcaaagccgtattctggaagcgcagctgcgcacccaacgcgaactgctcaattccctgttgcaggggggcgatacgctgatcctcgaactcaccaagctgaaagtctcaaacagccagctggaggacgcgctgaaagaggtcaacgaagccacgcaccgttacctgttctggacatccgacgtgcggccgatgaccttcgcctggccgatcgagatcgtgcaggatctgcgccgcctcatttcgctggacaccttcagccagctgggtctcgccagcgtgatgatgctcaccagtaaggagaccatcttcccgctgctgggggcactgattctggtgggtttcagtatttattcccgtcgccacttcacccgtttccttgagcgctccagcgcccgggtggggaaagtgacacaggatcacttctggctgacgctgcgtacagtgttctggtcaattctggtcgcgtctccgctgccggtgctgtggatgacgctcggatacggcctgcgtgaagcctggccctatccgcttgccgtcgcaattggcgatggcgtgaccgccaccgttccgctgctgtgggtggtgatgatttgcgccacgtttgcgcggccaaatggtctgttcatcgctcactttggctggccgcgtaatcgcgtggcgcgggcgatgcgctattacctgatgagcatcgggctgattgtgccgctaattatggcgctgatcatgttcgataatctcaatgaccgggagttctccggctcgctgggacggctgtgctttatgctgatctgcggggcattagcggtagtgacgctcagcctgaagcgcgccgggatcccgctctatctcgacaagtccggcagtggcgataacatgtttaaccgtctgctgtggaacctgctgcttagcgcgccgctggcggcaatgctggcggcggctgtcggttatctcgccacatcgcaggcgctgctcgcacgactggaaacgtcagtagctatctggttcctgctgctggtggtctaccatgttattcgccgcggcatgctgatccagcgtcgtcgtctggcgtttgaccgtgccaaacatcgtcgcgcagaaatactggctcagcgcgcgcggggtgaggaagagccgaaccacgtcaacagcaccgaagggacttcagacgccgatgacgtcgaactggatctcgatgcgatcagtacccagtccctgcggctggtacgctcaattctgatgctggttgccctgctgtcggtgatcttcctgtggtcggaaatccactctgcgtttggcttcctggagaacatctctttgtgggatgtgacgtcgacggtgcagggggtcgaaagcctggagccaatcaccttaggggccgtgctgattgcgattctggtactcattatcaccacgcagctgatccgtaacttccctgccctgctggagctggcgctgttgcagcatctggatttaacccccggcacaggctatgcgatcaccaccattaccaagtatttaatcatgctgtttggtgggctggttggcttctcgatgattggtatcgaatggtcaaaactgcaatggctggttgccgccctgaccgtaggcctgggctttggtttacaggagatctttgccaacttcgtctcgggtctgatcattctgtttgaaaagccgattcgaattggcgatacggtgaccatccgcgatctgaccggcagcgtcaccaggatcaacacccgcgccaccaccatcagcgactgggaccgtaaagagatcatcgtcccgaacaaagcgtttatcaccgagcagtttatcaactggtcgctgtctgactccgtcacgcgtgtggtgctgaccgtacccgctccgtcggatgccaacagcgaagaggtgacgcagatcctgtatacggctgctgaacgctgttcgctggtaatcgacaacccgccgccggaagtcttcctggttgatttgcagcaggggatccagattttcgagctgcgtatctacgccgccgagatgggacaccgtatgccgctgcgccatgagatccaccagctgatcctggctggcttccgcgagcacggaattgatatgccgttcccacctttccagatgcgtctggaaacgctggacggacgtaagacgggaagaacgttgacgtctgcggcgcgttcgcgcccggcgggaagtttataa

SEQ ID NO: 525011 - DNA, 1500 bp, Stenotrophomonas maltophilia
atgtctcactcactcaaaaaaatgacccttaccgggctcatcctgatgatttttacgtcagtttttggctttgccaatagcccgtccgcgttttatctgatgggctacaacgcgacgccgttttatatcgtttccgcgctgttcttctttattccgtttgcgctaatgatggcggagatggggtcggcgtacaggaaagaagaaggcggcatctattcgtggatgaacaacagcgtcggtccgcgttatgcgtttatcggtacgttcatgtggttttcatcctatgtcgtctggatggtcagcacggcggccaaggtctgggtgccgttctcaacgtttctcttcggtgcggataaaacgcaggtctggtctctggcggggctgagttccacacaggtggtcggtattctggcggtgtgctggatggtggttgtcacgcgggtggcctcgaaaggcatcaacaaaattgcccgtatcactgccgttggcggaatttccgtgatgtgcctgaacctggtgctgctgctggtcagtatcgctattctgtgcctgaacggcgggcatttcgcgcaggaagtcaacttcgtttcatcgcctaatccgggttaccagtccgggctggccatgctctccttcgtggtgtttgccatctttgcttacggtggaattgaagccgtgggcgggctggtcgataaaaccgaaaacccggaaaagaacttcgccaaaggcattatctttgccgccatcgtcatttccattggctactcgctggcgattttcctctggggcgtcagcaccaactggcagcaggtactgagcaataacaccaccaacctcggcaacattacctacgtgttgatgaaaagcctgggggtgacgctgggcaacgccatggatctcgcgccggaaacgtcggccaccctggggatctggtttgcgcggattaccggtttgtcgatgttcctcgcctatactggcgcgttcttcacgctgatctactcgccgctgaaagcgattattcaggggacgccaaaggcgctgtggcccgcacgtatgacgcagctgaatgctgccggtatgcctgccaacgcgatgtggatgcagtgcctgctggtgtgcgtgttcattctgctggtgtcctttggcggcgataccgcgtcggcgttctataacaagctgaccctgatggcaaacgtatcgatgacgcttccgtacctattcctggcgctggcgttcccgttctttaaggcgaagcgggatctggagcgaccgtttgtgatcttcaaaacccgcgtggcgacgctgctggcgaccactgttgtggtgctggtcgtcgcgttcgccaacatctttaccgtcattcagcccgtggttgaggcaaatgactggagcagcacgctgtggatggttggcggaccgatcttcttctcgctgctggcaatggggatttatgagaactaccgccgccgcatgatgacctgcgtggcagaagtggcatag

SEQ ID NO: 525012 - DNA, 978 bp, Stenotrophomonas maltophilia
atgagcgaaacggccacctggcagccgagcgcatccattccaaacctgctaaagcgcgcagcaattatggcggagatccgccgcttctttgcggatcgcggcgtcctggaggtggaaacgccgtgcatgagtcaggcgacggtcacggatattcatctggtcccgtttgaaacccgttttgttggcccaggccactctcagggcatgaatctgtatctgatgaccagcccggaataccatatgaagcgtctgctggcggccgggtgtggtccggtctatcagctgtgccgtagcttccgtaatgaagagatgggccgacaccataatccggaattcactatgctggagtggtaccgcccgcactacgacatgtatcgtctgatgaacgaagtcgacgatctgctccaacaggtgctggattgcgcggaagctgaaacgctctcctatcagcaggccttccagcgtcatctggaaattgatccgctgtcggctgataaaacacagctgcgtgaagtggcggcaaaactggatctgagcaacgtggcggataacgaagaggatcgcgacacgctgctgcaactgctgttcacctttggtgttgaaccgcagattggcaaagatcgtccgacgtttgtctatcacttcccggccagccaggcttcactggcgcagatcagcaccgaagatcaccgcgtggcggagcgctttgaggtgtactttaaaggcatcgagctggcgaacggtttccatgagctgaccgacgcgtgcgaacagcaacagcgtttcgagcaggataaccgcaagcgcaacgcgcgcggtctgccgcagcagccgattgacaccaacctgctggaagcgcttaaagccggtctgccggactgctccggcgtggcgctgggtgtggatcgcctggtcatgctggcgctgggcgcagaacaactgggcgatgtgattgcctttacggtcgatcgcgcataa

SEQ ID NO: 525013 - DNA, 1791 bp, Stenotrophomonas maltophilia
gtgcaaacttttcaagccgatcttgccgtaataggcgctggcggggctggattacgcgctgcaattgctgcggcacaagccaatccgaacgccaaaatcgcattgatttcaaaagtctatccgatgcgcagccacacggtagccgcagagggaggatccgccgccgtcgcgcaggatcatgacagcttcgaataccatttccacgacacggttgcagggggcgactggctttgcgaacaggatgtcgttgattacttcgtgcaccattgcccaacggaaatgacccagctggaacagtggggatgtccttggagccgccgtccggacgggagcgtcaacgtccgccgcttcggtggcatgaagatcgaacgcacctggtttgccgccgataagaccggcttccacatgctgcacaccctgttccagacctccctccagttcccacaaatccagcgctttgacgaacatttcgttctcgacattctggtcgacgacggtcatgcgcacggactggtagcaatgaacatgatggaaggcacgctcgtccagatccgcgctaaggcggtggtgatggcaacgggcggtgcgggccgcgtataccgctacaacaccaacggcggcatcgtcaccggtgacggtatgggcatggcgctcagccacggcgtcccgctgcgtgatatggagttcgtccagtatcacccaaccggcctgccgggctccggtattctgatgacggaaggctgccgcggcgaaggcggtattctggtcaacaaaaacggctatcgctatttgcaggattacggcatgggtccggaaaccccgcttggcgagccgaaaaacaaatacatggaactcggcccacgcgacaaagtctctcaggctttctggcatgagtggcgcaaaggcaacaccatctcaacgccgcgcggcgacgtggtacatctcgacctgcgtcatctcggcgagaagaaactgctggagcgtctgccgtttatctgcgagctggcgaaagcctatgtgggcgtcgacccggtgaaagagccgatcccggtgcgtccaaccgcgcactacaccatgggcggtatcgaaaccgaccagcagtgcgaaacccgcatcaaagggctgtttgcggtgggtgagtgttcctccgtcggtctgcacggcgcaaaccgtctgggctcgaactcgctggctgagctggtggtctttggtcgcatggcgggcgaacgcgcgatggagcgtgccgcaacggcaggtgaagctaacagcgcggcgctggatgcgcaggttgcagacatcgaaaaacgcctgaaaggcctggtgaaccaggaaggtaacgaaaactggtcgaagatccgcgacgaaatggggctgtcgatggaagaaggctgcgggatctaccgtacgccagagctgatgcagaaaaccgtcgacaagctggcagaactccaggaacgcttcaagcgcgtgcgcatcaccgacacctccagcgtcttcaataccgacctgctctataccattgaactgggccacggcctgaacgtcgcagagtgtatggcccattccgccctggcgcgtaaagagtcccgcggcgcacaccagcgcctggatgagggctgcaccgaacgtgacgacgtcaatttccttaaacatactctcgcctggcgcgatgcggatggtaccacccgtctggactacagcgacgtgaaaatcactacgctgccaccggcgaaacgcgtgtacggtgcagaagcagaagccgccgataagaaggagaaggcgaatggctga

SEQ ID NO: 525014 - DNA, 735 bp, Stenotrophomonas maltophilia
atggctgagatgcaaaaactgaaagttgaagtggtgcgctacaacccggaagtggacgccgcgccgcacagcgctttctatgaagtcccttacgacgagcaaacctccctgctggatgcgctcggctatatcaaagataacctggccccggacctgagctaccgctggtcctgccgcatggcaatctgcggctcctgcggcatgatggtcaacaaagtgccgaagctggcgtgtaaaactttcctgcgtgattacactaagggcatcaaggttgaagcgctgggcaacttcccgattgagcgcgatctggtggtcgacatgacccactttatcgaaagcctcgaagcgattaagccgtacatcatcggcaacccgcgcacgccggatcaggggccaaacacccaaacgcccgcgcagatggcgaaataccatcagttttccggctgcatcaactgcggcctgtgctacgccgcctgtccacagtttggcctgaaccctgagtttatcggcccggccgccattaccctggcgcaccgctataacgaggacagccgcgaccacggcaaaaaagaacgtatggcacagcttaacggccagaacggggtctggacctgcacgtttgtcggttactgctccgaagtctgtccgaagcatgtcgacccggccgccgctattcagcagggaaaagtggaaagttcgaaagactttcttatcgctaccctgaaaccacgctaa

SEQ ID NO: 525015 - DNA, 396 bp, Stenotrophomonas maltophilia
atgacgactaaacgcaaagcctacgtgcgaccaatgccgtccacctggtggaaaaaactgccgttttatcgcttctatatgctgcgtgaaggcacggctgttcccgcggtctggttcagcctcgaattgatgtacggggtgtatgccctcaagcacggcccggaagcctgggccagttttgtgggtttcctgcaaaacccaatcatcgtagttctgaatctgattgtgctcgcagccgcgctactgcataccaaaacctggtttgaactggcgccaaaagcagcgaacatcattgtaaaaggcgaaaaaatggggccagagccggttattaaagggctctgggcagtgacggcagttgtctctgtggtcattctgtttgtcgcactgttctggtaa

SEQ ID NO: 525016 - DNA, 360 bp, Stenotrophomonas maltophilia
gtgatcaatccaaatccaaaacgttcagatgagccggtcttctgggggctgtttggcgcaggcggcatgtggagcgccattattgccccggtcattatcctgctggtcggtattatgctgccgctggggctgtttccgggcgatgcgctgagctatgagcgcgtactggcctttgcgagcagctttattggccgggtgttcatcttcctgatgatcgtcctgccgctgtggtgtggtctgcaccgtatccaccatgcgatgcacgatctgaaaatccatgtgccaagcggtaaatgggtcttctacggcctggcaaccattctgacggtcgtcacgttgattgccgtggttaccatctga

SEQ ID NO: 525017 - DNA, 876 bp, Stenotrophomonas maltophilia
atgacgcgaagctatctccccctcaattcgcttcgagcctttgaagccgccgcgagacatctcagctttacgcatgcggccattgagctgaacgtgacccattcagccattagccagcatgtgaaaacgctggagcagcacctgaactgtcagctgttcgttcgcgtgtcgcgcgggctgatgttgactaccgagggagaaaacttactgccggtactgaatgattcgttcgatcgtatagccggaatgctggatcgcttcgctaaccatcgtgcgcaggagaagctgaaaatcggcgtggtgggtacgtttgccatcggggttttattctcacagctggacgattttcgccgtggctatccgcacatcgatcttcagctttccacccataacaaccgcgttgatccggctgccgaagggcttgactatacgatccgctacggtggcggggcgtggcatggcaccgaggctgaatttctttgtcatgcgccgctcgcgccgctgtgtacgcccgatatcgccaccagtctgcactgtccggccgacatcctcaggtttacgctgctgcgctcctaccgacgcgacgagtggaccgcgtggatgcaggcggccggcgagcaccccccttcgccaacgcaccgtgtgatggtatttgattcgtccgtgaccatgctggaggccgctcaggcaggggtaggtattgccattgcacctgtcgatatgtttacccatctgttagccagcgagcgcattgtgcagccctttgcaacgcagattgagctcggcagttactggcttacccgattgcaatcccggacagaaacgcctgccatgcgcgaattttcccggtggctggtggagaagatgaaaaagtaa

SEQ ID NO: 525018 - DNA, 1248 bp, Stenotrophomonas maltophilia
atgctaaatttaaccgtttgtcaggcacagtcaaatccaacagactacgcctgtctgacgggcccggacatccccttgactcgctattacggaagattactgatgatgaaaaaatctctttgctgcgccctgctgctcggcatctcttgctctgctctcgccgcgccagtgtcagaaaaacagctggcggaggtggtcgcgaatacggttaccccgctgatgaaagcccagtcgattccaggcatggcggtggccgttatttatcagggtaaaccgcactattacacgtttggcaaagccgataccgcggccagcaaacccgttacgcctcagactctgttcgagctgggctctataagtaaaaccttcaccggggttttaggaggggatgccattgctcgcggtgaaatttcgctggacgatccggtgaccagatactggccacagctgacgggcaagcagtggcaggggattcgtatgctggatctcgcaacctacaccgctggcggcctgccgctacaggtaccggatgaggtcacggataatgccgccctgctgcgcttttatcaaaactggcagccgcagtggaagcctggcacaacgcgtctttacgccaacgccagtatcggtctttttggcgcgctggcggtcaaaccttccggcatgggctatgagcaggccatgacgacgcgggtccttaagccgctcaagctggaccatacctggattaacgttccgaaagcggaagaggcgcattacgcctggggctatcgtgacggtaaagcggtgcgcgtttcgccgggaatgctggatgcacaagcctatggcgtgaaaaccaacgtgcaggatatggcgaactgggtcatggcaaacatggcgccggagaacgttgctgatgcctcacttaagcagggcatcgcgctggcgcagtcgcgctactggcgtatcgggtcaatgtatcagggtctgggctgggagatgctcaactggcccgtggaggccaacacggtgatcgagggcagcgacagtaaggtggcgctggcaccgcttcccgtggcagaagtgaatccaccggctcccccggtcgaagcgtcctgggtccataaaatgggctctactggcgggtttggcagttacgtggcctttattcctgaaaagcagatcggtattgtgatgctcgcgaataaaagctatccgaacccggcacgcgttgaggcggcataccatatcctcgacgcgctacagtaa

SEQ ID NO: 525019 - DNA, 531 bp, Stenotrophomonas maltophilia
atgcgcattctgcctgttattgccgcagtaacagccgcgtttttagtggttgcttgcagttcccctactcctccgcctggcgtcacggtagtcagtaatttcgacgcacagcgcttcctcggcacctggtatgaaatcgcccgactggaccatcagttcgaacggggcttagaaaaagtcacggtcagctacagcgcgatggatgacggcgggatccgggtcattaaccgcggctataacccggatcgccagatgtggcagcagtcagttggtcaggcctatttcaccggcgcatctaaccgcgcggccatgaaagcctctttcatcggcccatactacggcgggtataacgtcattgcgctggacagagagtaccgccacgcgctggtctgtgggccggatcgcaactatctgtggctcctctcacgcacgccaacgatctcggcggaaatgaaacagcagatgctgcacatagcgacccggcaagggtttgatgtgacgaagttaatctgggtaaaacagccgcattag

SEQ ID NO: 525020 - DNA, 318 bp, Stenotrophomonas maltophilia
atgtcctggatcgttcttgttattgctggtttgctcgaagtggtatgggcaattggtctgaaatacacccacggttttacccgcctgacgcccagcgtcatcactatcgccgcaatgattgtcagtatcgtcatgctttcatgggcgatgcgaaccttaccggtcggcacagcttacgctgtctggacgggaattggcgcggtaggggctgccattaccggcattctgctgctgggggagtctgcgagtctggcgcgcatcgccagcctcgcgttgattgtcgcgggtatcatcgggttaaaactcagtacgcactaa

SEQ ID NO: 525021 - DNA, 600 bp, Stenotrophomonas maltophilia
atgttcaaaattcttttgattgaccgttgtcacttcacccgcgcgggatttgaagcctgggtcaatcattcagacctgttttcgggtcatttcgtcgtaaccggggtaaataatcttttcctcgccagagagcatatcctgcaatggaaacctgcgctggtcatcgctgatttatctggcttccggcaggatttacaccattttcagcagctttcctccctgctaattgccagcgaaacactgccttttattatgcttcaatcagggcaggagcaggagatgactgattatctggcgcagttcccgatatggtcttcgctctccaaaaataccgatctggaagcactggcggcggtgataaacgatgcgctaacgtcatgcgcgagcgcggagctaccgaaaatggcggcaccgttgctgacgcgtcaggaagaaagagttctgaccttgtggatggatggtgcgagcaaccagaaaattgccagcaatcttcgcattaacggaaaaacggtatatacgtacaaacgcaatatccgcatgaagctgcatatggatacgcgctactcgccgtttttatcgctacaggaagtggagaattga

SEQ ID NO: 525022 - DNA, 147 bp, Stenotrophomonas maltophilia
atggttaagaaaacaattgcagcgatcttttctgttctggtgctttcttcggtactgactgcatgtaacaccacccgtggcgtaggggaagatatctccgacggtggtagcgcgatttctggcgcagcaactaaagctcagaactaa

SEQ ID NO: 525023 - DNA, 132 bp, Stenotrophomonas maltophilia
atgaaacgtaccgttaaaattctgcttctgttagcgctctccagcgcaattctctccggctgcaacaccgcgcgtggcgtgggtgaagatatccaggatctcggccatatcatttcccatgcggccagctaa

SEQ ID NO: 525024 - DNA, 567 bp, Stenotrophomonas maltophilia
atggcaacgtactatagcaacgattttcgtgctggtcttaaaatcatgatggacggcgaaccgtacgcggttgaagccagcgaattcgttaaaccaggtaaaggccaggcatttgcgcgcgttaagctgcgccgcctgctgaccggtacccgtgttgagaaaaccttcaaatctactgactccgctgaaggcgctgatgttgtcgatatgaacctgacttacctgtacaacgacggtgagttctggcacttcatgaacaacgaaaccttcgagcagctgtctgcggacgcgaaagcgattggcgacaacgccaagtggctgctggatcaggctgagtgcatcgtgaccctgtggaacggtcagcctatcgcggttacgccgccgaacttcgttgagctggaaatcgttgaaaccgatccaggtctgaaaggtgataccgcaggtactggcggcaagcctgccaccctgtctaccggcgctgtggttaaagtgccactgttcgtacagatcggtgaagtgatcaaagtggatacccgctccggcgaatacgtatcccgcgtgaagtaa

SEQ ID NO: 525025 - DNA, 1029 bp, Stenotrophomonas maltophilia
atggcgcatattgtaaccctaaacaccccgtccagagaagattggttatcgcaacttgccgatgtaatcaccagtcctgatgaattgctgcgtcttttagacctcgaacagcacgaagcgttgcgtgcaggccgtgaggcgaagcgccttttcgccctgcgcgttccccgcgcgtttgttgcccgaatggaaaagggtaaccctgatgatccattattaaaacaaacgctgacctctcaggatgagtttattaccgcccccggatacagcaccgatccgctggaagagcagaacagtgttgtaccgggtttactgcataaataccgcaatcgtgccctgctgctggttaagggcgggtgcgcggtaaattgccgctattgcttccgtcgccacttcccgtacgccgaaaatcagggtaataagcgcaactggcaggtggcgctggactacatcgcagcgcatccggaactggatgaaatcatcttttccggcggcgacccgctgatggcaaaagatcatgagctggactggctgctgactcaacttgagaccatcccgcacattaagcgtctgcgcattcacagccgtttaccgatcgtcatcccggcgcgtatcaccgacgccatggtcacgcgcctggagcagtcccgtttacaggtgctgctggtaaaccatatcaaccatgcaaatgaaattgacgcggactttcgtgcggcgatgacgcgtatgcgaatggcaggcgtgacgctgctcaaccagagcgtattactgcgcggcgtgaacgacagcgcccacgtgttggccgatctcagcaatgccttatttgatgcgggcgtaatgccctattacctgcatgttctggatcgcgtccagggcgcctcgcacttcatggtgacggatgaagaggcacggaagattatgcgcgagctgttaacgctggtttcaggttatatggtgccgaagctggcacgtgagattggcggagagccgagtaagacgccgctggatttgcagctgcggcagcagtaa

SEQ ID NO: 525026 - DNA, 354 bp, Stenotrophomonas maltophilia
atgcgcataaaagtctgtgcagggattgtaggtgcagcattgctgctggcgggttgtagcaccagcaatgagctgacggcagcgggccagagcgttcgctttgtggaagataagccgggcagcgaatgccagctgttaggcaccgcctctggcgagcaaagcaactggatgtcagggcagcacggcgaggagggcggctctatgcgcggtgcggccaatgccctgcgtaatcaggctgcggcaatgggcggcaacgtgatttacggggtgagcagcccgacgcagggtatgctgtccagctttgtgccaaccgccagccagatgaacggccaggtctataagtgcccgaactga

SEQ ID NO: 525027 - DNA, 648 bp, Stenotrophomonas maltophilia
atgagtgcatcatcctcaggagaggaaaaagtaacctgggtgggctatctggcgttcgtgctcaccatcttatttttctcaggttttttcgccaaaagtactgaatggtggcgcgtgctggattttaccgttctgaacggcagctttggaccggtgaacggcgccctaacgtttcgcggcgagggtggcacaggagcgaaagacggttttttgtttgcccttgaactggcgccctcagtcattttatcgctcgggatcattgccgttaccgaggggctgggcgggctgcgcgccgcacaacagctcatgacgcccattctgcgcccgctgctcggcgtgccgggcatctgctctctggcgcttatcgccaacctgcaaaataccgatgcagccgcagggatgaccaaagagttgaccgacgaaggggcgattactgaccatgaacgcgccattttcgccaccttccagaccagcggtagcgccattattaccaactatttttcttccggtgccgcactttttacctttattaccgtcccggtgatcgcgccgctggcggtcattctggtatttaaatttgttggcgccaacttcctgcggctgtggatcgcccacatggaagttcgtcgcgttcaggaggaaaaatga

SEQ ID NO: 525028 - DNA, 462 bp, Stenotrophomonas maltophilia
atgatcgcccagacgcgtaaaaatatcatggacttgtttatcgatggcgcccgccgcggctttaccatcgccaccaccagcctgctgccgaacgtggtcatggcgtttgtcatcattcaggcgcttaaggtgaccggcctgctggatattgtcggcagggtatgcgagcccatcatgaccctgtgggggcttccgggtgcggcggcaacggtacttctggcctcggtgatgagtatgggcggcggcgtgggggtttgcgccagcctggtcgtcgccggcacgctcagcggccatgatgccaccatcctgctgcccgccatctacctgatgggcaatccggtgcaaaacacgggccgctgcctcggcaccgcaggcgtgaacccgaaatattacccgcacatcatcgctgtctgcgtcatcaacgccctgctctcgatgtgggtgatgcagctactcttctga

SEQ ID NO: 525029 - DNA, 1647 bp, Stenotrophomonas maltophilia
atggcagctaaagacgtaaaattcggtaacgacgctcgtgtaaaaatgctccgcggcgtaaacgtactggcagacgcagtgaaagtcactctgggcccgaaaggccgtaacgtcgtgctggacaaatccttcggcgcgccaaccatcaccaaagatggtgtttctgttgcacgtgaaatcgagctggaagacaagttcgaaaacatgggcgcacagatggtgaaagaagttgcctctaaagcgaacgacgctgctggtgacggtaccaccaccgcgaccgtactggcgcaggcgatcatcaccgaaggcctgaaagccgttgctgcgggcatgaacccaatggatctgaaacgtggtatcgacaaagctgtcgcctctgctgttgaagagctgaaagcgctgtccgtaccgtgctctgactctaaagccattgctcaggttggtactatctccgctaactccgacgaaaccgtaggtaaactgatcgctgaagcgatggataaagtcggtaaagaaggcgtgatcaccgttgaagacggtactggtctggaagacgaactggatgtggttgaaggtatgcagttcgaccgcggttacctgtccccatacttcatcaacaagccagaaactggcgctgttgagctggaaagcccgttcatcctgctggctgacaagaaaatctccaacatccgcgaaatgttgccagtgctggaagccgttgcgaaagcaggcaagccgctggtaatcattgctgaagacgttgaaggcgaagcgctggcgactctggtggttaacaccatgcgtggcatcgtgaaagtggcagcggttaaagcacctggcttcggcgatcgtcgtaaggcgatgctgcaggatatcgctaccctgaccggcggtaccgtgatctctgaagagattggtatggagctggaaaaagcgaccctggaagacctgggccaggcgaaacgcgttgtgatcaacaaagacactaccaccatcatcgacggtgtgggtgaagaagccgctattcagggccgtgttggtcagatccgtaagcagatcgaagaagcaacttccgattacgaccgtgaaaaactgcaggagcgcgtagcgaaactggcaggcggcgttgcggtaatcaaagttggtgctgcgaccgaagttgaaatgaaagagaagaaagcacgcgttgacgatgccctgcatgcgacacgtgctgcggtagaagaaggcgtagttgctggtggtggtgtcgcgctggtgcgtgtagccgctaaactggctggcctgaccgctcagaacgaagaccagaacgtaggtatcaaagttgcgcttcgcgcaatggaagcccctctgcgtcagatcgtgtccaacgccggtgaagagccatcagtagttgcgaacaacgtgaaagcgggcgaaggtaactacggttacaacgcagcaactgaagaatacggcaacatgatcgacttcggtatcctggacccaactaaagttacccgttctgctctgcagtacgcggcatctgtagctggcctgatgatcacgaccgaatgcatggtaaccgacatgcctaaaggcgacgcgcctgacttaggtgctgctggtggtatgggcggcatgggtggcatgggcggcatgatgtaa

SEQ ID NO: 525030 - DNA, 294 bp, Stenotrophomonas maltophilia
atgagtattcgtccgttacatgatcgtgtgatcgtcaaacgtaaagaagttgaaaccaagtctgctggtggcatcgttctgaccggttcagcagcagcaaaatcaacgcgtggcgaaatcatcgctgtcggtaagggccgcatcctggaaaacggaactgtgcagccactggacgttaaagttggtgacatcgtcattttcaacgatggctacggcgtgaaatccgagaagatcgacaatgaagaagtgttgatcatgtccgagagcgacattctggcaattgttgaagcgtaa

SEQ ID NO: 525031 - DNA, 1248 bp, Stenotrophomonas maltophilia
atgagtggactcaggcaggagttggggctggcgcagggcattggcttactctcaacgtctttgttaggcacgggcgtttttgcggttcccgcgctggcggcgttggttgccggcaataacagtctttgggcatggccggtgctgatcgtgctggtgtttcctgtggcgattgtctttgccatactcgggcggcacttcccgagcgcaggcggcgtagcgcattttgtcggcatggcgtttgggccgcgaatggaacgcgtcaccggctggctatttttgtcggtgatacccgttggccttccggcagccctgcatatcgcaaccggcttcggacaggcgctgtttggctggcacgatgaacagctgctgctggctgaactcggtacgctagcgattatctggtgggttggctcacgcggggccagttccagcgccaacctgcaaacgctggtcgccgtgttaatcgtcgcgctgatcatcgccatctggtttgcgggtgacattacggtggcggatattcctttccccgcgattaatgacatcgaccacacacagcttttcgctgcactatccgtcatgttctggtgtttcgtcggtctggaggcgttcgctcatctggcatccgagtttaaacagcccgagcgtgattttccccgcgccctgatgattggcctgctgctggcgggcaccgtgtactgggcctgtaccgtactggtgctgcacttcaacgcgttcggtgaagagaaagccgccgccgcgtcgctgccgggcatcgtggtgcagctgtttggcgttaaagccctgtgggtagcctgcgtgattggctatctcgcctgctttgccagcctcaacatctatattcagagcttcgcccggctggtgtggtctcaggcactttataaaccggatagccccctctcacgcctgtcaaagcgtcagcttccggtgaatgcgctgaataccgtacttggctgctgcgtggtgagttccctggccatttatctcctcgacatcaaccttgacgcgctgattatctacgccaacggtattttcatcatgatctatctgttgtgcatgctggcgggctgtcggctactgaaaggacgctttaaggcgctggcggctatcgggtgtgtcctgtgcctgctgctgctggcgatggtgggatggaagagtgtgtacgccatcgtcatgctggcggggctgtgggtgtttttaccgaagcggcaaaatccgcaggcccggtga

SEQ ID NO: 525032 - DNA, 465 bp, Stenotrophomonas maltophilia
gtgcgctggataccatttattgctttctttctttatgtttacattgagatttcgattttcatccaggttgcccatgtgctgggcgtcctgctgacgctgattctggtgatcttcacctccgtcatcggcatgtcgctggtgcgcaatcagggtttcaaaaatttcctgttaatgcagcagaagatggccgcaggtgaaagcccggccgccgagatgatcaaaagcgtgtcgctgattattgctggcctgctgctgatcctgcctgggttcttcaccgacttcctcggcctgctgttgctgttgccgccggtgcagaagcatctgaccatgaagctgctgccgcatctgcgtttcagccgtatgccaggcggtggtttcagcaccggcccgggggatacctttgaaggggaatatcagcgtaaggatgagcagcgcgaccggttagatcataaagacgatcggtaa

SEQ ID NO: 525033 - DNA, 1437 bp, Stenotrophomonas maltophilia
atgttaaacaacattcgtatcgaagaagatttgttgggtaccagggaagttccagcggatgcctactatggtgttcacactctgagagcgattgaaaacttctacatcagcaacagcaaaatcagcgacatccctgaatttgtgcgtggcatggtgatggtaaaaaaagccgcggctctggcaaacaaagagctgcaaaccattcctaaaagcgctgcaaatgcgattatcgccgcgtgcgatgaagtgctgaacaacggcaaatgcatggatcagttcccggttgacgtctatcagggcggcgcaggcacctccgtcaacatgaacaccaacgaagtgctggcaaacatcggcctggagctgatgggtcatcagaaaggtgaataccagtacctgaacccgaacgaccacgttaacaaatgtcagtccaccaacgacgcctacccaaccggcttccgcatcgcggtgtatgcctctgtcgtcaaactggtcgacgcgattaatcagctgggtgatggcttccagcgtaaagccgttgagttccaggacatcctgaaaatgggtcgtacccagctgcaggacgcggtgccgatgacgctcggccaggagttccacgcgtttaacgtgctgttgaatgaagagaccaaaaacctgctgcgcacgtccgaactgctgctggaagtgaacctgggcgctaccgccatcggtacacgcctgaacaccccggatggctatcagcagctggcggtacagaagctggctgaagtgtccaacctgccggttgtgcctgcagaagacctgattgaagccacctcagactgcggcgcctacgtgatggtgcacagcgcattgaaacgtctggcggtgaaactgtccaaaatctgtaacgacctgcgcctgctctcctccggtccgcgcgctggcctgaatgaaatcaacctgccagagttgcaggcgggttcatccatcatgccagctaaagtgaacccggtggtgccagaagtggtgaaccaggtttgcttcaaggtgattggtaacgatacgaccgtcaccatggcctccgaagccggtcagctccagctgaacgtaatggagccggtgattggccaggcgatgtttgaatctatccacattctgaccaacgcctgctacaacctgctggaaaaatgcattaacggcatcaccgcgaataaagaagtgtgtgaaggctacgtctataactccatcggcatcgtcacctacctcaacccgttcatcggccaccacaacggcgatatcgtcgggaagatttgtgccgaaaccggtaagagcgtgcgtgaggtggttctcgagcgaggattgttgaccgaagccgaactggacgatatcttctccgcccagaacctgatgcacccggcatataaagcgaaacgatataccgatgaaagcgaacagtaa

SEQ ID NO: 525034 - DNA, 1302 bp, Stenotrophomonas maltophilia
atgtttggagcagaactcgtcatcgtcctgttggcgatttatttgggcgcacgactcgggggtatcggcatcggctttgccggcggtctcggcgtgctcgtacttaccctgatctttcagattaaacccggcgcaatcccttttgacgttatcgaaatcatcatggcggttatcgctgccattgcggccatgcaggtcgctggcggtatggactacctggtgagcctggcggagcgtatgctgcgtcgtcatccaaaatacatcaccttccttgccccactggtgacctggtttatgaccattctcgccggtactggccataccgctttctctacgctgccggtcatcaccgaagtggcgaaagagcagggtattcgcccgtctcgccctctttctattgctgtagtcgcctcccagattgcgatcaccgcctcgcccatttccgcggcagtggtctttttcgcgggtattctcgagccgatgggcgtaagttatctgacgctgctggcgatctgtattccggtcacgctgattgcggtaatgatcactgccgtgctgtgtaacttcctcggcgccgagctgaaagacgatccggtttaccaggagcgcctggcaaaaggtgaagtgagcctgcgcggtagccaggtctttgagctgaagccgcatgcaaaacgctccgtgctgctgttcctgattggtatcgtcgccgtgatgttctacgcgaccgccatcagcgatacggtaggtctgatccagaacccggttctgccgcgtaacgaagcgattgtggtatttatgctgaccatcgcgacgctgatcagtatcacctgtaaaatcgacaccagcgaagtgctgaacgccagcaccttcaaatccggtatgagcgcctgcgtgtgcgtgctgggtgtggcgtggctcggtgacaccttcgtgaaagcgcacatcagcgatatccagacagttgcaggcgacctgctgcacaactatccgtggctactggcggtggtgctgttctttgccgcaacgctgctgtactcccaggctgcgaccaccaaagcgctaatgcctgcggcactgatgctgggcgtgacgccgctgacggcgattgcctctttcgcggcggtttccgccctgttcgtgctgccaacctacccaaccctgctggccgcggttgagatggatgacaccggctcgacccgtatcggtaaatacgtgtttaaccacgcgttcctcatcccgggcgtggtggcgattacgctctgcgtggtcctcggctttatcatcggcggcattgtgctgtaa

SEQ ID NO: 525035 - DNA, 324 bp, Stenotrophomonas maltophilia
gtgaacacgcctgatgctgttgttgtactgtgtaccgcccctgatgaagcttctgcccaggatctcgccgccaaagtgcttgccgaaaaactggctgcctgcgtcacgctacttcccggcgccacctccctttattactgggaaggcaagctggagcaagagtacgaagtccagatgttgctcaaaaccaatctgaccaaccagcaggcgctcctcgactgcctcaagtctcatcatccttaccaaaccccggagctgctggtgctgccagtggtccacggcgataacgattatctctcatggctcaacgcttctttacgctga

SEQ ID NO: 525036 - DNA, 1704 bp, Stenotrophomonas maltophilia
atggctcaacgcttctttacgctgatcctgctgctgtgcagcacgtcagtttttgccgggttgtttgacgcgcccggccgttcgaactttattcctgccgaccaggcattcgttttcgactttcagcaaaaccagcacgatctcagcctcacctggcaggtgaaagagggttattacctctatcgcaagcaggtcagcatcacgccggcaaaggctgacgtcggcgcattgcagatgcccgctggcgaatggcacgaggacgagttctacggtaaaagtgaaatttatcgccagcgcttaagcgtgcccgtcacggtgaatcaggcggataaaggcgcaaccctgacggtgacgtatcagggttgcgccgatgcgggcttctgctatccctctgaaacaaaggtcgttccgcttagcgaagtgaaagcggcggcctcccctctcccctcaggggaaatggccagtgtgaggggtgaaggcgaagccgcttcagaccttccgttctcagcgctttgggcgttattgattggtatcggcatcgcctttacgccctgcgtactgcccatgtacccgcttatctctggcatcgtgctgggtggtaagcaacgcctttccaccgcccgcgcgctgttgctggcctttatctatgtgcagggcatggcgttaacctatacggcgctcggcctcgtggtcgccgctgccgggttgcagttccaggccgcccttcagcacccctatgtgcttatcggactgtcagcagtgtttattctgctggcgctgtcgatgtttggcctgttcactctgcaactgccctcttccctgcaaacccgtctgacgctaatgagcaaccgtcagcaggggggctctgcgggcggcgtgttcgccatgggtgccatcgccgggctgatttgctccccttgcaccaccgcgccgctgagcgccatcctgttatacattgcccagagcggcaacctttggctcggcggcggcacactgtacctttacgcgctcggcatgggtctgccgctgatccttgtgacggtatttggcaatcgtctgctgccgaagagcggcccgtggatggagacagtgaaaaccgcgtttggttttgtcattctggcgctaccggtattcctgctggaacgcatcatcggtgatgtgtggggtacgcgtctgtgggctatgctcggcgtggccttcttcagctgggcatttatcgtgagtctgggtgcgaagaaaccgtggatgcgcctgctacagatccttctgctggcggccgcgctggtgagcgtccgtccgttacaggactgggcgtttggcaccccgacaggtcaaacgcaggctcatctgaattttatacagattaaaaacgtggatgaccttaaccgagccctggtgcaggcgaaaggcaaaccggtcatgctcgatctctatgccgactggtgcgtggcctgcaaagagtttgaaaaatacaccttcagcgatccgcaggtacaacatgcgctgagcgataccgttctgctccaggcgaacgttaccgccaacagcgcgcaggataaggctctgctgaagcaacttaacgtgctcgggctgcctaccatcctgttcttcaatgaacagggggaagaacagctgacgcagcgtgtaaccgggtttatggacgcgacggcattcaacgcgcatttgcgcaatcgccaaccgtaa

SEQ ID NO: 525037 - DNA, 576 bp, Stenotrophomonas maltophilia
gtgcaacgcgaagacgtactgggacaagccctgcaattacttgagattcaagggatcgccagcaccacgcttgagatggtagccgaccgtatcgattaccctctggatgaacttaagcgcttctggccggataaagaggcgctgctgtatgatgccctgcgctatctcagccagcaggtggatatctggcgcaggcaactgatgctgaatgaagagctgaccaccgagcaaaagctgctggcacgctataccgcactgacggagtgtgtcaccaacaaccgttacccaggctgtctgtttatcgccgcctgcacctactatccggatcccggacaccccatccatcagctggcagatcagcaaaaacgagccgcgcacgagttcacacacgagctgctgaccacacttgaagtggatgatccggcaatggtcgcgaagcagatggagctggtgctggaaggttgcctgagccgcatgctggtgaaccgtagccaggcggatgtggatacggcgcaccgtctggcggaagatattttgcggtttgcgcagtgccgtatgggtggtgcactgacctaa

SEQ ID NO: 525038 - DNA, 591 bp, Stenotrophomonas maltophilia
gtgaatttaatacccttcctgctgtttgcatttgtcgcctcgattacaccggggccaaccaatattttggtactggctaacagtcagcactttggcgtaaaaaatacggttcctgcgatcctgggtgggtgtcttgccgccagcgctattgttctggtttcaggcgctggggcaggagaagtgttacgccagtatccgctgatacgtcaggtgatgagctgggcgggcgtgctgtggctttcctggatgagctggcagctgtttagcgccccggccgcgaatctctcctccaggcgtcatgttcgatttaccgcgcgggcggcggcgttattacaggttgtaaacccaaaaacctggatgatggcgctggccgtcgtcagcctgtttgctccggcaagcgaccatgcattacgggatatttcgctgatggcgctatggtttctggcgatctcagtggtctgtttgttgtgctgggcgtggctggggaaggcggtgaaccggattttccgcaccaccgtggcgatggtgcgatttcaacgtacaatggcgctgtgtttgtttatttccgcctggacgggaatgctggcttag

SEQ ID NO: 525039 - DNA, 846 bp, Stenotrophomonas maltophilia
atggcaaacgactggcttgagctgcgtcagcatgcagaaacaggtattgagacaattaaggcgcatttcgaaggacacgcctttgatccccactggcatgatagctatctggtcggaataaccctttccggtacgcagcagttccactgtcgccgtgaacgccaccgtagccagccgggcgatgcttttttacttgagcctggtgaaatacatgacggtgatgcaccggtagagggtggctttacttatctgaccttttatctggatgaacactggctcacccgtacgcttcaagggctgtatgactctactcccgggagttacaccctccactttgcccaaacgctgacgcgagagcctcagctggtgcgcgctatcggtgatacatttgcctcgctgcataacgatgagatgaagatcgtacaacagagcacaatggataacctgctcactaagattacagcccactgccactggcggaagaaactcccgtcgcagttacaaagctccgctgtggcgcatcgtgcccgcgactatctctatgcgcatatcggcgagaacgtggggctgtcagaccttgcgcgggagacggggacggatcgctttacgctcacccgctgctttaagcgcgagtttcaccttgcgccgcacgcctggcttatccagctgcgcctggcaaaggcccgacagatgctggcgtatggggaactgcctgttgatgtggcgacggcagtaggttttgccgatcaaagccatcttggtcgctggttccagcgggcgtaccgtatttatccggcacactaccgtcggttgtgcacaaaccttccagacgtttccagaaaataa

SEQ ID NO: 525040 - DNA, 909 bp, Stenotrophomonas maltophilia
atgcgcaatcgcacttttgcggatctggaccgcgtggtcgctcttggaggaggtcacggtctgggacgggttatgtcgtcgttatcgtcactgggctcacgcctgacgggcatcgtgacaacaacggacaacggcggctcaaccgggcggatccgacgtgctgaaggcgggatagcctggggtgatacgcgcaactgcctcaaccagctcatcactgagccaagcgtggcctcggcgatgtttgagtaccgttttgggggaaatggcgaactttcaggccataaccttggaaatctgatgttaaaggcgctggatcacctgagcgtgcgccctctggaagcgatcaatttaattcgtaacctgctaaaagtggatgcgttcctgatcccgatgtccgaacagccggtagatttgatggcgatcgatgctgacgatcacgaagtgtatggtgaagtgaatatcgaccagcttcttcttccgccaaaagagctgatgacctaccccagcgtacccgcaacgcgtgaagcggttgaagcgattggcgaggccgatctgatcctgattgggccggggagtttttataccagcctgatgccgatcctgctggtgaaagagctggcgcaggcgctgcgcagaacgcctgcgcccatggtctatatcggtaatttaggccgcgaactcagtccggccgcggcaagcctgtcgctggcggataagctggacctgatggaacagtatgttggtaagaaaattatcgatggtgtcgtggtcgggccaaaagtagatgtgtcggggattggcgatcgcgtggtggtgcaggagccgctggaagccagcgatattaaatatcgccacgaccgccatttgctgcgcgaggcgctggagaaggcgattcaggcattaggttag

SEQ ID NO: 525041 - DNA, 990 bp, Stenotrophomonas maltophilia
atggcttcacaacttactgatgctttcgcgcgtaagtttttctacttacgtttgtcgattaccgacgtgtgtaacttccgttgcacctactgcctgcccgatggctacaagccgggcagcgtcaccaataatggctttctctccgtggaagaagtacgccgcgtcacgcgcgcgttctctgaactcggtacggaaaaagtgcgtcttaccgggggagagccctccctgcgccgtgatttccctgacatcattgccgccgtgcgtgaaaacgaacgtatccgccagatagcggtgaccaccaacggttaccgcatggcgcgtgacgtggcgaactggcgcgatgcggggctgacggcgatcaacgtcaacgtcgatagcctggacgcccgtcagttccacgccattaccggccaggataagttccagcaggtaatggacggcatcgatgccgcgttcaccgccggtttcgacaaggtcaaagtcaataccgtgttgatgcgtgatgtgaaccaccatcagctggacacttttctggcgtggatcaaaccgcgccgcattcaactgcgttttattgagctgatggagaccggggagggcagcgagctgttccgtcgccatcacatctccggcatggtcctgcgtgacgaactgctgaaacgcggctggatccaccagatccgccagcgcagcgatggcccggcgcaggtcttttgtcatccggattatgaaggcgaaatcggcctgatcatgccctatgaaaaagacttctgtgccagctgcaaccgcctgcgcgtctcctctgttggcaagctgcacctctgcctgttcggggatggcggcgtcgatctgcgcgatttgctggaagacgacgcccaacaggacgcgcttgaagcacgcatttccgaggcgctgacgcacaaaaagcagacccatttcctgcatcagggcaacaccggcattactcagaacctgtcctatatcggcgggtaa

SEQ ID NO: 525042 - DNA, 528 bp, Stenotrophomonas maltophilia
  misc_feature (92)..(101): n is a, c, g, or t
atgagtcaggtaagcgcggaatttatcccgacacgcattgctattcttaccgtttccgaacgtcgtggtgaagaggatgatacctccggccnnnnnnnnnncggccactggctgcgcgaggcggcacacgaagccgggcaccagattgttgataaagcgatcgtcaaagagaaccgttacgccattcgcgctcaggtttcacagtggattgcgagtgatgacgtccaggttgtactgatcactggcggcaccggctttaccgcaggcgaccaggcgccggaagcgctgcttccgctgttcgatcgcgaagtagaaggcttcggcgaagtgttccgcatgctctcatttgaagagattggcacctctacgctccagtcccgtgccgtcgcgggggtagcgaacaagacgctgatcttcgccatgccgggctcgaccaaagcctgccgcaccgcgtgggaaaacattattgccccgcagctggatgcccgtacccgtccgtgtaatttccatccccatttaaagaaataa

SEQ ID NO: 525043 - DNA, 486 bp, Stenotrophomonas maltophilia
atgtcacaactgacccacataaacgccgctggcgaagcgcatatggtggatgtctccgccaaagccgaaacggtgcgcgaggcgcgtgctgaagcgttcgtcaccatgctgccggagacgctggcgatgattatcgacggtagccatcacaagggtgatgtgtttgccaccgcccgcatcgccggtattcaggccgctaaacgcacctgggacctcatcccgctctgccatccgctgatgcttagcaaagtggaggtaaatttgcaggcgcagccggagcataaccgcgtgcgtatcgagtccctgtgccgcttaaccgggaaaaccggtgtggagatggaggcgttaacggcagcctccgtggcggcgctgaccatctacgacatgtgtaaagcggtgcagaaagatatggtgattggcccggtgcgtctgctggcaaaaagcggcggcaaatccggtgattttaaggtggaaatccatgattaa

SEQ ID NO: 525044 - DNA, 246 bp, Stenotrophomonas maltophilia
atgattaaggtgctcttttttgcccaggtccgtgagcttatcaataccgacagcctgacgctggacggctctttcgaaaacgtcgccgccctgcgtgcgcatctggcggcgcaaagcgaccgctgggcgctggcgctggatgaaggcaaactgctggccgccgtgaatcagacgctggtggagttgacccacccgctggctgatggggatgaagtggccttcttcccgccggtcacagggggttga

SEQ ID NO: 525045 - DNA, 453 bp, Stenotrophomonas maltophilia
atgacggaaacccgaattctggttggccatgagcgttttaacgtgggcacggaatatgactggctggccgggcgcgacgaagacggcgcggtcgtgacctttaccgggaaagtgcgtaatcataatctcggcgacagcgtaaaagcgctgacgctggagcactatccgggaatgaccgaaaaatcgctggcggccattgtcgaagaggcgcgaggccgctggccgctggggcgcgttacggttatccatcgcatcggcgaaatgtggcccggcgaagaaattgtgtttgtcggcgtcaccagcgcccatcgcgggagtgcttttgcggcgggggagttcatcatggattacctcaaaactaaagcgccgttctggaagcgtgaagcgacgccggaaggtgagcgctgggtggaatcgcgggacagcgacaaacaggctgccagccgctggtaa

SEQ ID NO: 525046 - DNA, 708 bp, Stenotrophomonas maltophilia
atggaccgatttccgcgttccgattcgatagttcagcagacccgtagcgggctgcaaacctacatggctcaggtatatggctggatgacggttggcctgctgcttaccgcgtttatcgcgtggtatgcggcaaacacgcctgaactgatgatgtttatcttctccagcaaaatcaccttctttgggctgattattgcgcaactggcgctggtattcgtgctctccgggctggtgcacaagctcagttcgggcatggcgaccacgctgtttatgctctattcggcgctgaccgggctgacgctctccagtattttcatcgtttacacctactcctccattgccagcacctttgtggtgaccggcgggatgttcggtgtgatgagcctgtacggttacaccaccaaacgtgacctgagcggcttcggcaacatgctgtttatggggctgatagggattgtgctggcgtcgctggtgaacctgtggttgaagagtgacgcgctgatgtgggcggtgacctatatcggggtggtgatcttcgtgggcttaaccgcctacgacacccagaaactgaaaaacatcggtgaacaaattgatgttcgcgacagttcaaacctgcgcaaatactcgattctgggcgcactgacgctttatctggacttcatcaacctgttcctgatgctgctgcgtatcttcggcaaccgtcgctag

SEQ ID NO: 525047 - DNA, 963 bp, Stenotrophomonas maltophilia
atgtcgaaatctcatcctcgctggcggctggcgaaaaaaatcctgacctggctgttcttcattgccgtcgcggtcctgctggtggtgtatgcccaaaaggtggactgggaagaggtgtggaaggttattcgcaactacaaccggacagtcctgctgggggcggttggcctggtgattgtgagctacctgatgtacggctgctatgacctgttgggacgcgcctactgcgggcataagcttgccaaacggcaggttatgctggtgtcattcatctgctacgcctttaacctgacgctgagcacctgggtgggcgggattggtatgcgctatcgcctgtactcccgccttggcttaccgggcggcaccatcacgcgtattttctcgctgagtatcaccaccaactggctggggtatatcctgctcggcggggtgatcttcaccattggcgtggtgcagctgcctgcgcactggtacatcgatgaggccaccctgcgcattctgggcatcgtactgctgctgatcatcgccgcctacctttgggcctgcgcctttgccaaacgtcgtcatatgaccattaaagggcagaagctggtgctgccgtcatggaagtttgccgtcctgcaaatggtggtttccagcgccaactggatggcgatgggggccattatctggctgctgattggcgaagatgtgaattacttcttcgtgctgggcgtgctgctggtaagcagtattgccggggtgattgtgcatattccagcggggatcggcgtactggaagcggtgtttatcgcgctgcttgcaggggagcatgtgtctcacgggacgattatcgctgccctgctcgcgtaccgcatgatctactacttcctgccgctggcgctggcaacgatctgttatctggtgctggagagtcgggcgaagaagctgcgcgccaaaaacgagaaggcgatggcaaaataa

SEQ ID NO: 525048 - DNA, 1239 bp, Stenotrophomonas maltophilia
atgaaatgcacatggcaggaaggtaaccgtattacgctgctggaaaatggcgataacttttatccggcagtctttgaggcgattagccacgcacagcagaaagtctttctggaaacgtttatctggtttgaagacgacgtgggcaggcagttgcacagcgcgctgctgcaagccgctcgtcgcggtataaaaatcgaggtcctgctcgacggatatggttcgccggatctcagcgacgaatttgttaacgagctcaccgccgcaggggtggtattccgctattacgatcccggcccgcgtctgttcgggatgcgcaccaacctgttccgccgaatgcaccgcaaaattgtggtggtggacgaaacggtggccttcgttggcggcattaactactccgccgagcatatgtcggattatggtcccgaagcgaaacaggactacgcgatccgtatcgaagggccggtggttcaggacatccagctgttcgtgctggaaaacttacccggcaaagaggccgcacgccgctggtggcgacgccgccatcgcccggaagagaaccgcaagcccggcgaggcgcaggcgctgttcgtctggcgggataacgaggagcaccgggacgatatcgaacgtcactacctgaagatgctggcgaacgcgaagcgcgaggtgattatcgccaacgcctatttcttccccggttaccggattttgcacgccatgcgcaacgcggcccgacgcggcgtgagcgtgaagctcatcgtccagggtgagcccgatatgccgattgtgaaggtgggcgcgcgtctgctctatcgctatctggtcaaaagcggcgtgcaaatctatgaatatcgccgccgcccgctgcacggcaaagtggccgtgatggatgaccactgggcgaccgttggctcaagcaacctcgatccgctgagcttatcgctcaatctggaagcgaacctgatcatccacgatcgccagtttaatcagaccctgcgcgataaccttcagggtctgatcaataaagactgcgtgcgtgtggatgagtccatggtgccgaaacgcagctggtggaacgttggcatcggtgtggtggtgttccacttcctgcgccacttcccggccatggtgggctggctgcccgcgcatacgccgaaactggcgctggtggatccgccagtgcaacccgaaatggaaacccaggaccgcgtagaggcggaagatggagggaaaacctga

SEQ ID NO: 525049 - DNA, 762 bp, Stenotrophomonas maltophilia
atgagcaaaagaacgcagcatttctcgcttaaggtgctgacgataaatattcataagggcttcacagcatttaaccgccgcttcattttaccggagctgcgcgacgcggtacgcaccgtcagcgccgatattgtctgcctccaggaggtcatgggcgcgcacgaagtgcacccgatgcatttcgaaaactggcccgacacgccccattacgagtttctggcggataccatgtggagcgattacgcctacgggcgcaatgcggtctacccggaggggcatcacggtaacgcagtgctgtcgcgttttcctatcgagcattatgagaaccgggacgtctccgttggcgagagcgaaaaacgcgggttgttatactgccgcatcacgccaccggcgctcgattttcccattcatgtgggctgcgttcatcttggcctgcgtgaggcccaccgtcaggctcagctacagatgctggcagactggaccaatgcgctgccggagggcgagcccgtggtagtggccggtgattttaacgactggcgacagcgggccaaccatcctctgaaggtgaatgcggggctggaggagatttttacccgctcacgcggtcgtcccgcgcggacgtttccggtgcgcttccccctgctgcgccttgaccgcatctacgtaaaaaatgcccacgccagcagcccgactgcgctggctttactcaactggcgacatctctccgaccatgccccactcagcgcggagatccacttatga

SEQ ID NO: 525050 - DNA, 357 bp, Stenotrophomonas maltophilia
atgttgcatttactggtcgtggccgtactggtgatgggctggatgagcggcacgctggtgcgtgtcggcttagggttatgcgtggtttacggcgtgaccgtgctgtcgatgctgtttttacagcgtcaccacgacgcgcgctggcgtgaagtgggtgatgtgctcgaagagctcaccaccacctggtattttggtgcggcaatgatcgtcctgtggctgttgtcacgcgtgctgcaaaacaacctgctgctggccctggcgggtctggctatcctcgcagggcctgcggtggtgtcgttgctcaccaaagagaaaaagctacgcgatgtttcgtctaaacatcgcataggccactga

SEQ ID NO: 525051 - DNA, 1107 bp, Stenotrophomonas maltophilia
atgtttcaccgtttatggacattgatccgcaaagagctgcaatccttgctgcgcgagccgcagacccgcgccattctggtgctgccggtgctgcttcaggttgtactgtttccgtttgccgccacgctggaggtcaccaacgctaccatcgccatttacaacgaagacaatggcaagcattccgtcgagctgacgcagcgtttcgcccgcgccaaagcctttacccatgtcctgctgctgcaaagcccgcaggcgatccagcccaccatcgacacgcagaaagcattattgctggtgcgcttcccggcggatttctcccgcaatctggacaccttccagaccgcgccgatgcagctgatcctcgacgggcgtaactccaacagcgcccagatagcggcgaactatttgcagcaggtagtgaaggactaccagcaggagctgatggcggacaaacccaaacccaacaacagcgagctggtggtgcgcaactggtacaacccgaatctggactacaagtggtttgtggtgccgtcgttaatcgccatgatcaccactattggcgtgatgattgtcacctcgctgtccgtggcacgcgaacgtgagcaaggtacgctggatcagctgctggtctcgccgctcgctacctggcagatatttgtcggcaaggcggtgccggcactgattgtcgcgacgttccaggccaccatcgtgctgggggtgggaatatgggcgtaccagatcccgtttgccggatcgctggtgctgttttacttcacgatggtgatttacggcctgtcgctggtggggtttgggctgctgatttccgcgctctgctcaacgcagcagcaggcgtttatcggggtgtttgtctttatgatgccggcgattttgctttcagggtacgtgtcgccagtggagaacatgccggtgtggttacaggatctgacatggataaacccgattcgtcacttcacggatatcaccaagcaaatctatctgaaggatgcgagtctggatattgtgtggggaagtttgtggccgctactggtcatcgcggccacaacgggctcagtggcctatgcgatgtttagacgaaacatcgcgtag

SEQ ID NO: 525052 - DNA, 1134 bp, Stenotrophomonas maltophilia
atgcgcagtaacgccctctcctggcgccgggtgcgcgccctgtgcgtcaaagagacgcggcagattgtgcgtgaccccagcagctggctgattgcggtggtgatccccctgctgctgctgtttatttttggctacggaattaacctcgattccagcaagctgcgggttgggatcctgctggagcagcagagcgaagaggcgctggacttcacccacgccatgaccggctcgccctacatcgatgccaccatcagcgacaaccggcaggaactgatccagaaaatgcaggccggtaaaattcgcggtctgatcgtcatcccggtcgatttcgccgccaacatggcacgcccgggcgccgatgcgccaattcaggtgatcaccgacggcagcgaaccgaacaccgccaacttcgtgcagggctatgcggaggggatctggcagctctggcagatgcagcgcgccgaagaccggggggagaagtttgaaccgctgattgacgtgcagacgcgctactggtttaaccccgccgccatcagccagcattttattatcccgggtgcagtcactatcatcatgacggtgattggcgcgatcctcacctcgctggtgatcgcccgcgaatgggagcgcggcaccatggaggcgctgctctccaccgaagtgacgcgcgtcgagcttttgctctgcaagctgatcccctactacttcctcggcatgctggcgatgctgctctgtatgctggtctcggtatttattcttggcgtgccgtaccgcggttcgctggtggtgctgttctttattaccagcctgtttttactcagcacgctgggaatggggctgctgatctccaccatcacccgcaaccagtttaacgccgcgcaggtggcgcttaatgccgccttcctgccgtcgatcatgctctccggctttatcttccagattgacagtatgccagcggtgatccgtgccgtgacctacatcattccggcacgctactttgtgagcaccctgcaaagcctgtttctggcggggaacatcccggtagtgctgattatcaacaccctgtttttgctggcgtcggcggtgatgtttatcgggctgacgtggatgaaaacgaaaagaagattagattag

SEQ ID NO: 525053 - DNA, 1740 bp, Stenotrophomonas maltophilia
atgaatgatgcggttatccagctcaataatctggtcaaacgcttcccgggaatggctaaaccggcggtcgcgccgctgaactgtacgattcagaaaggctatgtgaccgggctggtggggccggacggcgcgggtaaaaccacgctgatgcggatgctagcgggattgctgaagccggatgaaggcagcgccagcgtgcttggcctcgatcccatcaaagacgacgcggcgctccacggcatactcggctatatgccgcagaagtttggtctgtatgaagatctgacggtaatggaaaacctcaacctgtatgccgatctgcgcagcgttaccggcgaaacccggcagaaaaccttcgagcgtctgctggcgtttacctccctcggcccgttcaccgatcggctggcgggcaaactttccggcgggatgaagcagaagctggggctggcctgcacgctggtgggcgaaccgaaggtgctgttgctggatgaacccggcgtcggcgtggacccgatttcccgccgcgagctgtggcagatggtgcacgagctggcgggtgacggcatgttgatcctctggagtacctcttaccttgatgaagcagagcagtgccgtgacgtgctgctgatgaacgaaggcgaactgctctatcagggcgagcccaccgagctgacgcaaaccatggccgggcgcagttttctgctacacagcgcgcaggaatccaaccgcaagctgctgcaacgggtgctgaagctgccccaggtgagcgacgggatgattcagggccgttcggtgcgcgtgatcctcaaaaaagaggccaccgccgacgatatccggcgtgcgcaggggatgcctgaaatcgacatgacagagaccgcgccgcgctttgaagatgcgtttatcgatctgctgggcggggcgggaacctcagaatcaccgcttggcgccattctgcacacggtggaaggcacgccgggcgaaacggtcattgaagcgaaatcgctcaccaaaaaatttggcgatttcgccgccaccgataacgtcaattttgccgtgaagcgcggcgagatatttggcctgctcgggccgaacggtgcggggaaatccaccacctttaaaatgatgtgcggcctgctggtaccgacctccggcaaagcgctggtgctgaacatggatctcaaagtcagctccggcaaggcgcgccagcatctgggctatatggcgcagaagttttcgctctacggcaacctgacggtggagcaaaatctgcgatttttctccggcgtctacggcctgcggggacgggcgcagaacgagaagatcggccgcatgtgcgacgcctttggcctgaccgatatcgcctcacacgctaccgacgcgctgccgcttggcttcaaacagcggctggcgctggcctgttcgttgatgcacgagcccgacatcctctttcttgatgaacctacgtcaggcgtggatcccctcacccgccgtgaattctggttgcatatcaatagcatggtggaaaaaggcgtgaccgtgatggtcaccacccactttatggacgaggcagagtactgcgaccgcatcgggctggtctatcgcggcaagctgattgcccacggcacgccggacgacctgaaagcgcaggccgccgacgacgcacagccggacccgaccatggagcaggcgtttatcaccctcatccacgactgggataaggagaatcctcatgcgcagtaa

SEQ ID NO: 525054 - DNA, 996 bp, Stenotrophomonas maltophilia
atgaaaaaacctgtcgccatcattctggtggttgttgtcttgcttgctgcgggaacaggcggctggctgtggtatcagagccagcaggatcgtggcctgacgctgtacggcaacgtggatatccgcaccgtgaacatgagcttccgcgtcggcggacggctggcctcgctgagcgttgacgaaggcgatgccatcaaaaccgggcagacgctggggatgctggacaaagccccgtttgaaaacgcgttgatgcaggcaaaagcgggcgtcgccgtcgcacaggcgcagtacgacctgatgctggcgggctatcgtgatgaagagatcgcccaggcggccgctgccgttaagcaggcaaaagccgcctatgactatgcgcagaatttctataaccgtcagcaaggcttatggaaaagccgcactatttccgccaacgacctggaaaatgcgcgctcatcccgcgaccaggcgcaggcgacgctgaaatctgcccaggataagttaagccagtaccgcaccggtaaccgcgcgcaggacattgcccaggcgaaggccagccttgagcaggcgcaggcgcagttagcccaggcggagctggatctgcacgacaccacgttaatcgccccgtctgacggtacgctgatgacccgcgccgtggagccgggcagcatgctcagcgcgggcagcaccgtgttaacgctctccttaacccgtccggtgtgggtgcgcgcttacattgatgagccgaatcttggccagatgcagccgggccgcgaactgctgctctacaccgatggtcgcccggacaagccgtatcacggcaaagtgggcttcgtctccccaacggccgagttcacgccaaaaaccgttgaaaccccggatctgcgtaccgacctggtgtatcgcctgcgcatcatcgtcaccgatgcggacgacgcgctgcgtcagggcatgcctgttaccgtgaccttaaacgacggggaacaacatgaatga

SEQ ID NO: 525055 - DNA, 678 bp, Stenotrophomonas maltophilia
atgaatacaaccccaacgacaaccaaaggcgaacaggcgaaaagtcagcttatcgccgccgcgctggcgcagtttggcgagtatggtctgcatgccaccacgcgggatatcgccgcgcaggccgggcagaatattgcggccattacctactattttggctcaaaagaggatttatacctcgcctgcgcccagtggatcgcggattttatcggcaccagctttcgcccacacgtggaagaagccaccgcgctgttcagccagacagaaccggaccgggttgccatccgccagctgatccttaacgcctgtcacaacatgattcgcctgctgacgcacgacgatacgctgaacctgagcaaatttatctcccgcgagcagctctcccccactgccgcgtaccagctggtgcacgatcaggtgatcgccccgatgcatagccatctgacccggctgatcgccgcctataccggacgggacgccagcgatacggacaccattttgcatacccacgccctgctgggcgaagtgctcgccttccgtctggggcgtgagaccatcctgttacgtacgggctggacacaattcgatgaggataaagccgcgcaaattagccaggtcattacctgtcacgttgatctgatcctgcaaggcttaacgcaaaggagccagaagtcatga

SEQ ID NO: 525056 - DNA, 1383 bp, Stenotrophomonas maltophilia
atgtcttttgattcccttggtctgaacccggaaattctgcgcgccatcgcagagcagggctacgttgagccaacccctattcagcagcaggctatcccggccgttttgcagggccgtgacctgatggcaagcgcgcagaccggtaccggtaagaccgcgggctttacccttccgctgttggagctgctggtaaaaaaccagccacacgccaaaggccgtcgtccggtgcgtgcgctgatcctcaccccaacccgcgagctggcggcccagattggtgagaacgtgcgtgaatacagccgctatctcaacattcgttcgctggtagttttcggcggggtaagcattaacccgcagatgatgaagctgcgcggcggcgtggacgtgctggtggcaaccccggggcgtctgctggatctggaacaccagaacgcggtgaagctcgataacatcgaaattctggtgctggacgaagccgaccgtatgctggacatgggcttcatccacgatattcgtcgcgtgctggcgaagctgccgacgcgtcgtcagaacctgctcttctccgcgaccttctccgacgagatcaaggcgctggcggaaaagctgctgcataacccgctggaagtggaagtcgcgcgccgcaacaccgcctccgagcaggtgacgcagcacgtgcactttgtagataagaagcgcaagcgggaactgctctcccagatgatcggccagggcaactggcagcaggtgctggtgtttacccgcaccaagcacggcgccaatcacctggcggaacagctgaataaagatggcatccgcagcgcggccattcacggcaacaagagccagggcgcgcgtacccgcgcgctggcagacttcaagtccggcgacatacgcgtgctggtggcaaccgacatcgccgcacgcggtctggatatcgaagagctgccgcacgtggtgaactacgagctgccaaacgtgccggaagattacgttcaccgtatcggccgtaccggacgcgcggcggcaaccggggaagcgctctctctggtttgcgtggatgagcacaagctgctgcgcgacatcgaacgcctgctgaagaaagagatcccgcgtattgaaaccccgggctatgaagttgacccgtcaatcaaagccgagccaattcagaacggtcgtcagggtggcgggcgcggtcagggcggcggtggtcgcggtcagcagccgcgtcgtgccgaaggcggcgcgccgaaatcttcgggcaaaccgccgcgtcgtaataacgacagcaaaccggccggtgaaaacccatggcgtagcggcgaagggaaaccggcaggcgaggggcagcgccgacgccgcccgcgtaagcctgctaacccgcagtaa

SEQ ID NO: 525057 - DNA, 1989 bp, Stenotrophomonas maltophilia
  misc_feature (1975)..(1984): n is a, c, g, or t
atggctttaaccgctgcgctcaaggcgcaaattggcgcatggtataaggcgctacaacagcagatccccgattttattccccgagccccgcagcggcagatgattgccgacgtggcaaaaacgctcgccggggacgacgggcgacatctggcgattgaagccccgaccggcgtcgggaaaaccctgtcgtatcttattcccggcattgccatcgcgcgggaagaagataaaacgctggtggtcagtaccgctaacgtggccttgcaggatcagatcttcagcaaagatttgccgctgctgcgcaaaattatccccgatttacggtttaccgccgcctttggtcgcgggcgctacgtctgtccgcgcaatctggcggctctggccagcagtgaaccctcccaacaggatctgctcgcgtttcttgatgacgagctgacgccaaacaacaaggcggagcaggagcagtgcgcaaagctgaaggccgatctcgacggctacaagtgggacggcctgcgggatcacaccaaccaggcgatcggcgacgacctgtggcgcaggctcagcaccgataaagcaagctgcctgaaccgtaactgtcactactatcgcgagtgcccgttctttgtcgcccggcgtgagattcaggaagcggaggtggttgtcgccaaccacgcgctggtcatggctgcactggagagtgaagcggtcctgccggagcccaaaaacctgctgctggtgctcgatgaaggccatcatctgcccgacgtggcgcgagatgcgctggagatgagcgcggaaattaccgccccgtggtttcgcctgcaactggatctgttctgcaaactggtggcaacctgcatggagcagttccgtccgaaaaccacgccgccgctggcggttccggagcggttgagcgagcactgtgaagaggtgtacagcctcatcgcctcgctgaataatattcttaacctgtatctccccgccacccaggaggcggaacaccgctttgcgatgggtgagttgccgcaggaagtgatggagatttgccagcagttggcgaagcacctggaaaagctgcgcgggctggcggagatgttcttaaacgatctcagcgagaaaaccggtactcacgacgtggtgcgtttgcaccgcattctgctgcaaatgaatcgtgcgctggggatgtttgaagcgcagagcaaactctggcggctggcttcgatggcgcaggcgtccggcgcgccggtgactaagtgggccacccgcgaagtacgagacgggcagggacatctcttcttccactgcgtgggcatccgcgtggccgatcagctggaaaagctgatctggcgcagcgttccgcacgtggtagtgacgtcagcgactctgcgttccctgaacagcttctcaaggttgcaggagatgagcggcctgaaagagaaagcgggcgaccgctttgtagccctggactcgccgttcaaccactgtgagcagggaaagctggtcattccgcgcatgaattatgagccgcttatcgataacgaagagcagcatattgcggaaatggcggcctacttccgcgagcaggttgagagtaaaaaataccccggtatgctggtgctgtttgccagcggtcgggcgatgcaacgcttcctggagcacgtcaccgagctgcgcttactcctgctggtgcagggcgatcagccgcgctatcggctggtggaaacccaccgtaaacgcattgataacggcgagcgcagcgtgctggtggggttacagtcctttgcggaagggcttgatttgaaaggcgactacctgacgcaggtgcatatccataaaatcgccttcccgcccatcgacagcccggtggtgatcaccgaaggcgaatggctgaaaagccttaaccgttatccgtttgaagtacaaagcctgcctgcagcgtcgtttaacctgattcagcaggtcgggcgcttgatcnnnnnnnnnncttga

SEQ ID NO: 525058 - DNA, 504 bp, Stenotrophomonas maltophilia
atgaaaaaaaccgcattgattctcgcgctggggctgatcgcccaggcccacgccgatgatatacagatccagatgacgggtaacatttacgccaacacgtgcgtcattgacagtgccagccgcaacctgacggtggacttaggccaggcggcatcgggtagttttaaagacgtgggcgataccggcgagtggaaggacttttccctttcggtgtcgcactgcccggccacgctggcgcttgccaccgcctttttctacggtcaggccgacagcacccatcccaccaaatttgccaatctcggtagcgcaaaggcgctggcactggagctggcagatcgtcaggacaagatactgattgccccgcaggccgcctttaacgctgccataaacccgacagatcacacggccacgttcccgctggccgcacgctattacgccacctcgatgcccatctctgccggcacgttcagcagcgtgatccaggtgaccttcacttaccagtag

SEQ ID NO: 525059 - DNA, 990 bp, Stenotrophomonas maltophilia
atgcaaatgattaaacagtgctttttcttactgattctgggaaccgctgcgttattcatgccgcatgcgaaggcgacctgcaccacgccggatctccccaaaatgatcaacgtggcatccatttctgtcccgacgacgctggcagttggcgcaactatcccgggtacagagcagagcgttcatgttgccgggcattgcgatcagagtaccgacagcggcctggagattgtctcctgctactacggcaccggagcggaaatgccagggctcaggggggtatacgaatccggtgtgccggggattggcgtagcattgatgaatgatcacgggcagcgaattagcggcgctggcggcgtgcagtgcgattcacgtggaacgcctgtcggctacgtctctaccgatggaacacagacttttagctttgaaataacgcttgagctggttaaaacgagtgacaccgtgacatccggtacgctggtgcagtctcaaaccgaatttggcattggcgttttcggccatgaagggatcggcaaccctaaccacatcgcctatgcaggtaatgttattcttcatcaggtcacctgctccgttttaccgaaaaatctcaccgttaatttgggcgattttcccgtcagtgatttcaacagcgtaggttttttatccagccctgctcaaaaatttaatatcaccgtcaactgtgacacaaccgtacagcctgagctaaaaatcaccagcgcgaatggatatgacacagcatttgagggggtgatcaaactcacgcagcagaccggcatggctacaggcgtcggagtaagaatgctatttgatgaccatctcgccaccttcggtacctatgaaagtacccaaaatcaggccgtagccaacgaaacgctggtgatcccgtttgaggttcgctacgagcaggtcagcaatgtagtcacccccgggccagccaatactgtggcaaccatcaccctcgcttataagtga

SEQ ID NO: 525060 - DNA, 2544 bp, Stenotrophomonas maltophilia
atgtacagccacaaaaagccgttcacctgccgaatgtcttcattgctggtcattctctgtggcctggcaatagccacctttgcgcagcaggttatggctgatgattattttaaccccgccctgctggatattgataatccccagcagggtaaaaccgatctgtccgtctatgaaaaaggtcccggccaggcaccggggaaatatgaggtcgcggtgtttatcaataataataaaattgatacccgcaacgtgacctttacgcttgagaaagattcgcagggcaacgacacgttacaaccttgctttagcatgggtgaattaaaaagcctcggtatcaagacccaaaagtttcctcagctaatggccaaaggccagtgtgccgatctaggtgtcatccctgcttcatctgcaatctttcacgttcgcaaccagcagctgctgctaagcattccgcaaaaggcgctcggacaggtgccacgcggttacatcgacccgaaagagtttgacgaagggatcaacgcgggcttgcttaattacagcgtcaacgccagccagagccatgcgcgccagcagggtgaagaggatagcagtagccagtacgtgaacctgcgtccgggtttaaacgttggcgcatggcgccttcgcaactattccacctggaatcgcagcaccacaggcaatgaggaggaacagaaattcacctccgtttatacctatgcgcaacgcgatattgtggcgatgaaaagcgatatcaccgttggccagagctcatcacctgctgatgtttttgacagtgtcccttacaccggcgtggagctgaaatccgataacgacatgcttcccgacagcgaaaaaggctatgcgcctattattcgtggcaccgcccacagcaacgcgctggtgatggtgcgccagaacgggtacgtgatttatcagaacacggtcgcgccgggggccttcgaaattaacgatctctaccccaccggcagcagcggcgacctccaggtcacggtgaaagaaactgacggcagcgaaagtcatttcgtggtgccgtttgcctccgttccggtattgcagcgtgaaaaaaacctgcgctacagcgtaactgccgggcgttatcgttcttatgacaaagatgttgaaaagaccccgtttgctcaggggagcgccatctatggtttaccccacggcttcacggcctacggcggcgtgcagcagagcagtcattatcagtcgcaggcgataggcgccgggaaaaacatgggcgatttaggggcgttctccattgacgtgactcgcgccagagccctgctgaaaaaacagcagtccagcacaggcaaatcgtggcgcgtacgctacagcaaagatttcgccggttcaggcacctacttttcgcttgcgggctatcgctacaacagcaaggggttttacaccctggacgacaccatggagtcgtatacccgcgccgacaactggtctgcgccacagcagcgccgcgcccgtaccgaagccaccatcgaccagacgctaccagaaggctggggatcggtcacgctgagcatggtgaaggaaacctactggagccagaatcaggacatgacctccatgagcgtcagctacaacaacagctggcacggcgttagctacagccttagctacagcatgaataaaaacacccacgacagcgatctggacggtaatgcggtgacgaacgacaaccagttctcgctgagcgtttcggttccgctggatcgctggatgcataacacctgggccacgtacaacctgaacaacacgaaagatggcaccacgcagaacatcggcctgaacggtacggccctgaaagaagacaacctgaactggaatctccaggaggggctgagcagcaccggcagcggtaactccaccagcgttaacgccgactacaaagcgacatacggtgaagtgagcggtggcatcagtcaggataaatatcagcaaacactgaacgtcggcttgcagggaggcgtgattgcccatgcaaacggcatcacgctaagccagccgctcggtgagaccattgcgctcgtgaaagccccgggtacgcacggcacgcatatcactaaccagaccggcgttgaaaccgacttccgcggctacaccgtcgtaccgttcgtcaccgcgtatcgccacaacactattgcgctggatacggaaacgctgccggaggacgccgacgtcacccatgcggcacaaattgtgacgccaacccgcggagccattgtgcgcgccagcttcacgacgcgcgtgggcaatcgcgtcctgatgacgctcacgcaaaacggtaaaccgctgccgttcggcgcaacggttaccaccgaggacaaggacagcgaatttatcgtcgggaatgacggccagacctatctctcgggtctgccacagcaagggcatctccgcgtttcctggggacaggaggcaaacgagcattgcgtcgctgactatgtgctcacggatgagaaagcgaaaaccagcatcattaacgctgccgcgcagtgtcactga

SEQ ID NO: 525061 - DNA, 675 bp, Stenotrophomonas maltophilia
atgcgccacggttatttactgagcactcttttactgatagcagcctctgcacatgcgggtgtcgtgattaatggtacccggctggtctatcagggagataaaaaggaatcatctcttggcctatcaaacccggatacgacggattatctggtacagtcctgggtcgattctggcggtaaaaacccggccaaagccccattcctgatcaccccgccgcttttccgtctggatgcaaaagaagataacgttctgcgcgtggtacgcacgggcggaaatttaccggaagacagggaatctctgtactggttgaatatcaaagcgatcccttcctcaaaacacgttgagggagtaaatacgctgcaaattgccattaatacccgcattaaattgctgtatcgcccgtccgcggtaaaaggccgaccagaagatgtggcggataagcttgaatggcatcgcgaaggtaacgacctggtggtgaataaccctacgcctttctatatgaatttccagaccgtcacgcttaacggtcagaaagtcacaaaagcgacctgggctgttccgaaatcagaaacacattttgccataccgggtaatgtcgggggctcaaacgtgacgtattccattattaatgattacggcagcatcagccattcctggtcgaaatccgttaattaa

SEQ ID NO: 525062 - DNA, 537 bp, Stenotrophomonas maltophilia
atgaacaaggttgcattaggtttttttatcgccgcaacggtgggatgttctgcatccgcatttgcggcaactaacggtgaaggccagattaatttcaccggtgaaattatcgattctgcttgccaggtcgtgaatggattaagtaatccattaaacgttcagttgggtaaggtgtctaaaacggtatttaccggcgcaggctctaccagcacatcaacgaagtttgatattaagttaaccaattgtccggaaacagtgacctcggctgcgattaacttcggtggtaccccggatgcggataataatgccgcgctggcattaacgccagataccgatgcggcaaccggtgtagcgattcagttgatggatgcttccgggcagcctgtcactctgtatacgccttcgcagcaatatcctttagcctccggcacggcagttaacgacctggaattcggtgcgcgttatattcaaactcaggccgccattaccgcaggccctgccaactctgtatcgactttcaccgttatttataactga

SEQ ID NO: 525063 - DNA, 963 bp, Stenotrophomonas maltophilia
gtggattaccgcaaaattatcaaagaggtagggcgtgggaaaaaccacgctcgcgatctggaccaggaaacagcccgcgcgttgtacacgcatatgctgaatggcgacgtgccggaactggaaatgggcggcattttgattgcgctgcgtattaaaggggaaggtgaggcggaaatgcgcggtttttatgaggccatgcagtcgcagaccatgcgcttaaccccgcccgtcacgaagccgatgccagttgtgatcccgacctacaacggcgcgcgtaagcaggcaaacctcacgccgctgctggctattctgttgcagaaactcggtttcccggtagtagtgcatggcgtgagcgaagatccgacgcgcgtgctgacagaaaccatcctggcgttgttaggtattgaaccgaccctccatgccggtcaggcacaggcaaagctggaggggaatcagccggtctatatccccgttagcgcgctctgcccaccgctggaaaagcagctggacatgcgctggcgcatgggcgtccgtaacagtgctcacaccctggcgaagctggcgacgccgtttgccgaagacgccgcgctgcgtctttccagcgtctcccatccggaatacgtgacgcgagtcgggcaattctttgccgaaatcggtggacgcgcgctgctgatgcacgggacagaaggcgaggtttacgccaacccgcagcgttgtccacagctgatgctgattgagcccgccgggacgcgggtcgttgttgaacgtggggaagagaacagagatgcgatcctgcctgagtcgaaagatccgcaggtcaccgcgcgctggattgtgcagtgtctggccgggaaggtgccggttccgcagtcaatcaagctgcaaatggcctgctgcctgctggctgcaggggaagtcgagtccgtggaagccgggttgcagcgcgtggcgcagtcattttaa

SEQ ID NO: 525064 - DNA, 261 bp, Stenotrophomonas maltophilia
atgaaaaccatcaaatatgctgttgccgctgttgccctgtccgctctgtctttcggcgctttcgctgtagagccagtctcctctactcaggcacaggatctgaacaaaatcggtgtggtgagtgctgaaggcgcgaccacgctggacggtctggaagcaaaactggctgaaaaagctgccgccgcgggcgcaagtggatacaccatcacttccactaacggtaataacaaactgagcggtactgcggttatctacaagtaa

SEQ ID NO: 525065 - DNA, 267 bp, Stenotrophomonas maltophilia
atggcttccggctgggcgaatgacgacgccgttaacgaacagatcaacagtaccattgaagatgcggttgcgcgtgctcgcggtgaaattccgcgcggcgaaagtttgacggaatgcgaagagtgcggggatcccattcctgaggcacgacgtaaagccattcccggggtacggctttgcatcacctgtcagcaggagaaagattcaaaaaatgcttcacattcaggatataatcgtagaggatcgaaagacagccagttacgttga

SEQ ID NO: 525066 - DNA, 264 bp, Stenotrophomonas maltophilia
atgaaaaagtatctgacctttattattgcgggtgcgctggcaggcgcatcattctctgccttgtccgttcaacctctgaccgacagtaccgacaccagccagctacgcgcggctgggacggtctctgtcagccgggcaagcaaccttgatgaccttcaggacaagctggccgaaaaagcccgtcaggaaggcgctaaaggcttcgtggtgaacgccgccggtggcgataaccatatgtacggtacagcgactatctataaataa

SEQ ID NO: 525067 - DNA, 912 bp, Stenotrophomonas maltophilia
atgacttcccacaagccgggattgcacccgcgtaaccgccaccgtagccgctacgatatgaaagccctgtgtctgagctgccctgaattgcagggttttatcgttcagacaccagccggtgaaccgtcggtaaactttgccgatccgctggcggttaaaacgctgaacaaagcgctgctggcccatttttatggtgtgacgcactgggacatccctgatggctttctctgcccgccggtcccgggccgtgcggattacgtccatcatcttgccgatctgctggcggatgaccacgatggcgtagtgccgaaacaggctaccgtccttgatatcggtacgggcgcgaacctgatctaccccctgataggcgcacatgagtaccagtggcgatttaccggcagcgagatcggtgatgaggccttcgccagcgcgcaggccattatcaacgctaacccggggttaagccgggccgttcgtctgcgtcgtcagaaggatgccgctgctattttcaacggcataattcataagaacgaacaatatgatgccaccctgtgcaacccgccattccacgactccgccgcgtctgcgcgtgcgggaagtgaacgcaagcggcgtaacctgggccaggccgaagatggcgcgctgaactttggcggccagcagcaggagctgtggtgcgagggcggggaagtagcctttattctgcgcatgattgccgagagtaaaggcttcggtcgtcaggtgaaatggtttaccacgctggtctctcgtggcgataacctgccgccgctttaccgcgcgctgaccgaagccggcgcggtgaaggtggtcaaaaaagagatggcgcagggtcagaagcagagccgctttattgcctggtcctttatggacgataacaaacgtcgcaaatag

SEQ ID NO: 525068 - DNA, 2211 bp, Stenotrophomonas maltophilia
gtgccgtggatcctgttgctactgtttaccctgtttagcgcgccatcacttgctgtaaccattcccggcgtcaccaccggagccaccgccacccagcaaaatgcgccgccagaacccgacgctgaaaagaaaaaagccgcttacagcgcacttgccgacgtgcttgagaacgacacgtcccggcaggagcttatcgatcagctgaggaaagtggccgccacaccgcctcaggatccggttccgactatcgcgccgccggaagtcgaagacgaaaagacggtactggaaaacgtcaccgatatcagtcgccgctacggggaagccctgtcgtcgcgttttgcccagctctatcgcaaccttgttggcacctcgcataagccttttaatccccacaccttttctgcagccgcgacccagttttctattctggccgccgcggtattcattttttactggctgttgcgcctgtctgtctggccgctttaccggaagatgggccactggggacgtaaaaagaatcaacataaaagcagctggctgcatcttccggcaatgattaccggggcctttatcatcgatttgctgctgctggcgctgacgctgtttgtcggccagatgctggccgaccgtcttaataccgggaacaaaaccatcgcctttcagcaggggctgttcctgaacgcctttgccctgatcgagttctttaaggcgctcctgcggttaatattctgtccgcgcgtgccggaacttcgcccgttcgccatttcggatcggagcgccaaatactgggcggttcggctcagcgtgctgagcgggttgatcggctatggcctgctggtcgccgtcccgattatttccaaccaggttaacgtgcagttcggggccctggcgaacgtgctgatcatgctctgtattaccgtctgggcgctgtacctcatcttccacaataaaaaagcgatcaccgacagtctgcttcacctggccgatcgctccctctcctttttcagcctctttattcgcgcctttgcgctggtgtggcattggctggccagcgcctattttattgtgctgtgtttcttctcgctgttcgatccgggcaacagcctgaaatttatgatgggggcgacattcaaaagcctggcgattatcggcatcgcggcctttgtttctggcctgctctcccgctggctgtcgaagacgatcaccctgtcgccgcaggttcagcgtaattaccccgagctgcaaaaacgggtaaatggctggacatcggtgtcgctgaaggtggcgcgtattttgacggtctgcgtggcaattatgctgctgctgaatgcgtggggactgtttgatttctggaactggctgcataacggtgcgggagaaaagaccgtcgatattcttattcgtatcgcgctgatcctgttcttctccgccgtcggctggacgctgctggcaagccttatcgaaaaccgtctggtgtcggatgtccacggcaggcccctgccaagcgcccgcgcccgcacactgctgacgctgttccgcaacgcgctggcggtgatcattagcaccattaccatcatgattgtgttgtcggaaatcggcgtaaatatcgccccactgctggcgggtgccggtgccctgggactggcgatctcctttggttcgcagacgctggtgaaggatattatcaccggcatttttatccagtttgagaacgggatgaacaccggggatctggtgaccattggaccgctcaccggcacggtggagaggatgtccattcgctccgtcggcgtacgtcaggataccggggcgtaccacattattccgtggtcatcgatcaccacctttgccaactttgtgcgcggcattggttcggtggtggcgaattatgatgtcgatcgtcacgaagatgcagataaggcgaaacaggcgctgcgggatgcggtgagcgaactgatggagatggaggatattcgcgggctggtaattggtgagccgtcgtttgcgggcatcgtcgggctgacgaacactgcctttaccctgcgcgtgtcgttcaccacccagccgctgaaacagtggacggtgcgctttgctctcgacagcatggtgaaaaaacacttcgatctggcgaacgtgagagcgccggtgcagacgtatcaggtattgtcgccgcccgcttcgccgctccctccgcaggagccgacgctgtaa

SEQ ID NO: 525069 - DNA, 723 bp, Stenotrophomonas maltophilia
gtgattgaatttaaaaatgtttccaagcactttggtccaacccaggtgctgcacaatatcgatttgaacatcaggcagggtgaagtggtggtgatcatcgggccgtcgggttccggaaaatccaccctgctgcgctgtattaacaagctcgaggagatcaccagcggcgatttgatcgtcgatggtctgaaggtgaacgatccgaaagtggacgagcgcctgatccgccaggaagcgggcatggtgttccagcagttctacctgttcccgcacctgacggcgctggaaaacgtgatgttcggtcctttgcgcgtgcgtggggccagcaaagcggcggcagaaacgctggcaaaagatctgctggcgaaagtgggtctggcggagcgtgcccaccactatccttccgagctgtccggtggccagcagcagcgcgtggccattgcccgtgcgctggcggtgaagccaaagatgatgctgtttgatgagccaacgtccgcactcgacccggagctgcgtcacgaggtgctgaaagtgatgcaggatctggcagaagaaggcatgacgatggtgatcgttacccacgaaatcggctttgccgaaaaagtggcgtcccgtctgatcttcattgataagggccgcatcgcggaagacggtaatccgcaggcgctgattgcgaacccacctagccaacgcctccaggagttcctgcaacacgtctcctga

SEQ ID NO: 525070 - DNA, 660 bp, Stenotrophomonas maltophilia
atgcagtttgactggagcgccatctggcctgccattcctctcttgcttgaaggcgctaaaatgaccttgtggatttcggtcctcggtctggttggcgggttaattatcggtctggtggccggtttcgcccgcacctacggcggctggattgcaaaccacatcgcactggttttcatcgaagtgatccgcggcacccccattgtggtgcaggtcatgtttatctacttcgccctgccgatggccttcaacgatctgcgcattgacccgttcagcgcagctgtcgtcaccattatgattaactccggcgcctacattgcggaaatcacccgcggtgcggtgctgtcgattcataaaggcttcagcgaagccggtctggcgttaggtctttcccgtcgcgaaacgatccgtcacgtgatcctgccgctggcgctgcgccgcatgctgccgccgctgggcaaccagtggatcatcagcattaaagacacctctctgtttattgttatcggggtggccgagctgacccgtcagggccaggagatcatcgcgggtaacttccgcgccctggaaatctggagtgcggtcgccgttgtctacctgattatcacgcttgtcctgagctttgttctgcgtcgtcttgaaagaaggatgaaaatcctgtga

SEQ ID NO: 525071 - DNA, 252 bp, Stenotrophomonas maltophilia
atggaactgggcaccaaccgcgcagacgcggtgctgcacgacacgcctaacatcctttacttcatcaaaaccgccggtaacggcaagttcaaagcggtaggtgattctctggaagctcagcagtacggtattgcgttcccgaaaggcagcgacgacctgcgtaataaagttaacggcgcgctgaaaaccctgaaagagaacggcacctataacgaaatctacaaaaaatggttcggtaccgagcctaaataa

SEQ ID NO: 525072 - DNA, 273 bp, Stenotrophomonas maltophilia
atgtctgatttcgacactgataaaaatgcacaatacgctggcgataaagccaaaaacaaacttgatgaattatccggctctgcgcagcagcagtttggtgaattcgttgattcccctaaacatcaggtgaaaggtgcagcgaaaaaatatgctgcccaggccagtgatgccgtctcggatgttactgaagccgtcagaaataacccgttaacgggcttaatcgctgcgggtgcggtaggcatcgttctgggacttctgctgggacggaaataa

SEQ ID NO: 525073 - DNA, 606 bp, Stenotrophomonas maltophilia
  misc_feature (400)..(409): n is a, c, g, or t
atgattgtactaaagagctttttattctttgttggcgcggcggtcgcatgcgcgcttattatactttgtctttgggttgatatgcggtttgtcggccatgatattccggaattatcactgaccgaaatcatgcaggaaacggtattagcgactatcgtgtttctccattttcgtctggcgaaaatggatgaatccatgcgttactgtaatatactggttggcggttttttcctgacgatgttaattcgtgaactggacgcgctttttgacctcatttctcatgggagttgggtgtggttcgcgctgattaccgctctgctggctttaattcgccccgttatgcattttcgcgctaccctggaacagctggcaaaatacacgcaatccccctggtacggtnnnnnnnnnntacggtattctgttgagcggcctgctggccgtactggtcttctcccgtctctttggaatgcaggtgctgtggcacgccattctggaacatggctatatgcgtgtcgtgaaaaacgccgtggaggaaggttcggaatcgttcggctatatgctgtgcctggccgcatcccttggctattacattacctttcgcgctaa

SEQ ID NO: 525074 - DNA, 276 bp, Stenotrophomonas maltophilia
atgccgcattcacccgaagataaaaaacgtattctgacccgcgtccgccgcattcgaggccaggttgatgcccttgaacgcgccctggagtcgggcgatccctgtctcgccattctgcagcaaatagccgccgtgcgcggtgctgccaatggcctgatgggtgaaatggttgaaattcacctcaaagatgagctggtgacgggggagaccaccccggatcagcgggcagtgcggatggcggaagtcggccatttgctgcgctcttatctaaaataa

SEQ ID NO: 525075 - DNA, 1119 bp, Stenotrophomonas maltophilia
atgaaatctcgcgcagctgtcgcgttcggcccaggcaagccgctgaaaatcgttgaaattgatgttgctccgccgaagaaaggcgaagtgctgatcaaaattactcacaccggcgtctgccataccgatgcgtttaccctctccggtgacgatccggaaggcgtattcccggcggtgctcggccacgaagggggcggtgtagtggtggaagtgggtgaaggcgttaccagcctgaagcccggcgaccatgtgatcccgctctacaccgcagagtgcggcgagtgtaagttctgcaaatccggcaaaactaacctctgtcaggccgtgcgcgccacgcagggcaagggtcttatgccggacggcaccacccgtttctcctataacggcgagccaatctatcactacatggggaccagcaccttcagcgagtacacggtgtgcgccgagatctcactggcgaaagtgaatccgcaggcaccgctggataaagtctgtctgctcggctgcggtgtcaccaccggtatcggcgcggtgcataacacggcgaaagtgaaagagggtgacaccgtggcggtgttcggcctgggcgggatcggtctggcggtcatccagggcgcggtacaggcgaaagctgggcgtatcattgctgtggataccaacccggagaaatttaagctcgcaggtgagatgggtgcgaccgacttcatcaacccgaaagactacgacaaaccggttcaggacgtgatcgttgagctgaccgacggcggcgtggatttcagcttcgaatgtatcggcaacgtcaacgtaatgcgctcagcgctggagtgctgccacaaaggctggggtgagagcatcattatcggtgtggccggcgcgggtcaggagattaaaacccgtcccttccagctggtgacagggcgcgtatggcgcgggtcggcatttggcggcgtgaaaggccgtacacagctgccgggcatggttgaagatgcgatggtcggcaaaattcagctcgacccgttcattacgcaccgcctgccgctggagcagatcaacgaagctttcgatctgatgcacgaaggaaaatccattcgtaccgtcatccatttcggcgacaactga

SEQ ID NO: 525076 - DNA, 1692 bp, Stenotrophomonas maltophilia
atggacaacacaacatcgatgcaggcgcagcacaagctgagtttcttgcatcacatccggctggttccgctgttttcctccattctcggtggcattattctcctgtttgccttgagctcgggtctggcaggctatttcctgctccaggccgataacgatcagcaggatgtcacagcagaaatccaggtgcgcaccggtctgtcaaacagttccaaccatttacgcaccgcccgtatcaacatgatccacgcgggggcggcgagccgcatcgcggagatggaggcgatgaagcaaaacatcgctgaggctgagacccgcatcaggcagtcgcaggatggatttgccgcctatatgaagcgcaccgttcgcactcaggctgatgaagcgctggatggcgatctgaaagcccgctatgacgcctacatcgccggtatgcagccgatgctgaaatatgccaaaaacggcatgtttgaagccattatcaaccatgaaaatgagaccgcgcgtccgctggacgatgcctataacgcggtgctgctgaaggcgataaaaatccgcaccgaacgcgccaacgcactgacggcgcaggctcacacccgcacccggctggggctgatgtttatgttcggcgcgtttggcctggcgctggcgctggcggtgatcacctttgtggtgctgcgccgtacggtgataaacccgcttcagcgagccgctacgcgtatcgaaaatatcgcgaaaggcgatttgaccatgccggacgaaccgaccgggcgcagcgaaattggccgcctgacgcgcgatctgcaaacaatgcagcacgcgctggtggcaaccgtgggcacggtgcggcagggggcggaggagatttaccgtggaaccagcgagatctccgcgggtaataccgatctctcatcccgaaccgaacagcaggcggcggccatcgaacagacggcggccagcatggagcagctcaccgcgacggtgaagcaaaacgccgataacgcgcatcatgcgagtaaacttgcagaagatgcctccggtaaggccagccgcggggggcagatggtctccggcgtggtgaaaaccatgggtaatatttccaccagctcgaagaagatctctgaaattaccgccgtgattaacagcatcgcgttccagaccaatattctcgcgctcaatgcggcggtcgaggcggcgcgtgcgggtgaacagggacgcggctttgcggtcgtagcgagtgaagtccgcaccctggcaagccgcagcgcgaacgcggcgaaagagattgaaagcctgattaatgaatcggtgtcgcttatcgatcagggttccggggaggtggttgcggcgggcaataccatgaatgagatcgtcgaggcggttaaacgcgtcaccgatattatgctggagattgcggccgcgtctgatgagcagagccgcggcattgttcaggtgagccaggcgatttccgagatggataaggtgacgcagcagaatgcctcgctggtggaagaagcttctgcggcagcggcttcgctggaggagcagggcgcacgtctgacggaagccgttggcgcgtttcgtctcaacggggcgcacgcaggacggactacagccgctgcaaacgcagcaaaacccgcgcctttaaccccggcggcggctgtctcaggtgataactgggaaacgttctga

SEQ ID NO: 525077 - DNA, 924 bp, Stenotrophomonas maltophilia
atggaaaaaaatggtctgttcagtcagcgcatacgcttgcgccatttgcatacttttgtggccgtcgctcaacagggaacgctggggcgagcggctgaaacccttaacctcagtcagcctgcactctccaaaacgctgaacgaactggaacagcttaccggaacccgcctgttcgatcgcggccgtctgggcgctcagcttacgctcgtgggcgaacagttcctgacgcatgccgttaaagttctcgatgccctcaataccgccggtcaggccttaaatcgtaaagaagagcaggccagcgacatcgtgcgcgtgggggcactgccaacggcggcgctgggcatactgcctgcggcgatcggccagttccaccgtcagcaaaagcacgccacgcttcaggtcgcgaccatgaataacaccatgctgctggcgggcctgaagtcaggcgagctggatctgggcattgggcggatgtccgatccggaactgatgagcggcctgaactacgagctgctgttcctggaatcgctgaagctggtcgtgcgtccgaatcatcctctgttgcaggataccgtgaccctgagccgtgtgatggagtggccggtggtggtctcaccaaaaggaaccgttccgcgtcagaatgcggaagcgttgctgcaaatgcagggctgcacgctgccttccgggtgtattgaaacgctctcggcgtcgctgtcgcgccagcttacggtggattatgactacgtatggtttgtgccgtccggcgcggtgaaggacgatctgcgacgcggcgtgcttacggcgctgccggtaacctcacccggcgcgggagaaccgattgggatcctgacgcgggtagatgccccgctctctgaaggtgcccaaacgctgttaagcgccattcgtaaatcaatgcctctctga

SEQ ID NO: 525078 - DNA, 1344 bp, Stenotrophomonas maltophilia
atggcgaacaccatcacggctgatgatattcgggaacacttttcgcaggctatgtcggcgatgtaccagcaggaagttccgcagtacggctccttgctggaactggtggcggacgttaacctggcggttctggaaaataacccacttttacatgaacaactggcgaacgcagacgaactggcgcgcctgaatgttgaacgtcacggtgcgatccgcgttggcaccgcgcaggagctttccaccctgagccggatcttcgccattatgggcatgtacccggtcagctattacgatctctcccaggcgggcgtgcccgtccactcgacggcgtttcgtccgacagacgatgcggcgctctgccgtaatccgtttcgcatttttacctcgctgctgcgcctggagctgattgaaaacgttgcgctgcgcgaaagggcggcggagatcctctcccggcgcaacatctttacgccgcgctgtctggacctgatcgacctgcatgatgcgcagggacactttactgaggcacaggcgcgcgaatttgtgcaggaagccctggaaaccttccgctggcatcgccatgcgacggtcgatcaggaaacctatctggcgctgagcaacgaacatcgcctgattgccgacgtggtctgtttcccggggtgtcatataaaccatctcacgccgcgcacgctggatatcgaccgggtgcaggagctaatgccgaagtacggcattgagccgaaaattctgattgaaggcccgccgcgccgcgaggtgccgatcctcctgcgccagaccagctttaaggcgctggaagagccggtgcttttcgcgggagaacacaagggtacgcataccgcgcgtttcggtgagattgagcagcggggcgtggcccttacgccgaaagggcgcgagctgtacgaccgtctgttaaatcaggccgggaccggcaaagacaacctgacccatcagcttcacctgcgcgagatcttcagcaccttcccggacagcgaaatgttcctgcgccgtcaggggctggcttatttccgctaccgtctgactccgacaggtgaggcgcatcgccacgcgtttcgtcccggcgacgatccgcagccgctgatcgaacgcggctgggttgtggcgcagccgatcacctatgaggattttctgcccgtcagcgcggcggggattttccagtcgaatcttggcaatgaaacgcaggcgcgcagccacggcaatgccagccgcaatgccttcgaagccgcgctcggctgtgcggtgtacgacgagtttacgctttacgaggaggcggaagcgcgcagcaaacagcgttgcggtttgctctga

SEQ ID NO: 525079 - DNA, 1506 bp, Stenotrophomonas maltophilia
atggaaaatccctccgcccctgtggttgaaacgcgccagggcgcactaattggttctactgaaggcgatacccatgtgtggtgtggcattccttatgcggcaccgccggttggcccgtggcgctggcgctccccacgcccccctgcacgctgggatggcgtgcgtccggcgacggcgttctccgcctccagctggcagagcagcgaaagctgtcaggagctgggcggcggcgatcctggccagttctctgaagactgcctgtaccttaacgtctggtcgccagtcgtacgcgccgatccgcttccggtgatggtctggctgcacggcggaggatttacactcggcgctggcggtctgcctccgtataacggcagggcgctggcgaagcgcggcacggtggtggtgacaattaattaccgtctcggacacctcggcttttttgcccatccggcgcttgagggggaagaagaacgcgtggtgcataactttgcgctgctcgatcagatccaggccctggaatgggtgcgcgataacattgccgcgttcggcggcgatcctgagaacatcaccgtatttggcgagtcggccggtgcgcgcagcgtgctgtcgctgatggcttctccgcttgcgggaggactgttccataaagccattgtgcaaagcgggtacacgctgcccgacaccccgcgcgagcaggccatgcataaaggcgaagtgattgctgcccattttggcctgcaaaatgccaccgcggaacagcttcgcgcgatcccgcctgaggcgttctggccgctgacctcgccactgaatatcgcccctgcgcccatcgtgggtgactgcgttttgcctgaggccatgctcgatgtctttttcgctgcccgtcagcattcagtaccggtgatgattgggtcaaacagcgacgaagccagcgtgatgtcggtgttcggggtcgatcttgccgggcagatccagaagctccgtcgcgagcggcgctttggcctggggctgatcaagctgctttatccgggcgtgaagggcgatgaggaactcggcaggcaggtttgccgcgacatggcctttaccaccatgggatacgtggtgatgcaggcgcagcagcgggcaggcggcctgtgctggcgatactggtttgattatgtggccgaagcggagcacgcgacgtataccaacggcgcctggcacggtaacgaagtgccctacgtgttcgatacccttgggcaggtggaaccctcgcggcagtatgtaaatgaacgcgatctggccttcgccgctcaggtggcggactactgggtgagcttcgcccgggatgcgggagcacgcgatagcctggtggggcccacgcgctggcccgcctgccggaaagggcgggacgtgttgttacgcattggtgtgaataaacatgcaggttttcggcttgaaaaccgttttatgcgtgcccgtatgagcctcttcaaacgggtaatgaaacaccacgtcagcctcgactga

SEQ ID NO: 525080 - DNA, 843 bp, Stenotrophomonas maltophilia
atgtcgcgtcgttcatttccgcttaatgccgtagagacgtttatcgtgaccgcgcgtcacctgaatcttacccatgccgcgaaggagctttgtctgacgcagggggcggtaagccgcaaaattgcctcgctggaaagctggttcggcttcccgctgttcgaacgccatgctcgcggcctgcgtctttcttcacagggaagcgccctgctgccggaactgcaatctgcgtttgagcacctgcttaacgttgctgaacaggcgcggacgcaccagaccgtaattcgactgaaagcgcctacctgcgcgatgcgctggctggtaccgcgtctgttacaggtcgagcgcgaacagccggaactccagattgcgctgaccactaccaccgatcataacgtcaatttcaaaaccgaatcctatgacgcggcgattgtgtttggaacgcacatgagcgccggcgatctgctgttcgaagaggccttaaccccggtgatgagcccgctgcgggccggttctgcgctggaaacactcaccttccttcaccccacgcgggacaaaacggactggacgctgtggctggcgaaacagccgcgtccggcgccagctatgctcaaaaatcaacactttgaaaccatggatctggccattaccgccgccattcaggggctgggcatcgccattgcggatgaaacgctggtggaggaggacgtgcgcgccggacggctgatacggccttatgatacgagcataaagacgggggcgagctaccggctggtgttacgcgacgcacccgacccggagaacgggctggatgcgtttcgtgcctgtctgctcagtcgaggctga

SEQ ID NO: 525081 - DNA, 966 bp, Stenotrophomonas maltophilia
  misc_feature (887)..(896): n is a, c, g, or t
atgactttgaaaacgccggtgcagacccgctccaaattgcccgatgtaggaaccaccatttttaccgttatcggccagctttcagcccggcataacgccatcaacctttctcagggtgcgccgaatttttcctgcgacccaaaacttatctccggcgtcactcgcgccatggagtcagggcataaccagtatgcctccatgaccgggctgcaaccgctcagagagcgcatcgcggacaaaattgccacgctctatggcacccgctatgacccggcgagtgaggtactggtgaccgccagcgccagcgaagggctttactcagccatcagcgggctggttcatcctggcgatgaggtgatctatttcgagccctcctttgacagctatgcgccgattgtccgtctgcagggggcgacgccgatcgctattaagctgacggtaccggattttgccgtgaactgggatgaagtacgcgcggctattaccccacgcacgcggatgatcatcgtcaatacgccgcacaacccgagcggacaggtgttttcagccgccgatctgcaccagctggcagcgctgacgcgccacaccgacatcatcattttgtctgacgaagtgtacgagcacgtcgtttttgatggcgaaccgcatcacgggatggcaacgcacccgcaactggcggagcgcagcgtgattatttcttctttcggaaaaacctatcacgtcaccggctggcgcgtgggttattgtgtggcgcccgcggagctgatggatgaaatatgtaaggtccatcaatttttaatgttctcggccgatacgccgatgcagtacgcgtttgccgaacacatgaccgatccgcaaacctggctgtcgctggcggcgttttatcnnnnnnnnnnccgactcaccgttcaggctgcttccgagtgccggttcgtttttcctgcttgcggattacagcggctttag

SEQ ID NO: 525082 - DNA, 162 bp, Stenotrophomonas maltophilia
atggtgaaaaggctgattgtcgagtacggggttgccaccattccgctgtcagcgttttatgccgatggcacggacaataaactgatccgtctctcttttgcgaaagatgaggcgacgttacgggcaggtgcccaggccctttgtcgggttacaccacgttaa

SEQ ID NO: 525083 - DNA, 774 bp, Stenotrophomonas maltophilia
atgaaattacgcgcgttagttgtcggcataggactgctgtgttcattctcgtcgtttgctgctaccgagttgcgatacgggctggaagcggaatatccgccgtttgaaagccgcaatgcctcaggggagctggaaggatttgacgtagaactgggaaatgccatctgtaaagccgccgcgctgaagtgcagctgggtagaaacctcgtttgatgcgttgattcccggtctgctggcgaaaaagttcgacgccataaactcggcgatgaacatcaccgaacagcgtcgtaagagcattgattttacccagcccatctaccgtattccctcccagctggtgggcaaagccggttctgcggtagaggccacgccggaagggctgaagggcaaaaccatcggcgttctccagggttcaattcaggaaacctacgccaaagagcactgggaaaagcacggtgtcaccgtggtgtcttataaagatcagaatatggcctggggagatctgctgaatggccgcctcgatgcctcgctggtcatgtcagcggccgggcaggcaggtttcctcagcaagccgcagggtaaagggtttggctttatcggcaaaccggtgtcggacgacaccatcctcggcagtgggatcggctttgggctgcgtaagggggatgaggccaccaaaaagcagcttgatgccgcaattgataaagtacgtgccgacggcacgatcgctaaactggctgataagtacttcccgggtatcgatgtcagcgtaaaataa

SEQ ID NO: 525084 - DNA, 1620 bp, Stenotrophomonas maltophilia
atggctgccctgagcggcacttctggccttgcttctctgttttcccaggcggcgtatgctgctgactccgacattgccgacggtcagagccgtcgctttgacttctctgttctgcaatccatggcgcacgatctggcgaaaaccccgtggggtggtgcgccgcgtccgctgccggaaacgctggccaccatgacgccgcaggcgtacaacgccatccgttacgatgagaaacagtcgctgtggaataacattgaaggtcgccagctggacgcccagttcttccatatggggatgggattccgccgccgcgtgcgcatgttctcgctggatcaaagcacctctcaggcgcgtgagatccacttccgtccagagctgttcagctacggcgatacgggcgtggataccaaacagcttgaaggtcagagtgacctcggcttcgccggattccgcgtctttaaagcgcccgaactggcgcgacgcgatatcgtttcgttcctgggcgcgagttacttccgcgcagtggatgatacctaccagtacggcctttccgcgcgcgggctggcggtggatacctttactgacaccccggaagagttcccggatttcacctccttctggtttgaaaccgttaagccgggcgataccacctttaccgtctatgcgctgctggacagcccgagcattaccggtgcctataagtttgtgatccactgtgagaagagccaggtgatcatggacgtcgagaaccatctctatgcgcgcaaagacatcaagcagctcggcatcgcgccgatgaccagcatgttcagctgcggcaacaacgaacgccgcatgtgcgacaccattcatccgcagatccacgattcagaccgcctggcaatgtggcgcggtaacggagagtggatctgccgaccgctgaacaacccgcaaaagctgcaatttaacacttatctggataaaaacccgaaaggctttggtttgttgcagcttgatcgggacttctcccattaccaggacgtcatgggctggtataacaagcgaccaagcctgtgggtcgagccgcgcaacaactggggtaaaggatccatcgccctgatggagatcccgacaaccggcgagacgctcgataacgtggtctgcttctggcagccggagaaaccggtgcaggcgggtgatgaactggacttcaaataccgtctctactggagcgcgcagccgccggtgcgttcaccgctggcaaacgtctacgctacccgtaccggtatgggcggcttcccggagggctgggcgccgggtgaaaattacccgaaagtgtgggcccgtcgctttgccatcgacttcgtcgggggcgatttgaaggccgccgcaccgaagggcattgagccggtgatcaccctgtccagcggtgaagcgaagcaggtggagatcctctacgtcgagccgttcgacgggtatcgcattctgtttgactggtatccaacctctgactccaccgagccggtcgatatgcgtctgttcctgcgctgtcagggcgacgccatcagcgagacctggctgtaccagtatttcccgcccgcgccggacaaacgtaactacgttgatgaccggatcatgcgttag

SEQ ID NO: 525085 - DNA, 540 bp, Stenotrophomonas maltophilia
atgtcttcagaaattatccccgtaacccaggaaatcgagcttcgcgccgtcgaagagcgctataccaccgatctgcacaacctcgttattaaaaacaaaacctggctgcaaaccgccttcgactgggcgcagcatgtcggcactgaagaggacacgcgccgtaacgtgcagagcaaccagatgctgcaccagcgcggctacgccaaaatgttcctgattttcatgaaggacgagctggtgggcgtgctttcttttaacgcgatagagcctgcgaataaggccgggtacatcggctactggcttgacaaagcgcatcaggggcagggtattctctctcaggcgctacaggcgtttatgcgctattacgttgagcgcggcgagatccgccgctttgtgatcaaatgtcgcgtggctaaccataacagtaaccgcgtggcgcagcgcaacggttttgcgctggaaggttgtttgcgggaagcggaaatgctcaacggccgcttcgatgacgtaaacctgtacgccaggttattcccgctatag

SEQ ID NO: 525086 - DNA, 981 bp, Stenotrophomonas maltophilia
atgacaaaatacaggcttagcaatgaaacccgtctctggcgctggcaggacggatcaacgccgtgcacaaccctactcagacagataattgccgcaaaggattttaacgatgtgaccagcgggacaaaaggtggttgggttgaggatgaacacgcgctcgcccaggacggggattgctgggtttatgatgaaaacagcgtggtgtttgccggggccaggatatccggcaacgcccgcctcacccaaccctgcatcgtaagccaccgcgcactcgtaggcggcaacagctggcttgacgcggcagaggtgagtcacggcgcggcaataagtgacaacgtcactatccagcaatccaccgtacgcggggaatgccgtatcgcgggtgacgcgcgggtgctgcatgacagcatggtgattgcagccaaagggctgacacccgaccgtgagcagatcctacagatttacgacagagccacggtcagccagtcgcgtattgtgcatcaggcgcaaatctacggcgatgccatggtgacctgggcctttgttgagcaccgcgcggaggtgtttgaccgcgccattcttgagggcaacgcgcttaataacgtctgggtgtgcgactgcgccaaagtgtacggcaacgcccgcctgctggccggtttagaggatgatgcgatcccgaccgtgcggtacagttcacaggtcgcggaaaacgccctcgtcgaaggtaactgcgtgattaaacaccacgtattgattggtggcgaggcgtggttacgcggcgggccgatcctgattgatgacaaggtcgttattcaggggcgcgcgcgtatcagcggcgatgtcctgattgagcatcaggtggagatgacagacgatgcggcgatcgaggcgctggagggtgaaagcattcacgtccggggagccaaagtgatcaacggtgacacgcggatcacccggacgccgctgctgggggcgctatag

SEQ ID NO: 525087 - DNA, 996 bp, Stenotrophomonas maltophilia
atgcataaccaagaccaacgcgttcttaacttgcccgccggttatttcggtatggttctgggtaccataggtatggggttcgcctggcgttatgccggtactatctggccggtgacgcgctggccgggcgagatcctggtggcgctggcggtggcgatctggttcctgctgagcgtggcgtttcttacccgtgcggtacggtttccatatagcgtactggccgagatgcggcatccggtaatgagcagttttgtcagcctgtttccagccacaacgctactggtggccattggctttgtgccgtggtgccgaccagtgtcgctggtgctgtttagcgtaggcgtggtgatccagcttgcgtatgccgcctggcaaagcgccgggctgtggcgcggtaagcatccggaagaggccacgacgccgggactgtatctgccgacggtagcgaacaattttatcagcgccatggcctgcggtgcgctgggtttccacgatgcggggctggtgttccttggtgccggggtcttttcctggctgagcctcgagccagtcattctgcaacgcctgcgcagcgcgggcgaactgcccgcggcgcttcgtacttcgctcgggatccagcttgcgcctgccctggtggcttgtagcgcctggtttagcgtcaacggcggcgaagcggacaccttcgccaaaatgcttttcggctatggtctgttgcaactcctgtttatgctgcgtctgatgccgtggtatctgtcgcagccgttcaacgtgtcgttctggagcttctcgttcggggtgtcggcgctggcgaccaccggtttacatctggggcagagcagtccgtcagggttctttcatgccctcgcggttcccctgtttattttcaccaacatcatcatcgcgatgctgctggtccgtacttttatcttgctgatgcagggcaaacttctggtgcgcgctgataaggcactgctaatgcaatctgaggaaaaataa

SEQ ID NO: 525088 - DNA, 594 bp, Stenotrophomonas maltophilia
atgactgtcgatgaaaactactttactgagaaatatgggctgacccgcacgcactcagaggtcctgctcagcgcggacattgttaagccgggaaaaacgctcgatctcggtagcggaaatggccgtaacagcctctacctcgctgccaacggctatgacgtgacggcgtgggataaaaacccgatgagcatcgataacatcgagcgcattaaggcggcggaagggatcgcgaatctgcaaacggcgataaaggatctgaacaacctgacctttgacggcgaatacgactttattctttccaccgtcgtgttgatgtttctcgaagcaaaaaccatccctggtcttatcgccaatatgcagcgttgcactaaaccaggcggctataacctgatcgttgccgccatggatacggaggattatccgtgtaccgtcggtttcccgtttgccttcaagaccggtgaactgagccactactacgaaggctgggagcagatcaagtacaacgaagaggtgggggaactccaccgtaccgatgccaacggcaaccgtatcaagctgcgcttcgccaccatgctcgcacgcaagcccgcttaa

SEQ ID NO: 525089 - DNA, 1230 bp, Stenotrophomonas maltophilia
atgggctcagaactctccagacaattaacccaacgctttttccgctatctcgccatcaccagccagagcgacccgaaagtcaaaaccctgccctccaccccgggccagcacgacatggcgcgggagctggcgaaggagctggaaacgctggggttagacgatattgtgattgatgagttcgccaccgttaccgccgtgaaaaaaggcaatattcccggcgcgccgcggattggttttattacccatatcgataccgttgacgtcggtttatccccggatattcatccacaaatattaacctttacgggagatgatctctgcctgaataaagaaaaagatatttggttgcgcgtaaatgagcacccggaaattctggcttatcctgatgaggagattattttcagcgacggatccagcgtattaggcgcagataataaagcggccgtcaccgtggtcatgacggtgctggaaaacctcaccgctgaacataagcatggcgatattgtggtggcgtttgtgcccgatgaagagattggtctctgtggcgcgaaagcgctggatttgaagcgcttcgacgtcgattttgcctggaccatcgactgctgcgagctgggggaaattgtttacgagaactttaacgcggctgcggctgaaattcgctttaccggcgtcacggcgcacccgatgtccgccaaaggggtgctggtcaacccgctgctgatggcaacggatttcatcagccatttcgatcgccagcaaaccccggaatgcaccgaggggcgcgaaggttatatctggtttaacggcatccaggccgggcaaaacgaagcggtgctgaaagccaacattcgtgattttgacaaagagggttttgccgcccgcaagcagcaaattgccgatgtggcagcgcggattgctgcgcagcatcccacggcaaacgtggagtatcgcattgaagatacctacagcaatatcagcaatgcgattggcgaagaccgccgcgcgatcgacctgatgttcgaggcgatggaatcgctcggtatcaccccaaaaccgatccccatgcgcggtggcacggacggggcggccctgtcagccaaaggcttgctcaccccgaacttcttcaccggcgcccataacttccactcgaagtttgagtttttaccgctgtcgtcgttcgaggcctcctgtcgcacggccctgcaactctgtctgctggccgcgcgttaa

SEQ ID NO: 525090 - DNA, 1602 bp, Stenotrophomonas maltophilia
  misc_feature (666)..(675): n is a, c, g, or t
atgaaaagcacattcacaatgataacgctggcgcttgctgcgctgacggtcagttccaccgtcgcggcaaaaacgctggtgtattgctccgaaggatcgccggaaaacttcaatcctcagctctacacgtcgggaaccagcgtggacgccagcgccgtaccggtttataaccgtctggtcgatttcaaaccgggtactaccgaactggtgccgagcctggcggaaagctgggaggtgagcgaggatggtaaggtctacaccttccacctgcgcaaaggggtgaaattccacagtaataaactgttcacgccgacgcgcgacttcaacgcggatgacgtgattttctcgtttatgcgccagaaggatgtgaatcatccctaccataacgtatccaacggcagttattccaacttcgaaagtctggagttcggcagcctgattaccgccattgataagattgacgatcgcaccgtgcgcttcaccctggcgcacccggaagcgccgtttgttgccgatctggcgtggtattttgcctccatcctgtcggcggagtatgccgatgccatgctgaaagcgggcacgcctgaaaaggtcgatatgcagccgattggcaccgggccgtttaagctggcgcaatatcagaaggattcccgcatcctctttacnnnnnnnnnnttcccggactactggcagggaaaatcgaagctggatcgtctggtgttcaccatcacgccggacgcctcggtgcgttttgccaaagtcgagaagaatgagtgccaggtgatgccgttcccaaacccggcggatctgccgcgtatgaaggctaacaaagacatcaacctgatgagcaaggccggtctgaataccggtttcctggcatttaacacgcaaaagccgccgctggataacgtaaaagtgcgccaggcgctggcgatggcgattaacaaaccggccatcattgaggcggtcttccacggcaccggcacggcggcgaaaaacctgctgccgcccggcgtctggagtgccgacagcgagctgaaagactacgattacgatccagaaaaagcgaaaacgctgttaaaggaggcgggatttgccaacggcgtaagcatcgaactgtgggctatgcccgtgcagcggccgtataacccgaacgcgaagcgtatggctgaaatgatccaggcggactgggcgaaagtaggcgtgcagaccaaaatcgtgacctacgaatggggcgaatatctgaagcgcgtgaagggcggggagcatcaggctgcgctgatgggctggacaacggcgacgggcgatccggataacttcttcggaccactgtttacctgtacgtccgccaacggcgggtcgaactcggccaaatggtgctataagccgtttgataacctgattgccgaagcaaaatcgataaccgatcgcgaaaaacgcgtggcgctgtacaagcaggcgcagcagatgatgcacgatcaaatgccggcggttatgattgcccactcgaccatttttgagccagtcagaaaagaggtcacgggctatgaaatcgatcccttcggcaaacatctgttctggcaggtagatataaaacagtaa

SEQ ID NO: 525091 - DNA, 675 bp, Stenotrophomonas maltophilia
atgcgtacttccactttttttaaagttgcagtgctttctggcctgttggccctttctggctgtgcgtcaaaagtcgcagcccccgatcaatattcaggctttttaaaagattactctgacttgcaggagatgacatcagcaaccgggaaaccaaccttgcgttgggtcgatccttcctatgatccggcgaactacgacagtattatctggaccccgataacctattatccgacaccaaagccaaccacacagcttgggcaaaaaacgcttgatgaattgttgagttacaccaataacacactaaaaaacgcgattggccagcgtaagccaattgtgacgacgccgggcaaacacagcctgatcttccgcggcgccatcacgggtgtgagctcagagaaagaaggtttgcagttctatgaagtggtgcccgtcgcgctgctggttgcgggtacgcagatggcaactggccatcgcaccatggatacgcatcttttctttgaaggtgagctgattgatgcggccacgaacaaaccggtagtaaaagttgttcgtaaaggtgaaggtaaagagcttgccaacgagaatacgccgttgggattcgccacactgaaacaggttgtggatgatatggcgaccgatgccaccatgtttgatgtccatcagacagcaaaataa

SEQ ID NO: 525092 - DNA, 897 bp, Stenotrophomonas maltophilia
atgaacgcattactctatgggctggttgttgttatctggggcacgacctggatcgccatttttttacaacaggggccggttgcagcgccggtctccattttctggcgcttcgccgtggccagcgccacgatgatgatcgtcctggtcgcccttcgtcgcctgcgcaggctggcgctgcgggatcatctctattgcatgcttcagggttgctgcgttttctgtttcaacttctggtgcttttataccgccgccgcccatatcaataccggccttgagtcggtgattttctcgatggccgtactgtataacgccatcaacagctttatcttcttcggccagcgtccacccgcgcgcttctggacggcggcagcgctggggcttatcgggatcattaccctgttctggaacgatctgctcgccagcggctggaacgcgtcattgcttacgggcatcgggctttccgcccttggcacctacggcttctcgctggggaatatgatcagcatgcgtcatcagcgaaacgggctggaaaccatgaccaccaacgcctgggcgatgctgtatggcaccgtcgtgatgggccttatcgctctcttcaggggcgataactttatgccggaatggacggtgagctatatgggggcgctgctctatcttgctctgtttggctcggtgattgccttcggcgcctactttacgctggtaggccgcattggtcccggtaaggccgcgtacagcaccctgctgttcccgctggtggcgctgtcgatttcaacggtgtacgagggttacgtgtggcatatcaacgggatcgtcggcctgctgttgatattggggggaaatatggtgatgtttacgaaaccggaaacctggttccgccgcctgctgacggcataa

SEQ ID NO: 525093 - DNA, 873 bp, Stenotrophomonas maltophilia
atgtctctcgtttacgacacctttgaaacgttacgccaaaaaaatgcagtgctgcgggaaaccgtcgcgctcaatactggcattcaactggcggcgtggtacaacaagcacgatacgatcacggtgaaaagcaaccatcacacccttagcctgtacgtggcggatggctatgaaagctatcaaaaaacgccgggtggctggaaaaatggcggtgggccggaccgtttttgtctgatgccggaagagagcgaatccacatgggatattcgtgatgacctgtcgttcgtgcacctctactgcaccgatgaacacctgcgggacgtgggggagaaaatctgggataaacgaccgctatcgctgacgctggaggaaaaaatcttcggcagcgatccgaaaatcaccgccctttatcgccagtttttgctcggctgcgactggcagcaaaacgccaatcagctcaccctgagcactgcgtcgaccttattactgacgcatttggtccagcactattccagcgtccagtggaagttaccggtggtcaccggcgggctatcgccgtttgtgctgcgcaacgtgctggcctttatcgaggaaaatctggcgcaacccttaacgctggcggaactggcgggccaggccgcactcagtgagtatcactttgcgcggatgttccgccagtcgatggggctggcgccgcatcagtacgtcatgcagcgccgcatggagaaggccaaagcgctgattcagcacacgaccacgcagctcaccgacatcgcgctggcctgtggatttaactccgccagccatttcagtaaccgttttcgcagcatgaccggcatcacgccgtcacagctacgcgcggcgaaggcgtga

SEQ ID NO: 525094 - DNA, 1167 bp, Stenotrophomonas maltophilia
atgcgatcgactgcctctctctttcctgccgtgctggctggttttgttgccgttctggtgggctacgccagctctgccgccattatctggcaggcggctgcggcggcgggcgccagtacacagcaaatcgccggatggatgaccgcgctggggctcgggatggggatcagcacgcttgcattgtcgtggtggtataaagccccggtgctgaccgcctggtcgactcctggcgcggcgctgctcgccaccagcctgcaaggcgtgacgctggcggaaaccataggggtatttatatttgcgaatgcgctgattctgctgtgcggcgtcactggcctgtttgcccggttgatgaaactgatcccgcactcgcttgccgccgctatgctggcaggcgtgctcttacagtttagcctgaaggcattcagcaatcttgagggacacgtgcttctttgcggcagtatgctggccgcctggctggtggcaaaagccgtggcgccccggtatgccattgtcgccacgctgctggtgggggtgttcgtggcctgggctggaggtgacgttgtcacgaataaaatgacgttatcggtgatcatgccggaattcattgcccctgcgttcaccttcaccagcctgatcagcatcggcttacccttcttcctggtgaccatggcgtcgcagaatgcgcccggcttcgccaccatgcaggcatcgggctatccgctggcggtctcaccgctgatcgttgccaccggcgggctggcgctgctgttgtcccccttcggcgtctattccatctgcatcgccgccatcaccgccgccatctgccagagcccggacgcccacccggatgccagtaaacgctggctggcagcggcggccgcaggtgggttttatctgctggcgggggtgttcggcgggtcgatttcggggctgatggccgccctgccgctgagcggcatccagacgctggccgggctggccctgctcggcactatcagcgggagcttgtatcaggcactgaatcatgaagcagagcgcgacgcggcgatcgtcaccttcctgatgaccgccagcggcgtcacgctcctgggaattggctccgctttctggggactggtgctgggtgggatctgttacgctgtcttctcacgccttcgccgcgcgtag

SEQ ID NO: 525095 - DNA, 528 bp, Stenotrophomonas maltophilia
atggatatcactcaacatctggcaaccacactgaaagcgctgcgtcaggcgcggggctggagcctgtcgaaactggcggaagagacgggcgtgtcgaaagcgatgcttgggcaaatcgaacgcaatgagtccagcccgacggtctcaaccttgtggaaaattgccaccgggctgaacgtacctttttcggcgtttatcactccagagagcgaaccgcaggcggtgttcgatccgcagcagcaggcgatggtggtgaaaccgcttttcccctgggatgaacagcttaagttcgaccatttctccatcaccctgtcgcccggcgcgctgagtgagtccacgccgcacgaagccggggtgattgaacacgtggtggtgataagcggtgagctggatatgcatatcgacggtgtctggcgcactgtatacgctgattcaggcgtgcgttttgccggcgataaaccgcacgcgtaccgcaacagcagcacccggacggtacattttcactctctgatccattatccccgctaa

SEQ ID NO: 525096 - DNA, 1965 bp, Stenotrophomonas maltophilia
atgcgcctgcacccccatcatcttgaactgctaagcccggcccgcgacgccgccattgcccgtgaagccattcttcacggtgcggatgccgtctacattggcggcccaggcttcggtgcccgtcataacgccagcaatagcctgcgcgacattgccgaactggtaccgttcgcccaccgtttcggggcgaaggtgttcgtgaccctgaacaccattcttcatgatgatgagctggagcccgcgcagcgtcttattaccgatctctaccagaccggcgttgacgctctgatcgttcaggatatgggtgttctggaactggatatcccgccaattgagctgcacgccagcacccagtgcgatatccgcaccgttgagaaggcgaagtttctttcagacgtcgggtttacgcagattgttctggcgcgcgagctgaaccttaaccagatccgcgatatccaccagaccaccgacgcgaccattgaattctttatccacggtgcgctttgcgtggcctattccgggcagtgtaatatctctcacgcccagacggggcgcagcgctaaccgcggcgactgctctcaggcctgccgtctgccgtataccctgaaagacgatcagggccgcgtggtggcattcgaaaaacacctgctgtcgatgaaagataacgatcagacggcaaacctcggcgcgctgatcgatgccggcgtacgctccttcaaaattgaaggccgctacaaggacatgagctacgtgaaaaatatcaccgcccattatcgtcagatgctggatgccatcatcgaggatcgcggtgacctggcgcgcgcgtccgccggtcgtacagagcatttctttattccatcgacggacaaaacgttccaccgcggcagtacggattatttcgttaatgcgcgcaaaggggatattggcgcgttcgattcaccgaagtttattggtctgccggtaggtgaagtgctgaaagtggcgaaggatcatcttgacgttcaggttacagagccgctggcgaacggcgatggtctcaacgtgatgatcaaacgtgaagtggttggttttcgcgccaatacggtggagaaaaccggcgaaaatcgttatcgcgtctggccgaatgaaatgcctgccgacctttacaaagcccgcccgaatgcggcgctgaaccgtaacctggatcacaactggcagcaggccttgctcaagacctccagcgagcgtcgcattgcggtggatatcgcgctgggtggctgggaagagcagctgatcctgaccatgacctgcgaagacggcatcagcgtgacgcatacgctcgacggcctgttcgaggtggcgaacaatgcggagaaagcgctcagcaacctcaaggatggcgtagcgaagctcgggcagaccatttattatgcgcgcaatattgaggtgaatctgccggatgcgctgttcgtgccgaacagcctgctgaaccagttccgccgtgaaacggctgagatgctggatgaagcacgcctggcaaactatccgcgcggcagtcgtaaggccgaagcggtgcctgcgccggtctacccggacacgcatctctctttccttgcgaacgtttacaaccacaaagcgcgtgcgttttaccatcgtcacggcgtgcaactgattgacgccgcgtatgaagcgcatgaagagaagggcgatgtgccggtgatgatcaccaaacactgcctgcggtttgcctttaacctttgtccgaaacaggcgaaaggcaatattaaaagctggaaagcgacgccgatgcagctggtgaatggcgatgaagtactgacgctgaagtttgactgccgtccgtgtgaaatgcacgttatcggcaagatgaagaatcacatcttcaaaatgccgtctccgggcagcattgtggcctccgtcagccctgacgatttgatgaaaaccctgccgaagcgtaaaggcagctaa

SEQ ID NO: 525097 - DNA, 234 bp, Stenotrophomonas maltophilia
atgttcagaaaaggcttttcgctactgctgctgattagtgcactgttctcggggcagattatggcggagcacaaagggcatgaatttgtgtatgtgaaaaacgccgaccatcagcttcgtcatgaagctgacagcgacgagttacgtagcgcggcagaggagtctgcggaggggttgcgcgagcaccatgtatggcagaaatcgcgcaaaccggatacccattctgcgggttag

SEQ ID NO: 525098 - DNA, 363 bp, Stenotrophomonas maltophilia
atgaaaaaaataatcgtgctatcacttctgggcgtagtggttgcggtgggtgctgcggccagcatctattcaaatgaagaaccagaatatattcagtcagcaaaaagccgtgtcggatcgtatttaaccagcgattacggacgtgtcgaatgtaatagcacccaagtaagtgaagatcgctgggagctgggctgtaccaataaggcgaggggcaaaaccttccagttcgctgtttacccatccgagcaggcgccgtatggggtctctcgtgcgttttatctcgaagcgattaatgatgatgcccgccagagtgcagagcaggggctgatgcgttatctgcaaattaataccaaagcgggttaa

SEQ ID NO: 525099 - DNA, 999 bp, Stenotrophomonas maltophilia
atgccagaaaacagcaaaaagatgacaaacttaagacatccctcgccgcgcgcgatcgtgctggcatatgacggtttatgtacctttgagtttggcgtggcggtagaaatctttggcttgccgcgcccggagatggccgatgactggtatcagtttgccgtggcgagcgtggatgatggcgaactccgggcaacgggcgggatccgtattctggccgatggcgatctgggtctgctggagacggcggatctggttgtcgttcccggctggcgagggctggacgaacccgtacccgaagcgctctgccaggcgctccgcgcggcgcatgcccgcggctgccagctactctcgatctgttcaggcgttttcgttctggcagcctcaggcctgcttgacgggcggaaggcaaccacccactggcgctacacgcaagcgctgaaaacacgctatcccgccattaccgtggtcgaagatgtgctctaccaggacgaaggcgatattctcacttccgccggaagcgccgcggggattgatctgtgcctgcacgtggtgcgccggaattacggtatggaagtggcaaaccgcgtggcgcgtcggctggtgatcccgccccatcgggacggctcgcaaacccagcagcttagccgaccggtggctcagttgcgggagagccagcgcctcggccagttgtttgattatcttcaccagcatctggctgtttcccataccgtcgaatcgctggccctgcgggtgggtatgagtcagcgcacctttctgcgccgtttccaggacgcgaccggaacaacgcccgcgcgctggttattgactgcgcgattgcagcgggcaaaagattatctcgaaaacagtcggctcagcatcgacaatattgcggaacaaaccggatttggacaaagcgccacgctgcgccaccatttccggcagcaatttgcgctttcacccgcgcaatatcgcaaacaatttttacagccggtacgataa

SEQ ID NO: 525100 - DNA, 411 bp, Stenotrophomonas maltophilia
atgagctatgttactgaatttccggctgctgagccgcaggaagctgtgggacattttctgcgtcgtctgagtgtcgagacggactgcgccgatgtccatcacgcggtatccggcggtgagcaggactttgttctgctgcacgttgtcggaaagcctgaacattttgcccggcggcatctgcccggcgcgctgcatttaccctggagccagatcaccgcagagcggatgaaagcgtggccggagggcacgctgtttgtcgtctattgtgcaggcccgcactgcaacggggcggacagggcggccctaaagctggcgcgtctgggtctgccggttaagattatgctcgggggcatgaccggctgggaagatgagcggttcgcgtttgcaggatcttcatcacccgctctgtga

SEQ ID NO: 525101 - DNA, 1104 bp, Stenotrophomonas maltophilia
atgcagcgacaccatgccccgtaccgcgccgatgtagtcggcagttttttacgcccggatgctattaaacaggcccgtctgcaatttgccagcggtgaaatcgatgccgggcagcttcgcgcggttgaggacgaggccattcgtcatgttgtcgagcagcagtgcgcctgcggtctgcatgtggtaacggacggtgaattccgccgcgcctggtggcactttgacttctttgacgggctacagggcgtggagcgttatgattcccagcagggcattcagttcaacggggtgcagactaaagcccatggcgtgcgcgtaacgggcaaactgggcttcggcgatcatcctatgctggaagatttccgctacctcaaaagcattagcggtaatgcacagccgaagatgaccattccgagcccgagcgtgctgcacttccgcggtggccgcaaggatattgatgctacggtctacccggatctgaaggattactttgacgatctggcgaccacctggcgcgatgccattcgggccttttacgatgcaggctgccgctatctgcagctggatgacaccgtctgggcctatctttgttcggaggaccagcgccgccagatccgcgagcgcggtgacgatgcagacgaacttgcccggacctatgcccgggtgctgaataaggcgctggagggcaaaccggacgatctgaccgtcgggctgcacgtctgccgcggcaacttccgctcaacctggatttccgagggcggctatgagccggtggcggaggtgctgttcggcacggtgaacgtcgacgcgttcttcctggagtacgacaacgaccgtagcggggacttcgcgccactgcgttttgtgcgcccgggtaaacagcaggtggttctggggctgatcaccaccaaacacggtgaactggagaacccggaaggggtgaaagcgcgtctggaagaggctgcgcgctacgtggcgaaagagcagatttgcctcagcccgcagtgcggatttgcttctacggaagagggtaacagcctgagcgaagcccagcagtgggataaagttcgcctcgtgacgaaaatcgccagcgacgtctggtaa

SEQ ID NO: 525102 - DNA, 312 bp, Stenotrophomonas maltophilia
  misc_feature (296)..(305): n is a, c, g, or t
atgcaccgtcgtacctttattaaagcgttcaccttgtccgcctccgtcatcgccatgggaatgagctttggcgtccaggccgcagagaccattaaagtcgggattatgcactctctctccggcacgatggccatttcagaaacgcccctgaaagatgtcgccctgatgaccatcgatgaaatcaatgctaaaggcggcgtgctcgggaaaaagctggagccggtggtggttgacccggcatccaactggccgctgtttgccgaaaaggcccgccagcttctgagccaggataaggnnnnnnnnnnaggataa

SEQ ID NO: 525103 - DNA, 1398 bp, Stenotrophomonas maltophilia
atgcctgacaataataaacaggggcgtacgtccaataaggcaatgacgttcttcgtctgcttcctcgccgctctggcaggattactctttggcctggatattggcgtaattgccggtgcattacctttcatcaccgatgagttccagattagcgcacacactcaggaatgggtggtcagctccatgatgttcggtgccgccgtcggcgcggtcggcagcggctggctctcctttaagctcgggcgtaaaaagagcctgatgatcggcgcgatcctgttcgttgccggctcactgttctctgccgctgcgcctaacgttgaagtgctgatcctttcccgcgtgctgctcggtctggcagtgggcgtggcgtcttatactgccccgctgtacctgtctgaaatcgcaccggaaaaaatccgcggcagcatgatttccatgtaccagctgatgatcaccatcggtattctgggggcttatctttccgataccgccttcagctacagcggcgcatggcgctggatgctgggcgtcatcatcattccggccattctgctgctgattggtgtcttcttcctgccggacagcccgcgctggttcgccgccaaacgccgcttccacgatgccgaacgcgtgctcttacgcctgcgtgataccagcgccgaagccaaaaacgagctggaagagatccgcgaaagcctgaaggtcaaacagtccggctgggcgctgttcaaagagaacagcaacttccgccgcgcggtgttcctcggtgtgctgttacagatcatgcaacagttcaccgggatgaacgtcatcatgtattacgcgccgaaaatcttcgaactggcgggctacaccaacaccaccgaacagatgtggggcaccgtgatcgtcggcctgactaacgtgctggcgacctttatcgctatcggtctggtggaccgctgggggcgtaaaccaaccctgacgctgggcttcctggtgatggccatcgggatgggcgtgctgggtaccatgatgcacatgggcattcactccccaacggcacagtacttcgccgtggcgatgctgctgatgtttattattgggtttgcgatgagcgccggtccgctgatttgggtactgtgttctgagatccagccgctgaaagggcgtgattttggtatcacctgctctaccgcaaccaactggattgccaacatgatcgtcggcgcaacgttcctgaccatgctcaataccctgggtaatgccaataccttctgggtctacgccggtcttaacctgttctttattgttctcacgatctggctggttcctgaaaccaaacatgtttcactggaacacattgaacgtaacctgatgaaaggtcgtcctctgcgcgaaatcggcgcacacgactga

SEQ ID NO: 525104 - DNA, 498 bp, Stenotrophomonas maltophilia
atgaaatctccccgtctccccatcgccattcagcaagccgttatgcgcagcctgcgggaaaaactcgcccaggccaacctgaagctcggccgcgattatcctgaaccgaagctggtctatcagcagcgtggcaccgcggcaggcaccgcgtggctggaatcgtatgagatccgcctgaatccggtgttgatgatggaaaatcagcaggcgtttatcgaagaagtggtgccgcacgagctggcccaccttctggtgtggaaacactttggccgcgtcgcgccgcacggcaaagagtggaaatggatgatggaggcggtgctcggcgttccggctcgccgcacccaccagttcgagctggaatcggtacgccgcaatacatttccctaccgctgccagtgccagcagcaccagcttaccgtgcgccgtcacaaccgcgtggtgcgcggcgaggcgacctatcgctgcgtaaagtgcggcgaaccactggtggcggaataa

SEQ ID NO: 525105 - DNA, 708 bp, Stenotrophomonas maltophilia
atgtcccgtaatgtttctctcgcagtcgcttttctggcggcggcgctctccggccatgctctggccgacggtattcacagtttctcacaggcaaaaaccgcaggcgtaaagattaacgccgacgtaccgggtgatttctactgcggctgtaaaattaactggcagggtaagaaaggggtcgtggatctgggatcctgcggctataaggtgcgcaagaacgagaaccgcgccagccgaatcgaatgggaacacgttgttccggcctggcagtttggccaccagcgccagtgctggcaggacggtggacgtaaaaattgcgcaaaagatccggtctaccgccagatggaaagcgatatgcacaacctgcaacccgccgtgggtgaagtcaatggcgaccgcggaaacttcatgtacagccagtggaacggtggcgaaggccagtacggtcagtgcgccatgaaggtcgatttcaaagagaaactcgccgaaccgcctgcccgcgcgcgcggcagcatcgcccgcacttacttctatatgcgcgaccgctacgatctcaacctttcccgccagcagacgcagctcttcaatgcctgggacaagctctacccggtgacggactgggaatgccagcgcgacgaacgtatcgccaaagtccaggggaatcacaacccttacgtccagcgggcttgccaggcgcaaaagagctaa

SEQ ID NO: 525106 - DNA, 732 bp, Stenotrophomonas maltophilia
atgcgcatccctcgcatctatcaccctgaactgattaccccaggcggcgaaatcgccctgtctgatgatgccgcaaaccacgtaggccgcgtgctgcgcatgggcgcaggccaggcgattcagctctttgacggctctaatcagatttttgacgctgaaattacgcgcgccgataaaaaaagcgtgcacgtgaaggtgctgcgtggcgacgtggacgaccgggaatccccgctgcacattcaccttggccaggtgatgtcgcgcggggaaaagatggagttcaccattcagaaatccattgaactgggtgtaagcctcattacgccacttttttctgagcgctgcggcgttaaactggatgcggaacgtctcaacaaaaagatccagcagtggcagaaaattgccattgcagcctgtgaacagagtggccgcaaccgcatcccggagatccgcccggcgatggatctggaggactggtgtgcagaagaggaaagcgggcttaagcttaatcttcatccgcgcgccagcgccagcatcaatacgctgccgctgcccgttgagcgtgtacgcctgctgattggcccggaaggcggcctgtcggctgacgaaatcgccatgacggcgcgttaccagtttactgatattctgttgggacctcgcgttctgcgcactgagacaacggcactcaccgccattaccgccctacaggtgcgatttggcgatctgggttga

SEQ ID NO: 525107 - DNA, 948 bp, Stenotrophomonas maltophilia
atgattaagctcggcatcgtgatggaccccatcgcaaacattaacattaagaaagattccagcttcgctatgctgctggaagcgcagcgtcgcggctatgaactccactatatggagatgaacgatctgtacctgatcaacggtgaagcccgcgcacgtacccgcatcgttaacgtcgagcagaactacgaaaaatggtacgaattcggcaccgagcaggatattgccctggccgaccttaacgtcatcctgatgcgtaaagatccgccgttcgacaccgaatacatttactccacctatatccttgagcgtgccgaagagaaaggcacgctgatcgtcaacaagccgcagagcctgcgcgactgcaacgagaagctctataccgcatggttctctgacctgacgccggaaacgctggtcacccgcagcaaaacgcagctgaaagaattctggcagaagcacggcgacatcatcatgaagccgctggacggcatgggcggcgcatcgatcttccgcgtgaaagagggcgacccgaacattggcgtaattgccgaaacgctgaccgagctgggaacccgctactgcatggcgcaaaactatctgccggccattaaagacggcgacaagcgtgtgctggttgtagacggcgagccggtgccttactgcctggcgcgtatcccgcagggtggtgaagcccgtggcaacctggcggccggaggccgtggcgaaccgcgtccgttaagcgaaagcgactgggaaattgcccgccgcgtcggccctacgctgaaagccaaaggcctgatcttcgttggcctcgatattatcggcgatcgtctgaccgaagtgaacgtcaccagcccgacctgcattcgtgagatcgaagcggaattcccgatctcgatcaccggaatgctgatggacgctatcgaaaaacgtttacagaaataa

SEQ ID NO: 525108 - DNA, 561 bp, Stenotrophomonas maltophilia
atgaatttacagcatcactttcttattgccatgcctgctctccaggatccgattttccgccgcgccgtggtctatatttgcgaatacaacgaagacggcgcaatggggattatcatcaataagccgctggaaaaccttcaggttgaaggcattctggacaagctgaaaatccctgctgaagcgcggctgccggaaatccgtcttgataaaccggtgatgctcggcggaccgcttgcagaagatcgtggctttatcctgcataccccgccggttttctcgtccagcattcgtatctccgataacaccgtcgtcaccacctctcgcgatgtgctcgaaacactgggcacggcaaatcagccttctgaggtgctggttgcgctcggctacgcttcctgggaaaaagggcagctggaacaagaaattctggacaacgcctggctgacggcccctgcggatatgaatatcctgtttaaaacccctatcgccgatcgttggcgtgacgcggcaaaactgattggcattgatattctgaccatgcctggcgttgcggggcacgcgtaa

SEQ ID NO: 525109 - DNA, 417 bp, Stenotrophomonas maltophilia
atgagcggcacccttctcgcctttgacttcggcaccaaaagcatcggcgtcgctgtgggtcaacggatcaccggcaccgcccgcccgctcacggcgctgaaagctaacgacggcacgccggactggaaccttattgagcgcttgctcaaagagtggcagccggacgacgtgattgtcggtctgccgttgaacatggacggcaccgagcagccgcttaccgcccgcgcacgcaagttcgcgaacaaaattcatggccgatttggcgtctccgttaagctgcacgatgaacgtttgagcaccgtcgaggcacgcgctggcctgttcgagcacggtggcttccgggcgttgaacaaaggcagcgtggattcagcttcagccgtcattatcctcgaaagctatttcgaacagggttactga

SEQ ID NO: 525110 - DNA, 981 bp, Stenotrophomonas maltophilia
atggatgtggaagaaattgtggcccttagtgtaaagcataacgtctccgatctacacctgtgcagtgattcaccaccgcgctggcgcaggtcaggccgtcttgaacctgcgccgtttccgcccccggatgtggaggcgttattaaaagcgtggctcaatgacgaacagcagggcgcctggtgggcaaacgggcaggtagattttgccgttaccctcacaggcggtcagcggctgcgcggcagtgcgtttaagcatatgcacggcgtttcgatcgcgctacgcctgttgccgctgacgtgtccgcagctctctgcgctaggcgtgccgcgcgcgatcccggagcttttgtccaatgacaatggcctgattctggtcaccggcgccaccggcagcgggaaatcgaccaccctggccgcgatggtcgattttctcaatcaccatacggacgggcacattctgaccctggaagatccggtggagtttatgtaccagagccaacgttgcctcatccggcagcgggagataggccagcatagcccgtcctttgccgaggccctgcgcagtgcgctgcgtgaagatccggatgtgattctgcttggtgagctgcgcgacagcgagacgatacgcctggcgctgacggcggctgagactggccatctggtgttggccacgctgcacacgcgcggtgcggcgcaggcgatcgagcgcctggtcgataccttcccggcgcaggagaaagatccggttcgtaatcagctggcgggaagcctgcgtgcggtactggcgcagaagctgcgtcaggatgtccagggcgggcgcgtggcgctgtatgagctactggtgaatacgtcggcggcggcaaacctgatccgcgaaggtaaaacctggcaactgccgggcattattcaaacggggcagcaggcggggatgcagaactttgagcagagtctggcggagcgacgggcgcaggggcggctgtag

SEQ ID NO: 525111 - DNA, 702 bp, Stenotrophomonas maltophilia
atgaacgacattgcgcataacctggcacaggtccgggacaaaatctcagccgcggcaacgcgttgcggccgtgcttcagaagaaattacgttgcttgcagtcagcaagaccaagcctgcgagcgccatcgcagaagcgatagccgccggtcatcgtgcctttggtgaaaactatgtgcaggaaggcgtagataagattcgcgctttccgggagcggggaaatacagacctgcagtggcactttatcggtccgctacagtcgaacaaaagccgtctggtagcagagcacttcgactggtgtcacaccatcgatcgtctgcgtatcgctacccgtttgagcgaccagcgccctatggagatgccagcgcttaacgtgctgattcaaatcaacatcagtgatgaaaacagcaagtccggcattacgctgagcgaactggatgcgctggcggcggacgtggcggcgctgccgcgcttaaccctgcgcggactgatggccattccggcaccagagtcaagttatgaaaggcagtttgccgtagcacagcaaatggctgtagcatttgaggcgcttaaagcgcgctatgacacggtagacacgctttctctgggcatgtcggacgatatggaagccgccatcgcggcaggcagcaccatggtgcgcatcggcacagcaattttcggtgcgcgcgattacacccaataa

SEQ ID NO: 525112 - DNA, 567 bp, Stenotrophomonas maltophilia
atgaagacgttgactttcctgctttcaacggtcattgaactgtatacgatggcgctgctactgcgcgtctggatgcagtgggcccgttgtgatttttacaatccattctcacaatttatcgtgaaaatcacgcagcccattgtggggccgcttcgccgcatcattccggcaatggggccgattgacagttcatctctgctgatggcgtttattctgagcgttatcaaagcgatcgtgctgtttatggtcatcactttccagccgattatctggatttcagccgttctgatcctggttaaaaccgtcggctcgctgatcttctgggtcctgctggtgatggcgattatgagctgggtaagccggggccgtagcccggtggagtacgcgttgattcagctgactgaaccattgctgcgtccgatccgtagcctgctgcctgcgatgggcggaatcgacttctccccgatgcttctcgttttgctgctgtacgtgctgaatatgggtatcgcggaactgttacaggcgacgggtaatatgctgctgccggggctgtggatggcgttatga

SEQ ID NO: 525113 - DNA, 297 bp, Stenotrophomonas maltophilia
atgagtgcagttagcccctgcgccgacgggctggttttacggctgtacattcagccgaaagccagccgcgacagcattgttgggctgcatggcgacgagctaaaagtcgccatcactgccccgcccgttgacggccaggcgaatgcgcatctgactaaatatctggcaaaacagtttcgcgtcgctaaaagccaggtcatcattgagaaaggtgaacttggccggcataaacaggtaaaaatccttaacccgcaatctatcccgacggaagtcgcggctctgacaaaacaggactaa

SEQ ID NO: 525114 - DNA, 594 bp, Stenotrophomonas maltophilia
atgcagaaagttgttctcgccaccggtaacgccggtaaagtgcgcgagctggcctcgctattacatgattttgggctggacgtggtggctcagaccgagctgggcgtggactccgccgaagaaaccggcctgacgtttatcgaaaacgccattctgaaagcgcgccatgcggcgcagatcaccgggctgcccgcgattgccgatgactccggtctggccgtggattttctgggcggtgcgccggggatttactccgcccgctattccggggtggacgccaccgaccagcagaacctggaaaagctgcttgtggccctgaacgacgtccctgacgaacagcgtaccgcacagttccactgcgtgctggtctacatgcgtcacgcggaagatcccacgccgattgtctgtcacggcagctggccgggcgtgatcacccgtgaagcggcgggcaacggcggctttggttacgacccgattttctttgtcccgaccgagggcaaaaccgctgcggaactcacccgcgaagagaaaagcgcgatctcccaccgtggacgcgccctgaaactgttactggaagcactgcgtaatggctaa

SEQ ID NO: 525115 - DNA, 1149 bp, Stenotrophomonas maltophilia
atggctaatttgccacctctgagtctttatattcacatcccatggtgcgtgcagaaatgcccgtactgcgatttcaactcgcacgcgctgaagggcgaagtgccgcacgatgattacgtcgcgcatctgctggccgatctggatgccgatgtaccgtacgcacagggacgtgaagtgaagaccatttttattggtggcggtacgccgagcctgctttcaggcccggcgatgcagactttgctggacggtgtgcgcgcacgtctgaagctggcagcggatgctgaaattacgatggaagccaacccgggcaccgttgaggccgaccgttttgtcgagtatcagcgcgcgggcgtgaaccgtatctccatcggcgtgcagagctttagcgagccaaagctgaagcgtctggggcgcattcacggcccggaagaggcaaagcgcgcggcgaacctggcaacggggcttgggctgcgcagttttaacctcgatttgatgcacggcctgccggatcagtcgctggaagaagcgctggacgatttgcgtcaggcaattgaactgaacccgccgcatctgtcgtggtatcagttgaccattgaaccgaacaccctgtttggttcccgtcctccggtgctgccggacgatgatgcgctgtgggatatcttcgagcagggccaccagcttttgaccgcggcggggtatcagcaatacgaaacctcggcgtatgcgaagccgggctatcagtgtcagcacaacctgaactactggcgctttggtgattatctggggattggctgcggggcacacggcaaagtgaccttcccggacgggcgcattctgcgcactgcaaaaacgcgtcatccgcgcggttttatggaaggccgctacctggagcgtcagcatgacgtcgaggcggtggataagccgtttgagttctttatgaaccgcttccgtctgctggaagccgcaccgcgcgcggagtttgcgctctacaccgggttgtcagagtcggtgattcgtccgcagattgacgaggcgttggcgcaggggtatctgaccgagtgtaatgagtactggcagatcaccgagcacggtaagctgttcctaaactcccttcttgagctgttcctcgctgaaaatcctgaaggctga

SEQ ID NO: 525116 - DNA, 363 bp, Stenotrophomonas maltophilia
atggaaattactcgttcttatgcaaaacagctcagacgtgagctgacaaaagaagaaaggcggctttggtatctactgcgcagccgccgtttcgaaaattataaatttcgtcgacagcatccggtaggtaattacattctggatttcgcctgctgcgcggctcgtctggctgttgagctggatggcgggcaacatgatgagaatcaggaatacgatcgtcaaaggacgctctggctaaatcgaaagggctggtacgtcattcgtttctggaacaacgaactctgggataacgaagaggtggtgttagaaaagatccttgaaacactgcaaatgctgcaaccctcaccccggccctctccctga

SEQ ID NO: 525117 - DNA, 717 bp, Stenotrophomonas maltophilia
atgcgtaaaacgttgctggcggttgctttactggcaatcggaaccaccgcccatgcggagtataaatgtagcgtcaccccgcgtgacgacgtggtattaagcccgcaaaccgtgcaggttaagggcgagaatggcaatctggtgatcacgccggatggcaacgtgacgtttaacggcaaacagcaaaacctgacggccgcccagcgcgagcaggcgatggactaccaggccgagttgcgtaccgcgctgccatggataaacgatggcgcgctgacccgcgttgagaagggccgcgtggcgctggataaaatcatcaccaaagaggtgggggagagcagcaatatgcgcacccgcctgacgaagctggataaacagctgaaagaacagatgaaccgcattattgagacgcgctctgatggcctgacgttccactataaggcgatcgatcaggtgcgagccgacggtcagcagctggtgaaccaggcgatgggcggcattctccaggacagcatcaacgagatgggcgccaaagcggtgctgaaaggcggcggtaatccgttgcagggtgtactgggtagcctgggcggactgcaaacctcgattcagaacgagtggaagaatcaggaagccgatttccagcagttcggcaaagacgtgtgtaaacgcgtggtgtccctggaagacagccggaaggcgctggtggggacgctgaagtaa

SEQ ID NO: 525118 - DNA, 327 bp, Stenotrophomonas maltophilia
atggcaaagaatcgtagccgtcgtctgcgtaaaaagatgcacatcgaagaattccaggaagtgggtttctccgttgcctggcgtttcccggaaggcaccagcgttgagcagatcgatcaggacgttgatgcgttcatcaacgaggtgatcgaacccaacaagctggccttcgacggtagcggctatctggcgtgggaaggtctgatttgcacccaggaagtggggaaatgcaccgaagaacatcaggcgctggtacgcaaatggcttgaagaccacaaactggaagatgtccgcgtcagcgaacttttcgacgtttggtgggactaa

SEQ ID NO: 525119 - DNA, 720 bp, Stenotrophomonas maltophilia
atgaaaaacgacgtcatttcaccggaatttgatgaaaacggtcgcccgctgcgccgtattcgcagctttgtccgccgtcagggccgcctgacaaaagggcagcaacacgcgctggacaactactggccggtgatgggcgttgagttcagcgagcagccgctcgactttaccgagctgtttggccgcgatgcgccagtgacgctggagatcggttttggcatgggcacctcgctggtcactatggcgaaagcgcgaccagagcagaacttcctcggtattgaagtgcactcgccaggcgtcggtgcgtgtctggcaacggcccatgaagagggcgttgagaacctgcgcgttatgtgtcacgacgcggtggaagtgctgcataaaatgattcctgacaattctttgaacatggttcagctctttttccctgacccgtggcacaaagcgcgtcataataaacgccgtatcgttcaggcgccgtttgccgagctggtgaaaagtaagcttaagctgggcggcgtcttccacatggcgaccgactgggaaccttatgcggaacacatgctggaagtgatgtcgtcgctggacgggtataaaaaccagtctgaaagcaacgactacgtaccgcgtccggattcacgtccggtgacaaaatttgaacagcgtggccatcgtcttggtcacggcgtatgggacttaatgttcgagagggtgaaataa

SEQ ID NO: 525120 - DNA, 1059 bp, Stenotrophomonas maltophilia
atgaccatgcaagcctctcaattttcagcccaggtgctggactggtacgacaaatacgggcgtaaaaccctgccttggcaaattgaaaaaacgccttacaaagtatggctctccgaggtgatgttgcaacaaacgcaggtcgcgacggtcattccttacttcgagcgttttatggcgcgcttcccgacaatcaccgatctggccaacgcgccgttagacgaggtactgcacctgtggacaggcctcggctattacgcccgcgcgcgcaacctgcacaaagccgcacagcaggtcgccacccgccacaacggtaaattcccggagacctttgacgaggtggcggatttgcccggcgtcgggcgttcaaccgcaggcgcaatcctttccctgtctttaggcaagcatttccctattctcgacggcaacgtcaagcgcgtgctggcacgctgctacgccgtagaaggctggccgggcaagaaagaggttgagaagcgcctgtgggagatcagtgaagcggtcactccggcgaaaggggtggagcgttttaaccaggcgatgatggatctgggcgcgatggtctgcacccgttcaaaaccgaagtgcgaactctgcccggtaaataacctctgcgtggcctatgcgaaccactcctgggcgcagtatccggggaaaaaaccgaagcagacgctgcctgaacgcaccgggtacatgctgctgatgcagcatggcgacgaggtgtttctcgcccagcgcccgccgagtggcctgtggggtggtctatactgcttcccacagtttgaggatgaagcttcgcttcgggcatggcttgaacagcgcggcattgcggccgataccctgacgcaactcaacgcgttccgtcataccttcagccatttccatctggatattgtgcctatgtggcttcccgtgtcctcattcacctcctgcatggatgaaggcaccgctctctggtataacttagcgcaaccgccatcagtcgggctggcggctcccgtggagcgcctgttacagcaattacgtgtcggtgcaatggtttag

SEQ ID NO: 525121 - DNA, 273 bp, Stenotrophomonas maltophilia
atggccagaaccattttttgtactttcctgcagcgcgacgctgaaggccaggatttccagctctacccgggcgacctgggtaaacgcatttacaacgagatctccaaagaagcctggggacagtggcagaaaaaacagaccatgctgatcaacgagaaaaagctcagcatgatgaacccggaacaccgcaagctgctggagcaggagatggtgaacttcctgttcgagggtaaagacgtccacatcgaaggctatacgccaccggaaaaataa

SEQ ID NO: 525122 - DNA, 1080 bp, Stenotrophomonas maltophilia
atgatgaaaaaactattagcgctagcacttgttgcgccgttgcttgtgtcttgttcttccaaaaagggcgatagctataacgaagcctgggttaaggacaccaacggttttgacattttgatggggcagtttgcccataacatcgagaacatatggggatttaacgaagttcttattgccggaccgaaggactacgttaagtataccgacgcctatcagacccgtagccacatcaacttcgatgacggtacgattacgattgaaaccatcgcggggactgaacctgcggcgcatttacgtcaggccatcatcaaaaccctgctgatgggcgacgatccgggctctatcgatctctactctgatgccgatgacattactatctccaaagagccgttcctgtatgggcaggtcgttgaccagaccggtcagccgattcgctgggaaggtcgcgcgacgaacttcgcagactatttgctgcaaacgcgcctgaaaagccgcaccaatggcctgaaggtgatctatagcgttacgataaacctggtgccgaaccacctcgacaagcgtgcgcataagtatctgggcatggtgcgtcaggcgtcgcgtaagtatggcgtggatgagtcgctgatcctggcgattatgcagaccgaatcctcgttcaacccgtatgcggtgagccgttccgacgcgctggggctgatgcaggttgtgcagcacagcgccggtaaagacgtgttccgcgcgcaggggaaatccggtacgccgagccgcagctacctgtttgacccgcaaagcaacattgataccggtaccgcatatctggcgatgctgaacaatgtttatctcggcgggattgataacccgacttcacgtcgctatgcggtgatcaccgcctacaacggcggagcgggcagcgtcctgcgcgtcttctcgaacgataaagtgcaggccgcgaacatcatcaacagcatggcgccgggggatgtctactcaaccctcaccactcgccacccgtctgcggaatcccgccgctatctgtataaggtgaatacggcgcagaagaactatcgtcgtcgctag

SEQ ID NO: 525123 - DNA, 1257 bp, Stenotrophomonas maltophilia
atgaaccttaagctgcagcttaaaatcttgtcgtttctgcagttctgcctgtggggtagctggctgactacactcggctcctatatgtttgtgacgctcaagttcgatggtgcgtcaatcggtgccgtctacagctcgctgggtattgcggctgttttcatgccaacgctgctcggtatcgtggcggataaatggttaagtgcgaaatggctgtatatgctttgccatctggtgggtgcggggacgctgtttatggcggccgaagtgaccacgccgggggcgatgtttatggtgatcctgcttaactcgctggcgtatatgccaacgcttggcctgatcaacaccatctcctactaccgcctgaaatctgccggtctggatatcgtcaccgacttcccgccaatccgtatctggggcaccatcggctttatcatggcaatgtggggcgtgagcttcgcgggcttcgagctgagccacatgcagctgtatattggtgccgcgctctccttgctgctggcgctgttcaccctgacgctgcccaccattccggtttctaaccagcagaaaaaccagagctggagcaccatgcttggcctggatgccttcgccctgttcaaaaacaagcgcatggcgatcttctttattttctccatgctgctgggggcggaactgcaaatcaccaacatgttcggtaataccttcctgcacagcttcgataacgatccgctgtttgccgggagctttatcgttgaacacgcgtcggtgatgatgtccatctcgcagatctctgagacgctgttcatcctgaccatcccgttcttcctgagccgctacggcatcaagaacgtcatgctgatcagtatcgctgcctggatgttgcgcttcggtctgttcgcctacggcgacccaagcgcgttcggtaccgtgctgctggttctgtcgatgattgtttacggctgcgccttcgacttcttcaatatctccggctcggtgtttgtagaaaaagaggtgaaacctgaaattcgcgccagcgcgcagggcatgttcctgatgatgaccaacggcttcggctgtattctgggcggcgtggtgagcggtaaagtggttgagatgtataccaccaacggcatcaccaactggcagccagtgtggctgatcttcgccgggtactcactggtgcttttcttcgcgttcatcgtgctgttcaagtacaagcacgtacgcgaaccacacggtgcacagccgatcgcgcattga

SEQ ID NO: 525124 - DNA, 804 bp, Stenotrophomonas maltophilia
atgactggtttggtcgcgactaaaccgcgcccggttgatgttcctgcgcttgccgcagaggcgctgtggcaggagctggagctgacgcccaaaccggggctggtggacaggctcaataacggctcccatcgcgatatggaccataccttattcctccgcagcattgcggcgattacgccgtggtttgcccgttttgcggaactgggtgaagcacatgcggaaaaacctgctggagagcagctacggattatccgcccgatgggaatggcctgtgagcaggcgatgtacgccgccacgggcggggtgaacacgcacaagggcgggatttttgcccttggtttgctctgcttcgccgccggacgtgtgaaaaatatctctgcggatagcctctgttgtgaggtaagtaacatctgtcgtgggctcgtggcgcgggaactgggcgggcgcagcgggcaggcaacggcgggagagcgacagtttcaacagtacggtttaaccggcgcgcgcggtgaggcagaaagcggcttcagcacggtgcgtaaggcgctggcgcagtggaagggaaacacccttcatgacctgttattgcgcctgatggccatcaaccaggacagtaatctcgtttcgcgcggcggcactgaagggctgcgctacgtccagggttatgcgcaggagctgctggcgaacggctgggatcaggatgcgttgcttaggatggataacgcgttgattgaacgaaacctgagtccgggcggcagcgcggatttgctgtcggtggggtgggtgttgtctggaataaaatag

SEQ ID NO: 525125 - DNA, 540 bp, Stenotrophomonas maltophilia
atgactactgcgacacccgtgcggacgggtgtcagcctggacgcgctgctggcggcgaaagagcgccgcgcagcccgtcaggctgactggcttacgcaccatcaacaaccggtgatctccctaacgctggtcacgcccgggcaaatcaaagacagcctgcgctatcgcaacaccatgggcgtggcgttacagatgtgcgaccagctgctgtgggaaaaccgctggcaggtgctggatcgccaggtgctctggctacccaccggacctgaagcgctgtggtgcgtcgcgcatccggcggcggaaattaaagcgcactgtgctgaactggagcagacgcacccgctcggcagactgtgggatctggatgtgatctgccctgaaaacggccacgttggccgtcagtcgttgggttcacacctcaggcgctgtctgatttgcgacgagcctgcccacgcttgttcccgttctcggcaccatcccgttgagcaggtggtttcccgcgtggagaagatgatagatgactggtttggtcgcgactaa

SEQ ID NO: 525126 - DNA, 1518 bp, Stenotrophomonas maltophilia
atgaatcagacagaacttctccatgtgaatttcccccatctgcgggatctgaagccttttgataccgcccacagcgcgacgccgtggctggcggacagcgaggcgaaacacaaccgtaagctttgcgcctccctcgaagaagccgtcatgcgcagcggcttgcaggacgggatgaccatctctttccaccatgcctttcgcgaaggcgaccgggtgatcaacaccgttgtggcgctgctggcgcggatgggttttaaaaatttgaccctggcctccagctcgctgatgacctgcaacgacgcgctgatcgagcatattcaaaacggcgtgatcgcccgaatttatacctccggtatgcgcggctggctggcggaggccatctcccacgggctgatggacgagccggtacaaattcactcccacggggggcgcgtgaagctgctccaggatggcgagctgaatatcgacgtggcatttctcggcgtgccgtgcagcgatgagtttggcaacgccaacggcacgcagggcaaatcgtgctgcggttcgctgggctacgccatggtggacgcacactttgcccgtaaggtggtgctgctgaccgaagagctggtgccgttcccgaatatgcccgccagcctggtgcaggatcaggtggactacatcgtgcaggtggagagcgtgggcgacccggcgaaaatcagcgtcggtgcggcgcgcgtcaccagcaacccgcgcgagctgatgattgcccgctatgcggcggacgtgattgaacactctggttactttaaaccgggcttctcgatgcagaccggctccggcgcggcggcgaccgcctgcacccgctttatggaagagaagatggagcgcagcggcgtgaaggcgcgcttcgcccttggcggtatcaccggcagcctggtggatttgcacgagaaggggctcatcgaaaagctgctcgacacccagtgctttgacggccaggcggcggcctcgctggcgcgcaacccgaaccacgtggagatctccaccaacgtctacgccaaccccggcagcaaggcggcaagctgcgaccagctcgacgtggtgatcctcagcgcgctggaaatcgacgtcgattttaacgtcaacgtcatcaccggatccgacggcgtgatgcgcggcgcatccggcgggcactgcgacgtggcgtcggcagccaacctgaccattgtggtcgcgccgctgctgcgaagccgcatcccgaccgttgtgaagcgcgttaccacgcgcctcacgccgggggagagcattgacgtgctggtcaccgaccacggtattgcggtcaacccggcgcgcccggagatccgcgaacgactcatggaagcaggcctgaaggttgtagatatcaacgcgctctatgagcgggcgatttccctgaccggcgtaccgaaaccgattgagttcaccgacaaaattgtcggggtgatccgctaccgcgacggcagcgtgatcgacaccgttcgacaggtaaaggagtga

SEQ ID NO: 525127 - DNA, 876 bp, Stenotrophomonas maltophilia
atgagcaaactccgccgcagtatgctgttcctgccgggcgccaatgccgccatgctctccaccgcctttatctaccgccccgactccatcatgtttgaccttgaggacgccgtggccctgcgcgagaaagacaccgcacgcatgctggtgttccacgcgttgcagcacccgatgtatcaggatatcgaaaccgtggtgcgtattaacccgctgagcacgccgtttggcctgctggatctggaggccgccgtgcgcgcgggcgtagacgtgattcgcctgccgaaaaccgacaccccggacgatatctacgagctggaaggccacctcgagcgcattgagcaggagtgcgggcgtgaagtaggttccacccgcgtgatggcggcgattgaatcggccattggcgtcatcaacgccgtggcgattgcccgcagctccccgcgcctgatcggcatcgcgctggccgcctttgactacgtaatggacatgcagaccgagcgcggcgacggcaccgagctgttctacgcccgctgcgccgtgctgcacgccgcccgcgcggcaggcatcgacgccttcgacgtggtgtggtcagacgttaacgacgaagccgggttcctgcgcgaggtcgatctgatccgcaagatgggctttaacggcaaatcgctgattaacccgcgccagattgacctgctgcacaacgcctacgccccgactcaggaagaggtggatcacgcgaaacgggtgattgaagcggcagaagagggcgagcgtaacggcctgggcgtggtctcgctcaacggcaaaatggtggatgcaccgattattaaccacgcgcaggtggtgctggagcgcgcggcggcctccggcgtgcgtcggtaa

SEQ ID NO: 525128 - DNA, 294 bp, Stenotrophomonas maltophilia
atgaatattgtaagggaggcgctggccggaacgcaggagtccagcgacctgatggtgaaaatcgcccccgctcacggtgagctggagattgtcatccacagtgaagtgattaagcagtttggcgagcaaatacgccaggtggtcaacgacacattgcgcgccatgaacgtgcaccagggattaatcattattgaagacaaaggggcgctggactgtgtgatccgcgcccgcctgcaaagcgcgcttctgcgtgcagccgatgaacaggccatcaactggggggcgctgaaatga

SEQ ID NO: 525129 - DNA, 1023 bp, Stenotrophomonas maltophilia
atgcaatcgcaacccattgattttcgccacaccgttgtggcgaaacacccggaacgcttaagccagatccgctacctgctggcagacagcggccttggcctggacaacgacatcacgctgtttgttgaagcctggtccggcgcgcagctggtgggttgcgccgggcttgctgccaacgtcatcaagtgcgtggcggtcaacgagcagcttcgtggggaaaacctcagcgcgcgtctgctggcagaggtggaaaatgcggcgctggagcgcggccattttcacctcttcctctgcacccgtccgtgcaataaggaacgctttggccgcagcggtttctggccggttgcccagagcgggaacaacgcggtgctaatggagaacactccgcaagggatcgtgcgctactgccgatccctgcgcgctagccgcaagtgtggggagaagattggtgccatcgtgatgaacgccaacccgttcaccctcggtcaccgtcatctggtggagcaggcggcggcgcagtgcgatgctctgcatctgttcgtggtgcgtgaagacgcctcgttcttcccgttcagcgcgcgccttgagatggtgcgcgcgggcgtggcgcatctgtcgaacgtggtggtgcatgaaggctcgcagtacatcatctcccgcgccacgtttccggcctacttcctgaaggagaccggcaaagtgcagcaggcgtggagcgagatcgacgtgctgatcttccgggactttatcgccccggcgctgggcatcacgcaccgcttcatcggctcggagccgttctgcgatatcacccgccagtacaaccagacgctgcacgacctgctggcctcgcacatcgacgtggtggagatgccgcgcatcaaagccaccggcaacgctatttcggcctcggaagtgcgccgtttactcaagacacagcagttttcccggatccgggagattgtcccggactccaccttcgcgcacctcgaagcacattatcgtgcgagtgcggaagtcgcataa

SEQ ID NO: 525130 - DNA, 864 bp, Stenotrophomonas maltophilia
atgaaactcgcaagctttttataccagggtaaacgcagctacggcatcgttcaggccgggggcgtgattgatttaggccgccgcatgggcgaccgctatggcgaccttaaagcgctgttgcaggggaacgggctggcgcaggccacccgttttctgaacgacgcggtggatgtaccgctgaacgccatcaccttcttaccggtgattgtccagccggaaaaaattctctgcgtgggcatgaactatgccgacaagcgcaaggagtttgatcagcataacccggccccgaccctgtttgtccgcttcccggattcacagaccggccacaacgagccggtgctgaagccgcgccactccagcgagttcgactacgaaggcgagctggcggtgatcatcggcaaaggcggggagaacatcagccgcgacgacgccctgcgccacgtggcgggctacagctgctacatggacggctccgcccgcgactggcagcacacctggttcaccgccgggaaaaactggcggcagaccggggcgttcggcccgtggatggcgacggcggacgagatcccggacccgcacagcctggcgatccgcacctggctgaacggccgcatggtgcaggaggacaacaccagcagcatgatccacaaggtggcggagctgatcgagtacatcagcaccttcacccgtctcagcccgggcgacgtgatcatcaccggctcgcctggcggggtgggtaaaaagcgcaacccgccactgtttatgaaggagggggatcgcattgaggtagagatcgagcatatcggtcatctgagcaacgtgatcgtggaagcgccagccgtcgggctcgcggcagcgcactga

SEQ ID NO: 525131 - DNA, 1362 bp, Stenotrophomonas maltophilia
atgagcacaactgacgattcattctctgttacccacgatccgattgatattcagcggccatcgctcaaagagcgctggtggcatattatggatacctggaaaatcggcattattcctctgccactgttcgttctggcgggcgcgctgattgcgatagattgcctgggcggaaaactgccgagcgacatcgtagtcatggtggccacgctggccttcttcggctttgcctgcggtgagttcggcaaacgcctgccgattgtcggcaagctcggcgcggcggcaatttgcgccacctttatcccttccgcgttggtctattacggcctgctgccggacgtggtggtagagtccacgaccaaattctataaatccaccaatattctctacctctatatctgctgcattatcgtcggcagcatcatgagcatgaaccgcaccgtgctgatccagggcttcctgcgcatcttcttcccgatgctgtgcggtgaaatcgtcggcatgattgtcggcatgggcgttggactagcgctgggccttgagccgttccagatcttcttctttatcattctgccgatcatggcgggcggcgtcggagaaggggcgatcccgctctctatcggctatgccaccctgctgcacatggatcagggcgtggcgctcggccgcgtgctgccgatggtaatgctcggcggcctgacggcgatcatcatctccggttgcctcaaccagctcggtaaacgctatccgcacctgaccggtgaaggccagctgatgcctaaccgcgccaacgccgatgccaccgtctctcaacccgcgttctccggcaaagcggatgtgaccaccatcgcctccggcgcgctgctggcggtgctgctgtacatgctgggcatgctcggtcacaagctgattggtctgccagcgccggtcggtatgctgtttatggcggtgctggtgaagctctgcaatggcgcctctccgcgtctgctggagggttctcaggtggtgtacaaattcttccagacctccgtgacctacccgattctcttcgccgttggcgtggcgattaccccatggcatgaactggtggcggcgttcaccgtcagcaacctgctggtgattatcagcaccgtttccgcgctggtggcaaccggcttcttcgttggcaaaaagattggtatgcacccgattgatgtcgccatcgtctcctgctgtcagagcgggcagggcggtaccggtgacgtggcgatcctgaccgcaggcaaccgcatgagcctgatgccattcgcccagattgctacccgtatcggcggggcgattaacgtctctgtctcactgctgattctgggcaacttcctcgtttaa

SEQ ID NO: 525132 - DNA, 1638 bp, Stenotrophomonas maltophilia
atgaaagtatcgtttcagatcaagctgtttatttcgctggtcgcctttttctcagtgctgttcgcattactgggcggatattattatgtcgatgtcggcaggcagctttatcaggaaatgagcgcgcgcgcaaaaatacaggccgaagaaattgcgcttattccttctctgcgaaaagaagtcgaacaaaaggatatccagggcatccatgactttatgcagaaaatagccgcccgcagcgacgccagttttattgtgattggtgacaataaagggctgcatcttttccattccgtgtttgccgaccgggtaggcaaaacgctggttggcggagacaacgacgaggtattacacggcaaaagcaccatcaccatccgcaagggcgggttaggcatttcgctgcgcagcaaagcgcccatttttaatgatgccgggcaggtggtggggattgtttcggtaggctatctcacaagctatctggacaccatcaccgtcagcaaggtggttaatatcctgattgccgccgtgctgctgcttatcgccctgtttattttctcctggttcttcacccgcagcatcaagaagcagatattctctctggagccgcgcgaaatcggcctgctggtacgtcagcaaaaggcgatgatggaatccatttatgaaggggtgattgccatcgacgacgatctccgcattgaggtgattaaccaggcggcgcgtaaattattaggcttacgccagcccgcccgcgaactgcggggtcaactcatcagccaggtgatcgcgcccgtcccgttctttaacgcgcaaaccatgcttgcgaaagacacccacgatgagatctgtcgctttaacgatctcacggtcattgccagccgggtgcggatcatgctggaagatgcgttgcagggctgggtgatcacctttcgcgatcgcaacgagatcgactcgctcagcgcccagctcagccaggtgaagcgctatgttgataacctgcgcatcatgcgacatgaacagctgaaccgcatgaccacgctgtccggcctgctgcatatgggccgttatgacgaggcaattcgctatatacaggcgcagtcggaacacgctcaggagctgctggactttatctcgtcccgctttagctccccgacgctgtgcggtttgctgcttggaaaggccgcccgagcgcgtgaaaaaggcgttgagctgagcttcgatccagcctgccgggtggacaaacccttcctgccgctgctcgaatcggaactagtctcgatcatcgggaacttgctggataacgccatcgaagcgacccagcgcgccccgctcccgcatgccccggtagacgtgctaataaagttgaacgagcaggaactgattattgaagtcgccgaccagggcgtcggcatcacaccggagatccgcgaccggatctttgagcgcggcatcactaccaaaacgcgcggcgatcacggtattggcctgtatctgattgaaagctacgtcacgcaggctggcggtgcaattgaagttgccgataacaccccacgcggtgccattttctcactgtttattcccgccacgggaacggtccggcaccccgtacaggaactggaagataccgactatgcaacatga

SEQ ID NO: 525133 - DNA, 693 bp, Stenotrophomonas maltophilia
atgcaacatgaacttatcgacgtactgattgttgaagacgagaacgaactggcgcaactgcacgcggagcttatcggtaaacatccgcgcctgaggctggtggggattgccgcgtcactggccgacgcgcaggtacaactggagagcaaacagccgaagctgatgctgctggataactatctgccggacggcaaaggcatcacccttatcagcaacccgatgctcacccgcgccaactgctcggtgattttcatcaccgccgccagcgatatggacacctgtagccaggccattcgtaacggcgcgttcgactacatcctcaagccggtttcctggaagcgcctgagccagtcgctggaacgttttgtgcagtttgccgaacagcagcgcgtctggaagattgtcgaccagcagaacgtggattcactctatcagctacaggcgaaaaattatcgactggactacggcagcaaagggatagaggagaacacgctggcgcgggtgcaaacgttgtttaacaacaaggcggcgcactgctttacggtggatgaggtggtgagcgagacgggcctgagtaaaaccaccacccggcgctatctggaacactgcgtggaggtgggttttctgacggtggagatgctgtacgggaagattgggcatccgagaaggatgtaccggcgtagtgcgacttaa

SEQ ID NO: 525134 - DNA, 2136 bp, Stenotrophomonas maltophilia
atgaaaaccatgaaaattgccgtcagccgtgagctggtatccaaagtttctacgcatcgcgaaaaggttatgctggataacaccgatttcaccgatgtggcggcagtcgtcattacggttgttgaaagctacagcggcattcttgcgttgctgaagcgtacgggctttcagctaccggtatttatgttctcaacagagccaggagaggtgccagagggtgtcacggcgatcatctcgggtaaagcacaagaattgctggaactggaatctgccgcctgccggtatgaagagaacctgctgccacccttttttgacaccctgagccagtatgtggcgatgggaaacagcacctttgcctgtccgggtcaccagcacggcgcctttttcaaaaaacatcccgccgggcggcagttttacgacttcttcggtgaaaacgtgtttcgtgccgatatgtgcaatgccgacgtgaagctcggtgatttgctgatccacgaaggttctgccaagcacgcgcaaaagttcgcggcgaaagtgttcaacgcggataaaacctacttcgtgctgaacggcacgtcggcggccaataaagtggtggccaatgcgctgctgacccgtggcgatctggtgctgttcgatcgtaacaaccataagtccaaccatcatggggcgctgatccaggccggggcaacgcctgtctatcttgaggcagcccgtaatccgtttggttttatcggcgggatcgatgaacactgctttgatgaggcctggctgcgggaactgatccgtgacgtcgcgccgcagaaagccgccgaggcgcgcccgttccgtctggcgatcattcagctcggcacctacgacggcacgatctacaacgcccgtcaggtgatcgacaagatcggtcacctttgcgactacatcctctttgactccgcctgggtcggctacgagcaatttatcccgatgatggcggaaacgtctccgcttctgctggaactgaacgagaacgatccgggaattttcgtgacccagtcggtccacaaacagcaggccgggttctcgcaaacctcacagatccataaaaaggataaccatattcgcggtcaatcgcgcttctgcccgcacaagcggctgaacaatgcgttcatgctgcatgcctccaccagcccgttttacccgctgtttgcggcgctggacgtgaacgccaagatccacgagggtgagagcggacgcaggttgtgggctgaatgcgtcgagctgggcattgaagcgcgcaaggccatcatcgccaactgcaatatgatcaaaccctttatcccaccggtggtggcgggtcggccatggcaggatcaccccacgcaggctatcgccagcgagcgtcgcttctttagttttgaaccgggtgcaaaatggcacggttttgaaggctatgcccgcgagcagtatttcgtcgatccgtgcaagctgctgctgaccacgccgggcattgatgcggaaacagggcactataccgatttcggcattccggcgaccattctcgcccactacctgcgcgaaaacggcattgtgccggagaagtgcgatctcaactccatcctgttcctgctgacgccagccgagagcgcggagaagctaatgcagctggtggcgatgctggggcagtttgaacagcatattgaagacgatacgccgctcgtggatgtgctgccgaccatctatcagaaatacccggtgcgttaccgcgactatacgatccgtcagctgtgccaggagatgcacgatctctacgtcagctttaacgtgaaggatttacagaaggcgatgttccgccaggagagcctgcctgccgtggtgatgaacccgcaggatgccaaccaggagtacattcgcgggaacgtcgaactggtgcgtattcgtgacgccgaaggacgcattgccgccgaaggtgcgctgccatacccgccgggcgtgctgtgcgtggtaccgggggaagtctggggtggagcagtacagcgctacttcctggcgctggaagagggcattaatatgctgccgggtttctcgccagagttgcagggcgtttacagcgagaaggatgccgacgggatcaagcgactgtatgggtacgtgttaaagtag

SEQ ID NO: 525135 - DNA, 714 bp, Stenotrophomonas maltophilia
gtggtgattggaccctttatcaatgcgggagccgtattgctgggcggtgtacttggggcagtattaagccagcggttgccggagcgtattcgcgtctccatgccctccatttttggcctggcgtcgttagggattggtatccttttagtggtgaaatgcgccaacctgccggtgatggtactggcgacactgctcggcgcgctgatcggcgagttttgctatctggaaaaaggcattaatcacgcggtaggcaaagccaaaaatctgattgcccgaccgggcaaggcaaagcacggcacgcacgagtcgtttattcagaactacgttgcgatcattattctgttctgcgccagcggcacggggatattcggttcgatgcaggaagggatgaccggcgatcccagcatactgattgcgaaagcgtttctggatttctttactgccaccatctttgccaccactctcggcatcgccgtcgccgcgatttgcgtaccgatgttgcttattcagctggcgctggccacctgcgccacgctgatcttgccgctgacgacgcctgcgatgatggcggactttaccgccgtcggcggcctgctgctgctggcgacagggctgcgcatctgtggcatcaagatgtttgcagtggtgaacatgctccctgccctgctgctcgcgatgccgctttccgcgctctggacgcactttttcgcttaa

SEQ ID NO: 525136 - DNA, 369 bp, Stenotrophomonas maltophilia
ttgctggtggaaggtaatggcgttatcccggatgttacagtatcggatttgggtaatgtgcagagtatacgaaatgaacttattggactgggctggtgggtgaagttcggtgtaccgctggactggcagcgtatcaatctgcaacacaggcctgtcagttttggccttttgtccgaccttaatcgttgtttcaggcatgacggccagcaggctgaacctctgcccctttatacaacaggcaattccgatgaactgcggaaggtgttggaaaagtacagctaccggctgcgtatcgcatcttcagaagtggttgaggatgtaacggtgttgcgctgttttattgaaaccggagtgatgaatgtccagtga

SEQ ID NO: 525137 - DNA, 960 bp, Stenotrophomonas maltophilia; identical to SEQ ID NO: 144576

SEQ ID NO: 525138 - DNA, 909 bp, Stenotrophomonas maltophilia; identical to SEQ ID NO: 144577

SEQ ID NO: 525139 - DNA, 330 bp, Stenotrophomonas maltophilia; identical to SEQ ID NO: 144578

SEQ ID NO: 525140 - DNA, 1182 bp, Stenotrophomonas maltophilia; identical to SEQ ID NO: 199456

SEQ ID NO: 525141 - DNA, 720 bp, Stenotrophomonas maltophilia
atggaaaaaccttcacgggttttagcaaattccagcaccgcgcttgaccagttgcgcgggcttatcaaccagcacgagtcaacaccaggcactccgctgcccactgaacgtgagctatcggaaacactcggcgtaggacgacgcgaagtgcgtcgcgcgctggacgtgctggaagaagaagggcggatctggcgcaagcagggcaaaggtaccttcattggtccggctgcccctgttgagccgttggcgcttcagggattggttcagcaaaccaacctgctggaagtcatggaagctcgactacagctcgaacccggcttagcccgacttgcggcactgcgtgccaccagggaaaacctcgcgctcatgcagcgcatgctggaacgcattgacaaggtcagcccggatgaccgcgatcttaacgaactgtgggatagcgcctttcatcgcgccattgcggaagcagccggcaaccgcctgatgctagggcttttcgatgcgatagatgccgtccgccgggagcccggctggcagtatttacgcgagcttgcccgcacccccgaacgtgtcgacaactacaacgaccaccatcacaacatcatgtcagcgattattcatcgccagcctaatgaagctgcggccgccatgcgcgaacacctgctcagcctgcaaaccgccctgattcaggccatccaccttgaggacgattccacgctatga

SEQ ID NO: 525142 - DNA, 1014 bp, Stenotrophomonas maltophilia
atgacgacgataccctttaaggactccatgcccgtactgcggctgcaaaacctcaacgttaaattcgcgggctcgccggtaagcgtgctcgaagacatctcgctgacggtaagggcgggcgaaacgctggcgctggtgggcgagtccggctgtggtaaaagcatcacttccctggcgctgatggggttattgcctgccagcgccaggatcgtcagcggggagatgcacttccgccgccacgatctgcgcaagctctcgccgcgcgagtatgccaatctgcgcggcagcgagctggcgatgatattccaggagcccatgacctcgctcaacccggctttcacgcttggcgatcagctcagtgaagcggtgatgcgccatcaaacgctctcccgggctgaggcgatgacggttgcgctacagatcctggagaaggtgcagatcccggccgcagagatgcgccttaaggcttacccgcatcagctttccggcggtatgcgccagcgcgtgatgattgcgatggcgctgataaaccatcccaaattactgatcgctgacgaacccactaccgctctggacgtgaccattcaggcgcaaattctcgctctgctcaataccttaaaagaagaaacgggcacggcggtgctgatgatcacccacgatttaggcgtggtggccgaagtggcacagcaggtggcggtgatgtatgccggccaggtagtagagcagggaagcgtcgaggcgatatttgccgacccgcagcacccgtacacaattggcctgatgggctcgatcccctcccttggcgtacgcaagggccagctttccaccattcccggatcggtcccgctgccggaatctatgcctcagggctgccgcttcgccacccggtgtcccttcgcgcagacgcgctgtcatgctgaaaaaccaccgctcactatgctcggcacgggtcatcaggttgcctgcttccgcgtgccgctggaacaacacattgtcctgggagaaattgcatga

SEQ ID NO: 525143 - DNA, 1083 bp, Stenotrophomonas maltophilia
atgaccacgcccattcttgaagcccgggatcttagcaagcttttccccagcccgaaaaaactgtttacgccggcccgctttgtcacggctgttgaccgcgtttcactgtcggtgctgccaggcgaaacgctggctattgtcggcgaatcaggttccgggaaatccaccctcggccggctgctgctgcgcctgctgggcgccagcgaagggcgcgtattttatcagggtgaggagatcacccacgcctcaggcgcacgtctgaaccagctccggcgtgagctacagatcatctttcaggatcccttcgcctcgctgaacccgcgcatgacggtagaacagattgtcggtgagccgctgtggctgcaccagaacatgaaaaaagcggatcgccagtaccacgtcgccgagctgctcaggacggtcggcttgcccgcggcctgggccggacgttatccgcacgaattttccggcgggcagcgtcagcgtatcggcattgcgcgcgcgctggcgtcaggcccaaagctgctgctgggcgatgaaccggtttccgcactggatgtttccgtccaggcacaggtggtcaatttactggaaagcctgaagcaccagttggggctaacgatggtgatcgtcgcccacggtctggcggttatccgtcatatgagcgaccgcgtggcggtgatgtatcttgggcaaatcgtcgagctggccaccgtcgacgatatcttcgacgcgccgctgcatccttatacccaggcattaattgcctctgcgccgcaaatgcagccaggcgtagcgcgggatgcgccgctgttgcagggtgatttaccgaacccggctaatccgccctccggctgccgtttccacacccgttgcccctatgttagcgatgaatgtcgtcaggttgagccgattcatcaggtaatcgacggcggacgtcaggtcgcctgccaccgctggcaggagattaatcgcgatcgcagcgttatacagatcgcaccgccatccgccgcatttttgcgccgccgcgcgctgtttgaacacgcggctactcactcctcccttccttcaaggaactcatga

SEQ ID NO: 525144 - DNA, 1515 bp, Stenotrophomonas maltophilia
atgacaatgcgtaattctcttttgaccgtactgggaagtgttatgttgcttggcgcggcgctgcccgcccattctgaaagcgtgctgcgaatcggcctgggtgcagatccggacatgctggacccacatctggcgcgtacctattatggccgcttcgtctttgcctccctgtgtgaccggctggtggacgtggacgagcacctcaaggtggtgccgggactggcgaaatcctgggcgtggagcgatgacggcaaaacgctgaccctggatctccgtgaaggcgtggccttccacgacggtgaaaaattcgatgccgccgccgcgaaatacaacctcgaccgggccctgacgctaaaaggctctctgcgtaaaagtgaactctcttctgttgagtcggtggaggtcaccggcccgatgcagatagccctgcacctgaaaacgccggatgccgcacttctgatgcagctcaccgatcgcgcaggcgcaatgatggcgccggaagccgcgaaaaaagccgattttgccgcccatccggtctgttccggcccgtataaattcgacagccgcgtgtcgcaggaccgcattgtgctgacccgcttcgacaactactggaacaaagacgcctatcacttcgataaaattatctatctgccgatcccggatgcctccgtgcgcctggcgaacctgcgcgcgggcgatctcgacctgaccgaaggcattgccgccagcgacgtcaaaaccgtcgaagccgacagcaagctggcgctggcgaaggtgacgggcctcggataccagggcatcaccttcaatattaacaatggcaaagtcccggcgaacgatcccttcaaagatgcccgcgtgcgtgaagcattttcccaggccatcgatcgcgatgctttaaaccaggtagtgttcgaagggctttacactccggcaaaccaggcgttttcgccggtaagcccgtatcacgtcaatttcccggttcccccgcgtgacgtcgacaaagccaaagcgctgctgaaagccgcaggcgtcaccgcaccgctgaccgtcaatctactggtgccgaacaacccaacctcgcagcaggtgggccaggtattgcaggcgatggtggcagaggcgggctttaacctgaacctgcaaatgaccgagttcgccacgctgctggatcgccagcagagcggtgactaccagttgagcttctccggctggtcgggtcgcccggatccagatggcagcatctacggctttatcaacagcaaaggcaccctcaacgacggccgctacagcaatgctcaggtggatgaatggctgacgcaggcgcgccagagcaccgatcaggccgctcgccagccgctgtatgacaaggttgtgaagcagcttcagaccgatatgccgattgcatacctttacttcgaaccgcgcatttttggcctgaacaagcgcgtgcagggctttaaagcgtacccggacggcattgtgcgtctggctggcttaacgctggcgaaataa

SEQ ID NO: 525145 - DNA, 942 bp, Stenotrophomonas maltophilia
atgctggaactgatttgcaaacgtctgctgctggctatacccactctgctgttggtgagcatgatggtgtttggcctgcaaaagctgctgcctggcgatccgctgattgccatggccggggaggagcgcgatccggcggtgatcgcccagctgcgtgctgagctgaatctggacgcgccgatccccgtgcagtatttcaactggctgacgcgggcgctgcaaggcgatctgggtgtctccttacgcactcatgagccggtcacgcaactgattgccagcaagctgccggtcacgctggaactgtcgctgctggcgatgattatcgcgctggtgtttggtatcagcatggggatcctcgcggcggtgaacaaaaacagctgggtcgatcacggggcgaactttgtggcgatctcggggatctcaataccgcacttctggctggggatcctgctgattctggtcttttcagtaaacctgcaatggttgcctgcgtccggttatgtgtcgttcagtgaagatccgatccagaacatgcggacattgctgctgcccgcgtccgtgctcggaaccggcctggcggcgacgctgatgcgccatacccgcgcgtcgatgattgcggtgctgaaagcggattacatccgcaccgcgcgcgctaaggggctgctgccgaaagcggtgatcctgaagcacgcctttcgcaatgcgctggtgccggtgatcaccctcaccacgttgctgttcggcgagctgctgggcggggcggtgctgaccgagcaggtgttcaccattccgggcttcggcaaaatgatcgtcgactcggtgttcaaccgcgactacgcggtggtgcagggcgtagtgctgatcgtggcgatcggtttcctgatgctcaacctgctggctgacgtgctctacgtccttatcaacccgaaaatgcgaggttaa

SEQ ID NO: 525146 - DNA, 876 bp, Stenotrophomonas maltophilia
atggcggaactgacgacgcaaaccgtggcgcccgcgctgccgcgcgcgcaaaaccgggtgctgaaaaaattcctcgccaataaaagtgcggtgattggcgcgattgtggtgggcttttttgtgctggtggcgctgctggcgccgtggatcgcgccatttgacccggtcaaagctaacttcctcgcggtgcgcaaagcgccatcggcgatgtactggttcggcaccgacgagctggggcgcgatatcttgtcccgcattatctggggggcgagaacctcgctgatggcgggctgtatgtcggtggcgatcgcggttgtcatcggcgtgccgctggggctggtggcgggttatttccagaagatgtgggacggggtgatctcccgctttattgaggcactgctggcctgtccattcctgatcatggcgatcgcgctgggggcattcttaggcccaagcctgacgaatgccatgatcgctattggactctcggcaatgccgatcttcgcccgcctgacgcgcggccaggtgatcgccattcgcaacgaagagtacatcgacggcgcgcgggcgattggcctgccggaccgctggatcatcattaaatacgttctgcccaacgtgatgtcacctatcctggtgcaggccacgctggccattgcctcggcgattatcgccgaagccagcctttcgtttttagggttaggccaacagccgccgaacccatcctggggctccatgctcaacaccgcaaaagggtttctcgaacaggcgccgtggatgtcggttttccccggcgtggcgattttccttgccgttcagggctttaatttactcggcgacgggctgcgcgatgcgctcgatccgcgccacgactaa

SEQ ID NO: 525147 - DNA, 1602 bp, Stenotrophomonas maltophilia
atgaccaaaacgctcgattttacaaccggttacgattcacgacgcccgccgatgatgggccataacgccgttgccacctcgcagccgctggcggcacaggcgggaatgaagatgctacagctgggcggaaatgccgttgatgcggcgattgcaaccgccatggcgctgaccgttgtcgagccgaccggcaacggcatcggcagcgatgcttttgccattgtctgggacggtgaaaaacttcacggtctgaatgcgtccggtcgttcgccagccagctggcatgcggatctgtttgccggaaaaaccgccgtaccggaaatcggctgggacgcggtgaccgtgccgggtgcggtgtcgggctgggtggcgctggctgaacgttttggcacgctgccgctgaccacgctcgcgcagccagccattgattacgcgcgtaacggtttcccggtctcgccgctgatcggccatctctggcagcgcggctacaacaagctgaaagatcagcccgggtttagtgcctgctttgcgccggaaggccgcgcgccgcgcgtgggggagatcttccgtaacccggcgcaggcgaactcactggagctgatcgccaaaaccaacggcgacgcgttttaccgtggcgaactggcgcagaaaattgccgccttcgccaaagcacatggtgcacacctgaccgaagcagacctggcgaatcaccgtgtggactgggtggaactgctatcgcgcgacttcgcgggcggttcggtgcaggaattgccgccaaacggtcaggggatcgccaccctgattgcgctcggcattctggagcagtgcggcatcgagaaacatcacccggattccgtgcaggggctgcacctgtctatagaggcaatgaagctggcgctggcggatctcgatcgctacgttgcggatgaagagcatatggagtttgccgccaaagcgctgctgagcgaccattatctgaagtcgcgcgccgcgcttatcaatcacgataaagcctctgattttgtgtacggatcgccgacgcagagtgggacggtttacctcagcgcagcggattccagcgggatgatgatctcctttatccagtccaattttatgggcttcggttcagggatcgtggtgccggatacggggatcagcctgcaaaaccgcggctgcggctttgtgctcgatcccaaacacccgaacgcgctggcaggcagcaagcgtcctttccacaccatcattccgggctttgcgatggacggtaacggcaaaccgctgatgtccttcggcgtgatgggcggcccgatgcaggcgcaggggcacatgcagatggcgcttcgcattatgctgcacgggcaaaacccgcaagcggcgattgacgccccgcgctggcgcgtggtgcagggcagggaagtggttgttgaatcgaccttcgatcgcaataccatcgcggcgctgcgcgagcgcggacaccagatagtggtggaagatccgcttcaggattacaattttggcggcgcgcaggtgatttaccgtatgccggaagggcactacgtggctgcgacggagagccgcaaagacgggcaggcgttggtgagctga

SEQ ID NO: 525148 - DNA, 771 bp, Stenotrophomonas maltophilia
gtgcctggtttaaagatttctgttttgcagcaacctttagtgtggatggacggccccgccaaccttcgccattttgatcgccagctggaagagattaccggacgcgatgtgattgtcctgccggagatgttcaccacaggtttcgcgatggaggcagcaaaacagtccatgccgcaggacgaggtggtggcctggatgcacgccagggcgcaggaaacaaacgcgctgattgccggcagcgtcgcgctccagaccgggcgcggaccggtcaatcgcttcctgctggtcgagccggaaggaaacgtccatttctacgataagcgccatctgttccgcatggcggatgaacatcaacattatgaagccggaaacgaacgcgtggtatttgaatggcgcggctggcgtattctgccgctggtctgctatgacctgcgcttcccggtgtggtcgcgcaaccgcaacgattatgacctggcgttgtacgtcgccaactggcccgccccacgctccctgcactggcaggctttactgaccgcgcgcgcgattgaaaatcaggcttatgtcgttggctgtaaccgcgtaggaacggacggcaacgggcatcactatcgcggtgacagccgggtgatcagtccgcagggtgagattattgccaccgccgagccgcatcaggcgacacgaattgacgctgagatctcgttaacggcgttaaaggagtatcgggagaagtttccggcctggcaggatgcagatccatttagcattggataa

SEQ ID NO: 525149 - DNA, 2445 bp, Stenotrophomonas maltophilia
atgatgattttgagcattctcgcaaccgttgtactgctcggagtgttgttctatcaccgtgtcagtttattcctgagtagcctgattcttctggcctggacggctgcacttggcgtcgctggcctgtggaatatctgggttcttgttcccctggccatcattttactgccgtttaacctgacgccgatgcgtaagtcgatgatctctgtgccggtgttcaggggattccgtaaagtgatgccgccgatgtcgcgtacagagaaagaagcgattgacgccggtacgacctggtgggaaggcgatctgttccagggcaacccggactggaaaaagcttcacaactatccacagccgcgtctgaccgccgaagaacaggcctttattgatggtccggtagaagaagcgtgccgcatggcaaacgactttgccatcactcacgaaatggccgatctgccgcctgagctgtgggcatatctgaaagagcatcgcttcttcgcgatgatcattaagaaagagtatggcggtctggaattctccgcttacgctcaggctcgcgtcctgcaaaaactggcgggtgtctccgggatcctggcgatcaccgttggcgtgccaaactccttaggcccgggcgagctgttacagcattacggtacggaagagcagaaagatcactatctgccgcgtctggcgcgtggtcaggaaattccgtgcttcgcgctgaccagcccggaagccggttctgatgccggtgcgatcccggatactggcgtggtctgcatgggcgaatggcagggcgaacaggtgctgggcatgcgcctgacctggaacaaacgttatatcaccctggcgcctatcgccaccgtactcggtctggcgttcaaactttctgacccggaaaaactgctgggcggtgaagaagatctgggcattacctgtgcgctgatcccaacctcgaccccgggggttgaaattggtcgtcgtcatttcccgctgaacgtaccgttccagaacggcccgactcgcggtcaggatatctttgtgccgattgactacatcatcggtggaccgaaaatggccggccagggctggcgtatgctggtggaatgtctgtcggtgggccgcggcattaccctgccgtcgaactctaccggcggtctgaaatcggcggcgatggggattggggcttacgcgcatatccgccgtcagttcaaaatttccatcggcaagatggaaggtatcgaagagccgctggcgcgcattgcgggcaatgcctacgtgatggacgccgcagcctcgctgattacctacggtattatgctgggcgaaaaacccgccgtgctgtcggcgattgtgaagtaccactgtacccaccgcgcacagcagtcaattattgatgcaatggatatcgcaggcggtaaaggcattatgcttggcgaaggcaacttcctggcgcgcggctatcagggcgcaccgattgccatcaccgtggaaggggcaaacatcctgacccgcagcatgatgatcttcggccagggtgcgattcgttgccatccgtacgtgctggaagagatggccgccgcgcagaataacgacgtggatgccttcgacaagctgctgttcaaacatatcggtcacgtttgcagcaatgaagttcgcagcttctggctcggcctgacgcgggggctgaccagcgcgacgccgacccgcgatgcaaccaaacgttactaccaacacctgaaccgtctgagcgctaacctggcgctgctgtctgacgtctccatggccgttctgggcggaagcctgaagcgtcgcgaacgcatctccgcccgtctgggtgatgtgctgagccagatcttcctggcctctgcggtgctgaaacgctacgacgatgaaggccgtcaggaagcggatctgccgctggtgcactggggcgtgcaggatgcgatgtatcaggcggaacaggcgattgacgacctgctggcaaacttcccgaaccgcttcgtggcgggcgccctgcgcgcggtgatcttcccgaccggtcgtcaccatctggcaccgtctgacaagctggatcataaagtggcgaagatcctccaggtaccaagcgcaacccgttcccgtattggccgtggtcaatacctggaacctaccccgcataacccggtaggtttgctggaagaagcgctgcttgacgtgatggccgccgacccgattcaccagaagatctgcaaacagctgggcaaaaacctgccgtttacacgactggatgagctggcaaaacaggcgctggcgggtggcatcatcgacaacagcgaagctgcgattctggtgaaagccgaagagagccgtctgcgcagtattaacgtggatgatttcgaaccagaagagctggcgactcagccggtaaagctgccagagaagcaccgcaaacctgaagcggcataa

SEQ ID NO: 525150 - DNA, 579 bp, Stenotrophomonas maltophilia
atgtaccaggatcttattcgtaacgaactgaacgaagcggcggaaacgctggcgaactttctgaaagatgatgccaatattcacgctattcagcgcgcggcggtcctgcttgccgacagcttcaaagccggcggtaaagtgctctcctgcggtaacggcggttcccactgtgacgccatgcacttcgccgaagagctgaccggacgctatcgcgaaaaccgtccgggctacccggcgattgcgatttccgacgtgagccacatctcctgtgtaggcaacgacttcggttacgaccatatcttttcccgctacgttgaagccgtaggccgtgaaggcgacgtgctgctggggatctccacgtccggtaactccgctaacgtgatcaaagcgatcgccgccgcgcgtgagaagggcatgaaagtgatcaccctgaccgggaaagatggcggtaagatggacggtacagcggacattgaaatccgtgtaccacacttcggttatgcggatcgcgttcaggaaattcacatcaaagtgatccacatcctgatccaactgatcgaaaaagagatggttaagtaa

SEQ ID NO: 525151 - DNA, 768 bp, Stenotrophomonas maltophilia
atgtgcgaactgctcgggatgagcgccaatgtgccaaccgatatctgctttagtttcaccgggctggttcagcgcggtggaggaaccgggccgcataaagacggctggggcattaccttctacgaaggcaaaggatgccgcacgtttaaagatccacagcccagctttaactcacccattgccagactggtgcaggactatcctattaaatcctgttcggtgatcgcccatatccgccaggccaatcgcggcgaagtggcgctggaaaatacccatccgtttacccgtgaactgtggggacgtaactggacctatgcgcacaacgggcagctctcgggctataaatcactggaaaccggcaattttcgtcctgtcggtgaaacggacagcgaaaaagcattttgctggctgctgcacaagctgaccgagcgctacccccgtacgcccggcaacatgaccgcagtatttaagtacatagcgtcactggcgtctgagttacgcgagaagggcgtgtttaatatgctgctgtctgacggacgctacgtgatggcattctgctcgacgaatctgttctggatcacccgacgtgcgccgtttggcgtcgccacgctgctcgatcaggatgtggaaattgattttcagaaggagaccacaccgaacgatgtggtcactgtcattgcaacgcagccgctgacgggcaacgaaacctggcaaaagatcatgccaggcgagtgggcgctattttgtctcggggaccgcgtaatttga

SEQ ID NO: 525152 - DNA, 741 bp, Stenotrophomonas maltophilia
atgcgtaaaatcgcattgttcattgcgatgcttctgataccgtgcatgtcgtttgccgggctgcttggcagtaatagttcaacgacgccggtcagcaaagagtataaacagcagttgatgggttccccggtttatattcaaatcttcaaggaagagcgcacactcgatctgtttgtcaaaatgggcgagacgtatcaactgctcgatagctacaaaatctgtaactattctggcggactggggccaaaacagcgccagggtgacttcaaaagtccggaagggttttacaacgttcagcgtagccagctaaaaccggacagccgcttttataaagcgattaacatcggtttccctaacgcctttgaccgtgcgcacggttacgaagggaaatacctgatgatccacggcgcctgcgtgtctgtcggctgttatgcgatgacggattccggcattgatgaaatcttccagtttgtcacgggcgcactggtcttcggccagccgaatgttcaggtcagcatctatccgttccgtatgacggatgccaacatggcgcgccataagtactctgtttacacagatttctggaaacagctaaaaccgggttatgactacttcgagcagacccataagccgccggtggtgtccatcgtcaatggccgttacgtggtgagtaaaccgctcagccatgaagtggttcagcctcagctggcgtcaaattacgcggtccccgagacaaaatag

SEQ ID NO: 525153 - DNA, 135 bp, Stenotrophomonas maltophilia
atgaacaacaatccagagaggccggagtgtaccattttcggccctgccaagggcagtaaatccgccgtctggcgcgccgaaatgcgagctattgcgcaaagttcctggagtcaggacaatatgaatgggttataa

SEQ ID NO: 525154 - DNA, 1344 bp, Stenotrophomonas maltophilia
atgtttagaatcagaaaaggactcgatctgccaatctctggcgtgcctgaacagcacgtaacgaccggcgccagtattcatcatgtcgctattgtgggtgatgattacgtgggcatgcgccccgcgatgctggtacaggaaggcgatcgtgtaataaaaggccaggcactcttcgaggataaaaaaaatcctggcgttatgtttacagccccagccagcggcaccgttgtcgccatccatcgtggtgagcgtcgcgttctgcaatcggtagttattcaaattgaaggcgatgagaaacgcgagtttgcgcgttttgacgccgccgatctcgctaccctcagccacgacgcggtgcagacgcaactgctggagtcaggactgtggacggcgcttcgcacgcgtccctatagcaaaacgcccgtacctggcactgtgccagccgctatcttcgttacggccatcgacaccaacccgctcagcgcggatccgcagcctcttatcctggcggaacgcaaagctttcgatgccggcctcaccgtgttaacgcgcctgacgccgggcaaagtgcatgtctgccaggccagcggcggtaagctgggcgggcatccgcaagggcaggtcgcctttaatgaatttgccggcccgcatccggccgggctggtgggaacgcatattcatttcctggagccggtaagcctgacgaaacaggtctggcatcttaattatcaggacgtgatcgctatcggtaagctcttcaccacgggtgagctgtgcgcagaacgcattattgccatcggcggccctcaggcaacccaaccgcgtctggttcgcacgctgcttggggcagacctgacggcgctgttggctggcgaaacgaaagaaggtgaaaaccgcattatttccggttcggtgctgagcggcagacacgcgacaggcccgatggcctggctgggtcgtttccatcttcaggtgagcgtggtgcttgaagggcgcgagaaagagctgttcggctgggtgctgcctggcgcggaaaaatactcgttaacccgtaccacgctcggccactttttgcgtcgtaagctgtttaacttctccaccagcaccaacggcggtgagcgcgccatggtcccgattggcaactacgaacgcgtgatgccgctggatattctgcccactgtgctgctgcgcgatctgctggccggcgataccgacggtgcccaggcgctgggctgtctggagctggacgaggaagatctggcgctgtgtacctatgtgtgtccaggtaaatacgaatatggacccgtattgcgcgaggtgttaacccgcattgagcaggaaggataa

SEQ ID NO: 525155 - DNA, 1236 bp, Stenotrophomonas maltophilia
atgggcttaaaacacctctttgaaaaaattgagccgcactttaccgaagggaagctcaaaaagtactacccgctgtatgaagcgacaacgaccattttctacaccccgggtctggtgacgaaaggcgcggcgcacgttcgcgacgccatcgacctcaagcgaatgatgattctggtctggtttgcggtcttcccggccatgttctgggggatgtataacgttgggttgcagactattccggcgctgcaccatatgtacgatgcagagcagctggcgcaggtgattcagtctgactggcactatcgtctggcgcagtcgctgggggtgagctttgcggcagatgcaggctggatcagcatgatgacgctgggcgctgtcttcttcctccccatctatatgactgtctttattgtgggcggtttctgggaggttctgttcgctattattcgcaaacatgagatcaacgagggcttctttgttacctctattctgtttgcgctgattgttccgccaacgctgccgctctggcaggcggcgatggggatcagctttggcgtagtgattgccaaggagatcttcggcgggaccggacgcaacttcctcaacccggcactggcagggcgcgcgttcctgttctttgcttatccggcgcaaatctcgggcgacctggtgtggacggcagcagacggattctccggcgcgacgccactttcacagtgggcggctggcggcggcgaaacgctggttaacaatgcaaccggacagcctgtcacctggtttgatgcgtttattggcaatattccaggctccatcggtgaagtgtctaccctgatgattttgatcggcggagccatcatcctctttggccgcgtggcgtcctggcgcattgtcgctggcgtcatgcttgggatggtcctcaccgccacgcttttcaatttcattggttcagacactaacccgatgttctccatgccgtggtactggcacctcgtgctgggaggctttgcgtttggcatgatgttcatggccaccgatcccgtctcggcttcgtttaccgacagaggaaaatggtgctacggcgcgctcattggggtgatgtgtgtactgattcgcgtggtcaacccggcctatccggaagggatgatgttggccattctgtttgccaatctgtttgcgccgctgttcgactatctggtcgtgcgcgccaacattaagcggaggaaggcgcgtggctga

SEQ ID NO: 525156 - DNA, 795 bp, Stenotrophomonas maltophilia
gtggctgagatcaaaaataacgacagtatcagcaaaacgctgctggtggtgctggtactgtgtctggtctgttccattgtcgtggccggttctgccgttgggttgaaaccgctacagcaggagcaacgtgcgctggataaacagcgtaacatccttgccgttgccgggctgatgcaggaaggcatgacgaaggatgacgtcgcagcggtgtttgccgaacgcattaccgcacggctggtggatttaaaaaccggggagttaatggataaagacccggcgaaatataaccaggcgctggcgctaaaagatccgcagatgagcaccatgcttgacgcctcgcaggatccggcaggcattaagcgccgcagcaatgtcgcggagatttacctcgtccgcgacgagcaaaagcgcatccaggaaatcgtgttgcccatctatggcaacggtttatggtcaatgatgtacgcctttgtggcgctggataccgatggccgtacggtcaaaggcattacatattacgatcagggcgaaacaccagggctggggggcgaagttgagaaccctaactggcgggcacagtttgtcggtaaaaaagtgctcgatgacaacggccagcctgcgctgaaggtggtgaaaggtggagcgcgtcccggtgatgaatttgccgttgatggcctttccggcgctacgctcacctctaatggggtgcagcacagctttgatttctggatgggtgaactgggctttggtcccttcctgaagaatgtacgtgaaggagcgctgaacaatggctga

SEQ ID NO: 525157 - DNA, 639 bp, Stenotrophomonas maltophilia
atggctgatacgggtgaactgaaagaagttaaaaaggtgctgattggcccacttttagccaataacccgataacgcttcaggtgctgggtgtatgctcggctctggcggtaaccaccaagctggaaacggcggtggtcatgacgctggcggtaacgctggtgacagcgttttccagcatgtttatctcaatgatccgccaccacatacccaacagcgtgaggatcattgtccagatggcgatcatcgcctcgctggtgatcgtggttgatcagcttctgcgcgccttcgcttatgaaacctcgaagcagctttcggtgtttgtcggcctgattatcaccaactgtatcgtgatggggcgcgctgaagcctatgcgatgaaaatgccgccactggcgagctttatggacggtatcggcaacgggctgggttacggtgtgatcctgttgacggttggtttcctgcgcgaacttattggcagcggcaaactgtttggcattccggtgctggatacggtacagaacggcggctggtatctgccgaacggcctgttcctgctggcaccaagcgcatttttcattatcggtttgctgatctggctgattcgtacgctgaagcctgaacagcaggaaaaggagtaa

SEQ ID NO: 525158 - DNA, 597 bp, Stenotrophomonas maltophilia
atggctcattacctgagtttatttgtgcgcgcggtgtttgttgaaaacatggcgctcgctttcttcctgggcatgtgtacgttccttgctgtttctaagaaggtatcgacggcattcggtctgggtgtggcggtcactgttgtgctggggctttccgttccgattaacaacctggtgttcaacttcgtgcttcgcgatggcgcgctggtggagggcgttgatcttagcttcctgaacttcatcacctttatcggggtgattgcggcgcttgttcagatcctggagatgatcctcgataaatacttcccgtcgctgtacaacgcactggggatcttcctgccgctaatcgcggtgaactgcgccattttcggcggcgtctcatttatggttcagcgcgattacaacttcagtgaatcggttgtgtatggtttcggttccggtatcggctggatgctggcgattgtcaccatggcggggatccgtgaaaaaatgaaatatgccaacgtacctgcggggcttcgtggcttagggatcacctttatcaccaccggcctgatggcgttgggctttatgtccttctccggtgtgcagctataa

SEQ ID NO: 525159 - DNA, 1224 bp, Stenotrophomonas maltophilia
atggaaattattcttggcgtggtgatgttcacgctgatagtactggtgctgtcagggctgatcctggcagcgcgtgcgaagctggtgaattccggggatgtgatcattgatatcaatgacgatccgcagaatcagatccgtaccccggcaggggataagctgcttaacacgctctccggcaacgggatttttgtctcgtctgcctgtggcggcggtggctcctgtggacagtgccgtgtgacggtgaaagagggaggcggtgatattctgccaacagaactgtcgcatatcacgaagcgtgaagcgaaagagggctgccgtctggcgtgtcaggtcgctgtgcgccagaacatgaagattgagctgccggaggagatcttcggcgtgaaaaaatgggagtgcgaagttatctctaacgataacaaagccacgttcattaaagagctcaagctgcgcgttcctgaaggggagagcgtcccgttccgtgcgggtgggtatatccagattgattgtccggcacacaccgtggcgtatgctgacttcgacgtgcccgaggagtaccgggccgactgggataaatttaacctcttccgctttgtttccgaagtaaaagagcccgcgcttcgcgcttattccatggctaactatccggaagagaagggcattattatgctcaacgtgcgtatcgccacgccgccgccgaatgtgcctgatgcaccccctggcgtcatgtcgtcctatatctggtccctcaagcctggcgacaaagtgacgatttccggcccgttcggcgaattctttgccaaagacaccgacgcggaaatggtctttatcggcggcggtgcgggtatggcaccgatgcgttcgcatatctttgaccagctcaaacgacttggcagcaagcgcaagatcagcttctggtacggggcgcgttcactgcgcgaaatgttctatgacgatgagtttgaacaactggcacgtgataaccctaactttaccttccatgtggcgttatccgatccgcagccggaagataactggacaggttatacgggcttcatccacaacgtgctgtatgaaaattacctcaaacagcacccggcaccggaagattgcgagttttatatgtgtggcccgccaatgatgaacgctgccgtgattaagatgctaaaagatcttggcgtggaagatgagaacatcatgctcgatgatttcggaggctga

SEQ ID NO: 525160 - DNA, 201 bp, Stenotrophomonas maltophilia
atgctgacctttctggcgacctttgcggtgtttgtactggtgatattcgggatgtccttaggctggatcatcaagcgtaaaagcatccagggcagctgtggaggtatatcttccatcggaatggaaaaagtgtgcgaatgtccggaaccgtgcgatgcgcgaaaaaaacggatggctcgcgagcagcaacgcattatttag

SEQ ID NO: 525161 - DNA, 1059 bp, Stenotrophomonas maltophilia
atgcgcaaaataatccatgtcgatatggactgcttttttgccgcagtggagatgcgtgacaacccggcgctgcgggatattcccatcgccattggcggcagccgggttcagcgcggtgtcatcagcaccgccaactatcctgctcgcaaatacggtgtgcgcagcgccatgccgacagcgatggcgctgaaactgtgcccgcatctcactcttttgcccggacgttttgatgcctataaagaagcatcgaaccacattcgggagatcttctcccgctacacctctctgattgaaccgttatcgctggatgaagcctatctggatgtcacccacagcgtgcactgccacggctctgccaccctgatggcgcaggagatccgccagactatttttaacgagctgaacctgacggcatcggcaggcgtcgcgccgataaaatttctcgccaaaatcgcctccgatttaaataagcccaacggccagtacgtcatcaccccggaagaggttccggcgtttttaaagacgctgccgctcagcaaaatccccggtgtgggtaaagtctccgccgcgaagctggaaagtatggggctacgcacctgtgaagacgttcagcgcagcgatctggcgctgctgcttaagcgttttggtaagtttggccgcgtactgtgggaacgcagtcagggcattgatgaccgcgatgtgaacaacgaacggctgcgtaaatcggtcggcgttgaacgcacgctgagcgaagatatccatgactggacagagtgtgaaaccattattacggaacaactctatcctgagcttgaacgacgcttactgaaggtcaaaccagatctgcttattgcccggcagggcatcaaactgaaatttaacgattttcagcagacgacgcaggaacacgtctggccacgcctcaacaaagaggatcttattgcgacggcaaaaaaggcatgggaagagcggcggggcggacgaggggtaaggctggtggggctgcacgtcaccttgctggatccgcagctggagcgtcagctggtgctgggactgtag

SEQ ID NO: 525162 - DNA, 1458 bp, Stenotrophomonas maltophilia
gtgtctgaactgtctcaattatctccacagccgctgtgggatatttttgccaaaatctgctccattccgcacccttcctatcacgaagaacagcttgccgaacatattatgggctgggcaaaggaaaaaggtctgcacgctgagcgcgaccaggttggcaatattctcatccgcaaacctgccaccgcaggtatggaaaaccgtaagccagtggtattgcaggcgcacctggacatggttccgcagaaaaacaacgacaccgttcacgacttcacaaaagacccgattcagccgtacatcgacggtgagtgggtgaaggcgcgcggcacgaccctgggcgcagataacggtattggtatggcttccgcgctggccgtgctggctgacgacagcgttgaacacggtccgctggaagtgctgctgaccatgactgaagaagcgggcatggatggcgcgttcggtctccaggcaaactggctgcaagcggacattctgatcaacaccgactccgaagaagaaggtgagatctacatgggctgcgcgggcgggatcgatttcatctctaccctgccgctgtcccgcgaagcgattcctgccggtttcgagacctttaagctgacgctgaaagggctgaaaggcggtcactccggcggtgatattcacctgggcctgggcaacgccaacaaactgctggcgcgtttcctggcgggccatgccgctgaactggatctgcgtctcgtggacttcaacggtggcactctgcgtaacgcgatccctcgtgaagcctttgcgaccgtggcggtgcctgcggcgaaagcggaagaactgaaaaacctctccagcctgtatctggatatcctgaaaaacgagctgtctgagaaagagaaaaacctgacggtggtactggagtccgttacaacggataaagccgcgctgaccgcacagtctcgtgacacgttcgtccagttgctgaacgcaacgccaaacggcgtgatccgcaattctgacgttgcaaaaggcgtggttgaaacctccctgaacgtgggcgtagtgaccatgggcgacgacagcgcagagatcatttgcctgatccgttccctgatcgacagcggtaaagagtacgttgtgagcatgctggaatctctgggtaccctggcgggcgcgaaaacgtctgcaaaaggcagctaccctggctggcagccggatgcaagttctccggtcatggcactggtgcgtgaaacttatcagagactgttcaacagcaccccgaacattcaggttattcacgcgggtctggaatgtggtctgttcaagaaaccgtatccggatatggacatggtctccatcgggccgaccatcacgggtccacactccccggatgagcaggttcacattgaaagcgtcggtcactactggacgctgctgactgagctgctgaaagcaatccctgttaagtaa

SEQ ID NO: 525163 - DNA, 459 bp, Stenotrophomonas maltophilia
atgagcgaaaaatacgtcgtcacctgggacatgttgcagattcacgcacgcaaactggctgcgcgtctgatgccttccgaacagtggaaaggcattattgccgtcagccgtggcggtttggtaccgggggcgctgctggcacgtgagctgggtattcgtcatgtcgataccgtatgtatctccagctatgaccacgataaccagcgtgagctgaaagtgctgaagcgcgcggaaggcgacggtgaaggctttatcgttatcgacgatctggtggacaccggcggtaccgctgtggctatccgcgaaatgtatccaaaagcgcacttcgtcactatcttcgcgaaaccagcgggtcgtcccctggttgatgattacgtcattgatatcccacaggatacctggattgaacagccatgggatatgggcgtggtcttcgtaccgcctatctctggccgttaa

SEQ ID NO: 525164 - DNA, 1245 bp, Stenotrophomonas maltophilia
atggcgcaggcgaatctcaccgaaactcttttcaaaccccgtttcaagcaccctgaaacctcgacgctggtgcgtcggtttaatccggggaccatgcctgctgtacagtcagcgttagatggtaaaaacgtgccccactggtaccgcatgattaatcgcctgatgtggatctggcgcggtatcgacccgcgcgaaatcctcgacgtgcaggcgcgtatcgtgatgagcgagtctgagcgcaccgacagcgatctctacgacacggtggtgggctaccgtggcgggaactggatctacgaatggtcaaagcaggccatgctctggcagcaaaaagcgagccaggaagaagatgccactctcagcggcaaacactggctgcatgcggcaaacctttacagcatcgctgcatacccgcatctgaaaggagacgaactggcggagcaggcccaggcgctggcaaaccgggcttatgaagaggccgcccagcggctgcctggccggatgcgtgaaattgagttcgccattcccggcggtagcccggtgactggattcctgcatatgccggagggggaaggcccgttcccgacggttctgatgtgcggcggcctggattcgttacaaattgattattacagcctgtatgagcgctactttgccccaaacgggatcgccatgctgacgctcgatatgccatcaattggtttttcatccaaatggaaacttacgcaagactccagcctgctgcaccagcatgcattaaaagcgctggagaatatcccctgggttgaccatacccgggtaggtgcgtttggcttccgctttggcgctaacgtcgcggtacggctggcctaccttgaatcttcccgcctgaaggccgtcgcctgtcttggtccggtagtgcatgcactgctaagcgagcctgcgcgtcagggtagcgttcctgaaatgtatctggacgtgctggcgagccgacttggcatgcatgatgcttcagatgaagcgttgcgcattgaacttaatcgatattcattaaaaacgcagggcttgctgggccgccgttgcccaaccccgatgatgtccggtttctggaagaacgatccatttagcccggaagaggagtcacgcttaatcacctcgtcatcttcggatggcaaattgctggaggtacccttcagcccggtgtaccaaaattttgacaaagcgcttaaagagatcacacgctggatcacgcagagattgtgttaa

SEQ ID NO: 525165 - DNA, 402 bp, Stenotrophomonas maltophilia
atgacgttaccgagtggacacccgaaaagtagactgattaagaagttcatggctcttggcccgtatattcgagaagagcagtgtgaagagaatcgcttttttttcgactgcctggctgtttgcgtcaacgtgaagcctgcacccgaaaaacgtgagttctggggctggtggatggaaatggaagcacaggaaaaccgttttacctatagctatcagtttggcctgtttaataaagacgggcactggcaggcgacgagcatcaaagatcaggaagtgatcgatcgcctggagcatacgctaaaagaatttcacggcagagctcgcgacctgctggcaacgctggatctgaagctggagcctgcggacgatttttccagcgaagcggtgaaactgagagcctga

SEQ ID NO: 525166 - DNA, 1053 bp, Stenotrophomonas maltophilia
atgaaaaagagcactctggcattagtggtaatgggcgtagttgcatccacatctgttcacgcagcagaagtttataataaaaacggtaataaactggacgtgtacggcaaagtaaaagcaatgcactatctcagtgatgatgacgcgaaggatggtgaccagacttacgttcgttttggctttaagggtgaaacgcagattaacgatcagctgacgggctacggacgttgggaagcagagttcgcgggtaacaaagcagaaagcgactcttctcaaaaaacgcgcctggcatttgcgggtattaaactgaaagattttggttcttttgattacggtcgtaacctgggtgcactgtatgacgtcgccgcatacaccgatatgttcccggagttcggcggtgacggcctggcgcagaccgataacttcatgacgaaacgcgcttccggtctggccacataccgtaataccgatttctttggcatggttgacggtcttaatatgaccctgcaatatcagggtaaaaatgaaaaccgcgacgtgaagaagcaaaacggtgacggcttcggtacctccctgagctatgacttcggcggcagcgatttctctgtgattggtgcgtatgccagctccgatcgcaccaatgagcaaaaccttcaggcacgcggcgaaggtaaaaaagcagaaggctgggcgaccggtctgaaatatgatgccaacgatatatatctggccactctctattctgaaacccgcaatatggcccctatttccggtggctttgcaaataaagcgcaaaacttcgaagtggttgcgcaatatcagtttgactttggtctgcgcccatctctgggttacgtgcagtctaaaggcaaagatatcgaaggcatcggcgatgaagatatcgtgaaatacatcgatgtaggtgcgacctattatttcaacaaaaacatgtctgcgtttgttgattataaaatcaaccagatcgatgacgataataaactgggcgtaagcagcgatgatatcgttgcgctgggcatgacctaccagttctga

SEQ ID NO: 525167 - DNA, 1104 bp, Stenotrophomonas maltophilia
atgagtgacagccagacgctggtggtaaaactcggtaccagtgtgttaacaggcggatcacgccgccttaatcgtgcccatatcgttgagcttgtacgtcagtgcgctcagttgcatgccgcagggcatcgtattgtgattgtgacctccggggcgattgccgccgggcgtgaacacctgggctaccccgaactccccgcgacgatcgcctccaaacagctgctggccgccgtaggacaaagccgactcatacagctctgggaacaactgttctccatttatggcattcacgtcgggcagatgctgttgacgcgtgcggatatggaagacagagaacgtttcctgaacgcccgcgatacgctgcgcgcgctgctggataaccatatcgttccggtcatcaacgaaaacgacgctgttgccaccgctgaaatcaaagtaggcgacaacgataacctctctgcgctggcggcgatcctggcaggggccgataagctgctgcttctgaccgatcagcaggggctgtttaccgctgacccgcgttccaatccacaggcagaactgatcaaagacgttcacggcattgacgatgcgctgcgtgccattgcgggagacagcgtttctggtcttgggacaggcggtatgggcaccaagctccaggctgcggacgtggcgtgccgggccggtatcgacaccatcattgccgcgggcagccgtccgggcgtgataggtgatgtgatggaaggcatctctgtgggcacacgcttccacgcccaggcgtccccgctggaaaaccgcaaacgctggatctttggcgcgcccccggctggtgaattgaccgtggatgaaggcgcgaccgccgctattctggaaagaggaagctcattgcttccaaaaggaattaaaagcgtgacaggcaacttctcgcgtggtgaagtgatccgaatccgtaaccttgaaggtcgcgacatcgctcatggcgtaagccgttataacagcgacgcgctgcgtcggattgctggccaccattcccagcagatcgacgccatcctgggctatgaatatggcccggttgccgtgcatcgcgacgacatgattattcgttaa

SEQ ID NO: 525168 - DNA, 1254 bp, Stenotrophomonas maltophilia
atgctggaacaaatgggcgcagccgcgaaagccgcctcgtataaactcgcgctcctttccagccgtgagaaaaaccgcgtgctggaaaaaatcgctgattatctggaatcccagtcgcaggaaattttgctcgccaatgagcaggatctgctggaagcgcgtcgtaacggcttgagcgaagcgatgctcgaccgtctggcattgaccccggcgcgtttgaaaggtatcgccgacgacgtccgtcaggtgtgcaacctcgccgacccggtagggcaggtgattgacggtggggtgctcgacagcgggttacgccttgagcgtcgtcgtgtgccactcggcgtcatcggtgtgatttacgaagcgcgtccaaacgtgacggtggatgtcgcctccctgtgcctgaaaaccggtaacgccgctatcctgcgtggcgggaaagagacctggcgcaccaacgccgcgacggtgaacgtcattcagcaggcgctggaggagtgcggcttaccggcggctgccgtgcaggcgattgaaagccccgaccgcgcgctggtcaacgagatgctgcgcatggacaaacacatcgacatgctcatcccacgcggcggcgcgggcctgcacaagctgtgccgtgagcattccaccattccggtcattaccggcggtatcggcgtatgccatatcgtggtggatgacaccgcggagatcgaacctgcactgaagattatcgtcaacgctaaaactcagcgtccaagcacctgtaatacggtcgaaacgctgctggtgcatcagggcatcgccagtaccttcctgccagcgctgagcatgcagatggcggaaagtggcgttacgctgcatgcggacgagaaggctctcgccctgctgaaagacggtccggcaaagatcgttccggttaacgcggagcagtacgacgatgagtatttgtcgctggatctgaacgtgaaggtagttgcggatctcgatgacgctattgcgcacattcgtgaacacggaacccagcattctgatgcgatcctgacgcgcaccctgcgcaatgccgatcgttttgtgaatgaagtggattcgtctgcggtttacgtgaatgcctcgacgcgcttcaccgatggcggccagtttggtctgggcgcggaggtggctgtgagcactcagaagctgcatgcccgcggtccgatggggctggaagcgctgaccacctacaagtggatcggcttcggtgatgataccattcgtgcgtaa

SEQ ID NO: 525169 - DNA, 852 bp, Stenotrophomonas maltophilia
atggaggcggtagacggaatggaaaaccgccgccatcgcctgaactgggagatgagccgggacaggtgtttaagactttccaaaccagtaccggagtatattccaaagctggcgacgaagggaacgagaaccagacacctggcaatactgcgggcgatcctcaatatggctgttgaatggcagtggctcgacaaggctccgaagatatcaacaccgcgtatcaagaacggtcgtatccgctggctgactgaggaagaatccaagcgcctgtttgcagagatagcgccccacttcttcccggttgtcatgtttgccatcacgaccggcctacgccgatctaacgtcaccgacctggaatggtcgcaggtggatctggataagcgcatggcatggatgcacccggacgaaacgaaagcaggtaatgcgatcggtgttccattgaatgaaacagcatgcggaatactgaggaagcagcagggattgcataaaaggtgggtattcgttcacacgacccctggctaccggagtgatggatctaaaacggcagatgtgaggaaaatgcgcacagacagtaataaggcatggaagggagcactaaagcgggcaggcattagcaatttccgcttccatgacctcaggcatacttgggcaagctggcttgttcagtctgatgtttcacttctggcgctgaaggaaatgggcggatgggagacgctggaaatggttcaacgatatgcacatttgtctgccggacatctgacggagcacgcgagcaaaattgatgcgattattggtcgcaatgtcacaaatacggcacaagaggagaatgtagtttacttgaatgtaagataa

SEQ ID NO: 525170 - DNA, 348 bp, Stenotrophomonas maltophilia
atggaagaggaaatcttcacacgcgaagaggctgcgtcgtacctgaaggttgataaaggcaccatcacgcagtggatccgcagcggtcgacttccggccgcaaagataaatccagaaaaacccaagagcccgtatcgcatttgtaagtctgactgcattgcagcgctgaagtctgtccgacacaatagcgctgtgaatgcggttggtatgcaggaggaaaaagcatgtcaatcaaactacgcggtggcacatggcactgcgacttcgtcgcgccagatggatcacgagttagacgctctcttgaaacctcagacaagagagaagcgcaggaacttcacgatcgtctga

SEQ ID NO: 525171 - DNA, 1665 bp, Stenotrophomonas maltophilia
atgtgttctatttttggcgtactggatattaaaactgacgcgggcgaactgcgtaaaaaagcactcgaattgtcccgcctgatgcgccatcgcggtccggactggtcaggcgtttacgccagcgataaagcgattctggctcacgaacgtctttccattgttgatgtcaacgctggcgcacagccgctgtataacgagaaaaaaacgcacgcgcttgctgttaacggtgaaatttacaaccatcaggcgctgcgcgctgagtacggcgatcgctatgcgtttcagaccggctcagactgcgaagtgatcctggcgctgtatcaggagaaaggcccggagttcctcgacgacctgcaaggtatgttcgccttcgcgctgtacgacagcgaaaaagacgcttacctgattggccgcgaccatattggtattatcccgctgtacatgggacacgatgaacacggtaacttctacgttgcctcagagatgaaagccctggtaccggtgtgccgcaccatcaaagagttcccggcaggtagctacctgtggagtaaagacggcgagatccgcccgtactaccagcgcgactggtttgattatgaggcggtgaaagacaacgtgacggacaaagccgaactgcgtcaggcactagaggagtcagtgaaaagccacctgatgtcagacgtaccttatggcgtactgctctccggcggtctggactcctccgtgatctccgcgattaccaagaaattcgccgcacgtcgcgtggaagatcaggagcgctctgaagcctggtggccgcagctgcactcctttgccgtgggtctggaaggggcacctgacctgaaagccgcccaggaagtggcgaaccatctcggcacggtgcaccatgaaattcacttcaccgtacaggaaggtctggatgcgatccgcgatgtgatctatcacattgaaacctatgatgtgaccaccattcgcgcctccacgccgatgtatttgatgtcgcggaagatcaaagcgatgggcatcaagatggtgctctccggcgaaggttctgacgaagtgtttggcggttacctctatttccacaaagcgccaaacgccaaagagctgcatgaagaaacggtgcgtaagctacaggcgctgcacatgtttgactgcgcgcgcgccaacaaagcgatgtccgcctggggtgtggaagcccgcgtgccgttcctcgataagaaattcctcgatgtggcgatgcgcatcaacccgcaggacaaaatgtgcggcaacggcaaaatggagaaacatatcctgcgtgaatgttttgaatcctacctgccggcgagcgtggcgtggcgtcagaaagagcagttctcggatggcgtgggttacagctggatcgacaccctgaaagaggtggcggcaaaacaggtttctgatcaacaactggaaactgcgagcttccgcttcccgtacaacacgccagcctcgaaagaagcgtatttgtaccgtgagatctttgaggagctgttcccggttccaagtgcagccgagtgcgtaccgggtggtccatcggtcgcctgctcttctgctaaagccattgaatgggatgaatccttcaaagccatgaacgatccgtcaggacgcgcagtgggcgttcaccagtctgcctataaataa

SEQ ID NO: 525172 - DNA, 753 bp, Stenotrophomonas maltophilia
atgaccattaagaatgtaatttgtgatatcgacggcgtgctaatgcacgacaacgttgccgtgccaggtgctgcggagtttcttcaccgcatcatcgacaaaggaatgccactggttcttctcacgaactacccttcacagactggtcaggatctggcaaatcgctttgctaccgcgggcgtcaacgtcccggacagcgtgttttatacctctgcgatggcgaccgcggatttcctgaagcgtcaggaaggcaaaaaagcctacgtggttggcgaaggcgcgctgatccacgagctgtataaagcgggcttcaccatcaccgacgtgaatccggactttgtcatcgtgggcgaaacgcgctcctttaactgggagatgatgcataaagcagcctactttgtcgccaatggtgcacgttttatcgccactaacccggatacgcatggtcgtggtttttatcccgcctgcggtgcgctgtgcgccggtatcgaaaaaatctcaggccgtaagccgtttgttgtcggcaaaccgagcccgtggatcatccgcgctgcactgaatacgatgcaggcacactcagaagaaaccgtcattgttggcgacaacctgcgcaccgatattctggctggcttccaggcggggcttgaaaccatcctggtgctttctggcgtttcacagcttgatgacattgatacgatgccgttccggccaagctggatttacccctctgtcgacgaaatcgacgttatttga

SEQ ID NO: 525173 - DNA, 1221 bp, Stenotrophomonas maltophilia
atgacaccaggcggacaagctcaaatcggtaatgtcgatctcgttaaacaacttaacagcgcggcagtttatcgcctgattgaccagcacgggccaatctcacgcattcagatagccgaacaaagccagcttgctcccgccagcgtgacaaaaattacacgtcagcttattgagcgcggcctgatcaaagaagtggatcagcaggcctccaccggcggccgccgcgcgatttccatcgtcactgaaacccgcaattttcaggccattggcgttcgcttaggccgtcatgacaccacgcttacgctctacgatctgagcagcaaggccattgccgaagagcattacccccttcctgagcgcacgcaggagacgctcgaacacgcgttactgaataccattgcgcagtttatcgaaatctgtcagcgcaagatccgtgaactcatcgccatctcggtgattttacccggcctggttgacccggaaagcggcgttattcgctacatgccgcatattaaagtagagaactgggggctggttgaggcgctggaaaaacgcttcaagctgacctgctttgttggtcacgatatccgctcgctggcgctggcggagcactactttggtgcgagccaggactgcgaagactctattctggtgcgcgttcaccgtggtacaggtgcgggtatcatctcgaatggccgcatttttattggtcgtaacggtaacgtaggcgagatcggtcatatccaggtggaaccgcttggcgagcgctgccactgcggtaactttggctgtcttgaaaccgttgccgccaatgccgccattgaacatcgcgtccgccacctgctggagcagggttatcagagccgcgtcacgctgggcgactgtaagatcggtgccatctgcaaagcggcaaacaaaggcgatgcgctggcctgcgaagtgatcgaacaggtaggacgccacctgggtaagaccatcgccattgccatcaacctgtttaatccgcaaaaagtggtgattgccggcgagatcgttgaagccgaaaaagtattactgcctgccattgaaggctgcatcaatacccaggcgctgaaggcatttcgccagaatttgccggtggtgcgatctacgctcgatcaccgctcggcaattggcgcattcgccctggtaaaacgtgccatgctcaacgggatcctgctgcaacatttgctggaatcctga

SEQ ID NO: 525174 - DNA, 1149 bp, Stenotrophomonas maltophilia
atgtacgctttaacccacggtcggatttataccggccatgaaattctggatgaccatgcgattgtaatcgccaatggcctgattgaacgtgtttgcccgctggcggaactgccgccggagatcgaacagcgttccctcaatggagcagtaatctcccccggtttcatcgacgtacagcttaacggctgcggcggtgtccagtttaacgataccgcagaggcggtaacggttgaaacgctggaaatcatgcaaaacgccaacgagaaatcgggctgcaccagctatctgccaacgctgattaccagcagcgatgacctgatgaaacagggtatccgcgtcatgcgtgaatacctggcaaaacatccgaatcaggcgctgggtctgcacctggaaggaccatggctgaatatggtcaagaaaggcacccataacccgaactacgtgcgcaaaccggatgccgagctggtggattacatgtgcgccaatgccgatgtgatcactaaagtgacgctggcaccggaaatgaccggcacggacgttatcagcaaactggccgccgccgggattgtggtatctgcgggccattcgaacgcgacgcttaaagaggcgaaggccggtttccgcgcaggtattacatttgccacacacctttataacgcgatgccgtatattaccggtcgcgaaccgggactggttggcgcaattctggatgaaccagacgtctactgcggtattatcgccgacggcttgcatgtcgattacaccaacatccgcaacgccaagcgccttaaaggcgacaagctctgcctggtcacggatgctaccgctccggcaggagcgaatattgaccagttcatttttgctggtaaaacaatatactaccggaatggactgtgtgtggatgagaacggcacgctgagcggttcttctctgacgatgatcgaaggggtacgtaacctcgttgaacattgcggcattgcgcttgaggaagtgctgcgcatggccacgctttatccggcgcgcgctattggcgtcgataaacagctcggcggtattgcgccaggtatggttgcaaacctgacggcgttcacacacgattataaaattattaagaccatcgttaatggtaacgaggtcgtcactgagtaa

SEQ ID NO: 525175 - DNA, 801 bp, Stenotrophomonas maltophilia
atgagactgattcccctggcaacagctgaacaagtcggaaaatgggctgctcgtcatatcgttaaccgcatcaacgcgttcaaaccaacagccgatcgtcctttcgtactcggtcttccaaccggtggtactcccctgaccgcgtataaggctttggttgaaatgcacaaagcgggccaggttagctttaaacatgttgtgaccttcaacatggacgaatatgtcggcctgccaaaggaacatccggaaagttaccacagctttatgcaccgtaatttcttcgatcacgttgatattccggctgaaaacattaacctgctgaatggaaacgcgcctgatattgacgcagaatgccgtcagtatgaagaaaaaatccgttcttacggtaaaatccacctgtttatgggcggcgtaggcaacgatggtcatatcgcgttcaacgaaccggcatcttcactggcttcccgtacccgtattaaaacgttgacccatgacacgcgtgtggctaactcccgcttctttgacggcgacgtcaatcaggtgcctaaatacgcgctgaccgtgggtgtgggtacactgctggatgccgaagaagtgatgattctggtgctgggcgcagtgaaagcgcaagcgcttcaggctgccgttgaaggcaacgtgaaccatatgtggacgatcagctgcttacagttgcatccaaaagcggttgtcgtgtgtgacgaaccgtccaccatggagctgaaagtgaaaacgctgaaatacttcaacgagctggaagctgagaacattaaaggtctgtaa

SEQ ID NO: 525176 - DNA, 1950 bp, Stenotrophomonas maltophilia
atgaatattttaggttttttccagcgcctcggtagggctttgcagctccctatcgccgtgctaccggttgcagcattgctgctgcgattcgggcaacccgatcttcttaatgtgccgtttattgcccaggcaggcggcgccatttttgacaaccttgcgctgattttcgccatcggcgtggcgtcaagctggtcaaaagacagcgccggtgctgcggcactggcaggggcggtaggttacttcatcctcacgaaagcgatggtaaccatcaacccggaaatcaacatgggtgtactggcgggtatcattaccggtctggtcggtggcgccgtgtacaaccgctgggcgggtatcaaactgcctgacttcctgagcttcttcggcggtaaacgttttgtgccgattgcgacgggctttttctgtctgatcctcgccgccatctttggctacgtttggccaccggttcagcatgctatccatgcgggtggcgagtggatcgtgtctgcgggcgcaatgggcgcgggcatcttcggtttcattaaccgtctgctgatcccaaccggtctgcatcaggtactgaacaccatcgcctggttccagattggtgagttcaccaacgcggctggcgcggtattccacggtgatatcaaccgcttctacgcaggtgacggcaccgcgggcatgttcatgtccggcttcttcccaatcatgatgtttggtctgcctggcgccgcgctggcaatgtacctggctgcgccgaaagcgcgtcgcccaatggttggcgggatgctgctgtccgttgcgatcaccgccttcctgaccggcgtgaccgagccactggaattcctgttcatgttcctggctccgctgctgtatctgatgcacgcgatcctgaccggtatcagcctgttcgttgccacccttctgggtatccatgcaggcttctccttctccgcaggcgctatcgactatgtgttgatgtacaacctgccggcggcaagcagcaacgtctggatgctggtggtgatgggcctgatcttcttcgttatctacttcgttctgttcagcgcggttattcgtatgtttaacctgaagacgccgggccgcgaagatacgaaagatgatgttgtgaccagtgaagccaacagcaataccgaagagggtttaacccagctggcaaccagctatattgccgctgtgggtggcaccgacaacctgaaagcgatcgatgcctgtattacccgtctgcgtctgaccgtgggcgactccgcgcgcgtgagcgatgcaatgtgcaaacgccttggtgcgtctggtgtggtgaagctgaataaacaaaccatccaggttatcgtgggtgcgaaagccgaatctatcggcgatgaaatgaaaaaagtggttgcccgtgggccggtcgctgccgcctcaacggataacgcgccagtggctgacgcgccggttgcaaaaccgcaggctgtgccaaatgcggtgaccatcgctgcgctggtttctccggtgacaggtgacgttgttgcgcttgagcaggtgcctgacgaagcgttcgccagcaaagcggtcggtgatggcgtggcggtgaaaccaacggacaaaaccgtggtctctccggcagccggtactatcgtgaaaatcttcaacaccaaccacgcgttctgcctggaaacggaaaaaggcgcggagatcgttgtccatatgggtatcgataccgttgcgctgaacggtcagggctttactcgcctggtggaagagggcgctgaagtggcggcaggccagccgattctggaaatggatctggagttcctgaacgccaacgcgcgctccatgataagcccggtagtgtgcagcaacatcgacgacttcagcggtctggtgatccaggcgcaggggcaggtagttgcaggccaaacgccactgtatgagattaaaggcaagtaa

SEQ ID NO: 525177 - DNA, 1680 bp, Stenotrophomonas maltophilia
  misc_feature (521)..(530): n is a, c, g, or t
atgagtgaggcagaagcccgcccgagtaactttattcgtcagatcatcgatgaagatctggccagtggtaagcacaccacagtccacacgcgtttcccgccggagccaaatggctacctgcacattggtcacgccaaatcgatctgccttaactttggtattgcgcaagactaccaggggcagtgcaacctgcgtttcgatgacaccaacccagtaaaagaagacatcgaatacgttgagtcgattaaaaacgacgtgcaatggctgggcttcaactggtcaggcgatatctgctactcctcagactatttcgatcagctgtatgcctatgcggttgaactgattaacaagggtctggcatacgtcgacgagctctctgctgacgaaatccgtgaataccgcggtacgctgactcagcccggtaagaacagtccgttccgcgatcgtagcgtggaagagaacctggcgctgtttgaaaaaatgcgtgccggtggctttgaagaaggtaaagcgtgtctgcnnnnnnnnnngcgtgccaaaatcgatatggcgtctccgttcatcgtgatgcgcgatccggtgctgtaccgcattaagttcgcagaacaccaccagaccggtaacaagtggtgcatctacccgatgtacgacttcacccactgcatcagcgatgcgctggaaggcattacgcactctctgtgcacgctggaattccaggacaaccgtcgtctgtacgactgggtgctggataacatcaccattcctgtgcatccgcgtcagtacgagttctctcgtctgaacctggaatacaccgtgatgtccaagcgtaagctgaacctgctggtcactgacaagcacgttgaaggctgggacgacccacgtatgccgaccatttctggcctgcgtcgtcgtggctacacctctgcgtccattcgtgagttctgcaaacgtatcggcgtcaccaagcaggacaacaccatcgaaatggcgtctctggaatcctgcattcgtgaagacctgaacgaaaacgcgccgcgcgcgatggcggtgatcgatccagtgaaactggttatcgaaaactatccgcagggcgggagcgaactggtctctatgcctaatcatccgaacaaaccggaaatgggcacccgcgacgtgccgttcagcggtgaaatctggatcgatcgtgccgacttccgcgaagaagcgaacaagcagtacaagcgtctggtgctgggcaaagaagtacgtctgcgtaacgcctatgtaatcaaagccgagcgcgtagagaaagatgcggaaggtaacatcacgaccatcttctgtacgtacgacgcagagacgctgagcaaagatccggcggatggccgtaaagtgaaaggcgtaatccactgggtgagcgcgcagcatgcgctgccggttgagatccgtctctacgaccgtctgttcagcgtgcctaacccaggcgcagcggaagacttcctggcggttattaaccctgagtctctgattatcaagcaggggtatgccgagccgtctctgaaagccgctgaagccggtaaagcgttccagttcgaacgtgagggttatttctgcctggacagccgttacagcacggcagaaaaaccggtatttaaccgtaccgtgggtctgcgtgatacctggactaagatcggcgaataa

SEQ ID NO: 525178 - DNA, 1401 bp, Stenotrophomonas maltophilia
  misc_feature (384)..(393): n is a, c, g, or t
atgcgtacgttcagtggcaaacgtagtgcgctggcgctggctatcgccggtgtgacagcaatgtcgggcctggtggttgcgccagaggcaaaagcagcaggtttcattgaagattccacccttacgggcggtatttattactggcaacgtgagcgtgaccgtaaagacgtcactgaagataaatacaaaactaacctttctcactcgacctggaacgccaacctggatttccagtcgggatatgccgccgatatgttcgggatcgatattgcagcgttcaccgcaattgaaatggccgaaaatggcgacagcggccatccgaacgaaattgcgttttcctccagcaataaagcttacgacgaagactggtccggcgataaaagnnnnnnnnnnagcctgtataaagcggctgcaaaattcaaatatggcccggtctgggcgcgtggtggttatatccagccaaccggtcagacgctgttagcgccgcactggagctttatgccaggtacctatcagggcgcggaagccggtgctaattttgactacggcgatgcgggggcgttgagcttctcctatatgtggaccaacgagtacaaagcgccgtggcacattgagatggacaagttctatcaaaacgataaaaaaaccaaagttgattatctccactcgctgggggcgaagtacgacttcaaaaacgatctggtgctggaagcggcttttggtcaggctgaaggctatatcgatcagtactttgctaaagccagctacaaatttgatatcgcaggcagcccgctgagcaccagctatcagttctacggtacgcgcgacaaggtcagcgatggcagcgtaaatgatatttatgacggcaccgcgtggttacaggcgctgaccttcggctacaaggtgggtcaggttgatttgcgtctggagggtacatgggtcaaggcagaagggcagcagggctacttcctgcaacgtatgacgccaacctacgcctcttccaacggtcgtctggatatctggtgggataaccgctctgacttcaacgccgacggcgaaaaggcagtcttcttcggcgcaatgtatgacctgaagaactggaacctgcctggctgggcagtgggcgcgtcctacgcgtacgcctgggacgcgaagccagcggatatggctacgccagacgcctactacgatccgaactaccgtctgaaagagtcttcatacagtctggatgcgatttataccctgcaggagggccgtgcgaaaggcacgatgttcaaactgcacttcacccagtatgacaaccactccgatatcccgagctacgcgggcggttacggcaacatcttccaggatgagcgcgacgtgaaattcatggtcattgcgccatttaccatcttctga

SEQ ID NO: 525179 - DNA, 330 bp, Stenotrophomonas maltophilia
atgatgaaaaaaagggtaatcgttgcgctgctggcattcgggctggtggcgtgcgcgcaggatcaggcgccgaaagaagactcccgtctgaaagaggcgtatagcgcttgcatcaataccgcacaaggttcacctgagaagattgaagcctgtcaaagcgtgctgaacgagctaaaaaaagacaaagcccatgagcaattcgccacgcaggaaaacgttcgcgtgatggattaccaggcctgcattcaggcgcgtaaaaccggtaacgatcaggaagtggcgaagcgttgcgataagatatgggacgagattcgcaataacaataaataa

SEQ ID NO: 525180 - DNA, 447 bp, Stenotrophomonas maltophilia
atgactgacaacaataccgcattaaagaaagctggcctgaaagtaacgcttcctcggttaaaaatccttgaagtgcttcaggggccagacaatcaccatgtcagtgcggaagacctttataagcgtcttatcgatatgggtgaagagattgggctggcaaccgtctatcgtgtgctgaaccagtttgatgacgcgggcattgttactcgtcataatttcgaaggcggtaaatccgtgttcgagctgactcagcagcaccaccacgatcacctgatctgcctcgactgtggcaaggtcattgaatttagcgatgattccattgaatcacgccagcgtgaaatcgccgcccgtcatggcatccgcctgaccaaccacagcctgtacctgtacggtcactgtgctgaaggggattgccgcgaaaatgaacatgcgcacgacgcaaaataa

SEQ ID NO: 525181 - DNA, 531 bp, Stenotrophomonas maltophilia
atggcaatcatcggcattttctttggcagtgataccggcaatactgaaaatatcgcaaaaaacattcaaaaacagctcggtaaagacgttgctgatgtgcatgacatcgccaagagcagcaaagaagatctcgagggctatgacatcctgctgctgggcatcccgacctggtactacggtgaagcacagtgtgactgggacgatttcttcccgacgctggaagaagtcgacttcaacggcaagctggttgccctgtttggctgtggcgatcaggaagactacgctgagtatttctgtgatgcgctgggcactattcgcgacatcattgagccgcgcggtgcggcgatcgttggtcactggccaacagcgggttatcacttcgaagcttccaaaggtctggcagatgacgatcacttcgttggccttgccattgatgaagaccgtcagccagagctgaccgcagagcgtgtagaaaaatgggttaagcaggttcgtgaagagctgaacctggacgatatccttaacgcctga

SEQ ID NO: 525182 - DNA, 288 bp, Stenotrophomonas maltophilia
atggccaaagaacaaacggaccgtacgacactagatctgttcgcgaatgagcgtcgaccgggacgaccgaaaacgaatccgctttcgcgcgatgaacagctgcgtatcaataaacgcaaccagcttaaacgcgataaaaatcgtgggcttaagcgtgtcgaactcaagctgaatgccgatgccgtcgatgcgcttaacgagttagctgacgcgcgcaacatcagccgcagcgaactgatcgaagagatgctgatcgcccagcttgagacgttacgcggcaaggcgtga

SEQ ID NO: 525183 - DNA, 774 bp, Stenotrophomonas maltophilia
atgaaattgaatacccgagcgcaaactgcacaatcgccgaacaataattctcccatcgtactggttcacggcctgtttggtagcctggataacctgggcgtgctggcgcgcgatttagtgaccgatcacgagatcctccaggttgatatgcgcaatcacggtctttcaggacgctcggaggagatgacctacgcagccatggcgcaggatctgcgggacaccctcgatgcgaataatatccagaaagcgacgctcatcgggcattcaatgggcggtaaagcggtgatggcgcttacagcgctggcccctgagcgaatttccggtctggtggtcattgacgttgcgcccgtcaattacgacgttcgccgtcacgatgagattttcgctgcgatcaatgctgtgacagagtcaggcgtctccacacgccagcaggcggcagccgttatgcgcgagcatctcgatgaagaaggcgtggtccagttcctgctgaaatcctttgttgacggacaatggcgctttaacgtcccggtactgtgggatcagtattcgcatattgtggggtgggaaaatgtccccgcctggccgcaccctaccctctttattcgcggcggcaactccccttacgtcactgacgcgtaccgtgacacgctgctggcgcaatttccgcaggctcgcgctcacgtcatcgccggtgccgggcactgggtccacgcggaaaaaccggatgcggtcctgcgcgccattcgccgctatcttactgatacagcgaattga

SEQ ID NO: 525184 - DNA, 546 bp, Stenotrophomonas maltophilia
atgaaaacaatcgaagttgatgacgaactctatcagtatattgccagccagacgcggcatattggggagagcgcgtccgacattttacggcgcatgcttaaaatttccgccgcctcacagcccactcctgtcacaaaagatgttgtgtctcagccgagcgttgttgcacaagtaaaacctgccgtcatgccggcaaaagacaaagtgcgcgcgatgcgcgagctgctgctgtccgatgaatatgcagagcagaaaaaggcggttaaccgctttatgctggtgctgtctacactttactcactggataacaacgcatttgcagaagcgacagagtcgctgcacggtcgcacgcgcgtttacttcgcaggtgacgagcagaccctgctgcaaaatggcaaccaaaccaaacccaaacatgttcccggtacgccatactgggtgatcaccaataccaatacgggccgcaagtgcagcatgatcgaacatatcatgcagtccatgcagttcccggcggaattgatcgaaaaggtttgcggtacaatttaa

SEQ ID NO: 525185 - DNA, 1641 bp, Stenotrophomonas maltophilia
atggcaaatcacagccgtgcaggacaacctgcacaacaacgcgatttgattaacgtcgctcaactgaccgcgcagtactacgtgctgaagccggtggtgggcaacgcagaacacgcagtgaagtttggtacatctggccaccgcggcagcgcggcgcgccacagctttaacgaaccgcacattctggccattgctcaggccatcgcggaagagcgcgccaaaaatggcgtcaccggtccgtgctatgttgggaaagatacccacgccctgtctgaacctgcctttatctccgtgctggaagtactggcggcaaacggcgtagacgtgattgttcaggagaacaacggtttcacgccaacgcctgcggtttctaacgctattctggtacataacaaaaaaggtggcgcgcaggcggacggtattgtgatcaccccgtcccacaacccaccggaagatggcggcatcaagtacaacccacctaacggtggcccggcggataccaacgtcacgaaagtggtggaagatcgcgccaacgcgttactggctaacggtctgaacggcgtgaagcgcatctcgctggatgaagccatggcgtccggccacgtgaaagagcaggatctggtgcagccgttcgtggaagggctggcggatatcgtcgatatggccgctatccagaaagccggtctgaagctgggcgtggatccgctgggcggctccggtattgaatactggaaacgcattgccgagcactacaagctggatctgaccatcgtgaacgatcacgtcgatcagaccttccgctttatgcacctggacaaagacggcgcgatccgtatggactgctcctccgaatgcgcaatggctggcctgctggcgctgcgcgacaagttcgacctggcgtttgccaacgacccggactacgaccgccacggtatcgtcaccccggctgggctgatgaaccctaaccactacctggctgttgcgatcaattatctcttccagcatcgtccgcagtggggcaaagaggttgcggtgggtaaaacgctggtctcttccgccatgattgaccgtgtggtcgatgcgctgggccgcaagctggtggaagtgccggtgggcttcaagtggtttgttgacggtctgcacgacggcagcttcggctttggtggtgaagagagcgcgggggcatccttcctgcgcttcgacggcaccccatggtcaaccgataaagacggcatcatcatgtgcctgctggcggcggaaatcaccgcggttaccggtaagaacccgcaggaacattacaacgacctggcggcacgctttggtgcgccaagctataaccgtattcaggctggcgcgacctctgctcagaaagccgctctgtccaaactctctccggagatggtcagcgcaagcaccctggcaggtgacccgatcaccgcgcgtctgacggcggcaccgggtaacggcgcatccatcggcggcctgaaggtgatgaccgaaaacggttggttcgccgcgcgtccatccggtacggaagatgcgtataaaatctattgcgaaagcttcctcggcgctgagcaccgccagcagattgagaaagaagcggtagagattgtcagcgaagtgctgaaaaacgcgtaa

SEQ ID NO: 525186 - DNA, 1314 bp, Stenotrophomonas maltophilia
atgagtaagtccaacaagatgggcgtggtacaactcactatcctcaccatggtgaatatgatggggtccgggatcatcatgctgcccaccaagctcgctgaagtggggacgatttcgattatctcctggctggtaacggcagtcggctcaatggcgctggcgtgggcgtttgccaagtgcgggatgttcagccgtaagtctggcggcatgggcggctatgccgaatatgcgtttggtaagtccggtaactttatggccaactatacctacggcgtgtcgctgctgatcgccaacgtggcgattgccatctccgctgtcggttacggtacggagctgtttggcgcgacgctgaccccggtgcagattgggctggcgaccatgggcgtgctgtggatctgcaccgtcgccaactttggcggcgcgcgcatcaccggacaactcagcagcatcaccgtctggggcgtgatcattccggtagtcggtctgtgcatcatcggctggttctggttcagcccgacgctgtacgccaattcctggaacccgcatcacgtgccgttctttaccgccgtgggatcgtccatcgccatgacgctatgggctttcctcgggctggagtcagcctgtgcgaatgcggaagtggtggaaaacccggaaaagaacgtgccgatcgcggtactcggcgggacgctgggggcggcggtgatctatatcgtctcaaccaacgtgattgcgggaattgtgcccaacatggatctcgccaactccacggcgccgttcgggctggcgtttgcgcagatgtttacgccagaggtagggaaagtgatcatgggactgatggtgatgtcctgctgcggctcgctgctgggctggcagttcaccatcgcccaggtattcaaatcctccgctgacgaaggttatttcccgaaaatcttctcccgcgtcaccaaagcggatgcgccggtacagggtatgctggcgattgtgattttccagagcggtttgtcgctgatgaccatcagcccgtcactgaacagccagtttaatgtactggtcaacctggcggtggtgacgaacatcattccgtacattctgtcgatggcggcactggtgattattcagaaggtggcgaaggtggatccgcgcaaagcccgggcggccaatatcgtggcgctgattggggcgatttacagcttctatgcgctctactcgtccggtcaggaggcgatgctgtatggcgcgatggtgacctttatgggctggacgctgtacggtctggtatcgccgagatttgaactgaagaataagcatagttaa

SEQ ID NO: 525187 - DNA, 2199 bp, Stenotrophomonas maltophilia
atgaaaacgttaaaaattgccgtcagccgtgcctgccctgaatgctttaccacttcgcgcgagatcgtggatatcaccgcatcggattatattgatgtggcagccgtggttctggccgtcagtgatattttcaatggcgccatagaagaaatagaagccacgggattcggtattccggtgtttattgccacgcataaagaagaaagggttccggctgaatttttgtcgcgtattcacggcgtttttgagtactccgacaccagcaatgcgtactacggacgccagcttgaagcggctgcgcagaagtacgaaaccaagctccgtccgccgttcttccgcgcgctggtcgattacgtccagcaggggaacagcgcgtttgactgccccggacatcagggaggccagttcttccgccgccatccggccggaaaccagtttgtcgatttctttggcgaaacgcttttccgcgccgatctgtgcaatgccgacgtggcaatgggcgatctgctgatccatgaaggtgcgccatgcatcgcccaacagcatgcggcaaaagtctttaatgcggataaaacctacttcgtgctgaacggcacctcctcttccaataaggtggtgctcaatgccctgctcacgccaggcgatctggtgctgttcgatcgcaataaccataaatctaaccaccacggggcgctgttacaggcgggagcgacgccggtgtatctggaaacagcgcgcaacccgtacgggtttatcggcggtattgacgcacactgtttcgacgagagttacctgcgggaactggtgtcagaggtcgcgcctggtcgcgcgcgggatgaacgtcccttccgtctggcggtgatccagctgggcacctacgacggtaccatttataacgcccgtcaggtggtggataagattggtcacctgtgcgattacatcctgtttgactccgcctgggtgggttacgagcagtttatcccgatgatggccgactgctcgccgctgctgctggagctgaacgaaaacgatccgggcattctggttacccagtcggtgcataagcagcaggcgggcttctcgcaaacctcgcaaatccataagaaggacagccacataaaaggccagccgcgctatgttccgcataagcgcctcaacaacgcctttatgatgcacgcctccaccagcccgttttatccgctgtttgccgccctggatatcaacgcccgcatgcacgaggggcaaagtgggcgcaacatgtggatggactgcgtggtgacgggtatcgaagcgcgaaaactgatccttcagaactgtcagtttattcgcccgttcgtgccggagacggtggatggccgtccgtgggaaagctgggatacggcggagatcgccaccgatctgcgcttcttccatttcgttccgggcgaacgctggcacgcctttgagggatatgccgagcatcagtattttattgatccctgcaaactgctgctgaccacgccaggcatcaacgcccgcaccggcgagtatgatgatttcggcgtgcccgccaccatcctcgccaacttcctgcgtgaaaacggcatcgtgccggaaaaatgcgacctcaattccattctgttcctgctcaccccggcggaggacatgggcaaattgcagcagctcgtcgcccagctggtgcgcttcgaaaaactgctccagagcgatgtgccgctgaaagaggttctgccctctctttataagcaacatccggaacgttatgcggattattccctgcgtcagatttgtcaggagatgcacgacctctacgcccgccataacgtgaagcagttgcagaaagagatgttccgcaagtctcacttcccgcgcgtcatgatgaacccgcaggaggcgaactatgcctatctgcgcggtgaggtcgagctagtgtcactgcgcgacgcggaaggccgtatcgccgcggaaggcgcgctgccttacccaccgggggtgttgtgcgtggttccgggggaagtctggggcggttccgtgctgcgctatttcgccgcgctggaagacgggatcaatctgctgccgggctttgcgccggagttacagggggtttacgtcgaggagtgtgacgggcgcaaacaggtgcgctgctacgtcattaaacaacccgccgctcagccgtctctgctgaaaggagaaaaattatga

SEQ ID NO: 525188 - DNA, 678 bp, Stenotrophomonas maltophilia
gtgattaacgttctgattgttgaagatgagctcgctatcagccgatttctgcgtaccgcgctggaaggcgacggtttgcgcgttcatgaagccggaacgcttcaacgggggttaattgaagccgccacccgcaagccagatctggtgatcctggatctgggactcccggatggcgacggcatcgattttattcgtgaggtgcgtcagtggagccagatgcccattctggtgctctctgcccgcaccgaagagacggataaaatcgccgcgctggatgccggagcggatgattatctgatcaaaccgtttggcattggcgagttacaggcccggctgcgtgtggcgctgcgtcgacacagtgccaccactccttctgaaccggtgtacgtctttggcgatatccgcgtcgatcttgccgcccgccgaatcgtgcgaggggaagaagagatccaccttacgcctatcgagtttcgtctgctggccgtgttgctcagtaaccacggaaaagtgttaacgcagcgacagctgttaagccaggtctggggaccgaatgctgtcgaacatagtcactatttacgcatttatatgggacaccttcgccagaaacttgaagccgatcccgcgcgtcctcgtcatttattaacagaaaccggtatcggatatcggtttatgatctga

SEQ ID NO: 525189 - DNA, 2688 bp, Stenotrophomonas maltophilia
atgaccgaagagcccatgcgcccggatccggacaggctgcttgaacaaacggctgaagcccaccgcggcaagctgaaaattttcttcggcgcctgcgcgggcgtcgggaaaaccttcgccatgctgacggaagcccagcggcttcgggcgcaggggcttgatattctcatcggcgtggtggaaacccacggtcgcaaagagacggcggcgctgctgacggggctggcgacgcagccgccccagcgtatcagccatcgcggtcggctggtgacggagttcgatcttgatgccgccctcgcccgccgccccgcgctgatcctgatggacgaactggcgcacagcaacgcgcctggctcacgccacccgaagcgctggcaggatgttgaggagctgcttgaagccggcatcgacgtcttcactacggtgaatgttcagcatctggaaagcctgaacgacgtggtaagcggggtaaccggtatccaggtgcgggaaaccgtccccgatccgttttttgattctgccgatgaagtcgtactggttgacctgccgcctgacgatctgcgccagcgcctgcacgaaggcaaggtgtatattgccggccaggccgaacgcgccatcgaacattttttccgcaaaggaaacctgattgccctgcgcgagctggccctgcgccgcaccgccgatcgcgtggatgaccagatgcgcgcctggcgagacctgcaggggcgggagcgcgtctggcacacgcgtgacgccattctgttatgcattggtcacggcagcggcaatgaaaaactggtccgcaccgccgcccggcttgcggcgaagtttggcagcgtctggcacgcggtgtatgtcgaaacgccacagcttcacggcctgccggaaaatcagcgtcgcgccattttgagtgcgctgcggctggcgcaggagctgggtgccgaaaccgcaaccctgtccgatccgcaagaagataaagccattctgcgctacgcgcgcgagcataacctgggcaagattgtcattggacgtcgccagcatcgccgctggtttagccgcgaatcttttgccgacaggctggcacgccgcgcgccggatctggatttagtcatcgtcgcgctggatgacaagcccacccccctgcccggccgtacgccggacgcacgcacctttggcgataaatggcgcgtccagatccggggctgcctcgtggccgtggtcctttgcgccctgattacggtgattgccagccagtggctaatcgccttcgatgccgccaatctggtcatgatttatctgctgggcgtcgttgtggtcgcgctcttttatggccgctggccgtcggtgctggcaacggtgatcaacgtcatcagcttcgacctcttttttatcgctccgcgcgggacgcttgctgtctcggacgtgcagtacattctgacctttgccgtgatgcttaccgtcgggctggtgatcgggaatctgacggcaggcgtacgctaccaggcacgcattgcccgctatcgcgagcagcgcacccgccatctgtatgagatgtcaaaatcgctggcggtcggtcgcacgcagcaggatatcgtccagaccagtgagcagtttatccgttcgacctttcatgccagtaacctgattttgctccccgacgagcaggggcgccttcacccgctgacctccccttcggggatgacgccctgggatgaagcgattgcccgctggagctttgataaggggttacctgccggtgccggcaccgacactctgcccggggtgccttaccagatcctgccgctgcgcagcgcgaataaaaatcacgggctggtcatcgtcgagccgtctaacctgcgtcagctgatgatccccgagcagcagcgcctgctggaaaccttcaccctgctggtcgccagcgctcttgaacggctggcgctcaccgccagcgaagagcaggcgcggctggcaagcgagcgcgaaagtattcgcaattcgctgctggcagcgctgtctcacgatttgcgcaccccgcttaccgtgctgtttggtcagtccgaaattctgacgctggatctggcggcggaaggatcaaaacatgcgatgcaggccagcgaaattcgtcagcacgtgctaaataccacgcgtctggtgaacaacctgctggacatggcgcgcattcagtccggcgggtttaacctcaaaaaagagtggctcacccttgaggaggttgtcggcagtgcgctgaagatgctggagccgggtctcggcgggcgccatatcgagctggacatgccggaacccctgacgttaatccatgtggatggcccgctgtttgagcgcgtgctgattaatcttctggaaaatgccgctaaatacgccggggcaaaggcccggctggggattgctgccagggtggataaacgtgtgctgcggctcgatgtctgggataccgggccgggtattccggccggccaggagcgcgccatattcgaaaaatttgcgcgcggtaataaggaatctgccattccgggcgtcgggctggggctggcgatctgccaggcgattgttgacgtgcatggcggcaccatttccgcagagaaccgcccggaaggtggggcacgcttttgtgttacacttcctcttgaaaccccaccagaacttgatgaattaccagaggatttgtga

SEQ ID NO: 525190 - DNA, 576 bp, Stenotrophomonas maltophilia
atgacgatgttacgtcccgctatactgttgtttattctgctgtctctgattaccggcgggctttacccgctgatgacaaccgcgctgggccagtggtggtttgaggaccaggccaacggctcgctgattatccagaacggtgaaaaccgcggctcgcgtctgattgggcaaaactttacggacccgcgctacttccagggacgcccttccgccactgcggaaagcccgtataatccaatggcctccggcggcagcaatctggctggcagtaatcctgacctggacaaagccgttgctgaacgcgttgccgccctgcgcgccgcgaatccgcaggccagccgtgaggtgccggttgagctggtcaccgcctccgcgagcgggctggattacagcctgacgccggacgcagcggcgtggcagatcccacgcgtggccgccgcccgtcagctgaccgtcgagcaggtgagccagctggttgcagaacatacgcaaaagccgctggtcagcttcatcggcatgccggtagtgaacattgttgagctgaatctggcgctggatgcgctaaggaagaactaa

SEQ ID NO: 525191 - DNA, 2049 bp, Stenotrophomonas maltophilia
atgagtcgtaaacaactggccctgctcgaaccaaccttagttcgtcaggccctcatggatgcggtaaaaaaactgagcccgcgagtgcagtggcacaacccggtgatgtttattgtctggactggaagtttactcaccaccgcattggcgattgccatgggaacgggacacctttcaggaaatgcaacctttaccggcgccatcagcctgtggctgtggtttaccgtgctgttcgccaactttgccgaagcgctggcggaaggccgcagtaaggcgcaggccaacagtctgaaaggggtcaaaaaaaccgcctttgcgcgcaaattacgcgaacctaaatacggcgcgcagatggaccacgttccggcggatgaactgcgcaaaggtgacgtggtgctggtggaagccggggacatcatcccctgcgacggggaggtaattgagggcggcgcgtcggtagacgaaagcgctattaccggggaatccgcgcccgtgatccgtgagtcgggcggagatttcgcctcagttaccggcggaacgcgcattctttccgactggctggtgatccagtgcagcgttaacccgggcgaaacctttctcgaccggatgatcgccatggtggaaggcgcacagcgtcgtaaaacgccgaacgagatcgccctgaccattctgctggtggcgctcaccattgtgttcctgctggcaacggcgaccctgtggcccttctccgcctacggcggtacagcggtcagcatcaccgtactgatcgccctgctggtctgtctgatccccaccactatcggcggcctgctttccgcgattggcgtggcggggatgagccgtatgctgggcgcgaacgtcatcgccaccagcggacgcgccgttgaagcggcgggtgacgtagacgtactgctgctggataaaacagggaccatcaccctgggtaatcgtcaggcctctgactttttacctgctcccggcgtggatgaaaaaacgctggccgacgcggcgcagctttcttcgctggccgatgagacgccggaaggtcgcagtatcgtgatcctcgccaagcagcgctttaacctgcgccagcgcgacgtacaaagcctgcacgccacgttcgtgccctttacggcgcaaacccgcatgagtggaattaacattcaggaccgaatgatccgtaaagggtccgttgatgccattcgccgtcatattgaagccaataatggacatttccctccggaagtcgaccatctggtggaaagcgtagcgcgtcagggggcaaccccgctggtggtggcggaaggtgcaagcgttttgggggttatcgccctgaaggatatcgttaaaggcggtataaaagagcgtttcgcccagatgcgtaagatgggcattaaaacggtgatgatcaccggggataaccgtctgactgcggcggccattgccgccgaagcgggcgtggatgatttcctttccgaagcgacaccggaagcaaagctggcgctcattcgccagtatcaggcggaaggtcgtctggtggcgatgaccggcgacggcaccaacgacgccccggcgctggcgcaggccgacgtggcggtggcgatgaactccggtacccaggcggcaaaagaggcgggcaacatggtggatctcgactcgaacccgaccaagctgatcgaagtggtgcatatcgggaagcagatgctgatgacgcgcggctcgctgaccacgttcagtatcgccaacgacgtggcgaagtatttcgccataatcccggcggcctttgcggcaacctatccgcagctgaatgccctgaacgtaatgcacctgcactctccagcctcggccattttgagcgcggtgatcttcaacgcgctgattattgtctttcttattccgctggcgctgaaaggggtgagctataagccgctgacggccgccgccatgctgcgccgtaacctgtggatttacggtctgggtgggctggtggtgccctttattgggatcaaggttatcgacatgttgttaacgctgttcgggctggtttaa

SEQ ID NO: 525192 - DNA, 1680 bp, Stenotrophomonas maltophilia
atggctgctcaggcgtttttgcttattgccagctttttactgctgctgtttgtgctcgccaggccgctgggaacagcgctggcacggctgataaacaacgtgccactgccgggtacgcgaaaaattgaaaacgtgctctggcgcatttcaggtatcagcgaccgcgaaatgagctggggccagtacctgatggcgatactgcttctgaatatcgtggggcttattgccctctttacgttgctcatgctccagggcaatttgccgttgaatccgcagcagttaccaggtttatcctggcatctggcgctgaacacggcggtcagctttgtcaccaataccaactggcagtcttacgccggtgaaaccacgctcagctacttcagccagatggcagggttaaccgtgcaaaactttctgtctgcagccagcggtatcgcggtgatcttcgccctgacgcgcgcgtttgcccgtcagaatgtcagcacgctcggcaacgcgtgggttgatgtcacgcgcatcaccctttggatcctggtgcctgttgcgctgattattgccctgttctttatacagcaaggcactctgcaaaacctgctgccttataccccttacacctcgcttgaagggggcagggaactcctgccaatggggccagtggcgtcgcaggaagcaatcaagatgctgggcaccaacgggggcggcttcttcaacgccaactcatcgcatccgtttgaaaacccaacggcattaaccaattttgtacagatgctggcgatattcctgatccccgccgcgctctgcttcgcctttggcgatgtggttaacgatcgccgccagggccgtacgctgctgtgggccatgtcgttaatcttcgtggtctgcgttgcactggtgatgtgggccgaatggaacggcaacagccatttcatgcagctgggggctaacagcaatatcaacctggaaggcaaagagagccgcttcggcattcttgccagcagcctctacgcggtggtcaccacggcggcctcctgcggggcggtgaacgccatgcacgactctttcaccgcgcttggcggcatgatcccgatgtggctgatgcagattggcgaggtagtcttcggtggggtcggttcggggctgtacggcatgctgttgttcgttctgctcgccgtgtttatcgccgggctgatgatcggccgcacgccggaatatctcggcaaaaaaatcgacgtccgcgaaatgaaattaaccgcgctggcaatcctggtcacccccacccttgtgctgctcggtaccgccctggcgctgatgaccgacgccgggcgcagcggcatctttaacccgggcattcacggctttagcgaagtgctttacgccgtttcgtctgccgcaaacaacaacggcagcgcctttgcagggttaagtgccaactcaccgttctggaactgtctgctggcgttctgcatgttcttcggtcgtttcggcgtgattattcccgtcatggcgatcgccggaacactggtgaataagaagatccagccgaccactaccggtacgttaccgactcacggcgcgctgttcgtcggcctgctgattggcaccgttctgctggtaggtgccttgacctttatccccgccctcgcgttaggcccggttgcggaatatctctctttacgctga

SEQ ID NO: 525193 - DNA, 207 bp, Stenotrophomonas maltophilia
atggatctttataaagagtatccggctcatatcgtgttcatgcgtcgcactttcgccgtagtggctggcgtgctggccctgccggtgatgctgttctggaaagatcgcgcacgtttttacagctatctgcaccgcgtctgggcgaaaaccagcgaaaagccggtgtggatggatcaggccgagaaagcaacctgcgatttctactga

SEQ ID NO: 525194 - DNA, 429 bp, Stenotrophomonas maltophilia
ttgcccgctgacctgttcgaaatcgtcgtcatgcgtgcaggcacggccctgttcgcgatcgacgtgcgggcagccatcgaaatacgcggcccggagaggttcggcccggtagatcatccgggcaggccgaccctggaggtgcgcgggcaagcgttgccggtggccgacctgtgcagcatgagcggtcaaccggcattcgagggtggatgcccggccatgctgttgatcaaggcaggcacttcaacgctggcactggctgttgacgaggtgctgcagatcgagacgccagatgcatctccagacgtatccgcgcctgcccaaggtcgatcgttcaacttctgcagccgacacgtccagatcgattccgcacgttcggctgcgctgatcgaaccgcagtcgctgctggctgcactcgcggtgcgggactga

SEQ ID NO: 525195 - DNA, 960 bp, Stenotrophomonas maltophilia
gtgaaaatcgctgccgtttgccgcaatgcccttcttttaacaggactttttgttttaggactaacctcagccctcgccgccgactggccgcgccaggtcaccgacagccgcggcgttcacacgcttgagagcaaaccgacgcgcattgtctccaccagcgtgaccttaaccggctccctgctggccattgacgcgccggtcattgccagcggcgcgaccacgccaaacaaccgcgtggcggatgcgcagggcttcctgcgtcagtggggcgatatcgccaaacagcgtaaggttgcccggctgtacatcggcgagccgagcgccgaagccgtcgcggcccagatgccggacctgattttgatcagcgccaccggcggggattccgcgctggcgctctacgatcagctttccgccatcgcgccgacgcttatcattaactacgacgacaaaagctggcaggaactgctgacccaactggggacgatcaccgggcaggagacacaggccgcagagcgcatcgctgccttcgacaaacagctcgccaaggtgaaacagcagatgaagctgccgccacagccggtgaacgccatcgtctacaccgccgcggcgcacacggcgaacctgtggacgacagactccgcgcagggcaagcttttgcaccagttgggctttacgctggccgacgtgcctgccgggttgcacacctcaaaaagtcagggcaaacgccacgacattatccagttagggggtgaaaacctggcgacggggctgaacggcgaagggctgttcgtgtttgccggcgatcagaaagacgtggacgcgatttacgccaacccgctgctggcgcatctgccgtcggtgaagaacaagcgcgtctgggcattaggaaccgagacgttccgcctggattattacagcgcgatgttggtgttgcagcgtttgaattcaatttttaaataa

SEQ ID NO: 525196 - DNA, 459 bp, Stenotrophomonas maltophilia
  misc_feature (358)..(367): n is a, c, g, or t
atggacacgtccctggctgaggaagttcagcacaccgcgacaacgctgcaatcagacagctttttctttatgtcgccttaccgcagttttaccacgtccggctgttttgcccgtttttctgaacccgccgtcggcagtgacgatccggcgggtccctttcagcagaaattagctcaggctttccggaatgcgaaaaacagcggcattgcccatccggtgatggtaggggcgatccccttcgatacccgcaaaccgtcatcgctgtttattccgcaacgctggcaaaccttctcccgcccggcgcgtcagcagtccgcacgttatgcctccggcgcgcagacgctgaacgtgcaacagnnnnnnnnnngtgcaacagcgcaccgagatcccgtcgcagccggttttcgaggagatggttgctcgcgccgcgtcgctcaccgctacgccgcaggtgaataa

SEQ ID NO: 525197 - DNA, 783 bp, Stenotrophomonas maltophilia
atggttgctcgcgccgcgtcgctcaccgctacgccgcaggtgaataaggtggtgctgtcgcgcctgattgatatcgctaccgacaaacagatcgatagcagcgcgctgatggagcgtcttatcgcccagaacccggcgagctttaacttccacgtaccgctggaagacggcggcgtgctgctgggcgccagcccggaactgctgctgcgcaaagagggcgcgcactttagctcgctgccgctggcaggctctgcgcgccgtcagccggacgatgtgctggatcgcgaagcgggcactaagctgctggcctccgaaaaagaccgccacgagcacgatctggtcacgcaggcgatgaaaaccattctggaaccgcgtagccatcatctgagcatgccggcttccccgcagctcatcaccaccccgacgctgtggcatctggccacgccggtagaaggtgaggcacgtgaaaacgagaacgccctgacgctggcctgcctgctgcacccgacgcccgcgctgagcggcttcccgcatcaggcggcaaaagagctgattgccgagctggagccgttcgaccgcgagctgttcggcggcatcgtcggctggtgcgacagcgaaggtaacggcgagtgggtggtaactatccgctgcgcgcggctgcatcaaaataccgttcgcctgtttgccggcgcgggcattgtgcctgcctcctccccgttcggcgagtggcgcgagacgggcgtgaagctctccaccatgctcaacgtgtttggtttgcactaa

SEQ ID NO: 525198 - DNA, 1611 bp, Stenotrophomonas maltophilia
atgaccatcccttttacccgctggcctgaggagtttgcccgccgctaccgtgaaaaaggctactggcaggatctgccgctgacccacatcctgacggaccatgcggacagcgatacggtcgcgataattgacggcgatcgccgcatcacctaccgcgcgtttaatcaggcggtgacgaatctggcgtcctcccttcaggcgcaggggctgcatcgcggggagaccgcgctggtgcagcttggcaacgtggctgagttctacatcaccttcttcgcgctactgcaaatcggcgtcgcgccggtcaacgcgctctttagccatcagcgcagtgaactcaacgcctacgcggagcagattaaacccgccgtgctgattgccgatcgcgaccacgcgctgttctcgggcgacgattttctcaacacctttgtggatgcgcatcgctcggtacgcgttgtgctgctgcgtggcgataagggcgaacatgcgctggaggcggcgattgcgcgcccggcggacaatttcatcccgaacccgacgcccgccgacgaagtggcgttcttccagctctccggcggcagcaccggcacgccgaagctgatcccgcgcacgcataacgattacgactacagcatccgtcgcagcaacgaaatctgcggtatcactgcgcacacccgctatctgaacgcgcttcccgcggcgcacaactacgccatgagctcgccaggatcgttaggcgttttcacggcgggtggctgcgtggtgctggctaacgatccgagcgccacgctctgcttcccgctgattgagcagcatcagataaatgtcacctcgctggtgccgcctgcggtcagcctgtggttgcaggcgattgccgacggcgcggggaacgcccagctgaaatccctcaggctgctccaggtgggcggcgcacgcctctccgccacgcttgcggcgcgcattccggcggaaattggctgccagcttcagcaggtgtttggcatggcggaagggctggtgaactataccgccctcgacgatgcgccggagcgcatcatcaatacccagggccgcccgatgtgcccggacgatgaagtgtgggtggcggacgaggacggtaacccgctgccgcgcggggaggtcgggcgtctgatgacgcgcggcccttacaccttccgcggctatttcaacagcccggaccacaacgccagcgccttcgatgccaacggcttctactgctcgggcgatctgatcgccatcgatgagcagggttacatcaccgtgcaggggcgcgagaaagatcagatcaaccgcggtggcgagaagatcgccgccgaagagatcgaaaacctgctgctgcgccacgacgcggtgatccacgccgcgctggtgagcatggaggacagcctgctgggcgaaaaaagctgcgcgtacctggtggtgaaacagccgctgcgcgcggtggaggtgcgccgcttcctgcgcgagcagggcgttgccgaatttaagctgccggaccgcgtggagagcgtggatgcgcttccgctcacgccggtcggcaaagttgataagaaacagttgcgcctgtggcttgctgaacgcgcccggggctga

SEQ ID NO: 525199 - DNA, 855 bp, Stenotrophomonas maltophilia
atggctattccaaaattaaccgcatatgcgctgccaaccgccgccgaactgccgaccagtaaagtaagctgggcgtttgagccggagcgcgccgcgctgctgatccacgatatgcaggagtacttcctgaatttctggggcgaaaatagcgacatgatgcagcaggtagtggcgaacatcgctaaactgcgcgcgtactgcaaagagcacaatattccggtgtactacaccgcgcagccgaaagatcagagcgatgaagaccgcgccctgctgaacgatatgtgggggccgggtctgactcgctcgccggagcagcagcgcatcgtcgctgagctgaccccggacgaagcggacaccgtgctggtgaagtggcgctacagcgcgttccaccgctccccgctggagcagatgctgaaagagaccggccgcaaccagcttttgatcaccggcgtgtacgcccacatcggctgcatgaccaccgccaccgacgcctttatgcgcgacatcaaaccgttctttatcgccgacgcgctggcggatttcacccgcgacgagcacctgatgtcgctgaaatacgtggccggacgttcgggccgcgtggtgatgaccgacgagttgctgccgtctgttccggcaacgaaagccgcgctgcgtgagctgatcctgccgctgctggacgagtccgacgagccgatggatgacgaaaacctgatcgactacggtctggattcagtacggatgatggcgctcgccgcccgctggcgcaaagtgcacggcgacattgatttcgtgatgctggcaaaaaatccgaccctcgacgcctggtgggcgctgctctcccgcgaggtgaagtga

SEQ ID NO: 525200 - DNA, 753 bp, Stenotrophomonas maltophilia
atggcttttgattttaccggtaaaaccgtctgggtgacgggcgcgggtaagggcattggctatgcgaccgcgctggcatttgtggaggccggggcgcaggtgaccgggttcgatctggctttccctcacggcgaatatccgtttgccaccgaaacgctggacgtggcggatgcggcgcaggcgagtgatgtctgcgggcgtttgctcagcagccttgagcggctcgacgtgctggttaacgcggcgggcattctgcgtatgggcgcgacggatcagctttcgcaggaggactggcagcagacctttgcggtcaacgtcggcggcgcgttcaacctgttccagcagacgatgggccagttccgtcgtcagcagggcggggcgattgtgaccgtagcctctgacgcggcgcacacgccgcgcatcggcatgagcgcctacggcgcgtcgaaagcggcgctgaaaagcctggcgctgacagtcgggctggagctggcgggcagcggcgtacgctgtaacctggtgtcgccgggttctacggataccgacatgcagcgcacgttgtggaccagcgatgatgcggaacagcggcgcattcgcggcttcggcgagcagttcaaactcggcattccgctcggtaaaattgcccgtccgcaggagattgccgcgaccgtgctgttcctggcatccgatgccgccagccatatcaccttgcaggatatcgtggtggacggcggctccacgctgggggcgtaa

SEQ ID NO: 525201 - DNA, 345 bp, Stenotrophomonas maltophilia
  misc_feature (252)..(261): n is a, c, g, or t
atgatctggaaacgtcatttatccctcgacgaactgaatgccactagccagaacacgatggtggaacaccttggcatcgtctatacccgcctcggggacgatacgctggaagcggagatgccggtggatgcgcgcacccaccagccgtttggcctgctgcacggcggtgcgtcggcggcgctggcggaaacgctggggtcgatggccggttttctgatgacccgcgacgggcagaatgtggtgggcacggannnnnnnnnncgctgcatctgggccgctccagtcagagttgggagattgtggtgttcgacgagcaggggcggcgctgctgtacgtgtcggttga

SEQ ID NO: 525202 - DNA, 1113 bp, Stenotrophomonas maltophilia
atgaatcttgaccattatatcgaagagctgaaaaccctggtgaacgtagactgcggcacccagacgattgacggcgtcgccgctgttgcaggcatcatgcagcaactgtggcagcgcgaaggctggcatacggagcaggtgaacctgggcgacaaggtgggccccggcgtcttcgtcagtaacaagccgcaggcggaacggttcgacgtgctgctggtcgggcatctggataccgtatttcccgccggcaccgtggccgcgcgtccgctgagcgaggatgaaacccgcctgtacggccccggtgtctcggatatgaagagcggacttctgaatattttgtgggcaatgcgcgcgcttgacgccgcagacaacgatcgtctcgcgattgccgttgcgatgaacccggacgaagagaccggatctgtccattcccatgagtggattggcgagctggctaagcgttcccgctgcgtgctggtgtgcgaagccgcccgcgccgacggttcgctggtgaaagcgcgtaaagggatggcgggctatcacttcacctttagcggcgtggcggcacacgcgggcaatgacccggaaaaaggccgctcggcgatcaccgcgctggcaaagagcgttatcgccatcaatgcgctgacggactgggatcgcggcactacacttaacgtcggcgtgattcagggcggcagcgcggcgaacgtggtcgcggacagcgctgtggcagaactggacgttcgcttctgggaaaacgacgagtatgaccgggtgaaccaggcgctggagttgttatgtgaacaaggctttttagacggcgtgaccaccacgctgacgcgggttaatcacaaaccggcgatggccgcgagcgacgcgacgcaggcgctgatgcagcaggttgaagcggcgggtaaagcggaaggcatcgacattacctggcaggcagtcggcggcggcagcgacgccaaccacaccgccgcgctcggcatccccacgcttgacggcttcgggccggttggcgccgggttccacagcccggcggaatggctggataaagcgtccattgcgccgcgagttcggctgttgaagcgggtggtatcgatgttgtaa

SEQ ID NO: 525203 - DNA, 465 bp, Stenotrophomonas maltophilia
atgagtgccccacagtccaatcccgtcattaccgatgtgtttatcgaaggcgcgcgcaaaggctggagcattgccaccagcagcacgctgcccaacgtggtgatggcctttatcatcatcaaggcgctggaaattaccggcgcgctgaaagggctgggcacaatcttttccccgctgatgggcctgtttggcctgccgggcgaagcggccgccgtgctgattggcggctggatgtcgatgggcggcgggatcggcgttgccatcggcctgtttgataaaggcatcctcaccggcgagcacctggcgatcctggcgcccgccatctacctgatgggctcgcaggtgcagtacctgggccgcattctgggggtgattggcacccgcgccaaacgtattccgctgatgatcgccctctcggtggtcaacgctttcttagccatgctgctgatgcgcattattctctga

SEQ ID NO: 525204 - DNA, 696 bp, Stenotrophomonas maltophilia
atgaacagttcagtacctcaggatagtcaggtcgggccgggcgcgtacttcgcgctggcgtttgcagccgttttcttctcgggtctgttaggcggacaagagtggtacggcgtctttgatttcaccaccctcaacggcgcttttggcaaagtggtcagcaaggccagtctggatgacggtacgttaaccacagccagcagcgcctttcgcggcaccggcggcagcggcgcgatggacgggtttctcttcgcgctcggtttaattcctgcggtgatgttcgccctggggatgatcaacgtgctggagcactatggcgccctgcgtgccgcgcgcaaactcttaactcctctgctgcgcccgctattggggatccctggcaccaccgggctggcgctgattggcagcctgcaaagtaccgacgtgggcgcgtcgcttacccgtaatctctctgatgaagggcaaatcagcgaaaaagagaaagacgttttcgccatgttccagttctccgccggggcgatgatcaccaactttttctcttccggggcgatcctcttcacgctgctcgccgttgacggcacggcggcggtgcccacctccatcggggcctgtatcgcggtgatgtttatcatgaaaattgtcggcgccaatctgctgcgcctgatcctgacgtttacccataaaggagacgccgcatga

SEQ ID NO: 525205 - DNA, 2106 bp, Stenotrophomonas maltophilia
atgaacaactcagggaaataccttatatgggcagggctctccgttgtgggagcctttgccctgggctacatcgccctcaaccggggggagcagatcaatgcgctctggatcgtggtcgcctccgtctgcatttatctgatcgcataccgtttttatggccgttatatcgcgaagacggtactgggcgtagacggcacgcgcatgacgccggccgtgcgtcataacgatggtctggactacgtgccgaccgataaaaaagtgctgttcggtcaccatttcgcggcgattgccggggcaggcccgctggtggggccggtactggccgcgcagatgggctacctgccggggatgatctggatcctcgcgggggtggtgctggcgggcgcggtgcaggacttcatggtgctgttcgtctccacccgtcgcgacggtcgttcgctgggtgagctggtgaaagaggagatgggggcaactgccggggtgattgcgctggtggcgacctttatgatcatggtcatcatcctcgcggtactggcgatgattgtggtgaaagccttgacccacagcccgtggggaacctataccgtcgccttcaccattccgctggcgctgttcatggggatctacatccgctatctgcgtccgggacgcattggtgaagtttcagtcattggcctggtgttcctggtgtttgctattatctccggcggctgggtggcggaaagcccgacctgggcaccgttcttcgacttcaccggcgtgcagctgacctggatgctggtgggctacggcttcgtggcggcggtgctgccggtatggctcctgctggccccgcgtgactacctctctacgttcctgaaaattggtaccatcgtcgggctggcgatcggcattctgattatgcgcccgaccctgaccatgcctgccctgaccaaattcattgacggcaccggcccggtctggaccggcaatctgttcccgttcctgtttatcaccatcgcctgtggggcagtgtctggcttccatgcgcttatcgcctccgggaccacgccgaagatgctggcgaatgaaaatcaggcctgcctgattggctatggcggcatgctgatggaatccttcgtggcgattatggcgctggtctcggcctgtattatcgacccgggcgtgtacttcgcgatgaacagcccgatggcggtactggccccggccggcactgttgacgtggtcgcctctgctgcgcaggtggtgagcggctggggctttgcgatcacccctgatacgttgacgcatatcgctaacgaggtcggcgagcagtcgattatctcccgtgcgggcggggcgccgacgctggcggtgggtatggcctacatcctgcacggtgcgctgggcgggctgatggatgtctcgttctggtatcacttcgccattctgttcgaggcgctgtttatcctaacggcggtggatgccggtacgcgcgcggcgcgctttatgttgcaggatctgctgggggtgatctccccgaatctgaaacgtaccgattcactcccggctaacctgctggcgacggcactgtgcgtgctggcgtggggctacttcctgcatcagggcgtggtcgatccgctgggcgggattaacaccctgtggccgctgttcggtatcgccaaccagatgctggcgggcatggcgctgatgctttgtgccgtagtcctgttcaagatgaagcgccagcgttacgcatgggtggcgctggtgccaacggcgtggctgctgatctgtaccctgacagcaggctggcagaaagccttcagcccggacaacaaggtgggcttcctggccattgccaacaagttccaggcgatgatcgacagcggcaagatcccggcgcagtacaccgaatctcagctgtcccagctggtgtttaacaaccgcctggacgccgggctgaccatcttctttatggtggtggttgtggtgctggcgttgtattctctgaaaaccgcgctggcggcgttgaaagtcgacacgccaacggcgaaagagacgccgtatgagccaatgcctgagaacctggacgagattgtcacccaggcgaaaggggcgcattaa

SEQ ID NO: 525206 - DNA, 225 bp, Stenotrophomonas maltophilia
gtgagggaaacaaacgagaaactgattatgttcgacaccctttccaaagcaggtaaatacctgggccaggccgctaaaatgatgattggcgtgccggattacgacaactacgtcgagcatatgcgcgtcaaccacccggatcagacgccaatgacctacgaagaatttttccgcgaccgccaggacgcccgttacggcggtaagggcggggcgaagtgctgttaa

SEQ ID NO: 525207 - DNA, 405 bp, Stenotrophomonas maltophilia
atgactattcagttcatcaaggatgaagaaggaaaaaaacagtatgttgtcataccctacggtgaatattttcgcatgcgtttagccatgcttgagtatgatgacgatgatgaaaacgactgggaagacatcccttacgaatcagacatctacgataacgtaggtttaccgggtgaagtgtgcgacatcatgcatagcgagaacgtcagcctgcaggccgcgtggcgtatcctgcgcgggctatcccagcaggaggtggcggaaaaactcggcatcagccagtccgctgtatcacagctggaagcgctggactcccgtccgcaaaagcgcacacgcgaaaagctggcggcaatttatggctgcaagcaggagcaaatcagcctctatttaccgaaagagggttaa

SEQ ID NO: 525208 - DNA, 303 bp, Stenotrophomonas maltophilia; identical to SEQ ID NO: 160581

SEQ ID NO: 525209 - DNA, 744 bp, Stenotrophomonas maltophilia
atgcagatcgatttaacaggtaaaaaggcgctggtcaccggcgccagtcgtgggctgggtcgggcgattgcgctgtcgctggcacgcgccggtgccgatgtggttatcacctacgaaaaatccgtcgataaagcccagcaggtcgtcgatgaaatcaacgcgctggggcgacacggcgaggcgattcaggccgacagcgccagcgcgcaggcgattcaggatgcggtcacgcaggcggcgcgctccctcggcgggctggatattctggtcaataacgccgggattgcacgcggcggcccgctggagtccatgaccctggcggacatcgacgctctgatcaacgtcaatatccgcggcgtggtgatcgccattcaggaagcgctggtgcatatgtctgacggcggacgcatcatcaacatcggcagctgtctggcgaaccgcgtggcgcagccggggatcgccgtctactcgatgaccaaatcggccctaaactcccttacccggggtctggcccgcgatttaggcccgcgcggcattaccgtcaacctggttcatcccggcccgaccaacagcgatatgaacccggaagacggcgagcaggcggaagcccagcgccggatgatcgcgcttggtcattacggccagccggaggatatcgcagcggcggtcaccttcctcgccagcccggctgcggggcaaatttccggcaccggtctggatgtggacggcggtctgaacgcctga

SEQ ID NO: 525210 - DNA, 1089 bp, Stenotrophomonas maltophilia
atgagcaacaccgatatccgcgtcgtgcccggcccggcgaactacttctctcatccgggaagccttgcgcacctggatgatttctttactccggaacagctttcccgcgcggtgtggatctacggcgagcgggctatcgagggcgcacgcccttatctgccggagagttttaacgcgacgggggcaaaacatctgctgtttaagggccattgcagcgagcgtgacgtcactcatctggtgaacgcgtcgggtggtgaagccagcgtggtgattggcgtgggcggcggtgcggtaatggataccgtcaaggccgtggcgcgtcgtctgggcgtgccgttcgtgggcattcccaccatcgccgccacctgcgcggcgtggaccccgctctccgtgtggtacaacgatgccgggcaggcgctacagtttgagatttttgacgacgccaactatctggtgctggtggagccgcaaatcatccttaacgccccggcggaatacctgttggcaggcatcggcgatacgctggcgaagtggtacgaagcggcggtactcgcccctgaaccggaaaacctgccgctgaccgtgcgtcttggcctgaacggtgcgctggcgatccgcgacgtgctgctggagcgcagcgaagaggcgctggccgaccagcagcgcggcgaccagacgcaggcgtttcgggacgtggtggacgccgttatcgccggtggcggtatggtcggcggtctgggcgaacgctatacccgcgtggcggcggcacatgcggtgcacaacggcttaaccgtgctgccgcagacggaaaaatacctccacggcaccaaggtggcctacggcattctggtgcagagcgccctgctcggtcaggaggacgtgctggcgcagctggtggcggcataccagcgttttaacctgccgaccacgcttcgcgcgctggaggtcgatatccataaccgcgacgagctggacaaggtcattgctcacaccctgcgcccggtggagtcgattcactttttaccgattacgttaagccctgacgttctgcgcgccgcgtttgagaaggtggaatccttcagccgttaa

SEQ ID NO: 525211 - DNA, 1443 bp, Stenotrophomonas maltophilia
atggtttccagtcgccttgagatgcgcggtatcagcctggccttttccggctttcaggccctgtcgcgcgtggatttcaccctgaatggcgggtcggtgcatgcgctgaccggcgccaacggcgcgggaaaatcgacgttgatggcggtgctgtgtgggacgcacgatcgttatgaaggcgaaatctgcattaacaaccagcaggtaagcatcgcgctgatccccgggctgagcattgcggagaacattatgctcgaccagctggcgcagccgggacaccgctacagctggcgcgcgattcgtcagcaggcgcggcaggcgctggcgcagctggatgtttcgctggacgttcgccgttccatcgacagctgcacgctggctgaaaagcagcagattttgctggcgcgggcgctctcgcaccactgccgttttctcattcttgatgagcccaccgcgccgctggacgcgcaagaaagcgagcgtctgtttgcggtagtaagacgtctgcaacagcagggcattggcgtggtgtttatttctcaccgcattcacgagctgaaggccatctgcgacaccctgacggtgctgcgcgacggcaggctgattgagtccggcccgatggcggatctgagcggagaggagatcgtcgagaagatgctcggccacgagctgagcgatatctatccgcccccgcgaccgccgcacggtgaagagatgctgctgcgggtggaaggcctgcacgacgacgcgctgctgaaagatatctccctgcatctgcgcaaaggtgaaatcctcggcattgccgggctggcgggggcggggaaaacggaactctgcaaggcgctgtttggcgccagcaaaagccgcgtggcgcgcggcgagctgaaccatcaggcctggaaaccgcgcgatccggcagactcggtgctacgcggtctggcgctggtgccggaggagcggcgcaaagagggcatttttatcgacgagccggtgagcatgaaccttgccgtgtgcgccgataacagtttctcgcgctggagcctgtttggtcatcgtcaggcgtggcgctgggcggaagaggtgattgcccgcgtcggcgtgcgcacgcgcgggccggggcaggtgctgcgtcggctttccggcggtaaccagcagaaggtcgccatcgggaaatggctgcgcaatgacgccagcgtgctgatattcgacgagccgaccaaaggcgtggacgtgaaggccaaaaccgatctgtttcagctgatcgacggcctggcgcgcgagggcaaaggggtgatttacgcctcgggtgaatttgccgagctggtcggtctgtgcgaccgcatctgcgtgctgtgggacgggcgcatcgtggcggaaatcgccggggcagaggcccgggaagagacactactttattattcaaccggaggaacggcgtcgtga

SEQ ID NO: 525212 - DNA, 996 bp, Stenotrophomonas maltophilia
gtgagcaaggccctttcagtgaccacggcggcgtctggccgtcagcagattttcgattttctttataagtggggcatgctgctgaccgtcgtcgcgctggtggcggtgtttggcctggcgtcggacagcttcctcgacccgaacaacatcatcaacattctgcgctcgattgccatcgtgacggtgattgccgttggcgtctctatttcgctgaccgtcggcgggttcgatctctccgtgggatctaccgcgtcgctggcgaacgcgctggtgatttcgcttttcgtctggcacggctttggcaccaccgagtcgattctgctgaccctcgcgctctgtacgctggtcggcctgtttaacgcctttctgatcgtcatcctgcgcattccggacatgctcgcgacccttgccagcctgtttgtcattcagggtgtggcgatgacctacagctacggcgggtcgattaccgagaacatggtactgccgagcggcgacatggcggaagggaccattccggcggcgtttggcctgctggggcaggtgccgaccattgtgatcgtcatgctggtggtgacgattctggcacagctgggcctgtcgctgaccacccatggacgccggatgtacgccattggcggcaaccccgaagccgcgcgcctctccggcattcgcaccacccgctacaaagtggcagcctacgtgattgcctctctgctggcggggctgggcggcattctgctggcctcgcgtattggttcatcgcaggtgaatgcgggcggcggctacctgatggacgcggtggcggcggcgtggatcggcttctcgctggccggatccggcaagccgaacgcgctgggtacgctggtgggggcggtgatcctcggcgtgctgtcgaacgggctggtgatgctctccgtgccgtattacgccatggacattataaaagggctggtgctcgcggtagcgctggcgattacctacatacaaaaacgctga

SEQ ID NO: 525213 - DNA, 1149 bp, Stenotrophomonas maltophilia
  misc_feature (947)..(956): n is a, c, g, or t
atgaaaaagattgcgctctctttggtagctcttgggttactcacttctctgccgggcctggcggctacccccgcgccggttccgaccgccattgccagccatgacggcccgatccgcatcgcggtgatccgcaacctgggctcggacgacaacaccacgcagtttgttgccggggcgattcaggaagggaaaaagctcggctttaaggtcagcacctttttaagtaacggggacgacgccaaattccaggatttcgttaaccaggccatcagccagaaatacgacgggattattctctctcaggggcgcgatccgtactccaccgcgctggtgaagaaggcggtggatgccgggatcaaagtttcggtgtttgataccgctgtgaacggcgagatcccgggcgtaaccgttacccagcaggacgatgcctccctgaccaacctctctttcggccagctggcgaaagatttcaacggcaaggccaatatcgtcaagctatgggtcgcgggcttcccgccgatggagcgccgtcaggcggcctacaaagaactgcaaaagcagtacccggagattaaagagctggagtccatcggcgcggtctcctctgacgtgcagggcgacactgccaacaaggtgggcgcgatcctcgcgaaatacccgaaaggtaaaatcgatgccatctggggtacctgggatgccttcagccagggcgcgtataaggcgctgaaagagaacggccgaaccgagatcaaactctacagcatcgacatctccaaccaggatttacagctgatgcgcgagccgggtagcccttgggcagtgagcgtggcggtggatccgaagctgattggcgcgaccaacgtacgcctgattgccaataagattgccggagaagcgacgcctgccacttacgatttcaaggcggtggccattccgcaggcgctgcnnnnnnnnnnatttcaaggcggcggccattccgcaggcgctgctgaccgcccagccgggcgcggtgaacgtggcgtctctggggaaaatcattccgggctggggccagacggaagattttgttgcgccgtggtttgcgacgctggaaggcaggtcaaaataatggccggtggcgcttcgcttaccgggcctacggtgttgtag

SEQ ID NO: 525214 - DNA, 1242 bp, Stenotrophomonas maltophilia
atgtctgcattacctcaacccgaatacagccgcaatatgcggctgattggccatagcgatcagggcggtcgcccggacggcgtgcagctgatggtacaccgcggtttcgcctatatcggccatatggtgtcgcagggcttttcgatagtggatgtgcgcgacccgaaaaaaccaaaagccgcaggatacgtgcctgcgccgccgggtacctggaatgtgcatctccaggcgcatgacgacctgctgctggtgatcaacgcccgggatctgtttgccgatgcgcgttttgccgacgagaaggtctactacacccgccaggtgggggagaccgtcagtgacgtgcaggataaaggctggagcgccgggcttcgcgtctttgatatctccacaccggacaggccacgcgagataggctttttatcgctgagcggcatcggcattcaccgcatctggtacgtcggtggccgctgggcgtatgtctcagcgctgatagacggctttaccgactacatctttctgaccatcgatctggcggacccgcgcaagcctgaagtggcgggacgctggtggctgccggggatgaatcaggccgaaggcgaacagccgaactggccggaaggcaaacgctacgccctgcaccatgcgattattgcaggcgataccgcgtacggcagctggcgcgacggtggcctgacgctgctggacgtgaaggaccgcacccggcctaagctcattagccatcgtaactggagcccgccgtttggcggcgggacgcacaccgcgcttccgctgccggatcgcgacctgctggtggtgctggacgaggcggtgctggataaccagcaggacggcgagaagctgatctggctgtttgatatccgcgagccgtcgaacccggtgagcatttctaccttcccgcagccggatgaaaccgactacgtggcgaaaggggcgcatttcggcccgcacaacctgcacgaaaaccggccggggagctttgtcagctcaacgctgatcttcgcgacgtaccagaacgcgggcgtgcgcgcgtataacatttccaatccgtatcgcccggtggaaacgggggcgctggtgcccgcggcgccggaaaagatgatggatacgcggcccaatcgcccgcaggtgatccagtcgtgcgacgtgtttgtggatgcgcaggggattatttacagcacggattataacggtgggatgtcggtgattgagtatttaggatga

SEQ ID NO: 525215 - DNA, 1200 bp, Stenotrophomonas maltophilia
atgtcgcaataccgtacctttaccgctcaggacgccgtggagtatgccaggcagtttggcggacttgacgatccgtcatcgctggtggaggcgcaggaaatcggcgacggcaacctcaacctggtctttaaaatattcgatagcgcgggggtgagccgcatcgtcgttaagcaggcgctgccctatgtgcgctgcgtcggcgagtcctggccgctgacgctggatcgcgctcgcctggaggcgcaaaccctggtcgagcattacaagcacagccctgagcacacggtgaaaatccaccactttgacccggaactggcggtgatggtgatggaagatctctccagccatcgcatctggcgcggcgagctgattaacaacatttactacccgcaggcggcgcggcagctgggtgaatatctggctcacaccctgttccacaccagcgatttttatctgcatccgcacgagaaaaaagcgcaggtggcaaaattcatcaacccggagatgtgcgagatcaccgaagatctgttctttaacgatccgtaccagatccacgcgcgcaacagctacccggccgatctggagaacgatgttgccgccctgcgcgacgacgcccagcttaaaatcgctgtggcctccctgaagcaccgcttcttttcgcatgccgaagccctgctgcatggggacattcacagcggctcaatttttgtggccgacggcagcctgaaggccatcgacgccgagttcggctactttggcccgattggctttgacgttggcactgccatcggcaacctgctgctgaacttctgcggcctgccggggcatctgggcattcgcgatgccgccgccgcgcgcgagcagcgcctgaccgatattcaggaactgtggaacaccttcgcggagcgcttccaggcgctggcgaacgagaaaacgcgcgacgccgcgctcagcgcgccgggctatgcctctgcgttcctgaaaaaggtctggcacgatgccatcggattctgcggcaccgagctgattcgccgcagcgtcgggctttcccatgtggcggatatcgacaccattcaggatgaagcgatgcgtcacgaatgcctgcgccacgcgatatccctcggcaaggcgctgattgtgattgctgaccgcatcgacagcgcggaagagctggtcgcgcgagtgcggcagtacagttga

SEQ ID NO: 525216 - DNA, 1017 bp, Stenotrophomonas maltophilia
atgcagacattacagacgaccagcctgcgggtggcgaataatcagctctatattctcgaccagcaggcgcttccgcaggagaaacgctggctgaatgcctcgacggtggaggcgctggttgggcatatccacgctctgcgcgtgcgtggcgcgccgttaattggtctctctgcaagcctgctgctggcgctgttagcggaaagcggtaaaagccgcgacgagctggcggcggcgctggagaccctgcgtgcctcccgcccgacggcggtgaacctgatgaacaatctcgaccgcatgaagattgcgctgtggcaggaagcgttcgttccggcgctggtggctgaagcgctgcgcctgattaatgaagacaaacggctttgcgacgcgattgcgaaagcgggtagcgcgctggtgaagcccggcagccgcctgctgacccactgcaataccggcgggctggcaacggcgggcgtcgggacggcgctgggtgtgattgcccgcgcgcatcaggcagggaatgtcagcaacgtctgggtggatgaaacccgtccgctgttgcagggcggcaggctgaccgcatgggagctgggcgagctgggcgtgccttatcagctgattactgactccatggccgccagcctgatggcaaaagggcaggtggatgccgtgtgggtgggggcagaccgcattgccgccaacggcgacgtggcgaacaaaatcggcacctattccctggcggtgctggcgaagttccacggtattccgttctacgtcgccgccccgcaaacgaccctcgaccgggactgcccgaacggtgacgcgatcccgattgagcagcgcgcggccagcgaagtgacgggcgtggcgggaagctttggcgcggtgcagtgggcgccgcaagaggcgcaggtctataacccggcgtttgacgttacccccgcctcgctgattagcggctgggtgctggatacgggcgtggtcacccctgaagaggtagcgaaagggaaattcgcctga

SEQ ID NO: 525217 - DNA, 471 bp, Stenotrophomonas maltophilia
gtgacgctcgatcctgaaacagacttaaaactggaacgcgtggtggatgcaccgcgcgacctgctgtggctctgctggaccacaccggagcacatcaaaaacttcttcattcctgctccccataaggtgactgaatgcgacctcgatctgcgcgtgggtgggcgattcaataccgtgtttgaggtggacgggcagcggatggataaccggggcgtatttcttgaaatcgatccggggaacaagctggtctttaccgatggctatactgagggctggaagccggctgaaacgccgtttatgacggcgatcctgctgctggaagatgtgggggagggcaagacccgctacacggcgatagcgcgtcacccaacgaaggaaatccgcgagcagcatgaacagatgggcttccacgaagggtggggcgtggtgttggatcagctggtggggtatgtgaaagggctaaaacggtag

SEQ ID NO: 525218 - DNA, 273 bp, Stenotrophomonas maltophilia
atgcagcatcagaactggcccccggccgatattatcgctgcactaaagaaacatggaacaagcctggctgcgttgtccagaaaggctggcctttcctcatccacactggcaaatgcgcttacccgaccatggcccaaaggtgaactgcttaccgctcaggcgccagacattccacccgatgtgatatggccggaaagatactttgatgaaaagggagagcgagtatttcgtcagatgaggaataccaaaaagagaaatctgtcttcaacataa

SEQ ID NO: 525219 - DNA, 225 bp, Stenotrophomonas maltophilia; identical to SEQ ID NO: 118723

SEQ ID NO: 525220 - DNA, 543 bp, Stenotrophomonas maltophilia
atgagcgcattgaccatttattccgataaagacgccagtcatcacctgtggcacagcaccgacgccgccgagatcgcccgacagctcaacgcgaaaggcgtgcggtttgaacgctgggcggcagaccgtgatttagggcaggatcccgcgcctgaagccgtgattgaggcgtatcagcatgcaatcgacaagctggtggcagagaaaggttaccagagctgggacgtgattagcctgcgcgccgacaatccgcagaaagaggcgctgcgcgcgaagtttctgaacgaacacacccacggcgaagacgaagtgcgcttttttgtggaaggcgcgggcttgttctgcctgcacatcggcgatgaggtgtatcaggtgctgtgcgagaaaaacgacctgatttccgtacccgcaggcacgccgcattggtttgacatgggttcagagccgaactttaccgccattcgtattttcgacaatccggaaggctgggttgcccagtttacgggcgatgcaatcgcggatgcgtatccacgcctggcctga

SEQ ID NO: 525221 - DNA, 690 bp, Stenotrophomonas maltophilia
atgattcgcgcgattgtgacggatattgaagggaccaccagcgatatccgttttgtccatgatgttttgttcccctacgcgcgtgagcggctggcggcctttgtgaccgcgcagcagtacgccgagccggtcaaatcgattctggacaacctgcgcgatgaaatcagcactccgcatgccagcgtcagcgatctcatcaacgtgctgtttacctttatggatgaagaccgcaaatcgacggcgctcaaagccctgcaaggcatcatctggcaggacggttacatcaacggtgactttaccggccatctctaccctgatgtactgcccgcgctggaaaaatggaaggcacaagggattgatctctatgtttattcctctggctccgtcgccgcgcagaaactgttatttggctacagcgacgaaggtgatattactcatctgttcagcggctattttgatacccgcatcggcgccaagcgtgaggtgcagtcttatcaaaatattgcggcgcaaacgggcatcgccccgtcgcagatcctgttcctgtcagatattcatcaggagctggacgcggctgaacaggcgggttttcgcaccctgcaactgatacgcggtgaagatgacggcgcaagccatcaccatcagatccaccagtttgacgagattaacccggagcagatcccttcatga

SEQ ID NO: 525222 - DNA, 615 bp, Stenotrophomonas maltophilia
atgacagacaacctgcaactcacacacctggtcgaggcctgccgctggattggcgctaaaggctgggcgcccgctaccggcggcaatatgtccgtgcgtcaggatgaacatctgtgctggctgagcgaatccggaaaagacaaaggcagcctgaccaccgccgattttctacaggttgaaatcgccaccaaccgtgcgccttctggccgtaaaccgtcggcagagaccgggctgcataccctcatctaccgcctgttccccgaggctaacgccgtcctgcacgttcacaccgtcaatgccacggtgctgtcgcggctggtcaacgagaccgagctgaagatctccggcttcgagatgcaaaaatcccttaccggacagaccacgcatcgggatacggtggccatcccggtgtttgataatgaccaggacatcgacgccctcgcctctcgaatcgcccattacgcgcaggaacgcccgcttaattatggttttcttctgcgcggtcatggcttaacctgctggggacgcgacgtggccgaagcccgccgtcatctggaaggtttagaattcttatttgaatgcgaaatgcgtttacgacaatgggagagagtatga

SEQ ID NO: 525223 - DNA, 1161 bp, Stenotrophomonas maltophilia
atgagcaataacccgttgatcccgcagagtaaacttccgaatctcggcacgacgatttttacgcagatgagcgccctggcgcagcagcacaacgccattaacctctcacaaggtttcccggattttgacgggccgaaatatttgcaggagcgtctggcgtaccacgttgcgcagggagccaaccagtatgcgccgatgaccggcgtgcaggcgttgcgtgaagccattgcggataaaacggcggagttatacggccataagcctgacgcgaacagcgatatcacggtaaccgcaggggccaccgaagcgctgtatgcggcgataaccgccctggtgcgtacgggcgatgaggtgatttgttttgacccgagctacgatagctacgccccggcgattgaactggccggtggcgtggtgaaacgcgtggcgctccagccgccgcattttcgtccggactggcaggcgtttgccgcgctgctgagcgataaaacccggctggtgatcctgaatacgccacacaacccatcggcgacggtgtggcagaaaagcgattttgccgccctgtggcaggccatcgccgaacgtgaaatctatgttctgagcgacgaggtgtatgagcacatctgctttgccgaagagggtcatgccagcgtgctggcgcatccgcagcttcgcgagcgcgcaatcgcggtatcatcatttgggaaaacctaccatatgaccggctggaaagtagggtactgcgtagcgcccgccgccatcagcgctgagctgcgtaaagtgcaccagtatttgacgtttgccgtaaacacacccgcccagctggcgctggcggatatgctgcgcgctgaacctgaacattaccgggatctgccagctttttaccgtgcgcggcgggatcggtttgtgactgccttgagcgagagtcggctggagatcctgccatgcgaaggcacctacttcctgctggcggactacagtgcgatttccgatctggatgatgtcagtttttgccagtggctgacgaaagaggtgggcgtggcggccattccgctgtcggtgttctgcgccgatcccttcccgcataaactgattcgtctttgctttgcgaagcaggagtcgacgctgctggcagcggctgcgcgcttaaattcgctctga

SEQ ID NO: 525224 - DNA, 627 bp, Stenotrophomonas maltophilia
atgcagcagcaaataatcagagaaatgcagacgtacctgcaggccctttctgaagaagagaaaatcggcgctattaatgcctttcgccaggcattacacgaaatcagcccttttaataatcaacccgtcgactgcgtattgtggataaaacagactgacatcaccgccaatgactacaacccaaataatgtcgctccggcggagaagcggttactcagcaaatcactggagctggatggattcacacaacctatcgttgtgacggaaaatgcgcctgagagctatgaaattgtcgatggattccatcgccatgagcttggcagtcatcgggctattctgaagcgtcaacttaaaggttacctccctgttacctgcctgcgtaaagcacgccaggaaaagttcgatcgcatggctgcaaccattcgtcacaaccgcgcgcgtggacgccaccagatcaatgccatgtcagaaatcgtgcgagaactggtgcttatgggctggagtgagcagaaaattggcctggagttgggtatggacagcgatgaagtgctgcgactgaagcaaatcaacggtctgctggaactcttcgcggaccgtcgtttttcagaagcctggacggttaaatag

SEQ ID NO: 525225 - DNA, 1224 bp, Stenotrophomonas maltophilia
atgtcgaactataaaatccctttacaggaaaatgttttagacgcttctgcggaacgcatacactggacgcttaacaatttccccaaggtatgcgtttccttttccggtggaaaagattctaccgtgatgctgcatcttgttgcccagaaagcacggcaattaaagcgaaaaatagacgtcatctttctggactgggaagcgcaattctcgtcgaccattcagcatgttgacgctatgaaaacgctctatcgggatgttatccaccagttctggtgggtagcgcttccgctcacgacccagaacgccctgtcacagtttcaacctgaatggcagtgctgggaacccggaacaaactgggttcgccagccaccagaagatgccattaccgattatcactatttcgatttttatcagcagggaatgacgtttgaagccttcgtgcgcgagtttgccgaatggtatgcgcaaagacgtcctgccgcagtcatggtagggatccgcgccgatgaatcttacaaccgctttctggctatcgcgtcggcgcgtaagcagcgcttttctgacgataaaccctggacgaccgtcgccccgggtgggcacgcctggtatatctacccactatacgactggaaaaccgccgacatctggacgtggttcgcgaaatcaaaatgttgctataacccgttatacgacctgatgtacaaggcgggggtgccgccgcgttatatgcgcatctgcgaaccgtttggtccggaacagcgtcagggcttatggctctatcatgtcattgaacccgaacgctgggcggctatgtgtgaacgcgcctgcggcgtgcgaagtggaggtatttatgccgggcacgataaccatttttatggccaccggaagatcctgaaacctgaccatctcggctggcgcgaatacgccatgctgctactcgacagcatgccgcaaaatacggcggaacattaccgaaataaaatcgcaatttatctccactggtatcaaaagcgaggcctggaggatattcccgatacgcaggagggtgacattggcgcaaaagatatcccttcctggcgacgcatttgcaaggttttactcaacaatgactactggtgccgggctctctcatttagtccaaacaaacctaaacactatcaacgctacagcgaaagagtgaaagccaaacgcaaggaatgggggattttatgcagcagcaaataa

SEQ ID NO: 525226 - DNA, 585 bp, Stenotrophomonas maltophilia
atgctggaaccgttgaagcttttaatatctgaggagaattatgagatagaacaaagagatatgcttatttcctccgaatcagcggaagatttgttggcctatcgtaaagccgatctcatcttctctatcgcacctatccacaatcgctctgtggtctgcacccacttcactacggtgccgatagccttaatctgtagagctgaccacccaaggctcgctgacacagctacggtggacgcgctataccaggagaaattcactttttaccagagtgctcatccgggtgtaaaagagttccagagtcgggccaatgacgcttttccggaaagaaatattgcttttcgcaccgactcccttagctctctcatctctatggtcagttcatctgatttgttaggctatatccccgtgtcgatctatgaaacatttaaagaatctttgaaattaaaaaggcttgagccaccgtttgcgctgcctgaattaaagatctatatgctctacggccgttcatcactgaatagctctgttttttcaacattcattgaaaaaatgcataagctctgcgtttctccgccgtctgcgtaa

SEQ ID NO: 525227 - DNA, 318 bp, Stenotrophomonas maltophilia
atggcaaacctctacgacctaaaaaaattcgatctcaatctgttagttatcttcgaatgcatttaccaacatctcagtatcagtagggctgccgagacgctttatatcacaccatccgccgtcagccagtcgctgcaacgcctgcgcggtcagcttgatgaccccctgtttatccgttcagggaagggaattacgcccaccacggtaggtaccaacttgcatcatcatctggaaaaaaatctcaatcagcttgagcagacgatcaacatgatgcatcactcggacatcaagaaaaagttcgttatctattgcacttaa

SEQ ID NO: 525228 - DNA, 717 bp, Stenotrophomonas maltophilia
atgaataagattgtttatgttgaagatgaacccgaagtgggtcaattgatcgccgcttatctgggtaaacatgatattgaagtggttgtcgaacctcgtggcgatcgcgctgaagacgtcgtcacccgcgaaaatccggacctggtgttgctggacattatgctgcccggaaaagatggcatgacgctttgccgggatctgcgcgcgaagtgggacggcccgatcgtgctgctgacctctctcgacagcgatatgaatcatattctgtcccttgagatgggcgcgaatgactacatcctgaaaaccacgccgccggcggtcctgcttgcccgtttgcgccttcatctgcgtcagcgtgccagcgctgagcgtgaagcgcctgcgccctctttaacgccgcataaggcgatgcggttcggcacgctttctatcgacccggtcaaccgacaggttatgctttccggggagctgattgcgctctcaaccgcagattttgacctgctgtgggagctggcaactcatgccgggcaaattatggaccgggatgcattgctgaaaaatctgcgcggcgtaagttacgacggaatggatcgtagcgttgatgtggcgatttctcgcctgcgaaaaaaactgcaggacagcgccaccgagccctaccgcattaaaaccgtacgtaataagggctacctgtttgccccgcacgcatgggaaacctga

SEQ ID NO: 525229 - DNA, 336 bp, Stenotrophomonas maltophilia
atggggctgttgatcaaagccgcgctgggtgcgctggtcgtgctgctgattggggtgctggctaaaacgaagaactactacattgccgggcttatcccgctgtttcccacctttgcgttaattgcgcactatattgtggcctctgagcggggtatagaggcgctgcgtgccaccattgtattcgggatgtggtcaatcatcccgtatttcatctatctgctgtcgctgtggtacttcaccggttttctgcgtctgcccctggcgctgggcggggcggtggtctgctggagcctcagcgcctgggtgctcatcttcttctggagccgctttcactag

SEQ ID NO: 525230 - DNA, 723 bp, Stenotrophomonas maltophilia
atgggacacacgcagcaacgcccaatattgatcactggcgcaggccgtcgcatcggcctcgccctcgcccatcactttctcaatcttcgccatccggttatcgtcagttaccgcacggaatatccctccattgaagggctacgacatgccggagccgtctgcattcaggcggatttctccacggatgaaggtattcttgctttcgcggaaaaagtgaaatcgaccacccgcgggctgcgggcggttattcacaacgccagtacctggcttcctgaaaaagcaggacattcgctcagcgaaacgctcgcctgcatgatgcagatccacgttaatgcgccttatctgctcaaccatgccctacaggatctgctacgcggacacggccatgccgcaggcgacattatccatttcaccgattacgtggtggagcgaggcagcgataaacacatcgcctacgcggccagcaaagccgcgctggataatatgactcgctcgttcgcgcgcaagctggcccccgaggtaaaagtcaacgcgattgccccggcgatgattttatttaacgagggcgatgatgccgagtatcgtcagcaggcgcttaacaaatcgttgatgaaaattgcgcccggcgagaaagaggtgatcgacctgatcgattatctgctgaccagctgttacgtcacgggaaggacgtttgccgtggacggtggccgcccgctgcgctag

SEQ ID NO: 525231 - DNA, 1383 bp, Stenotrophomonas maltophilia
atggaaaagaaacttggcctgagtgcgttaactgcacttgtattgagctcaatgctgggcgcgggcgtattcagtttgccgcagaacatggcggccgtcgccagcccggccgcattactgattggctggggcatcaccggcgtcgggattttgctgctggcgttcgccatgctgctgctgacgcgtatccgaccggatctggacggcggaatattcacttacgcccgtgaaggttttggcgagctgattggcttctgctccgcctggggctactggctgtgcgcggtgatcgccaacgtctcctatctggttatcgtcttctcggcgctcagtttctttaccgatacgcccgaactgcgcctgtttggtgacggcaatacctggcagtccatcgtaggcgcctcggtgctgctgtggattgttcactggttgattttgcgcggtgttcagaccgcggccagcattaacctggtggcgacgctggccaagctggtgccgcttggcctgttcgtcgtgctggccttcctcgccttccgtctcgatgtctttacgctcgatttcagcggtattgcgttgggcgttcccgtctgggagcaggtgaaaaataccatgctgattaccctgtgggtgttcatcggtgttgaaggtgccgtcgtggtctctgcccgcgcgcgtaacaaacgcgacgtgggacgcgccacactgctggccgtcctggcggcgctgggcgtttatctgctggtgacgctgctgtcgctcggtgtggtggcccgccctgaactggcggagatgcgtaatccgtccatggccgggctgatggtgaaaatgctcggtccctggggtgatgtggttatcgcggcaggtttgattgtctccgtctgcggcgcgtacctgagctggaccattatggcggcggaagttccgttcctggccgccacgcacaaagcgttcccgcgcctgtttgcccgtcagaataaaaacagtgcgccatcggcctctctgtggctcaccaacatcagcgtgcaggtctgtctggtgctgatctggctcacaggttcggactataacacgctgctgaccatcgcctccgagatgattctggtaccctatttcttagtgggcgcatatctgttaaaaattgcgacccgcccggcacactatgcggtaggcgtaggtgcctgtatttacggtctatggttattgtatgcttccggcccgatgcatctgctgctgtccgtggtgctctacgcgccaggcctgctggtgtttatctacgctcgccgtacgcatcagcttgataatacccttaagcgccgcgaaatggcgttgataggtttgctgttagtcgctgccgtaccggcaacgtggatgttaatgggatag

SEQ ID NO: 525232 - DNA, 945 bp, Stenotrophomonas maltophilia
atgaagcttaagaacacactcctggcgtccgcacttctttccgcgaccgccctgtcagcgaatgctgcgacagagttgacgccggagcaagcggcagcgttaaaaccttttgaccatacggtcattgtgggtcggtataattccattggcgatgccgtcgccgccgcatcaaaagccgccgataaaaacggcgctgcctcgttttacgttgttgaccagtccgatcagggcaacagcggtaaccagcgcgtgactgttgcgctgtacaaagagaatgccccaaaggcagatgaacagaaaaaccgcgtgattaacggcattgttgaactgccgaaagatcaggctgttcagctggaaccgtatgacaccgtgaccgttcagggcttctaccgcagccagcctgaagttaacgatgccatcaccaaagccgcgagagaaaaaggcgcttacgcgttttatatcgtgcgtcaggttgatgccaaccagggcggaaaccagcgtattaccgccttcatctataagcaagatgcgaaaaaacgcgtagtgcaaagcccggatgcgattccagcggattcagaagccggtcgtgctgcgttagcaaaaggcggtgaagaagcgaagaaagttgaaattccgggcgtagcaacgtctgcggcaccaagcgcagaagtgggtcgtttctttgaaacccaatccaccaaaggcggtcgttataccgttacgttaccagacggcacgaaaattgaagagctgaacaaagccactgccgcgcagatggtgccgttcgacagcatcaagtttacgggcaactatggcaacatgacagaaatctcctatcaggtggcgaagcgtgctgcgaagaaaggcgcgaagtattaccacatcacccgccagtggcaggaacgtggcaacaacctgaccatcagtgccgatctgtacaagtaa

SEQ ID NO: 525233 - DNA, 1530 bp, Stenotrophomonas maltophilia
atgcgtattggggtaccaaaagaacggttagccaatgaaacccgcgtagcggcaacaccaaaaacggtggagcaactgcttaaactgggttttaccgtcgcgattgaaagcggcgcgggcaaactggcgagtttcgatgacgaggcctttattcaggctggcgcggacgtagtggacggtgctgaggtctggcaatcacccattattctgaaggtaaacgcaccggaagagagtgaaattgaactgctgaacgcgggcaccacgcttgtgagctttgtctggccagcccaaaacccggagctgatggagaagctggcggcacgcggtgtcaccgtgatggcgatggattccgtgccgcgtatttcgcgcgcgcagtctctggatgcgctgagttctatggcaaacattgccggctatcgcgccattgtcgaagctgcgcatgagtttggtcgcttctttaccggtcaaattacggccgcaggcaaagtaccacccgcgaaggtgatggtaattggtgccggtgtggcaggtcttgccgctattggggccgcaaacagcctgggcgctattgttcgtgcgtttgatacccggccggaagtgaaggagcaggtgcagagtatgggcgccgaattccttgagctggacttcaaggaagaagcgggcagcggtgatggttacgcgaaggtcatgtctgaagcctttattaaggcggaaatggcgctctttgcggcgcaggcaaaagaggtggacatcattgtcaccaccgcgcttattccgggtaaaccggcaccgaagctgatcacccgtgagatggtggattccatgcagccgggcagcgtgattgtcgatctggcggcgcaaaacggcggtaactgtgagtataccgtgccaaatcaggtcacgacgaccgcgaacggcgtgaaggtgatcggttataccgacctgccaggacgtctgccaacccagtcctctcagctgtacggcacgaacctcgttaatctgctgaagctgctctgcaaagagaaagacggcaacatcaccgttgattttgatgatgtggtggtgcgcggcgtgaccgtggtgcgtgaaggggaaatcacctggcctgcaccgccgatacaggtttccgctcagcctcaggctgcgccgaaagcggcgcctgagcctgcagaaccagcgaaacctgcgtcgccgtggcgcaaatacgccatcatggcgctggtcattatcctgtttggctggctggcggacgtcgcgccaaaagagttccttggccacttcaccgtcttcgcgctctcctgcgtggtgggttactacgtcgtgtggaacgtttcccatgcgctgcataccccgctgatgtcggttaccaatgccatctccgggattatcgtggttggggcattgctgcaaattggtcatggcggctggatcagcttcctgagcttcattgcagtgctgatcgccagtatcaatattttcggtggtttcaccgtgactcagcgcatgctgaaaatgtttcgtaaaggctaa

SEQ ID NO: 525234 - DNA, 1389 bp, Stenotrophomonas maltophilia
atgtctggaggattagttacagccgcatacattgttgctgcaatcctgtttattttcagtctggcggggctttccaaacacgaaacgtctcagcagggaaataactttggtatcgccgggatggcgattgcgctgattgccaccatctttgggccggacaccggcaacgtggcgtggatcctggtggcgatgatcatcggtggtgcgattggtattcgtcttgcgaaacgcgttgaaatgaccgagatgccggagctggttgctattctgcacagcttcgtgggtctggccgcggtgctggtgggcttcaacagctatctgtaccacgaaccgggtctggaaccgattctggtgaacatccacctgaccgaagtgttcctcggcatcttcattggcgcggtgaccttcaccggctcaatcgtggcgttcggcaaactgcgcgggaagatctcttccaaaccgctgatgctgcctaaccgccacaagctgaatctggcggcgctggtcgtttcctttgtgctgctggtggtcttcgtgcgtaccgaaagcgtaggcttgcaggtgctggcgttactggtgatgaccatcatcgcgctagccttcggctggcatctggtggcgtctatcggcggggcagatatgccggtagtcgtctccatgctgaactcctactccggttgggcagcggcagcagcaggctttatgctgagcaacgacctgctgattgtcaccggtgcgctggtcggttcttccggtgcgatcctgtcttacatcatgtgtaaggcgatgaaccgctcgtttatcagcgtcatcgcgggtggcttcggttctgacggttcatcaaccggttctgatgaggaagtgggtgaacaccgtgaaatcagtgcggaagacaccgcagagatgctgaaaaactcgcattccgttatcatcaccccgggctatggcatggcggtggcgcaggcgcagtatccggtggcggaaatcaccgagaaactgcgcgcgcgcggtatcaaggttcgctttggtattcacccggtggcggggcgtctgccaggccacatgaacgtgctgctggcggaagcgaaggtgccttacgacatcgtgctggaaatggacgagatcaacgatgatttcgccgacaccgacaccgtgctggtgattggcgccaacgacaccgttaacccggcggcgcaggacgatccgcgcagcccgattgcgggtatgcctgttctcgaagtgtggaaggcgcagaacgtcattgtcttcaaacgctctatgaacaccggctatgctggcgtgcagaacccgctgttctttaaagataacacccacatgctgtttggcgacgccaaggccagcgtggatgcgattctgaaatctctttaa

SEQ ID NO: 525235 - DNA, 1113 bp, Stenotrophomonas maltophilia
atgcaatttctgtcccgctttgacatcatcgcgctgatgatgacgccatcattctggattggcgtcgccacggtagtctttgtaactctgctggtgtactggctgctgacgcgcctgatcgcctttgttaagaaagggatcaccacctggggcgacaagcatcccaccaccaaccggatgcgttttatcctgacggatatgcttaaccgcaccagccgcttcctgctttttgtcgtggcgctgctgttcagcctgcgtttcgtcgacttaccggatcatctctttggtaccgtgagccacgcctggttcctggtctttgctatccaggtggcgctgtggatggatcagggggtggtgtcgtggcttcgtcacgtcatgctggcgccgggaagccataaaaacccggtgacgctggtgatcacggggcttatcctccgtgccattgtctggtcagtgatgctgctgtctatccttgctaacgcgggcgtcaacatcactgctctggttgccagccttggggtagggggtattgctatcgccctcgcggtgcaaacgatcctgagcgacgtgtttgcatcgctctccatcggttttgataagccgttcgaaatcggcgattttgtggtgtttaacgatgtcgccgggacggtagagcacatcggcctgaaaaccactcgtatccgtagcctgagcggggagcaaattgtctgtgggaacgccatcctgctgcaacagacgctgcataactacaagcggatgcaaacgcgccggatcgtctttaccttcggggtcgccagcgacacggcgccggaaaaactgcgttcagtgggtgatatggtcaaacagatcattaccgacgtcggggaaacgaagtttgaccgcgcccatttcctgggcttcgatcgcgatcgcctgaccttcgaggtggtccatatcgttaatacggcggattacaacaagtacatggatattcagcaggagatcaatattcgtattctggaggggctgaaccagcaggagatcaagctggcgctgccgagcatggttctgcacgcgccctggatgaatgctggcgacgaggcaccggcgcaacggttgagcgaagcgcaataa

SEQ ID NO: 525236 - DNA, 951 bp, Stenotrophomonas maltophilia
atggcaaagtatcaaaatatgctggtggctatcgatccgaatcaggacgatcagccagcattacgacgtgctgtgtatttacatcaacggattggtggcaaaattaaagcctttttgccgatttatgacttctcatacgagatgaccacccttctgtcgcctgacgagcgcaccgctatgcgtcagggagtgatcagccagcgtaccgcgtggatccgcgagcaggcgaagtattatctggaagcgggcgtacctatcgatatcaaggtggtctggcacaaccgtcctttcgaagccattattcaggaagtggtggccggtgggcatgacctgctgctgaaaatggcgcaccagcatgacaaactggaatccgtgattttcaccccgaccgactggcacctgctgcgcaaatgcccttgtccggtatggatggtgaaagatcagccgtggcctgagggcgggaaagccgtcgtggcggtcaatctggccagcgaagaggattatcacaattcgctgaacgagaagctggtgaaggagacccttcagcttgccgaccaggttaaccataccgaagtccatctggtgggagcctatccggttacgccaatcaatatcgccatcgagctgcctgaatttgacccgagcgtgtataacgatgcgattcgcggtcagcatctgctggccatgaaagcgctgcgccagaaattcagtatcgatgagaacatgacccacgtagaaaaagggttaccggaagaggttattccggatctggcggagcatttgcaggccgggattgtggtgctgggcaccattggccggaccggtatttctgccgcgttcctgggtaataccgccgagcaggtgatcgaccatcttcgctgcgaccttctggttatcaaaccggatcagtatcagacgccggttgaactggacgatgaggaagacgattga

SEQ ID NO: 525237 - DNA, 753 bp, Stenotrophomonas maltophilia
atgatcccggaaaagcgaattatacgacgcattcagtctggcggttgtgctatccattgccaggattgcagcatcagccagctctgtatcccgtttactctgaatgagcatgaactcgatcagcttgacaatatcatcgagcgcaaaaagcctattcagaaagggcagacgctgtttaaagcgggagacgaactgaaatcgctctatgctatccgttctggcaccatcaaaagctacaccattaccgaacagggcgacgagcagatcactggcttccatctggcgggcgatttagtcggctttgacgccatcggcagtggccatcacccgagctttgctcaggcgctggaaacctctatggtttgtgaaatcccgtttgaaacgctggacgatctgtccggtaagatgccgaacctgcgtcagcagatgatgcgtctgatgagcggtgagatcaaaggcgatcaggatatgatcctgctgctttccaaaaagaatgccgaagagcgtctggccgcctttatctataacctctcccgccgtttcgcggaacgtggcttctccccacgcgaattccgtctgaccatgacgcgtggcgatattggtaactatctgggcctgaccgtggaaaccatcagccgtctgctgggtcgtttccagaagagcggaatgctggcggttaaaggtaagtacatcaccattgaaaacggtgaagcgctggccattctggcgggtcactcacgtaacgtggcataa

SEQ ID NO: 525238 - DNA, 516 bp, Stenotrophomonas maltophilia
atgctgagattactcgaagacaagattgcgacaccgctggggccgctgtgggttatcgcggatgaagcgttcaatcttcgcgctgttgagtgggaagagcacagcgaccggatggttgagctgctcaacattcattatcgcgccgagggttacgagcgtattacagcccgtaatcctggcgggctgagcgataaactggcggcctacttcgagggcgatctcagcattattaataccctgccaaccgccacggcgggtaccccttttcagcgcgaggtgtggcaggcgctacgtaacattccctgcgggcaggtgatgcactacggtcagctggcagagcagcttggccgtaccggcgcggcgcgcgcagtcggtgcggcaaatggctcaaatcccgtcagcattgtggtgccttgccatcgcgtgatcgggcgcaacggcaccctcaccggctatgccgggggcgtacagcgtaaagagtggctgctgcgtcacgaagggtattttctgctgtaa

SEQ ID NO: 525239 - DNA, 1527 bp, Stenotrophomonas maltophilia
atgagtatgtcttccataccttcgcattccccatccggtaagctctatggctgggttgaaaggatcggcaataaagtgccgcaccctttcctgctttttatctatttaattgtcatcctgatggtcgcgacagccgtgctgtccgcctttgatgtgagcgtgcgcagcccggccgacggcagcatggtggccgtaaaaaatctgctcagcgtggaggggttgcactggtttttgccgaacgtgattaaaaacttcagcggttttgcgccgctgggcgccatcctggcgctggtgttaggcgcgggtctggccgaacgcgtgggtctgctgcccgcgctgatggtgaaaatggcctcgcacgtcagcgcgcgttatgccagctatatggtgctgtttattgccttcttcagccatatctcgtccgacgcggcgctggtgatcatgccgccgatgggggcgctgattttcctcgccgttggccgtcatcctgttgcgggcctgctgtcggcgatcgcgggcgtcggctgtgggtttaccgctaacctgcttattgtgaccaccgatgtgctgctctccggcatcagcacggaggcagccagcaccatcgatgcggccatgcacgtcagcgtgatcgacaactggtactttatggccagttcggtgattgtcctgacgattgtcggggggctgattaccgataagatcgttgagccgcgcctgggtaaatgggaaggccggagcgatgaaaagctggagacgctgagcaaagagcagcagttcggcctgcgcgtcgccgggatcgtctcgctggcattcattgcggctgtggcgctgatggtggtgccggagaatggcgtgttgcgcgatccgatcaaacacaccgtacttccctcgccgtttattcaaggtattgtgccgctgataattctcttcttcttcgtcgtttcgctcgcctacggcatcgctaccggtaaaatccgccgtcagggagatctgccgcacctgatgatcgagccgatgaaggagatggcgggttttatcgtgatggtgttcccgctggcgcagtttgtggccatgtttaactggagcaacatgggcaagtttatggccgtgagcctgacggacgcgctggaggcggcggggttgagcggggttccggcgtttgtcggcctggcgctgctgtcgtccctgctgtgcatgtttattgccagcgggtcggccatctggtcgattctggcccccatctttgtccccatgtttatgatgctcggctttcatccggcgttcgcccagatcctgttccgtgtcgccgattcttcggtgatcccgctggcgcccgtgtcacccttcgttccgctgtttttaggcttcctgcaacgctacagaccggaggctaagttgggtacctactattcgctggtcttgccctatccgcttatcttcttaggggtatggctggtgatgctggtggcgtggtatcttgtcggcctgccgattggaccgggtatttacccgaggctgaactaa

SEQ ID NO: 525240 - DNA, 984 bp, Stenotrophomonas maltophilia
atggtgcgtgaaggattatttgacgacgtggacgctgccgtgacctggcatccggaagcctttgccggaatgtttaacgtcagcacgctggccaatattcaggccgcctggcggtttaaggggatcgccgcccacgccgcaaactccccacatctgggacgtagcgcgctggatgccgtgacgttgatgaccaccggcacaaacttcctcaacgaacacatcattgaaaaagcgcgcgttcattacgccatcaccgataccggcggaatttcgcctaacgtggtgcaggctcaggcagaagtgctgtacctgatccgcgctccggagatggccgatgcgcagcagatctacgcgcgcatcgagaaaatcgccaagggcgcggcgatgatgaccgaaaccactgtcgagtgtcgctttgataaagcctgctccagctatctgccgaaccgtacgctcgaaggggccatgtaccgcgcattgcagcattacggcacgccggactggacggaagaagaacgcgaatttgcccgtgaaatccgcgccacgctcacggcaaacgacctgcaaaacagcctgaaaaacatagccgcaacgggggccgaagagggaaaagcctttgcccgacgccatcacgaaacgctactggtggatgaagttgccccttacgccatcaccgataacgtgctggcaggctccaccgacgtgggggatgtcagctggaagatgcctgtcgcacagtgctttagcccctgttttaccgtcggcaccccgctgcatacctggcaattggtggcgcaggggcgtacctctattgcccataaaggcatgctgctggccggaaaagtgatgggcgcgaccgcgctgcatctgcttcaggatgccgacctgctgcgaaaatgtcgggaagaatttgaacaacacataacagaaaaaccgtacgagtgtccgatcccacaggacgtgacaccgtcacctttaaaataa

SEQ ID NO: 525241 - DNA, 498 bp, Stenotrophomonas maltophilia
  misc_feature (484)..(493): n is a, c, g, or t
atgcaggagaactacgcttttatcgctgatgccatcgacacgcgatgtcagacgtttaccgatattgccgacgacatctgggatcatcccgaaacgcgctttgaagagttctggtccgccgaacggctcgccagcgcgctggaagccgagggctttaccctgatgcgggaagccggaggcattcccaacgcctttattgccagctacggcagcggcaagcccgttatcgcccttctgggcgaatacgacgccctggccgggttgagccagcaggcgcactgcgcgacggcgcaatccgccaccccgggggctaacggccatggctgcgggcataacctgttgggtactgctgcctttgccggtgcggtggcggtgaaaagctggctggaacagcacggcggcagcggaacggtacgattttacggctgccccggcgaggaaggcggctccggtaaaacctttttggtgcgtgaaggattatttnnnnnnnnnnggtaa

SEQ ID NO: 525242 - DNA, 1311 bp, Stenotrophomonas maltophilia
atgaacgcactggcgcagtacatccacacattagccccccaactgagcgcatggcgtcgcgattttcaccatttcgcggaatccggctgggtggagtttcgcactgccgcgaaagtctcggagatcctggactcgctgggttacgagctggcgatgggtcgcgatgtcgtggatgccgaaagccggatggggttgcccgatgatgcaaccctggcgcgggaatttgcccgcgcccgcgcgcaaggcgcaccggaaaaatggctcgcgccgttcgaaggcgggttcaccggcattgtcgcgaccctgaataccggtcgccccggcccgacgctggcctttcgcgtggacatggatgcgcttgatctgagcgaagcgcatgacgacagccaccggccgtaccgcgacggttttgcctcctgtaacccgggcatgatgcacgcctgcgcgcacgacggccacaccaccattggtctggggctggcgcaggtgcttaagcagcatgaagcccagctcaacggcaccatcaaactgatcttccagcctgccgaagagggtacgcgcggcgcccgcgctatggtcgctgcaggggcgctggacgacgtggactactttaccgccattcatattggaaccggcgttccggaagggacggtgatctgcggcagcgataacttcatggcgaccactaaatttgacgtgcgctttaccggcgttgccgcacacgctggcggtaaaccggaagagggccgtaacgccctgctcgcggcggcccaggccgctatcgcgctgcatggcatcgcgccacacagcgaaggcgcgtcccgggttaacgtcggagtcatgcaggcgggcagcggacgcaacgtggttccggctgatgcgttgcttaaggttgaaacccgcggtgaaagcgaggctattaatcagtatgtctttgagcgcgcgcaggcggtgattaccggcgcggcagcactctacggcgtaacagccgggataaacctgatgggggcggcgacctccagtgccccctccccggcctgggtcgattatctgcgcgaacaggcaagccaggtgcccggcgtgactcatgccattaataaggtcaaagcccctgcgggctccgaagatgccacgctaatgatggcccgcgtgcagcagaacggcggcatggcctcgtatatggtcttcggcaccgaactgagcgccggacatcacaacgaaaaattcgattttgatgagcaggtgatgaacgttgccatcgaaacactggcgcgaactgcgcttaatttcccgtggacgcgaggtgtgtaa

SEQ ID NO: 525243 - DNA, 912 bp, Stenotrophomonas maltophilia
atgtcatttcagattaaatttcatcaaattcgggcttttgtcgaagtggcgcgtcagggcagtattcgcggagccagccgggtgctgaatctttcgcagcccgcgctgactaaatccattaaagagctggaagagggcatggcggcacaactgtttgtgcgccggagtaaaggtgtcgccctgaccgagtgcggggaagggttttatcaccgcgctaatttgattctggaagagcttcgcgcagcgcaggatgatatccgtcagcgtcagggggagctgaccgggcagatcaatattgggatgggtgccagcgtggcgcgcagcctgatgcccgccgttatctcccgttttcatgcgcagcatcctcagatcaaagtgcggattatggaaggtcagctggtatcaatgatcaatgaattacgccagggtgagctggactttaccatcaatacctattatcaggggccttacgatcacgaatttacgtttgaaaaactctttgagaaaccttttgcggtattttgtcgggaaggacatccggcgttgggggctacctctattaatgaacttcttcattataactggacaatgccaacgccgcggggaagttattataagcagcttgaggatatatttcatcatcactcgcagataccgcgtattggcgtcgtttgcgaaaccttttcgtcctgtattagccttgtcgcacaaagtgacttcctgagcgtgctgccgcaggagttgggctgcgacccgctgctggcgcaccggctggtcatgctgccggttgtggaaacacttcccagagcggcctattatttaattcagcgccgtgatgcacgccagacgcccctggctgaatcattaattacacaattcagaagggaagcgagaaaaatagttttatcgtga

SEQ ID NO: 525244 - DNA, 564 bp, Stenotrophomonas maltophilia
atgaaccctgacgacaaatcactttttcttgacgccatggaggatgtccagcccctgaaacgctgcaccgatatccactggcagcaaagccgtaatacccgggttcgccaggagatcgataccgagcagctcgacaactttctcacactgggtttcctggaactcttgccgcttgaagagccgctgatgttccagcgcgagggcgttcagcagggcgttattgacaagctgcgctcgggtaaatacgcccgacaggccagcttaaatctgttgcgtcagcccgccgaacgctgccgccagatgctgtacgccttcattcgccaggcctgccgcgacggtttacgtaacctgattatcattcacggaaagggccgcgagcagaattcgcacccgaacgtggtgcgcagttatcttgcccgctggttaactgagttcgaggacgtgcaggctttctgcgtggcgctgccgcatcacggcggcagcggggcatgttatgtttcactccgaaaatccgatgaggcgaaacaggagaactgggaacgtcacgccaagcgcagccgttaa

SEQ ID NO: 525245 - DNA, 1659 bp, Stenotrophomonas maltophilia
atgctgaaaaatctgcacgtgattaccggtattatctttgccctcaccatattctgtctgctgcaagttgtcacgggagggttgttctactctgccgttaacaacgatcgtcacaactttcagaactccgggttgctcaatgcccagcaggagagcctgagcgacagtgtgaacaccctggtgaaaacgcgcgttaccgtcacccgcgtggcgatccgctacctgaaaaaccagcgcgacccggcctctctcgcggcaatcaatacgctgctgggcaccgcgaacggttcgctggccaaagcagaagactattacaaaaactggcaggcgattccgcaggtgaaggggcaaaatgccgcgctcaccgaagagatgcagaaagcctggaagaacatgcacgaggtaatgcgcttgtccattgcgtacttgcgcgccgataactatcaggcctatggcgacctggacgcccagcaggcgcaggatgagatggaggcggtctatacccgctggcgcgcggaaaacaacgtgctgctgaaagccgccgccgaagagaaccagaacagctttacccagatgcagtggacgctggcggcgatcttcctgaccgttatcgccgtgctggtggtgatctggcagggtttacagcacctgctcctgagaccgctcaacgccatcatgaaccatattcgcaccatcgcgagcggcgatctgacgcaaaacgtcgcgattaccgggcgcaacgaaatgggccagctggccgccggtctgcatgagatgcaacagtcgctggtcagcaccgtcagcgccgtgcgcggcagcacagattctatctacacgggcgcaggagaaattgccgccgggagtaacgacctttccgcccgaaccgagcagcaggcagcctcgctggaagagaccgccgccagcatggaagagctgacggccacggtgaaacagaactcggataacgctcgtcaggcgacgctgctggcaaagaatgcgtctgaaaccgccgcacgcggcggccaggtggtgaataatgtagtgcgtaccatgaatgacattgccgacagttctcagcaaattgcgcatatcaccggcgttatcgatagcattgccttccagaccaacattctggcgctcaacgcggcggttgaagccgcccgtgccggcgaacaaggccgcggctttgcggtggtggcaggcgaagtacggacgctggccagccgcagcgcgcaggcggcaaaagagatcaaagggcttattgaaaactccgtcagccgggtgaataccggctcggaacaggtgagcgaggcgggtgcgaccatgaaagagatcgtcgcggccgtgacacgcgtaaccgatattatggctgaaatctcgtcggcgtctgacgagcaaagccgcggtattgaacaggtcagcctggcggtctcgcagatggacagcgtaacgcagcaaaacgccgcgctggtacaggagtcggcaacggcggcggcggcgctggaagatcagtctgaacagctgcgccaggccgtggcggcattccggctgaacatgcaggaaaacaccgctccgcggccaaaaaatacaaaagcaccgcaactgttgcgtcccgccacggtcagtgcctcaggtgacacaaactgggagacgttctag

SEQ ID NO: 525246 - DNA, 867 bp, Stenotrophomonas maltophilia
atgagcagcatagataaatgcggaacattcacgctcggaacgcgtacggttaaacggtttggctatggcgcgatgcagcttgccggacctggcgtttttggtccgccaaaagacaaaaatgcggcgctggcggtgttgcgtgaagcggtagagtcgggggtaaatcacattgataccagcgatttttacggcccccatgtgaccaaccagcttatttgcgaggcgcttcatccctaccgggacgaccttacgattgtgaccaagatcggagcccgacgcggcgaggacgcctcctggctgccggcgttttccgcccaggagctgacgcaggcggtgcatgacaacctgcgcaacctgaagcgagatgtgctggacgtggttaacctgcggatcatgtttagcgcccacggaccagcggaaggctcgattgccgcgccgctaagcaccctcgcggagctgcaacaacaggggctggttcgccatattgggctgagcaacgtcactgcttcgcaggtggctgaagcgcagaagatggtttccgtggtatgcgtacagaacatgtacaacgtggtgaatcgcggtgacgatgcgctggtagattcgctggcgcagcaggggattgcctgggtgccgttcttcccactgggtggtttcacgccactgcaatcttccgggctacaggcggtggcggattcactggatgcgacgcctatgcaggtggcgctggcatggctgctgcaacgctcgccaaatatcctcttgatcccgggtacttcttcggtggcgcatctgcgtgaaaacctggcggcagccgatctagtattgccgcctgaggcgctggagacgttaaatacgctggtagagtaa

SEQ ID NO: 525247 - DNA, 201 bp, Stenotrophomonas maltophilia
atgccagcccgtgattatcccgacaagcgtgttgctcgcggtgtagcaaaggaggccgatctcaggatgttaagtgcgcgcatcgatccagcgctgatggagtacatccgcattactgcgtatgaaacacggaaaagtaagcaggaaatcgtggcggaagcgttagcacttcaccgccaaaggaatcagattgtgtcataa

SEQ ID NO: 525248 - DNA, 2430 bp, Stenotrophomonas maltophilia
atgtcagacaataatccccgcccattgggctggttaggcccgtggtgcctgctggtgggtgtggtacttcttgtgacggggctgttttttgccatcggcggttttaaactggtttccctgggggggagttggtactttctcattgccggggttttcacgctgctctctgcaattcagtttttccgccgcaaatcctctgccgtagggctgtttgctctggtgtttcttggcaccctgatttgggcatttttcgatgccggactcgacttctggcccctggtttcccgattaatggtacccgccgggctgatggtgctggcagcagccacctggcctgcattgcgtaagcgtgaaggaaaaccgtcctctacgaaaggggcgatggcggtctgcgcggtccttattatcggcatgggcgtcacctttgttcagatgtttcaaccccatccgaccgtgccatttagcggcgaaaagcgcccgctggtgccggtaaaagaagaggcgaaacagcagaactgggatcactacggtaatacggctggcggtagtcgctttgtggcgctggaccagataacccgtgacaacgtgaaaaacctgaaaccggtctggacctaccataccggtgatattccgcaaagtccggatggcaatggcgcagaagatcagcaaacgccgctacaggtaggcgatcgtgtcttcctctgtacgccgcataacaacgtgatcgccgtggatgccgatagcgggaaagagatctggaaagcggaaatcaacgctaagtctgccatctggatgcgctgccgtggcctggcgtactttgatgccaccaaaccgctggcacagccaacggtagccggctccacaccggttctgccagcgcaggtcgcaccgggcgcggcatgccagcgccgtatcctgatgaataccattgacggtaagctgatcgcgttagacgccgataacggcaaattctgcccggacttcggtacttacggcagcgttaacctgcatgaaggaatgggcgacgcgtcagatccaacctatgtgttgacgtcggccccgacgctggcgggtaccacggtcgtggttggcggccgcgttgcggataacgtcagcaccgatatgccgggcggcgtaatacgtggttatgacgtgatcaccggccagctgcgctgggcgttcgatccgcgtaatccggatccgaactatgttctgaagccgggcgaacactacaaacgcagctccgcaaactcctgggcccctatgtcctgggatgcgtcgatgaataccgtgtttatcccgatgggaagttcctctgtcgacctgtggggcgctgaccgtattccggaagatcacaaatacgccacctcaatcctcgcgctggatgcgactaccgggaaagagaagtgggtataccagaccgtgcataacgacctctgggatttcgatatcccgatgcagccgagcctggttgatttcccaacgaaagagggcaacaagcccgcggtggtagtgggcactaaagcggggcaaatttacgttctcgatcgcctgacgggtaaaccgctcactgaagtgaaagaggttccggtaaaaccagcggatattccacgtgaacagtacccggcaacgcagcctcgctctgtggggatgccgcagattggcgcagaaaccctgaaagaatctgatatgtggggggcgacgccgtttgaccagctggcctgtcgtatcagcttcaaatcaatgcgttatgacggtctgtacacgatgccgggaaccgatatttccctgagcttcccgggctcgctgaggggaatgaactggggcagtttgtccaccgatccgaacaaccagtatatcttcgtcaatgacatgcgtctgggcctgtgggttcagctgattaagcaagatccgcagagcgcggtggcaaatacgggtggtgaagccgtgaacgccgggatgggcgccgttccgatgaaaggaacgccgtattcggtcaacaaaaaccgtttcatgtcaccactgggcattccgtgccagaaaccaccgtttggctctctctccgccattgacctgaaaacgcagaaaatcgtctggcaggtgccggtcggtaccgtacaggataccggtccgtttggggtaaaaatgcgtatgccaatgcctgtcggtatgccgacgctgggcggtacgctggccacgcagggcggtctggtcttcattgcgggaacccaggattactacctgcgcgcctttgattcctctacgggggaagaagtgtggaaagcgcgtcttccggtgggtagccagggcggacctatcagctatgtatcaccgaaaaccggcaaacagtacattctgatctctgctggcggtgcacgccagtcgccggatcgtggtgactacgtgattgcctacgcgctggataaataa

SEQ ID NO: 525249 - DNA, 2277 bp, Stenotrophomonas maltophilia
atgaccccccgcatcgtggagctggcaggcggtttacgcgcaacgctggtgcatcagccgcaggcgacacgcgcggcggcgcttgcgcgcgtgagtgccggaagccatcacgagccaccgcgcttcgccggtcttgcgcatttacttgagcacctgctgttccgcggtagccagcgctatcagggcgacgatcgactcatggcctgggtccagcgtcagggcggtagcgtcaatgccaccacgctggctcgccacagcgcatttttcttcgatgtggccgccgataacctgtccgacggcgtcgcgcggctgcgggatatgttgcaggcgccgctgctttcatgcgatgacatacagcgcgaagtggcggtcattgatgcggaaaaccggctcatccagcagcatgattccgccaggcgcgaagcggcggcacgccacgcgatggaagaacccacagtttttcgccgttttcaggtaggtagccaggattctctggggcaggacccgggatcgctgcaaaccgcgttgcgcgactttcatcggcgctattatgtggccggacacctgcaattgtggctgcaagggccgcaaacgctggatgcgctggccgagcttgcccatacgtttgcgtccggttttgcttctggtggcatgcctgaaaccgttcccccgttgcgtcttagcgctgaagcagattttcagctggcagtgacagagcgacccgcactgtggcgttgtccgttaattcgaaaaagtgacaacgtcaccttatttcgggagtttttactggacgacgcccccggaagcctgattgccgggctgcgggcgcgcgggctggcagaagatgtcacactgaactggctttatcaggataacgataacggatggctggcgctaacggttgatagcgaacgacccgaggagattgactcgcatattacccactggctacgggcgctacagcaaacgacggatgagcagcagcggcattattatcggctggcacagcagcgttttagcgccctgccgacgctggagcagctgcgccagcgggcgttcggttttgcgcccggtgcggcgcccgtaagtttttctgccttttgtgccgatttactggcggcgcccacctcgtatctggcctgcaaaaaaattgaaaccgctgaaattatcgccagccaggggtttgctctgccgcttagccattggcgtcgccagccggttgcagatgatagccccatcgcgttttccttctacccgcagactgccaggtatgttacgccagccccgacgtcagaagccgctccgctgctgcatttgacggcgcagacacaaccgccaacgctgatcctgcgcaggcctttttattcgtgcctggaacgggcgcagggggtggcgatgggcaaacagttacgccctctccttgctgaactgcgccatattgacggcagcggcgagtggcaaacggttgacggtagctggcagctcaccctgcggcttcctgacgccgtggtgacggcggaacacatcatcggggcgataatcgatcgcctctcccaccccgccccggctcttacgccagtgccagaaggcattgccatccgtgagctgcttcagcaattgcctgaacgtctggcatcggatccgccacgggacggctggctggcggcgctagttggcggcaacgccgaacacgcgcacgggttagcccggcagcttggcctgctccgggcgccagttaacgctaaggggtcgccgtttagcgattgtcccggcggaatcgaacgtatcccgcacgccagcgcggactcggcgctgctggtgtttattcccctgccgccgggcgcatcgctcgccgcgctgcggctgctggcgttatgctgcgaaccgcaatttttccagcgcctgcgcgtggaacagcagattggctacgtggtcagctgtcgctatcagcgtattgccgatcgcgatggcctgctgctggcgttacagtcgcctgaccgctctccagtgaacctgttgggttgctgcaaacaatttttgcgtgagctgacgctgtgcgatgtgacggcgttcagcgtattgcgacagcagctggcgatgcaaatccggtcaccgatgaatgccagcgccacggcagtagccgccctgcgccagcgctatggtttaccggtgttaacgccgcaggctgttgatgccctgcaacatgacgagataatcgcactatggcgcgagatgactcgccatcgccgtcgctggcgggtgcttttcacgggctga

SEQ ID NO: 525250 - DNA, 1143 bp, Stenotrophomonas maltophilia
gtgagccagaataaacccgccgtcaatccaccgctgtggctgctggcggagctgacctatcgctgtccgctacagtgtccttactgctctaacccgctggactttgcccggcaggatcaggagctgaccactgaacagtggattgaggttttccgccaggcgcgggcgatgggcagcgtgcagataggtttttccggcggcgaaccgttgacgcgtaaagatctgccggagctgatccgcgccgcccgcgatctcggtttttataccaacctgatcacctcgggaattggcctgacggaaagcaagctcgacgcgttcagcgaggccggtctggaccatatccagattagcttccaggctagcgatgaagtgctcaacgccgcgctggcggggaataaaaaagccttccagcagaagctggcgatggccaaagcggtcaaagcgcgcgattacccgatggtgctgaatttcgtcctgcaccggcacaacatcgaccagatcgataaaatcatcgagctgtgcattgaactggacgccgacgacgtcgaacttgccacctgccagttctacggttgggcgttccttaatcgtcagggccttttgccgacgcgagaacagatcgcccgcgcggaacgtgtggttgccgactatcggcaaaaaatggccgccagcggcaatctgaccaacctgctgttcgtcacccctgattattacgaagagcgaccaaaaggctgtatgggcggctgggggtcgattttcctcagcgtgaccccggaaggcacggcgctgccctgccacagcgcgcgccagctaccggtggagttcccctcggtgcttgatcagagtctggaatccatctggtatgactctttcggcttcaaccgctatcgcgggtttgactggatgccggagccgtgccgctcctgcgatgaaaaggagaaggacttcggcggctgccgctgccaggcctttatgctcaccgggaatgctgataacgccgatccggtgtgcagcaaatcgccgcatcatcataaaattctggacgcgcgacgcgaagcagcctgtagcgacatgaaaatcggccagcttcagttccgcaaccgtacccgttcgcagcttatctataaaacccgggaactgtag

SEQ ID NO: 525251 - DNA, 279 bp, Stenotrophomonas maltophilia
atgcaaaaaaactccatcgtcgcctttcgtcgcggctatcgcctgcaatgggaagccgctcaggacagccatgtcatcctttatccggaaggcatggctaaactcaatgagaccgcggccgcaatcctcgaactggtcgatggccaacgcgacgcggcggccatcattgccatactcaacgaacggttcccggaagccggcggcgtggatgacgacgtcgtagaattcctgcaaatcgcttatcaacagaagtggattattttccgtgagccagaataa

SEQ ID NO: 525252 - DNA, 660 bp, Stenotrophomonas maltophilia
atgcataacggcgaggccagccgcgagcagatccagggctgggtggcgaaccggttttactaccagacgacgatcccgctgaaagatgcggccattatggcgaactgcccggatccgcacacgcgtcgaaaatgggtgcagcggatcctcgatcacgacggcagcaacggtcatgacggcgggatcgaagcctggctacagctgggcgaagccgtagggcttagccgcgacgacttaatcagcgaacgccacgtgctgcccggcgttcgttttgccgtggacgcttacgttaacttcgcccgccgcgccaactggcaggaggcggcatgcagttcgctcaccgaactgtttgccccgcaaattcatcagtcgcgtctcgacagctggccgcagcactatccgtggatcaaagaggaaggctatttttatttccgcagccgcctcagccaggccagccgcgacgttgaacacggtctggagctggcgaagagttactgcgatagcgcagaaaagcagaatcggatgctggagatccttcagttcaaactcgatatcctgtggtcgatgctcgacgcgatgaccatggcctacgcgctacagcgtccgccttatcacacggtcaccgacaaagcggcctggcacacaacccgactggtataa

SEQ ID NO: 525253 - DNA, 549 bp, Stenotrophomonas maltophilia
atgtgcaggcgctgttccaacgtaattgaggggttcggccgggcctgcggcgcggcacccgctgactgccacggccactgcaactgcaactgcaaaagctggcattccgtgggttggcggagcgggtccggttgcgggggacgccgtaaacccgtccatgggggcttggtcgcggcatccatgccgctcacacccccgcaaccggacccaccccgccttcgacagtttcccgctgctgctggtgggtgccgaccgttggtcggcacgggatcggatccctgtttctgctctggtgggtgtcgaccttggtcgacacactgggtacagacgaatgatctgcccatgaaaaaagcccgccggtatccggcgggctttttcgtttgcaaccttggcgtggcgatcaggtccagccgaacagctcgaacagcttcaggatcaggtatgcgcagccgccggctgccgggatggtcaggatccaggcccagacgatgcgttcgatcacgccgaacttcagcgaacgcgggttcttggcgaagccgacgcccatga

SEQ ID NO: 525254 - DNA, 516 bp, Stenotrophomonas maltophilia; identical to SEQ ID NO: 144522

SEQ ID NO: 525255 - DNA, 327 bp, Stenotrophomonas maltophilia; identical to SEQ ID NO: 144521

SEQ ID NO: 525256 - DNA, 159 bp, Stenotrophomonas maltophilia; identical to SEQ ID NO: 144520

SEQ ID NO: 525257 - DNA, 273 bp, Stenotrophomonas maltophilia; identical to SEQ ID NO: 144519

SEQ ID NO: 525258 - DNA, 393 bp, Stenotrophomonas maltophilia; identical to SEQ ID NO: 144518

SEQ ID NO: 525259 - DNA, 291 bp, Stenotrophomonas maltophilia
atgaatattatcgcaacgttatatgcggtaatggacaagcgccccctgcgggcgctttccctcattatggcattactgctggcgggctgtatcttctgggacccgtcgcgcttcgcggctaaaaccagcgagcttgagatctggcacggcttcctgattatgtgggcggtgtgtgcaggtgtgattcacggtgtcggctttcatccgaaagcgcttcactggcagggtatcttctgcccgctgattgccgatctggttcttctcgccggtttgattttcttcttcttctga

SEQ ID NO: 525260 - DNA, 1140 bp, Stenotrophomonas maltophilia
atgatcgattatgaagtattgcgttttatctggtggctgttgatcggcgttctgctgattggttttgcggtcaccgatggtttcgatatgggcgtgggcatgctcacccgtttcctcggtcgtaatgacaccgagcgtcgaatcatgatcaactccatcgccccgcactgggacggtaaccaggtgtggctgatcaccgcaggcggcgcgctgttcgctgcctggccgatggtttacgcggctgcgttctccggcttctatgtggcgatgattctggtgctggcctctttattcttccgtccggtaggttttgactaccgctccaagattgaagacacccgctggcgtaacatgtgggactggggcatcttcattggtagcttcgttccaccgctggtcattggtgtggcgttcggtaacctgttacagggcgtaccgttccacgtcgacgaatatatgcgtctgttctacaccggtaacttcttccagctgctgaatccgtttggtcttctggcgggcgtggtgagcgtggcgatgatcatcacccagggcgcaacctatctccagatgcgtaccgtaggtgaactgcacctgcgttcccgtgcgaccgctcaggtggcggcgctggtgacgctggtctgcttcgcgctggcaggcgtgtgggtcgtgtacggtattgatggctacgtggtgacctccgccattaaccataccgcaccgtctaacccgttgaccaaagaggtggcgcgtcaggctggcgcatggctggtgaacttcaacaatatgcctgcgctgtgggctatccctgctctgggtgtgctgctgccactgctgacagtgttaatgtctcgtctggagaaaggcgctatggcgttcgtgttctcttccctgacgcttgcgtgcattatcctgacggcaggtattgctatgttcccattcgtgatgccatccagcaccatgatgaatgctagcctgaccatgtgggatgcaacgtccagccagttgacgttgaacctgatgacgtacgttgcttgcgtgttcgtgccgattatcctgctctacaccgcctggtgttactggaaaatgttcggtcgcatcactaaagaacatatcgaaagcaacacccactctatgtattaa

SEQ ID NO: 525261 - DNA, 1569 bp, Stenotrophomonas maltophilia
atgttagacgtagtcgaactgtcgcgcttacagtttgccttgaccgcgatgtaccatttcctttttgtgccgctgacgctcggtatggcgttcctgctggccatcatggaaacggtttacgtcctctccggcaaacagatttataaagatatgaccaagttctggggcaagttgtttggtatcaactttgcgctgggcgtggcaaccggtctgaccatggagttccagttcgggacaaactggtcttactattcccactatgtaggggatattttcggtgcgccgctggccattgaaggtctgatggccttcttcctcgaatccacctttgtaggtctgttcttcttcggttgggaccgtctgggtaaagtccagcatatggcggtaacctggctggtggcattaggctccaacttgtccgcactgtggatcctggtggcgaacggctggatgcaaaacccaatcgcatctgatttcaacttcgaaaccatgcgtatggagatggtcagcttcgctgagctagtcctgaacccggttgcccaggttaaattcgtgcacaccgtggcgtctggctatgtgtgcggcgcgatgttcgtgctgggcatcagctcctactatatgctgcgcggccgtgacttcgcgttcgccaagcgttctttcgctatcgcagcaagcttcggtatggccgcgattctgtccgttattgttctgggtgatgaatccggttacgaaatgggtgacgtgcagaaaaccaaactcgccgcaattgaagctgaatgggaaacccagccggcaccggcagcgtttaccctgttcggcgtgcctgaccaggacgcgcaggaaaaccgcttcgccattcaaattccttacgctctgggtattatcgccacgcgctccgtcgacaaacaggtgactggcctgaaagatctgatggtgcagcatgaagagcgtatccgtaacgggatgaaagcctactcgctgctggaacagctgcgcgccggttctaccgaccaggccgttcgcgatcaatttaacgacgtgaagaaagacctcggttacggtctgctgctgaaacgctataccccgaacgtctccgacgcgacggaagcgcagattcagatggcaaccaaagactctattccacgcgttgcgccgctgtacttcgcgttccgcatcatggtgggttgcggcattatcatgctgctgatcatcgcggcctcgttctggtcagtcattcgtaaccgtatcggtgagaaaaaatggctgctgcgcaccgcgctgtacggtatcccactgccatggattgctatcgagtccggctggtttgttgcggaatatggtcgtcagccatgggcgatcggtgaggtgctgccaacagcggtagcgaactcctccctgaccgcaggcgacctgatcttctccatgctgctgatttgcggtctgtacaccctgttcctggtggctgaactgttcctgatgttcaagttcgcgcgccttggcccaagcagcctgaaaaccggtcgctaccactacgagcagtctgttacgactactcagccggcacgctaa

SEQ ID NO: 525262 - DNA, 2313 bp, Stenotrophomonas maltophilia
atgcgcgactgtctggcctttggcgagccgatgaaaattggctatctgccggactccttcggcatgtcttcccagctgccacacatttacaacggttttggcatcacgcgcaccatgttctggcgcgggtgttccgagcggcacggtaccgataaaaccgaatttctctggcaaagccaggacggcagcgaagtgacggcacaggtgctgccgctgggctacgcgattggtaagtacttaccggaggatgaagccggactgcgcaaacggctcgacaactacttcgaggtgctcgaaaaagcctccgtgacgaaagaaattttgctgcctaacggccatgatcagatgccgctccagcagaacatatttgcggtgatggataagctgcgcaaaatctatccgcagcgtcagtttgtgatgagccgcttcgaggaggtgtttgaccatatcgatgcgcaccgcgatgaactggcgacgctgaaaggggaatttattgacggtaaatatatgcgggtgcaccggacgatcggctccacgcggatggacatcaaaatcgcccacgcccggatagagaataaaatcgtcaacgtccttgagccgctggctacgcttgcctggacgctgggctttgactatcaccacggcttgctggaaaaaatgtggaaagagatcctcaagaatcacgcccacgacagtatcggctgctgctgcagcgataaagtgcatcgcgaggtgatgtcacgctttgagctggcggaagacatggctgataacctgacgtgcttctatatgcgcaagattgtcgacaacatgccgcagagcgaggaagacaaactggtgatgtttaacctcacgccctggccgcgtgaggaagtgattaacaccacgatacgtctgcgcgccagccagttccgcctgttggacgaaaagggaaatgaaatcccttattatctccgcagcgcgcgtgagatagaccccgggctgattgaccggcagatagtgcattacggcaactacgatcccttcatggagtttgacatccagctcaaccagatcctgccatctatgggttaccgcacgctctatatcgagccgcacgtggccggcaaactgcagacgccagataaatcgccggaggcgttactggaaaatgctttctgggaagtaacgttaaacgaggacggtactttgcgtctgctcgataaagcgtccgggcttatctatgaccgcgcgctggaaattgaagagagctcggatgatggcgatgagtacgactactcgccttcacgggaagagtggagactctcttccgcgcagggcgaacatgaggttgaggtgatccacgaggcctggcagagcagggcggtgatccgccatcgaatggcggtgccagcggatctcgctgaacgttctgcgcgtcagcagacgggaacgcttgaggcagaactcacggtcacgctcagccataacagccgacgtatcgacgtcgaggcacgtctcggaaatcacgcggatgaccaccgtgtgcgggtgctgatcccgacaccattcaccacagagacggtcttagccgatacccagtttggttcgctgacgcgccctgtacaggatgaagcgatggcagactggcaggaggagggatggaaggaagcgccgctgccggtgtggaatctgctcaactacgcggtgctccaggaacggcgtaacgggatggcgctatttaccgaagggttgcgcgaatttgaagtaacaggtgagcgtcaaaacacgtttgccctgacgttgcttcgcggcgtcgggttgcttgggaaggaagacttacttctgcgccctggcagaccgtccgggatcaaaatgccggtgcctgattcgcagatgcggggccagttaacctgtcgctttagcctgttcagttttaatggtacgcccgtcagtgctggcgttgcgcagcaggcgaagtcgtggttaacgccagtgcactgttataacaaaattccgtgggatgcgatgaagcttaaccgtgcctctttcaccacaccctgtagctatagcctgctaacgctggcgcctaacggatgtgtactcagtgcgctgaaaaaagcggaggatcgtgacgagatgattcttcgtctgtacaacccttcggagacccgctccagtgacgtggctttgtctgtgaaccgtgaggtccaggcctgttgcgaaacggacatgaatgaggtgtgcaaagcgcaaggggaggagggctcagccattacggggtctttcaggccaggccagtcacgcaccttcagcataaaaattgaaaggtaa

SEQ ID NO: 525263 - DNA, 321 bp, Stenotrophomonas maltophilia
atgaaagctgtatctcgcgttcatatcacgccacatatgcactgggaccgggagtggtacttcaccaccgaagcgtcacgtattcttctggtcaataatatggaagagatcctcacccgtcttgagcaggacgcagagtataaatactacgttctcgacggccagacggcggtgctggaagattattttgccgtgaaaccggaaaacaggccacgcgtgaaggcgctggtggcggccgggaagctgattatcgggccgtggtatacccagacggacaccacccttgtctccggcgagtcgattgtgcgcaatctgatgtaa

SEQ ID NO: 525264 - DNA, 1917 bp, Stenotrophomonas maltophilia
atgaacctgacgactctgaccgacccccgtgctgtctgcgtgcaggcgcagtttaccagccgtgatgaggcaatccgtcagcttgcgacgcggctggtagcgttgggcaaaatagccgacgccgatacgtttctggcagaggttttccatcgcgaatcgcttggcccgacggcgctgggcgaggggctggccgtaccccatggtaaatcagcggcagtaaaggaagcggcttttgccgtggcaacactgcgcgagccgctgatctgggaaggcgtggacggaccggaggaggtcgagctgatttttctgctcgccattcctcccgcacaagcgggatcaacgcatattcaggtgctgacggaactgacgtcccgcctggcggatgacgatctcagggcgcacgtgatgacggcgaccagcgcggaagcggtgcttgctgcgctggaaacggcgcctgaggcgcaagaaaccgccgtcgcagagaatgccccgacgatcgtctgcgttaccgcctgtccggccgggatcgcccatacctacatggcagcggaatatctcgaaaaagcgggacgtaagctcggcgtcaatgtagtggtcgaaaagcagggggcaaacggtattgaggggcgcatcaccgcgcagcatttgcaggaggcaaaagcgtgtatcttcgcggcggaagtggcgatcaaagagcgtgagcgttttcaggggatccccgccatttccgtgcccgtcgcggaacccttgcgccatgcggaagcgctcattgagcgtgcgctggcgctacagcctgtatccgatgcgcgtcctgcgcacgtcgacacggacgcgaaaaagtccgttaaaaccgaactcaagcaagcgctgctcagcggtatctcctttgcggtgccgctgatcgtcgctggcggcacggtgctggccgtgtcggtactcctggcgcaaatcctgggcttgcagcacctgttcgatcaggaaaactcgtggctgtggatgtaccgtaaactgggcggtgggatgctcggcattctgatggtccctgttctggcggcctataccgcttactcgctggcggataaacctgcgcttacgccgggatttgcggcgggccttgccgccaatatgatcggctccggctttctgggggccatcgtcggcgggctgattgcgggctacctgatgcgctgggtgaaaaaccacatccggctgagtagccgctacaacggctttctgaccttttatatctatccggtgattggcgtactggacgcaggcagcctgatgctgtttgtgatcggcgaaccggtggcctggatcaataacgctctgaccgcctggcttaatggtctctccggcgcgaacgcgctgctgctgggggcgatcctgggctttatgtgctcgttcgatctgggcggtccggtcaacaaagcctcttacgcgttctgtctgggcgcgatggccaacggcgtatacgggccttatgcgatcttcgcctccgtcaaaatggtttcggcctttaccgtgacggcatcaacgatgctggctccgaatctgtttaaacagttcgaaattgagaccggcaaatccacctggctgctggggctggcgggcatcaccgaaggggcaattccgatggctatcgaggatccgttgcgagtcatcggctcatttgttctggggtcaatggcgaccggagcgattgtcggagcgatgggtattgggctctccaccccgggcgcgggcattttctctctcttcttactgcatgatgccgggctgggcggcgtgatagccgctgccggctggtttggcgccgcgctggtgggcgccgcaatctctacgctcattttactgctctggcgacgccaggccgtgaagagcggtacctacgtgactgaagacataccatcctaa

SEQ ID NO: 525265 - DNA, 717 bp, Stenotrophomonas maltophilia
atgggcaataaaccgatgtaccggcagatcgccgatgcgttccgcgagaagattaacgccggggaattaaaacccggagacgcgctgccgacggaatccagccttcaggaggcatttaacgttagccgtgtcaccgtgcggcaggctttgaagctgctcgccgacgagcagatcatcgaaagcattcagggcagtggctcgtatgtaaaagaggagcgggtgaattacgatatttatcagcttaccggcttttacgaaaaactggcggatcgcaacgttgatacgcacagcgacgtcagcgtcttcgaagtggtgaaagccgatgagcggctcgcggcaaaactggcgctcaatccggatgataaggtctggcacgtcaagcgcgtacgcttcatcagggaaaagccggtgaatctggaagagacatggatgccgctggcgatgtttcccgaccttacatgggaagtgatggaacagtcgaaataccattacattgagcaggtcaaaaagctggttatcgatcgcagcgagcaggagctggtgccagtcatgccatcggacgaggcgattgccgccctggcgctcgatccggcaaaaccaattcttgaaaaagtttcccgcggcttccttaaagacggccgggtatttgaattcagtcgcaacgtgtttaacaccgacgactataaattcactctggtggctaaacgcaggcaataa

SEQ ID NO: 525266 - DNA, 870 bp, Stenotrophomonas maltophilia
atgtccgttttaattaataaagataccaaggttatctgccagggcttcaccggtagccaggggactttccactccgaacaggcgattgcctacggtacgcagatggttggcggcgtaacgccaggtaaaggcggcaccacgcacctgggcctgccggtgttcaacaccgtgcgtgaagcagtagaagcgacgggcgcaaccgcgaccgtgatctacgttccagcgccgttctgcaaagactctattctggaagcgatcgacgcaggcattaagctgatcatcaccatcaccgaaggcatcccgacgctggatatgctgaccgtgaaggtgaagctggacgaagcaggcgtgcgcatgatcggcccgaactgcccaggcgttatcaccccaggcgaatgcaaaatcggcatcatgccgggccacattcacaaaccgggcaaagtgggcatcgtgtcccgttccggtaccctgacctatgaagcagttaagcagaccaccgattacggcttcggccagtccacctgcgtgggcatcggcggtgacccgatcccaggctctaacttcatcgacatcctgaagctgttccaggaagatccacagaccgaagcgatcgtgatgatcggtgagatcggtggtagcgcggaagaagaagcggctgcttacatcaaagatcatgtgaccaagccggtggtgggttatatcgcgggtgtgaccgcgccgaaaggcaaacgtatgggtcacgcgggtgcgattatcgctggcggtaaaggtacggctgatgagaaattcgcagcactggaagccgcaggcgtgaaaaccgttcgcagcctggcggatatcggtgaagcactgaaatccatcattaagtaa

SEQ ID NO: 525267 - DNA, 1167 bp, Stenotrophomonas maltophilia
atgaacttacatgaatatcaggccaaacagctgtttgccaggtcaggcttaccggctccggtgggttatgcctgtactaccccgcgtgaagcagaagaagccgcatctaaaatcggttccggcccgtgggtagttaaatgtcaggttcacgctggtggccgtggtaaagcgggcggtgtgaaggttgttaagagcaaagaagagatccgtgcgtttgctgaacattggctcggcaagcgtctggtaacctaccagacagatgcgaatggccagccggtcaaccagatcctggttgaagcggcaaccgacatcgcgaaagaattgtacctcggcgcagtcgtagaccgtagctcccgtcgcgtggtgttcatggcatctaccgaaggcggcgtggaaatcgaaaaagtggcggaagagaccccgcacctgatccacaaagtggcaatcgatccgctggcgggcccaatgccttaccagggtcgtgagctggcgttcaaactgggtctggaaggcaagctggttcagcagttcaccaagatcttcatggggctggcgaccatcttcctggagcgcgatctggcgctgatcgagatcaacccgctggtgatcaccacccagggcgacctgatctgcctcgacggcaagctgggcgctgacggcaacgcgctgttccgccaggcggatctgcgcgaaatgcgcgaccagtctcaggaagatccgcgtgaagcgcaggctgcccagtgggagctgaactacgtggcgctggatggcaacatcggctgcatggttaacggtgcgggcctggcaatgggcaccatggacatcgttaagctgcacggcggtgagccagcgaacttcctcgacgtgggcggtggcgcaaccaaagagcgcgtaaccgaagcgttcaaaatcattctctctgacagcaacgtaaaagcggttctggtgaacatcttcggcggtatcgtacgttgcgacctgatcgccgacggtatcatcggcgcggtaggagaagtgggcgttaacgttccggttgttgtacgtctggaagggaataacgctgaactcggcgcgaaaaaactggctgacagcggcctgaatattattgcagcgaaaagtctgacggatgcagctcagcaggttgttgccgcagtggaggggaaataa

SEQ ID NO: 525268 - DNA, 1227 bp, Stenotrophomonas maltophilia
atgagtagcgtagatattcttgttcccgacctgcctgagtccgtagcagatgcaaccgtcgccacctggcacaaaaaaccaggcgacgcggtaacccgtgacgaagtgctggtagaaatcgaaactgacaaagtggtactggaagtaccggcttcagcggatggcattctggatgcagtcctggaagacgaaggtacgaccgtgacttctcgccagatcctgggtcgcctgcgtgaaggcaacagcgcgggcaaagagtccagcgcgaaatctgaagagaaagcgtctaccccagcccagcgccagcaggcgtctctggaagagcaaaccaatgacgcgctcagcccggcgatccgtcgcctgctggctgagcacagcctcgatccggcagccatcaaaggtaccggcgtgggtggccgtctgactcgcgaagatatcgacaagcatctggcaaaagcgccttcagaggcgaaagcggaagcgaaagcccctgcggcagcaccagcggcacagccagctctgggcgcacgtagcgaaaaacgcgtgccgatgacccgccttcgcaagcgcgtggccgagcgtctgctggaagcgaaaaactccaccgcgatgctgaccaccttcaacgaagtcaacatgaagccaatcatggacctgcgcaagcagtacggtgacgcgtttgaaaaacgtcacggtatccgtctgggcttcatgtccttctacgtgaaagcggtagttgaagcgctgaaacgctacccggaagtgaacgcgtctatcgatggcgatgacgtggtttaccacaactacttcgacgtcagcatggcggtttctaccccacgtggcctggtcaccccggttctgcgtgatgtggacaccctgggtatggctgacattgagaagaaaatcaaagagctggccgtgaaaggccgcgacggcaagctgaccgttgaagacctgactggcggtaacttcaccattaccaacggtggcgtgttcggctcgctgatgtctaccccgatcatcaacccgccgcagagcgcgatcctgggtatgcacgccattaaagatcgtccaatggcggtagacggtaaagttgagatcctgccgatgatgtacctggcgctctcatacgatcaccgcctgatcgacggccgcgagtccgtaggcttcctggttgccattaaagagctgctggaagatccaacgcgtctgctgctggacgtttag

SEQ ID NO: 525269 - DNA, 2808 bp, Stenotrophomonas maltophilia
atgcagaacggcgcaatgaaagcctggctggactcttcttacctctctggttcaaaccagagctggatagaacagctctatgaagacttcttaaccgatcctgactcagtggacgcaaactggcgttccatgttccagcagttgcctggtacaggggtcaaaccggatcaattccattcaaaaacacgtgattatttccgtcgtctggcgaaggatgcctcacgttactcttctgcgatttccgaccctgacaccaatgcgaagcaggtaaaagtcctgcagcttatcaacgcttatcgcttccgtggtcaccagcatgcgaatctcgatccgctgggactgtggcagcaggaacgtgtagcggatctcgatccggcttatcacgatctgaccgaggccgatttccaggaaagctttaacgtaggttcctttgccatcggcaaagacacgatgaagctgggcgatctgattgatgcgctcaagcaaacctactgcggctccatcggcgcggaatatatgcacattacctccaccgaagagaaacgctggatccagcagcgtatcgaatccgtggcgggtcacgcgaatttctcagcagacgagaaaaaacgtttcctgagcgaactgacggcagccgaaggccttgagcgctatctgggcgcgaaattcccgggcgcaaaacgcttctcactggagggcggcgatgcgttagtcccgatgctgaaagagctgattcgtcatgccggtaagagcggcacgcgcgaagtggtgctgggcatggcgcaccgtggccgtctgaacgtgctggttaacgtgctgggtaaaaaaccgcaggatctgttcgacgaatttgcgggtaaacataaagagcacctcggcaccggtgacgtgaagtaccacatgggcttctcgtcggatatcgaaaccgagggcggtcaggttcacctggcgctggcgtttaacccgtcgcacttggaaatcgtcagcccggtggttatcggttccgtgcgtgcgcgtctggatcgtctggacgggccgagcagcaataaagtgctgccaatcaccattcacggtgatgcggcagtcacagggcagggcgtggttcaggaaaccctgaacatgtcgaaagcgcgtggttatgaagtgggcggtaccgttcgcatcgtaatcaacaaccaggtgggcttcaccacctctaacccgctggatgcgcgttctaccccgtactgcaccgacatcggtaaaatggttcaggcgccaatcttccacgtaaacgcggatgacccggaagccgttgctttcgttacccgtctggcgctggacttccgtaacacctttaagcgcgacgtgttcattgacctcttctgctaccgccgtcacggccacaacgaagcggatgagccaagtgcaacccagccgctgatgtaccagaaaatcaaaaaacacccgacgccgcgtaaaatctatgctgacaagctggaaagcgaaaaagtggcgacgctggaagatgcgaccgaaatggtcaatctttatcgcgacgcgctggacgcgggtgaatgcgtggtcaaagagctgcgcccaatgaacatgcactcctttacctggtcgccgtacctcaaccacgagtgggacgagagctacccgaacaaggttgagatgaagcgtttgcaggagctggctaaacgcatcagcaccgtgccggaagcgatcgagatgcagtcccgcgtggccaagatctatggcgaccgccaggccatggcggcgggtgaaaagctgttcgactggggcggcgcggaaacgctggcctatgcgacgctggttgacgaaggtattccggttcgtctgtccggtgaagatgcgggtcgtggcaccttcttccaccgtcatgcggttgtacacaaccagtctaacggttcaacctatactccgcttcagcacgtgcataacggtcagggccagttcaaggtctgggactccgtgctgtcagaagaagcggttctggccttcgaatacggctacgccaccgcagaacctcgcaccctgactatctgggaagcgcagttcggtgacttcgccaacggtgcgcaggtcgtcatcgaccagttcatctcctccggtgagcagaagtggggccgtatgtgtggtctggtgatgttgctgccgcacggctatgaagggcaagggccggagcactcctccgcgcgtctggagcgttatctgcaactctgcgccgagcagaacatgcaggtctgcgtgccgtccaccccggctcaggtgtaccacatgctgcgtcgtcaggcgctgcgcggtatgcgccgtccgctggtggtcatgtcgccaaaatccctgctgcgtcatccgctggcggtttcgagcctggatgaactggctaacggcaccttcctgccagccatcggtgaaattgacgagctggatccgcaggccgttaagcgtgtcgtaatgtgttctggtaaggtttattacgacctgctggaacagcgccgtaagaacgatcagaaagatgtcgccatcgtgcgtatcgagcagctttatccgttcccgcatcaggcgatgcaggaagtgctgaaacagtacgctcacgttcatgattttgtctggtgccaggaagagccgctcaaccagggcgcatggtattgcagccagcatcatttccgtgaagtgattccatttgggtctgccctgcgttatgcaggtcgcccggcctccgcctctccggcggtagggtatatgtccgttcaccagaagcagcaacaagatctggtcaatgacgcgctgaacgtcgattaa

SEQ ID NO: 525270 - DNA, 717 bp, Stenotrophomonas maltophilia
atgaaactcgaattctcagtttatcgttataacccggatatagacgatgctccgcgtatgcaggattacaccctcgaagcggaagaaggtcgtgacatgatgctgctggatgctttaatccagctgaaagaaaaagatcctacgctgtcgttccgccgctcctgccgtgaaggggtatgtggctctgacggtgtaaacatgaacggcaaaaacggtctggcctgtatcacgccaatttcagcgctacagcgtacaggccagaaaattgtcatccgtcctctgcctggcctgccggtcgtgcgtgatttggtggtggacatggggcaattctatgcacaatatgagaagattaagccttacttattgaataatgggcaaaatccacccgctcgcgagcacttacagtcgcctgagcagcgtgaaaaactcgatgggttgtacgagtgtattctctgtgcatgctgttcaacgtcatgcccgtcattctggtggaacccggataaatttatcggccctgcgggtctgctggctgcctatcgcttcctgatcgacagccgcgataccgaaaccgagaatcgtctggaagggttaagtgacgctttcagcgtattccgctgccatagcatcatgaactgcgtcagtgtgtgtcctaaggggctgaacccgacgcgcgccatcggccatattaagtcgatgttgttgcagcgcagtgcgtaa

SEQ ID NO: 525271 - DNA, 1767 bp, Stenotrophomonas maltophilia
atgaaactgccagtcagagaatttgatgctgttgtgattggtgcgggtggcgcaggtatgcgcgccgcactgcaaatttcccagagcggccagacctgtgcgctgctctctaaagtattcccgacccgttcccacactgtgtctgcgcagggtggtatcaccgttgcgctgggtaattcccatgaagataactgggaatggcacatgtacgatacggtaaaaggttcagactacatcggcgaccaggatgccatcgaatatatgtgtaaaaccggcccggaagcgattctggagctggaccacatgggtctgccgttctcccgtctggaaaatggcaccatctatcagcgtccgtttggcggccagtcgaaaaacttcggcggcgaacaggcggcacgtaccgcagcagcggctgaccgtaccggtcacgctttgctgcacaccctttatcagcaaaacctgaaaaaccacaccaccatcttctccgagtggtatgcgttggatctggtgaaaaacgccgatggcgcggtggtgggttgtaccgcactgtgcattgaaaccggtgaagtggtctatttcaaagcgcgcgcaaccgtgctggccaccggcggcgcaggccgtatctatcagtccactaccaacgcccacatcaacaccggtgacggcgttgggatggctatccgcgctggcgtgccggtgcaggacatggagatgtggcagttccacccaaccggtatcgccggtgcgggcgtgctggtgacagaaggctgccgtggtgaaggtggctatctgctgaacaaacatggcgagcgctttatggagcgttatgccccgaatgcgaaagacctggcgggtcgtgacgtggtggcgcgttccatcatgatcgaaatccgtgaaggccgcggctgcgacggcccttggggcccgcacgcgaagctgaaactcgaccatctgggtaaagaagtgctggaatcccgtctgccgggcattctggaactgtcccgcaccttcgcccacgtcgacccggtaaaagagccgattccggttatcccaacctgtcactacatgatgggcggtattccgaccaaagtgaccggtcaggcgctgaccgtgaacgagcagggtgaagacgtggtcatccctggtctgttcgcggtaggcgaaattgcctgcgtatccgtgcacggcgcaaaccgtctgggcggcaactccctgctggacctggtggtatttggccgtgcggtggggctgcatctccaggaatctattgccgagcagggcgcgttgcgtgatgcgaccgacgacgaaattgatgcctctcttgagcgcctcaaccgctggaacggcaaccgtaacggcgaagatccggttgaaatccgtaaagcgctgcaagagtgtatgcagcacaacttctcggtattccgtgaaggtgacgcgatggccaaagggctggagcagctgaaagcgatccgcgagcgtctgaagaatgcccgtctggacgatacttcgagcgagttcaacacccagcgcgttgagtgcctggagctggataacctgatggaaaccgcgttcgcgaccgcgatgtcggcaaactttcgtaccgaaagccgtggcgcccatagccgcttcgacttcccggatcgtgatgacgaaaactggctgtgccattccctgtatctgccagagtcggaaaccatgacgcgtcgtagcgttaacatggaaccgaaactgcgtccggcgttcccgccgaagattcgtacttactaa

SEQ ID NO: 525272 - DNA, 348 bp, Stenotrophomonas maltophilia
atggtaagcaacgcctccgcattaggacgcaacggcgtacatgacttcatcctggtccgcgctaccgccatcgtcctcacgctctacatcatctatatgatcggtttcttcgccactagcggcacactgacgtgggaaatctggagtggtttcttcgaatcggccttcaccaaagtgttcaccctgctggccctgttgtccatccttattcatgcctggattggcatgtggcaggtgttgaccgattacgttaaaccgctggcgattcgccttccgctgcaactgattattgttgttgctctgctggtttacgtcatttatggatttgttgtggtgtggggtgtgtaa

SEQ ID NO: 525273 - DNA, 480 bp, Stenotrophomonas maltophilia
atgacgcgcagttatagaaaaggaacgctgtctgacccgcatcgcagtccggaggaaggaaacaataagaacagcatgtgggcgttattcatgataagaaatgtgaaaaaacaaagacctgtcaatctggatctcaaaacgatccgattccctgtaacagcaatagcgtccattctgcaccgtgtttctggtgtgattacgtttgtggcggttggtatcttgctgtggttactgggaaccagcctctcatctcctgaaggattcctccaggcctcagccatcatgaacagcttcttcgtgaaatttatcatgtggggcattctgaccgcgctggcctatcacgtggttggcggcgttcgccatatgctgatggactttggctacctggaagagacgttcgaggccggtaaacgtaccgctaacatttcatttgtgatcactgtcgtgctttcacttctcgcaggagttctcgtatggtaa

SEQ ID NO: 525274 - DNA, 1284 bp, Stenotrophomonas maltophilia
atggctgatacaaaggcaaaactcaccctaaatggtgatgatgctattgaactggatgtgctaaaaggcacgctcggtcaggatgttattgatatccgtacgctgggttccaaaggggtattcacctttgaccctggattcacctctaccgcatcttgcgaatccaaaatcacctacattgacggtgacgaaggtatcctgctccatcgcggcttccccatcgatcagttagccaccgaatccaactatctggaagtgtgctacatcctgctgaacggcgaaaaaccgacgcaggcccagtacgatgaatttaaaaccaccgtgacccgtcacaccatgatccatgagcagattacccgtctgttccatgcgttccgtcgtgactctcatccgatggcggtcatgtgcggtattaccggtgcgctggcggcgttctaccacgattctctggacgtgaataacccacgtcaccgtgatatcgcggcgttccgtctgctgtccaaaatgcctaccatggcggcgatgtgttacaaatactctatcggtcagccgtttgtgtatccacgcaacgacctctcctacgcaggtaacttcctgcgcatgatgttctccacgccgtgtgaagagtacgaagtgaacccggtgctggaacgcgcgatggaccgtattctgatcctgcacgctgaccacgaacagaacgcctcgacctctaccgtccgtaccgcaggctcttccggcgcgaacccgttcgcctgtatcgctgcgggtatcgcctccctgtggggaccggcgcacggcggcgcgaacgaagcggcactgaagatgctggaagaaatcagctccgttgagcacattcctgagttcgtgcgccgcgcgaaagacaagaatgactccttccgtctgatgggcttcggtcaccgtgtttacaaaaactacgaccctcgcgcgaccgttatgcgtgagacctgccacgaagtgctgaaagagctgggcaccaaagatgatctgctggaagtggcgatggagctggaacacatcgcgctgaacgacccgtacttcatcgagaagaaactctacccgaacgtcgatttctactccggtatcatcctgaaagcgatgggtattccgtcttccatgttcaccgtgatcttcgccatggcgcgtaccgtgggctggattgcgcactggaacgaaatgcacagcgaaggcatgaaaatcgcccgtcctcgtcagctgtataccggctacgagcagcgtgactttaagtctgacattaagcgctaa

SEQ ID NO: 525275 - DNA, 792 bp, Stenotrophomonas maltophilia
atgccagaaggtccggagatccgccgcgcggcggatagcctggaggcggcgataaagggcaaacctctgacacacgtctggtttgcctttcctcaactcaaaccgtttgaatcgcagctggtgggacagacggtgacccacattgaaacgcgcggcaaagcgttactcacccacttttcccataacctgacgttatatagccacaatcagctttacggcgtctggcgggtggtaaaggcggacgagcagccgcaaacgacccgcgtgctgcgcgtgcggctacaaacggcggataaggcgatcctgctctacagcgcttctgatatcgaaatgttaacgccggagcagttgctcacgcatccgttcttacagcgggttgggccggacgtgctggatatgcgcctgacggcaagcgatgtgaaagcccggctgttatcgcccacattccgcaaccggcagttttccgggctgttgctcgatcaggcatttctggcggggctgggaaactacctgcgggtggagatcctctgggaagtcgggctggcgccgcagcacaaagcgtcgcagctaagcgatgaaaagctggaggcgctgtcgcacgcgttgctggatattccacggctgtcgtacaacacgcgcggcatggtggatgagaacaagcatcacggggcgttgtttcgcttcaaggtctttcatcgggcgggtaaaaagtgtgagcggtgcggcggggtgattgagaaggcgacgatctcttccagaccgttttactggtgtcctggatgccagatgtaa

SEQ ID NO: 525276 - DNA, 741 bp, Stenotrophomonas maltophilia
atggtaaagattgatttaaacgccgatctgggggagggcagcagcgccgatgcggcgctgatgacgctggtctcctcggtgaacatcgcctgtgggtttcatgccggcgatgcgcagaccatgctggcgagcgtgcgcaatgccatgaaaaacggcgtggcgataggcgctcaccccagctttccggaccgggaaaactttggtcgcacggcgatggatctgccgcctgagacggtttacgcgcaaatgctctaccagatcggtgccctggaggcgatagtgcgcgctgagaagggcgtgttgcgtcacgtcaagccgcacggcatgctctataaccaggcggcgaaagatccggcgctggcagacgccattgctcgcgcggtacgggactgcaatccgcgtctggtgctggtgggcctggcgggcagcgagcttatccgtgccggcgaacggctggggctgattacgcggcaggaagtgtttgccgatcggggatacctgccggacggtagcctggttccgcgtacgcaggccggtgcgctgatcaccgacgaaggtaaagcgctggcgcagacgctggagatggtgcgcttcgggcgagtaacctcaacggagggtacaacggcaaacgttcaggctgatacggtgtgcttacacggtgacggcgagcatgcgctccagtttgcacgacgcctgcgggcggcgttctcggaagagggcattgttgtcagcgcagaataa

SEQ ID NO: 525277 - DNA, 933 bp, Stenotrophomonas maltophilia
atgttaacgcttattcgcgcagggctttacacctcggtacaggatgccgggcgctttggcctgcgtcagtcgggcgtgagctactgcggtgcgcttgatcgtccctcgctggagattgccaacctgctggtaggcaacgccggcagcacggcggcgttagaaattacgctgggtcagtgcgtgattgagtttggtcaggaaacctggtttgccttaaccggcgcgggctgtgacgcgacgctggacggcaaagcggtgtggaccggctggcgcctgcgggcgaaagccggacagcgtctgacgctcaagcgtcctctgcacggcgtgcgcagctatcttgcggtggcgggaggtatcgacgtgccggaggtgctgggctcatccagcaccgaccagaaagcgggaatgggcggacatgaaggacggctgctgcgcgacggcgatcgcctggcgattaagccatcagcgcgccatttcaccaccacgcagggcgtgaagcagctgttgtgggggaacctgatccgcgccctgccggggccggaatatcatgagttcgatgaggcctcaaaagagtctttctggcgctcgccatggaagatcagcccgcagagtaaccgcatgggttaccggcttcagggccagccgctgacccgcacgactgaccgggagctgctttcccatggtctgttgccgggggtgattcaggtgccgggcaacggacagcccatcgtactgatgaacgatgcgcaaaccacgggaggatatccgcgtattgcctgcattattgaagcggatcgctaccatctggcgcaaattcctctcggtcagccaattcattttgtgcagtgttcgctggaggaggcgctgaaagcccgtcaggatcagcagcgttatctcgaacagctggcgtggaggctcgatggtaaagattga

SEQ ID NO: 525278 - DNA, 657 bp, Stenotrophomonas maltophilia
gtgcagcgagcgcgttgttatcttctgggtgaaaccgcagtggttctggaacttgagcctccggtgacgcttgccacgcaaaagcgtatctggcgtctggctcaacgactgcccgagctacctggcgtggttgaagctattccgggtatgaataatatcaccgtggtgctgcgtgatccgcacacgggggcgctggatgccattgagcgtctgcaacgctggtgggaggagagcgaggcgctggagccggaatcgcggacgattcagatcccggttgtctatggcggcaagggaggccccgaccttggcgtcgtggccgaacactgtggattaacggagaagcaggttgtggagctgcatagctcagtcgactatgttgtctggtttttgggatttcagccgggtttcccctatctgggcgggttatcgccccagttgcatacgccgcgccgggctgagccgcgcctgagcgtaccggcgggcagcgtggcgattggtggcgagcaaacgggaatttatccactcgcctcgccgggaggctggcagcttatcgggcacacatccacgccgttatttgaacctggccaggacgcacccatactcctgcgtccgggggataccctgcgctttatcccgcaaaaggaggggatatgttaa

SEQ ID NO: 525279 - DNA, 747 bp, Stenotrophomonas maltophilia
atgatgaaaaacagtgaactggaacgcctgattaacgaaaaactcaacacggcctcgtttagcgactacggtccgaatggcttacaggtggagggtcgcgagacggtgcaaaaaatcatcaccggcgtaacggcaagccaggcgctgctggatgaggcggtgcgtcaggaagccgacgcggtgattgtccatcacggttatttctggaaaaacgaatcaccgattattcgcggcatgaagcgcaaccgtctcaaaacgctgctggcgaatgacatcaacctgtacggctatcacctgccgctcgatgcgcatcctgaactggggaataacgttcagcttgcgcagctgctggggattaccgtgatgggcgaaattgaacccctggtgccgtggggtgaactgtcgatgccggttccgggtctggagctggcatcgtggatcgaagcacgcttggggcgtcgtccgctgtggtgcggcgacaccgggccggataccgtgaagcgcgtggcatggtgcaccggcggcggccagggctttattgatagcgcggcgcgtttcggtgtcgacgccttcattaccggcgaggtttccgagcagaccattcactctgcccgtgaacaaggcctgcatttttacgcggcaggccatcacgccaccgagcgtggcggcatccgcgccctcagcgagtggctgacggaaaataccgatctggatgtgacgtttattgatatccctaatccggcctga

SEQ ID NO: 525280 - DNA, 1413 bp, Stenotrophomonas maltophilia
atgcccacccatctggtttggtttcgcgcggatttacgcattcacgacaacttcgctctcgcggccgcctgccgcgctaaagacgcgaatgtgctggccctgtttatcgccacgcctgaacagtggcggcagcatgacatggcgccccggcaagcggcattactcagcacgtatctgaatgacctgcaacattcactggccgaaaaaggcattccgctgatctataaagaggcccatgattttgccgcacagcttgagatggtgcaggcaatctgtaagcagcacgcggtaacgcgtcttttttacaactaccagtatgaatttaacgagcagcagcgggatcgtcagctggagaaaaaccttacgggcgtggtctgtgaaggctttgatgacagcgtgatgctcgcaccgggcagcgtgatgaccggcagtcacgaaatgtataaagttttcacgccgtttaaaaatgcttttatcaaacgcctgaaagaggggctgtcagaatgtgttcccgccccggccataagaggggaaacgataacggatctgcaggacatcaggctgaattatccccagcagtcgtatgatgaaacggtattcccccccagcgagaaagcggctatcgcccggttgcgtcagttctgcgcgcagggggcggcggattacgaggcgcggcgggattttccagcgattgaaggcaccagccgcctgtcagcctgtttagcgctgggcgcgctctccccgcgccagtgtttacatcggctactggcggaacagcctcaggcggtagacgggggggcgggcgcagtgtggctgaacgaactgatctggcgtgagttttatcgccatctgatgacgtatcatcctgatttgtgtaaacatcggccctttattcgttggaccgaacaggtacagtggcagtcgaatgagaagctgcttaaggcatggcagcatgggctcaccggcttcccgattgttgatgcggctatgcggcagctcaatgaaaccgggtggatgcataaccgtctgcgtatgattaccgccagcttcctggtaaaggatctgcttatcgactggcgaaccggagagcgttattttatctctcagctgatcgatggcgatctggcggcaaataacggcggctggcagtgggcggcctccaccggcacggatgcggctccctattttcggatctttaatccgaccacgcagggacaacgatttgacgtcgacggcgagtttatccgtcgctggctgcctgaacttaaggatgtccccgccaaagccattcatgaaccctgggcatgggcggataaacagcgtgttaccctgaactatccccgtcccattgtcgaccataaacaggcgcgtgtcgccacgctggcggcgtacgaaaccgcccgaaaagtttga

SEQ ID NO: 525281 - DNA, 918 bp, Stenotrophomonas maltophilia
atgtttattaaagtcctcggttccgccgccggcggcggtttccctcagtggaactgtaattgcgccaactgtcagggtttgcgcaacggtacccttcaggcgaccccccgcacccagtcgtcgatcatcgtcagcgataacggcgaagagtggatactgtgtaacgcctcgcccgatatcagccagcagattgcccatacgccagaactgaataagaaagaggttctgcgcggcacgcatattggcggcattattctcaccgacagccagattgaccacaccaccgggctgctcagcctgcgcgaggggtgtccgcatcaggtatggtgtacgccggaggtgcatgaagatctttccagcggattcccgatttttaccatgctccggcactggaacggcggcctgattcatcatccgatcgcaccgctcaccgcctttagcgtggaagcctgccctgatttgcagtttaccgctgtccccatcgccagtaacgcaccgccctattcgccgtggcgcgaccgcccgctaccggggcataacgtggcgctgtttatcgaaaaccgccgcaacggtcagacgctgttctacgcgccgggtctcggtgaacccgatgacgacatcctgccgtggcttaaaaaagcggactgtctgctgattgacggcaccgtctggcaggacgatgaactgcaggccgctggcgtcgggcgcaataccggccgcgatatgggccatctggcgctcggcgatgaacacggcatgatggcgctgctggcctcactgccggcaaagcgcaagattctgattcacattaataacactaacccgatccttaacgagcagtcgccgcagcgtcacgccctcacgcagcagggaattgaagtgagctgggacgggatgaccatcacgcttcaggactaa

SEQ ID NO: 525282 - DNA, 1020 bp, Stenotrophomonas maltophilia
atggcgatttttgatggtcacaatgacctgttgcttaatttatggcttcatcatcgccaggatccggtaacggccttcttctccggcattgagaacggacacctcgattatccgcgcatgcagcaaggcggattttccggcgggctgttcgcgctgttcgtgccgccgcaggagtatatcgcccgcatggcgccgcactacgccagcgagccgtggcaaccgatcgacattctctggcagcagttgacgatcctcaagcagcttatcgcacactccgatggacgggcgcgattgtgcctgagcgcggcagatatcgaacgctgccgtcaggataaggtgctggcgatggtggcgcatattgagggtgcgggcggttttgacggcgagggtggcgatctacaggctttctatgccgctggcgtgcgcagcattgggcctttctggaacattgctaaccgttttggcactggcgttaacggggcgtttcccggcagcccggacagcggcccagggcttaccgcagagggtatcgccctcattaagcacgctaacgccctgaacatgctgattgacgtttctcatatgaatgaaaaggcgttctgggataccgctcgtcattcctcttcaccgctggtcgccacccattccaacgcccatacgctgtgcccgcaaccgcgcaatctgaccgatcggcagctgctggctatccgcgacagcggcggcgtggcaggggtcaatttcggcaacgcctttctgcgcgccgacggtaaacgcgatagcgataccccgctgagcacaatcgttcgtcatatcgactatcttattaacatcatgggcgacgatcatgtcgcgctgggctccgattttgacggcatcacgttacctgatgatttgcatgatgtgagtggtttaccgcggctaatcagcgcgttgcgtgacagcggctatgatcaatttgtgctgaataagctgctgtggggcaactggcaaaaggtattgcaaaatgtttggcaacaatag

SEQ ID NO: 525283 - DNA, 447 bp, Stenotrophomonas maltophilia
atgcgggagagcattaattttattttcgtggtgctgtttttcacggcactgattatgctgatgcgctttttcatcaggcgtattcggcatccaaagcgcatcgttgccgacagccggggaatgaaaaaaatctctacccatccttcctggtttggcggatcgtcaggtaaaacctatttttatgatgagcagtatttatacgaggtcataaatagcgtcacccgtaaaattgagctggccgctatcgtaaaaattaagccgggctcgacagtggtaaataacaggcggatctggtctgtgagctatcttgagggaacccgtgaaaaacaggtgcaattttataataatctgacggtgtttaatcaaaactttgctgcgtttttagaggctgtaaaacgcgtgaatcctgaagccgatattaaggccgtctccttgttcaatctgtga

SEQ ID NO: 525284 - DNA, 348 bp, Stenotrophomonas maltophilia
atggctctgattcccaaaaactacgcacggctggaaagcggctaccgtgaaaaagcgctaaaaatttacccgtgggtctgtggacgctgctcgcgggagtttgtgtattcgaatcttcgtgaactcacggtccaccatatcgaccacgatcacaccaataatccggaagatggcagtaactgggagttgttgtgcctgttttgccatgaccacgaacactcaaagtacaccgaagcggatcagtatggcaccaccgttgtcgcaggtgaggatgcgcaaaaagacgtgggtgtcgccacgtttaacccctttgccgatctcaaggcgatgatgaacaagaagaagtaa

SEQ ID NO: 525285 - DNA, 1023 bp, Stenotrophomonas maltophilia
  misc_feature (85)..(94): n is a, c, g, or t
ttggtcactggacgccgtcttcccagtccggcacgcaaaccgcagctgacacgctgctacagtccatcgatctggctgtcgccgnnnnnnnnnnccgctgaagagctgggcgcggacggggcttatttccgcgtgcaccactttgcccgccagctcagttcgccattccccttgctggctgcgataggcgcgaaaaccaaacgcatcgaaatcgggacgggcgtgatcgacatgcggtacgagaatccgctgtatatggcggaagatgctggcgcggcagatctcatctccggcgggcgattacagcttggtatcagccggggctccccggagcaggtgattgatggttggcgttattttggttacgtgccgcaggacggggaaaacgaatctgatatggcgcgccgtcacactgaggtactgcttgatgtattacgcggtgaagggtttgcgaagcctaacccacagccgatgttcccaaacccgccgggattgttgcgtctggagccgcattcagagggcttacgcgatcgtatctggtggggggctggctccaatgcaacggcagtatgggcggcaaaactggggatgaacctgcaaagctcaacgctgaaagatgatgaaaccggcgagccgttccatattcagcaggcaaaacagatccgtgcctaccgacaggcctgggccgaggcagggcatacccgtcagccacgcgtttcggtcagccgcagtatttttgccctgatggacgatcgcgaccggatgtatttcggttcaagccgcaatgagagcgacagcgttggctatctggatgagaaaacgtgggccattttcggacgcagctatgccgcagagccagtcaagctgattgaacagttgaaaaaggatgaagcgatcgcggaagcggatacgctgttgcttaccgtgccgaatcagctgggcgtggaatacaacgcacatgtgatcgagtccatcctgaaacatgtcgcaccggaaatgggatggcgcgatcgcaatgcgtaa

SEQ ID NO: 525286 - DNA, 846 bp, Stenotrophomonas maltophilia
gtgcgcatgcttttttctccggtgaacgcctccgatctcatccccatcaccggggcatatcgccatcgcacgccgctgcccgcaatagccggttatgaaggggtcggaatagtgaccgaaacgcccgccgcttacccggcgatgctgggcaagcgggttctgccgttacgggggcagggaacctggcagcgctatgtcgactgcccggtggcgtatgcggttcccgtcccggacgacatcgactcgcttcttgccgcgcgggcgtatatcaacccgcttgccgctcagatgatgctggaccgttatcctccggtcgggaaaacggtgctgctcaccgctgccggttctgactgcgccgttctgctcgggcaatgggcacgccaggcgggtgcagaggcggtttacgggatccatcgctcgcccgtgcacgctcaacgtctggctgaaatggggatcgtcccgattgcgcaagatgatacggccgccgtcaacgctgccgccgcgcaagcggaggtggtgtacgacgccacgggcggcagcctggcggaggcgatcctgagcgtgatgcccgaaaccggtacctttgtctgctacgggctactctccgggcagaccttccggcagcagcggccgttgccgcgcgtggcgtggtttcacattcgtaactatctggacgcgctgagcgctgaggcgtggcaggcggagtttcggcgcatctggcctaaactgcgcgccagccagtgcagcgatgttaccctctacccgctgtcggaatggcagcgggcagtgggcaactaccgcgaagcgggaagaacgggcaagcctatgctgtcgatggacaattaa

SEQ ID NO: 525287 - DNA, 1041 bp, Stenotrophomonas maltophilia
atggccaaacccattatcaccctcaacgggcttaagatcgtcatcatgctgggcatgctggtgatcattctgaccggcgttcgttttgcggccgatatcatcgtgccctttatcctggcgctttttatcgcggtgatcctcaatccactggtgcagcgaatggtgcggctgcgcatcccgcgtgtgctggcgataagcctgcttatcagtattattatcgttgcgatggtgctgttagtcgcctatctgggaacctccctgaacgagctggcgcggacgctgccgacataccgctcttccctggcgaccccgctgctgcaaattgaaccctggctgcaacgcgcgggtatcgaagtctcggttgaggaactgcttaaatacatcgatccgaatgccgccatgacgattgtcaccagcctgctggcacagctctccaacgccatgacctcgattttcctgctgttcctgacggttgtgtttatgctgctggaagttccacagctgcctgcaaaactccagcacatcatggtgcgtccggtagagggaatgggtgctattcagcgcgcgctcgacagcgtttcacgctatctggtgctgaaaacggccatcagcctcgtgacgggattagtggtctgggggatgctcgccgcgctggatgtgcgttttgccttcgtctgggggctgctggcctttgcgctcaactatattcctaacattggctccgtgctggcggcgatcccccctatccttcaggtgctggttttcagcggtttgtatgatgccctgattctgctggcaggctatctggtgattaaccttgtcttcgggaacattctcgaaccacggataatgggacgcgggctggggctttcaactcttgttgtgttcctgtccctgattttctggggctggctgctcgggcctgtcggcatgctgctctccgttccgctgacaattattgtcaaaattggcctggagcagaccgccggtggacaaagtatcgctgtactgctgagcgacatgagccataaggccgattaa

SEQ ID NO: 525288 - DNA, 393 bp, Stenotrophomonas maltophilia
atggattatattctcaagcaggagaaaaacatgttttactggattttattagctctggctatcgttgctgaaattaccggcaccttgtcgatgaaatgggcgagcgtgagtgacggcaacaccggatttattttgatgctgatcatgattacactttcctatatattcctctctttcgcggttaaaaaaatcgcgctgggcgtggcatacgctttgtgggaaggtgttggtattttattgatcacgctgttcagcgtcatgatatttgatgaaaccctgacgacaatgaaaattgccgggctgacgaccctggtcgcaggtatcgtgctgattaaatcgggtacgcgcaaaccagccaaacagcagaaggagcagacccatgcagcagtttga

SEQ ID NO: 525289 - DNA, 330 bp, Stenotrophomonas maltophilia
atgcagcagtttgaatggatccacgcggcctggctggctttcgccatcgttctggaaattattgcgaacgtctttttgaagttctccgacggctttcgtcgcaaagcctacggcctgttatcgattgccgcggttctgggggcgtttagcgccctgtcgcaggcggtgaaaggcatcgatctttccgtggcctacgcgctgtggggcggcttcggtattgccgccaccctggcggcaggctggattatgttcgggcagcgtttaaaccataaaggctggatagggctggtattactgctcgctggcatgatcatgattaaactggcctga

SEQ ID NO: 525290 - DNA, 822 bp, Stenotrophomonas maltophilia
atgcgtaaatctgttgtgttgttactgggaacgtttagcctttttgcaggcttttcacatgcggatgagggcgacgatgacgccatcagcgccaaagaggtaaagacgctgttttttggtcatgacgatcgtacgcgtgtcaccgatcctaccgaagcgccctgggatgccatcgggcaactggaaaccgccagcggcaatctatgtaccgcaactctcataacgccacgccttgcgctgacggcgggtcattgcctgttaatgccgcccgaaggcaaaccggataaagcgatcgccctgcgctttgtctcgcagaaagggatttggcgctacgaaattcacggtattgaggggcgggtggatccgtcgctcgggaaacgcctgaaaccggatggcgatggatggattgtgccgcccggggcggcatcctgggatttcgggctgatcgttttacgttatccgccgtccgggatcgctccgctaccgctctttgatggtgacaaagacgcgctcaccgccgccctgaaagccgccgatcgaaaagtgacgcagtcaggctaccctgttgatcacctcgattcgctgtacacccatacggactgcgtggtgacgggctgggcgcaaaacagcgtgctttcgcatcagtgcgatacgctaccgggtgatagcggatcgcccctgatgttaaaaaccgttaacggctggcaactgattggcgttcagagttctgctccggcagcgaaagaccgctggcgcgccgataaccgagcgttagcggtgaccggttttcgcgaccggctggaagccctggcgcagcagtag

SEQ ID NO: 525291 - DNA, 1485 bp, Stenotrophomonas maltophilia
atgaaaaacaataactatcaacaactcacccgcaccttccagcgtctctcccgcttcactcacctctcctccatcgccagctgggacatgtttaccatgatgccgcccggcggcagcgccgcgcgcggtgaagcgctggcggagatgagcgtcctgcaacatcagatcctgaccgataaaaaagtgggtgaatggctggcggcggcggcagaagaagatctgaacgacgttgagcaggccaacctgcgtgaaatgacgcgccactaccagcaggccactttactgccggaatcgctggtagaggccaaatcgctggcgggcagcaggtgtgaacacgcctggcgtactcagcgtccggccaacgactggcagggcttttcagccaacctgaaagaggtggtgaaactcagtcgtgaagaagcccgcctgcgcgctgaggctaaagactgcacgccttacgacgcgctgctggatatctttgaacccgacatgaccagcgctcgcctggatgtgctgttcggcgatctgaagtcctggctgccggagctgctggcaaaggttgtggaaaaacaggctcaacgatcgttcgttccgccacagggtcccttccccaccgccacccagcgcgagctgggcctggaagcgatgaaaatgcttggcttcgattttaacggcggtcgtctggacgttagcgcccacccgttctgcggcggcgtgccggaagatgtgcgtatcaccacgcgttacgatgaagatgaactgctcagcgcgcttttcggcgtgatccacgaaaccggacatgcccgctacgagcaaaaccttccgcgagcgtgggccggccagcccgttgcgctggcgcgctctacggcgatccatgaatcccagagtctgttttttgaaatgcagctgggccgcagcgacgctttcctgaagcatctgcttccggcggtccatgcccgtttcggcagccaggcggcattcagtgaagagaattttattgcctggaatcagcgcgtgaaaccgggctacatccgcgttgacgcagatgaagtgagctatccggcgcatgtggtattgcgctatgagattgagcgcgcgctgatcaatggcgaaatcgaagtggatgatatccccgcgttatgggatgagaaaatgcaggcctggcttggattatccaccaaagataactaccgcaacggctgtatgcaggacatccactggaccgacggcggttttggctacttcccgtcttacacgctgggggcaatgtatgcggcacagctgtttcatgccgccaaaactgcgctgcccgggttgcaggcatccattgccgggggcgatttctcggcgctgtttgactggctgcgtcagaatatctggcagcacggcagccgtttcagcacgtcgcagctcatcacccaggccacaggtgaagatctgaatatccgctacttccgcgaacacctgacgtcccgctacctgtaa

SEQ ID NO: 525292 - DNA, 1254 bp, Stenotrophomonas maltophilia
gtgagccgtacaacgaccgttgatatcgcgccggccagcgacattgatgatttacccgcagtaccgcagccggttcagtttataaaacgtggtaccccccagtttatgcgcgtcacgctggcgctcttttcagcgggtctcgccactttcgccctgctctactgcgttcagccgatcctgccggtcctgtcgcatgaatttggcgtgtcgccagccagcagcagtatttcgctctccatttcaaccgggatgctggcgatcggtctgctgttcaccgggccactttcagatgccatcgggcgtaagcaggtcatggtaacggcgttaatgctggcctccgtgtgtaccttgctgtccaccatgatgaccagctggcacggcattctggtcatgcgcgcgctgattgggttatccctcagcggcgtggcggcggtcgggatgacctatctcagcgaggagatccacccgagtttcgtggccttctccatggggctgtacattagcgggaactctatcggcgggatgagcggacgcctgctcagcggtgtgtttaccgatttctttaactggcgcattgcgctggccgtaatcggctgcttcgccctcgcttcggcgctgatgttctggaaaatcctgccggaatcgcgccatttccgcccgacttctctgcgtccgaaaacactgtttatcaacttccgtctgcactggcgcgacaaaggtttgccgcgattgtttctgatgggattcctgctgatggggtcatttgtcacgctgtttaactatattggctaccggctgatgctctcgccgtggcatcttagccaggcattggtgggtttgctctctgtggcgtatctcaccgggacgtggagttcaccaaaagcgggcgccatgaccgcgcgcttcggccgtggtccggtgatgctggtgtccaccgctgtgatgttgttcggactgctgatgacgcttgtctcttccctgtggctgatttttgccggaatgctgctcttctctgcgggattctttgccgcgcattctgttgccagcagctggattggcccacgcgcgcgccgcgttaaaggtcaggcttcgtctctgtatctgttcagttactatctcggttccagcattgccgggactctcggcggggtgttctggcataactacggctggaacggcgtgggcggatttatcgcgctgatgttgtgtgcggcactgctggtgggcgcgagcctgcataaacgactgcattaa

SEQ ID NO: 525293 - DNA, 906 bp, Stenotrophomonas maltophilia
atgaatatcgagctgcgccatctgcgctattttgtcgccgtcgctgaagagctccattttggtcgtgctgcggcaaggctgaatatctcccagccaccgctgagccaacagatccagatccttgagcagcaggttggggcgcgtctgctggcgcgaaccaaccgcagcgtgagcctgacggcggcgggaaaacagtttctcgccgatagccgacagatcctgagtatggtggtggacgccgccgccagagcggaacggcttcatctcggggagacgggagagctgcgcatcgggtttacctcgtcggcccccttcatcagcgctgtttcacaaacgctatcctcgtttcgcagtaactttccggatgtgcatattcagacgcgcgaaataaatacccgggagcaaatatcgccgcttaatgaaggatcgctcgacctggggctaatgcgtaacacgcagttgcctgataccctggcgtggcaggtgatcctccgcgaaccgctgatggcgatgatcccccgggatcacccgctcgccgcgcagcatagcgtcacgctggctgaactggcgaaagaaccctttgtcttttttgacccacaggtgggtaccggattgtatgacgatattcttggtctgatgcggcgatatggccttgtcccgactatcgcgcaggaagtgggggaagccatgacgatcattggtctcgttgccgcagggcttggcgtgtcgattcttccggcctcgtttaaacgggtacaactgccggaaatgcgctgggtgaatattgccgagcaggatgcggtctcggagatgtggctggtgtggtctaaacatcatgaacagagccatgcggcacagcgtttcaaagaacaattaattaccgcttcttacgggcgttatttatag

SEQ ID NO: 525294 - DNA, 1221 bp, Stenotrophomonas maltophilia
gtggttgctgatagtcagccagggcatatcgatcagatcaagcagaccaacgcgggcgccgtttatcgcctgattgatcagctgggtccggtttcgcgtatcgatctttcgcgcctggcacaactggcacccgccagtattaccaagattgtccgcgaaatgctggaagcccatctggttcaggagacagaaattcaggagccgggcagccgtggccgtccggcggtagggctggtggtggaaacggaagcctggcactacctgtcgctgcgaattagccgcggggaaatcttcctcgcgctgcgcgacctcagcagcaagctggtggtggaagaccggctggacctcccgctcgatgcagagcaaccacttctcgatgccattctgacccacatcgaccagttctttattcgtcaccagcagcgccttgaacgtttaacggcgattgcgatcaccctgccgggaattattgataccgaaaatggcattgtgcaccgcatgccgttttatgaaaacgtcaaagagatgccgctgggcgacgtgctggaaaaccacaccggtgtgccggtctacattcagcatgatatcagcgcctggacgatggcggaggcgttgtttggcgcttcccggggcgcgcgcgacgtgattcaggtggtgattgatcataacgttggcgcaggtgtgatcaccgacgggcgtctgttgcatgctggcagcagtagcctggtggagattggccatacgcaggtcgatccgtacggaaaacgctgctactgcggtaaccatggctgtctggagacaattgccagcgttgaaagcgtgctggagctggcgcaggtgcggctcagccagtcaatgagctccacgctgcacggtcaaccgttgagcgtcgaggcattgtgcactgcggcaaggcagggcgatctgctggcgaaggacatcattaccggcgtgggcaataatgtcgggcgcattctggccattatggtgaacctgtttaacccgcaaaaaatactgattggctccccgctcagccaggcggcggatatcctctttccggcgatttccgcctgcatcaaccagcaggcgcttcccgcatacagtaaaaacatcgtggtggaaagtacgcaattttccaaccagggtacgatggctggcgccgcgctggtaaaagatgcgatgtacaacggctcgttactgattcgtttgcttcagggctaa

SEQ ID NO: 525295 - DNA, 732 bp, Stenotrophomonas maltophilia
  misc_feature (227)..(236): n is a, c, g, or t
atgcttaagcgtttctttattactggtacggatacgtctgtcgggaagaccgtcgtatcccgcgcgttacttcaggccctggcggcaagcggtaaacgcgttgcaggatacaagccggtagcaaaaggcagtaaagagacgccagaagggctgcgcaataaggacgccctggttctgcaaagcgtctcgtctctggaactgccttatgatgccggcaatcccatcgnnnnnnnnnngccttatgatgccgtcaatcccatcgcgttaagcgaagaggaaagcagcgtcgctcacagtgggcttatcaactacagtctgctctctgatggcctggcaaatctgagtgaaaaggttgaccacgttgtcgttgaagggaccggtggctggcgcagcctgatgaacgatttacgtcccctttccgagtgggtggtgcaggagcagctgccggtgattatggtcgtgggcattcaggaagggtgcatcaaccatgccttgctgacggcgcaggctatcgctaatgacggcctgccactgattggttgggtggcgaaccgtattaacccgggccttgcgcactacgcagaaatcatcgacgtgttgagcaaaaagctgcctggcccgttggtaggcgaactgccttatctgccccgcgccgagcagcgcgaattagcgcactatatcgatctctcggctttcggcggtatgctggccgtagatcgagtcgtggcgtag

SEQ ID NO: 525296 - DNA, 1311 bp, Stenotrophomonas maltophilia
atgcaacgtcttcacgcttaccccgacatccgcgcgatgtttcgccgtctcctgattgctactgtcaccggcgtgctggcagcgctggccgttgcggtgttccgccacagcatgtatctgctggagtggttgtttctcagcaacgaaagcggaagcctggtgaatgccgctgccgcgttatcgccctggcggcgggcgctcacgcctgcgctgggtggtctggccgcgggagtgctactgtggggatggcagcgcatgacggcacaacgtccccacgccccgaccgattatatggaggcgctggagacgggtgatggccagtttgattacggcgccagcctggtgaaatccctcgcctcgttgctggtggtcgccagcggcagcgccatcggccgggaaggcgccatgatcctgcttgccgccctcgctgcctccttttttgcacaacgttgtacgccgaaatccgaatggaaactgtggatcgcctgcggtgccgccgccgggatggccagcgcctatcatgcgccgctggcgggcagcctgtttatcgcagagatcctgtttggcacgctgatgctggcctccctcggcccggtggtgattgccgctgtggtggccctgctgaccacgcgcctgttaagtcccggcgcgaatacactttatgatgtccatctcagcgagatgcttacggcggtggattatttcctgatcgttggcgtgggtctgctggctggcgtttgcggcccgctgctgatgtggctgatggcggccagccacaggctgtttctgcgtatcaaactttcaccgccgtggcagctggcgctgggggggctgatcgtcgggctgctgtcgctgctgacgccgaaggtatgggggaatggctacagcgtggttcaggcgtttttgcagtcgccgccgttgctgtcggtaattgccggcgtctttatctgcaagctcctggcggtgctggcaagcagcgggtccggcgcaccgggaggcgtgtttacgccaaccttgttcgttggtatggcaacgggaatgctgtttgcgcagatctttgcgctgtggtttcctggctctgagacggcgatcctgcttgggctggcaggaatggcgacgctgctcgccgccacaacgcatgcgccaatcatgtcggccttgatggtatgtgagatgaccgggcagtattttttacttcccggtttgctggttgcctgtgttgtggcgtcggtattgtcgagaacgctacgccacgactcgatctacggccagcataccgccgaaagccgagagatcgatatagtgcgctaa

SEQ ID NO: 525297 - DNA, 1149 bp, Stenotrophomonas maltophilia
atgataaaactggaaaacctcaccaaacaattttcacagaagcacggccagacgtttaaggccgtcgacaacgtcaatctgaacgtgcctgaaggggaaatgtgcgtgctgctcggcccgtccggctgcgggaaaaccactaccctgaagatgattaaccgtctcattacgccaagcagcgggacgatcctgattaacggcgaagacaccagcgggatggaccccgtgaccctgcgccgcaacattggctacgtgatccagcagattggcctgttcccgaacatgactatcgaagagaacattaccgtcgtgccgcgcatgctgggctgggacaaagcgcgctgtaaatcccgtgccgaggtgctgatggatatggtggcaatggatccacataaattccttcaccgctatccgcgcgaaatgtccggcggtcagcagcagcgtatcggcgtcatccgcgcgctggcagcggatcctccggtcctgctgatggatgaaccattcggcgcggttgacccgattaaccgtgaggtgatccagaaccagttcctggagatgcagcgcaagctgaaaaagaccgtgatgctggtgagccacgatattgacgaagcgctgaagctgggcgaccgtattgccgtcttccgtcaggggcgtattgttcagtgcgccagcccggacgagctgctggcgaaacccgccaatgagtttgtcggctcgtttgttggtcaggaccggacgttgaaacgcctgctgctggtatccgcgggcgacgtcaccgaccagcagccgacgattacggtacgcgaatcgacgccgctgccagaggccttcgccaccatggatgacaacgatattcgcgccattaccgtggttgatgatctcggcaaaccgctgggctttgtgaagcgccgcgaagcgcgtaatgccagcggcagctgcggtgatattctgcatccgttccgcatgacaggtaaggccgaggataacctgcgcgtggtgctttctcgcctgtatgagagcaacaccagctggatgccgattgtggacgaggacggacgctataacggcgagatatcccaggattatattgcggagtatttgagctcagggcgtacgcgccgggcgttgaatattcatagcgagagttaa

SEQ ID NO: 525298 - DNA, 648 bp, Stenotrophomonas maltophilia
atggagacgattcactatattctcgacaactgggactatctcttaaccctgacgctgcaacacctctggctggtggcactcgccgtgggcctggcgattgttattggcgtgccgctgggtattttaattgtccgccataaatggctggcaacgccggtgctggggattgccaccattgtgctcaccatcccgtcaattgcgcttttcggcctgatgatcccgctcttttcgctgatcggtcagggcattggcgccctgcccgcgattacggcggtgttcctctattcactgctgccgattgtgcgcaacacccacacggcgctcgacagcctgccacccggcctgcgcgaagcgggacgcggcatcggcatgaccttctggcagcgtctgcgctgggtggaaatcccaatggcgctgccggtcatttttggcggcatccgcaccgccgtggtgatgaacatcggcgtcatggcgattgctgccgtgattggcgcgggcggtctgggcctgctgctgcttaacggtattggcgggagtgatattcgtatgttaattgcgggcgcgctgatgatttgtcttttagcgattgtgctcgactggttgctgcaccgtttgcaggtggtactgactccgaaggggattcgataa

SEQ ID NO: 525299 - DNA, 900 bp, Stenotrophomonas maltophilia
atgagactgttttccggcctgacggcgctgtgcgccgccgcgctcttcaccagccaggcgctcgccgcgccgctgatcctggcaacaaagagctttaccgagcagcacattctctcggccatgaccgtacagtatctgcaaaagaaaggaattcaggtgcagccgcagactaatattgcgacggtgatttcccgtaacgcgatgattaacaagcagattgatatgacctgggagtacaccggcacgtcgctgatcatcttcaaccatatcaacaaacgcatgtcgccgcaggagtcatacgagacggtgaaacgcctcgacgcaaagcacggtctggtgtggcttaaacctgccgatatgaacaatacctatgcctttgccatgcagcgcaagcgcgccgaggctgaacatatcaataccatgtctgagatggtggcaaagattgagcagatccgtaaaaccgatccagataacaactggctgctgggccttgacctggaatttgccgggcgtagcgacgggatgaaaccgttgcaggcggcctacaacatggagctggaccgcccgcagatccgccagatggatccggggctggtctataacgcggtgcgcgacgggtttgtcgatgccgggctgatctacaccaccgatgggcgcgtgaagggcttcgatcttaaagtgctggaagacgataaaggcttcttcccgagttacgccgtgacgccagttgttcgaaaagacacgctggaggctaacccggggctggaggaggcgctgaacaccctctcagcccagctcaacaacgacgttatcaccgaactgaataaaaaggtggatatcgaccatcagtcaccgcagcaggtcgcccgtgatttcctgcgtagcaaacagttgctgtag

SEQ ID NO: 525300 - DNA, 711 bp, Stenotrophomonas maltophilia
atgcacccattacttaaacgttcgctgctttttgtcggcgcgattatcgtggtcctcgctctcctcgcctggggaattggactggagacgattaaggcgcgccaggttgacctgctctacctcggtcaacagcacctgattctggtcttttcatcaatgttctttgccctgctggtgggcattccaagcggtattctgctgagccgtccggcggcacggggtatcgccgaatacgtgatgcaaatctttaacgtgggcaacaccctgccgccgctggccgttctggcgctggcgatggtggtgattggcatcggtgataaaccggccattatcgccctctttctcgcttctttgctgccaattgtgcgtaacacctatgccgggctgtgctctgttcccgcgtcgttgctggaagcggcaaacggcatcggcatgaccaaatggcagcgcctgcatcaggtcgaaattcctaacgcctggccggtgatgctttccggtattcgcattgccactgcgattaacgtcggtaccggaccgctggcattcctgattggcgccagcagctacggcgagctgattttcccggggatctatctgaatgacttcccgacgctgatcctgggcgcggcggccaccgccctgttcgccctgattctggatacgctgctggcggcactgggtcgactactgagcccgcatctcgcgcgataa

SEQ ID NO: 525301 - DNA, 744 bp, Stenotrophomonas maltophilia
ttgctgattaaattaaagaaagaacgaacgcatcaggaggatcgtcgtcttgccctctggctggcgacctccgcgggactgctgaatgccattgcgctgggcgcgttcggcttttttccctcgcatatgacgggcaatacctcgcagttatccagcgaagtttcctccaccgatctcagcgatattattttctttggcgccattattctgtcgtttgtctcaggcgccattgttgcgcggattattgttatctgggggattatccataacgtcaggctggtattcagccaggttctgtttgttgaagggttattactggccggggtatccctgtacgaaatgtattttcattccttcgccacgaatcaggagattattcttttcctgtgcgggttgatgggaattcataactccacctcaactcagctttccggcggtcgggtgagatccacgcacatcaccggcacgctgaccgatgcgggcatttcgctggcctccgttatggtcgccatgctgcgccgggattactccaaagatacggccgcgcaaaagagccagctcaaaacccatttaaccacccttttctcgtttattaccggcgggattgcggggctgatcctcttcagagagtttggattccacgcgatgctggcactgggcctgatgctggtgtttatcgccgccttttcaatcgttcgtatctcgtggcgcgttcgaaaggtacgcgccgcgcttagtcgatag

SEQ ID NO: 525302 - DNA, 1059 bp, Stenotrophomonas maltophilia
atgagttatgcagaaacgctaaatcctaacgcccccgtttcgatggtgacaacctgggataaaaccttcgccgagagcaataaagtcaaccaccgcaaagtgacgttccagaaccggtacgggatcactctggtgggcgatctgtacattcccaggaaccacggcgaccagaaactggcggcgatagccgtcagtgggccgttcggtgcggttaaagaacaatctagcggtctgtacgcccagactctggctgagcaggggttcgtggccctggccttcgacccatcctacacgggggaaagtggcggccagccgcgtaacgttgcctcccctgacatcaacaccgaagactttagcgccgctgtggatttcctggggttacagaaagaagtcgaccgtaaccgtatcggcattcttggtatctgcggctggggcggtatggcgctgaacgcggcatccatggatacccgcgtgaaggcggtcgccaccagcgtaatgtacgatatgagccgcgcgatgggtcacggcgtgggcaacgggaaagatcgctattcagcggccgatcgtcgggccgtattgcagtatctgaacgcgcagcgctggaaagatgctgaaagcggcactttcgcccatggcggccacgatattaatgtcgatgagaatggcaaggtgacggcggccgagcgcattctgccggaagcactgcccaccgatccgcatccggtactgaaagagttctatgattactaccgtatgccgcgcggtttccatgcccgttccgtaaactccaccggcgcgtggactgcgaccatgccgttatcctttatgaatatgccgctgctgagctatgccggggagatcactatcccaacgctgattgtgaccggtgaaaacgcacactctcgttattttgcggaggatgcgttcaaggccgtcggcagcaaagagaaagagctggtgattgttcccggtgcaaaccatgttgatctctacgataacgtcgaaggaaaaatcccgttcgcgcagtttgagcagttcttcaaaaccagtctgaaataa

SEQ ID NO: 525303 - DNA, 885 bp, Stenotrophomonas maltophilia
atggcgaagcgggaaaactataatgagctgtatctctttatccaggtggtgcgggagggaagcttcacggcagccgcacagcggctcgggctggcgcaatccgggatcagccgatcggttcgcgagctggaggagcggctgggcgttcagcttctggtgcgcactacgcgcaagctgtcgctgacacacgctggggaacagctttaccagaccgccggctccgcctttgatgcgcttgataccgggttgaccagactggcgcattaccgccagacgccgtccggcacggtgcgcattaatgccagccagcacgccatcgagaaatgtctgctgccaaagctcgctatcttcaaacagcgttacccggatatccgtctggaattgatgaatgagagccggttcgtggatatcattgccgagcgattcgacgcgggcgtccggctggggccggaggtgggacaaggaatgattgcggtgcgcatcacgcccgatatggagatggctgtggttgccgccccggcgcattttcggcgctatggtttcccgcagacgcccgccgatctggatgctcatccctgcattgcctaccagtttgccgacggtaaccactatcaatgggagcttgttcaggacgggaagcgagttacgcaccggcctgaggggcaatgggccttttccgacagctacatggaggccgaagcggcccggctggaactcgggctggcctatgtcccggttgagctggtggctgacgatctggagcgtggcacgcttatacgcgtcttacagcgctacagcctgcggatggacgggctttacctctattatccgcaccgcaacgtgtccccggcgctgagagcggttattgatacgttgaaaatttaa

SEQ ID NO: 525304 - DNA, 660 bp, Stenotrophomonas maltophilia
atgacaaaaattacgccagaatatacggctgtagacttatcgagttgggcaaggaaagaacattttgaagtctttcagagctttgctcaatgcacgattaaccaaacggttcagctggatatcactgcgctgctgaaacatatcaaacaggttggctggaaattttatccttcgattatttcccttatttcgacagtcgttaaccgccattctgagttccgtatggctatgaaggataatgagcttgtaatatggaatgaggtgcatcccagctatacccttttccataaagagacggagacgttttcatcattatggagtcacttcgacgggaatattcatcactttcaaaacgtttatgcagaagacgtttctcgctatggtgataatcttgcctactggcccaaagaagagtaccgggaaaatatattcttcatatcggatattccgtgggtcagttttaccagttttaatatcaacgtggctaacatgcagaacttttttgcgcccatgttcacgtttggaaaatactttaaccaggatggaaaagtcttgttgcctttcgccgttcaggttcatcattctgtctgtgatggtttccatgtggccagactaatcaacgagttgcaagagttgtgtgataatttaccgcactattaa

SEQ ID NO: 525305 - DNA, 312 bp, Stenotrophomonas maltophilia
atggctgttgaaacaaaattcgtggtcgtaagaaaaggtgaagagaaaatgacttttgccagtaagaaagaggctgacgctcacgacaaactgctcgacatggcagaagcgttcaccgactggctgctgcaaagcggaatgcagatggatgaaacgcaggcggaaaaccttggtctgtatcttgccgagcagaaagagtccgtgcagcatatcctgcgtaccagcaagcttcccgagctcaatgctgcaacggataaaacagcgccagaggcggatagcagcaaaaaaatccgggccgtcaaagccgcctga

SEQ ID NO: 525306 - DNA, 645 bp, Stenotrophomonas maltophilia
atgaatgacgtctcacaccgcgaatcgttcgcgttcagcgcccgggtactgggcgcgctgttttattttgcccctgacagcgagcagaccgcaccgctggtgagtgccctgaccgcaggtgactgggtgcaggactggccgctggcgcaggaaagcctgcagcccgtggccagtatgtttaagaacccgtcggacgaagcgttgaaagacgcctggcagcgtctgtttattggcccgtatgccctgcccgcccccccgtggggctccgtctggctcgatcgcgagtccgtgctgtttggcgattcgacccttgcattgcgccagtggatgcgtgaaaaccatatcgcctttgagatgcagcagaatgagccggaagatcacttcggaacgttgctgatgctggcggcatggcttgccgagaacggtcgcgacacagaacgcgaccagcttatggcctggcatctgctgccgtggagcacgcgtttccttagcgtattcgttgaaaacgcggcccatccgttctatacggcgctgggtaaacttgcccagctgacgctggcagaatggcagtccactttgctgatcccgattgcagaaaaaacgctgtaccgatcgcagctcctggcttgtacatccgttgtgtaa

SEQ ID NO: 525307 - DNA, 855 bp, Stenotrophomonas maltophilia
atgggaagtggatggcatgaatggccgctggtgatcttcaccgttttcgggcagtgcgtggctggcgcattaatcgtgatgggcttcgcctggctgaatgaacgtgatgacaaggccagaatacgcatcgtgcgcagcctgttttttctctggctggtaatgggtattgggtttatggcctcggtactgcatcttggctccccgctgcgcgccttcaactcgcttaaccgcgtgggagcgtcagcgctgagtaatgagatcgcggcgggttcgatcttctttgccgtgggcggtttctggtggctggtgtcggttatcggtaaaatgcccccagctttaggcaaaatctggatggttgtcagccagctcctgggtgtcgtttttgtctgggcgatgacccgggtctatcagatcgataccgttccgacctggtatacgggctacaccacgttggccttcttcctgacgatggctcttactggcccgatgctggccgcgctgcttctgcgggtcgcaaacgtgacatacaaaggtacccttgccgcgtctgtcagcgtactggcactcatcgcatgcgtggcggtcgtcgtattgcaaagcaatacgctggggacgatccagagttctatccagcaggctaacgccctgctgccggattatggttcgcttcaggtatggcgcatcgcgctgctggcggcgggtttaggctgctggatctgtccacttattcgtcgtcaggaaccgaaaacgctcggcctgtttgcaggtttcgtgctggtggctgtgggtgaactgattggccgtgggctattttatggtttgcatatgaccgcagggttagcaattgcaggttaa

SEQ ID NO: 525308 - DNA, 1617 bp, Stenotrophomonas maltophilia
atgagcgatttgcagcccttccccccgacgcgcaagcgccctatgaagctgaatacgctggttacgctgatggtgtgcgccattatcggctctgtgctgctggtggtcttcgcgctgtactctgtgcagatcacccgtgccacgcgcgatgacgtgaaagataccgcgctgggtatcgcccgaacgctggccgacagcccggagatcaagcgtggcctgatggaatcgccgcaggccggcatcatccagccgattgcccaggcggtgacgaagcgcaacgacctgctgtttaccgtggttaccgacctgcgtgggatccgctattcccatccaaacgaagcgctgttaggtttgcattttattggcgacgatctgacgcccgccctcgaagggaaagagaatgtctccgtgaaccgcggcgcgctcgcggaagcactgcgcgtctttacgcccgtttatgacgatcggcacgaccagatcggcgtggtcgtggtgggtatttcgctgaataaagttgaagatcagattgcccgcggtcggctcaatgccgtgtggaccatcttattcagcgttctgatgagctcagtggcgatatggggtctggtccgggttctgaaacgtattctcttcgggcttgagccttacgagatctccgccctctttgagcagcgccaggccatgttgcagtccctgcgcgaaggcgtgatggctgtagatatgcacgggcgcgtgacgatgattaaccacaccgccagagaaattttgctcctgagctcgggtgagcactccgagagcagcggcgaaccactgctggccagcctgcgggaagtggcgaaaaccggcattgctcgtcaggatcaagagatcggctgtaacggacggctactgctgtgcaacatggtccccgtgaaaagccagaatcaggtcatcggggcaatcagcaccttccgcgataagaccgaaatcagccagttaatgcagcgtatcgatggtatggtcaactatgttgatgccctgcgctcacatacgcatgagtttatgaacaagctgcacgtgatcctcggcctgctgcacatgaagcgctacgataagctggaagagtacatcatccagaccgcacagaattatcagacggatatcggcgcgatacagcgcaaggttaaatcgccggtcattgcgggtttcctgctgggtaaaatcaaccgcgccaaagaggcgggagtgaccctgacgctggccgaggagagtcagcttcctgacacaagcaatgaagagcaggttgcggttctgatcaccgtgctgggcaatttaatcgaaaatgccctggatgcgatggaagctcagccggaaggcgagatcggcctgctgctgcattatcagaacggctggctgagcggtgaggtcagcgatgacggtcccggcattgatcccgagcggctggaggctatttttacaaagggctactcaacaaaaggtgaaaaccgtggcgttgggctgttccttgcacgtcagcagatccagaacctgggcggagatattaccgtcgagtcggagcctggcgtatttacccaattttttgttcagatcccctgggatagcgagaggaatatcgcgtga

SEQ ID NO: 525309 - DNA, 864 bp, Stenotrophomonas maltophilia
atgagcattatgcttaccggtacggccagggaaagacggcacgccagcacgatgaacatcgacagattatctacgctggatatgcttaatgtcatacaccaggatgacgcacaaatatcttctgcacttacccctcacttaagtatgctggctcgcgtggtggataacgcggcggcgacgcttagtcacggcggacgtctggtgctgatcggcgcaggcgcgtccggaggcgtggcgaagcaggcggcagaagcgttcgcgccgggaaaacatccggtcattgcgatgacagcaggcgataacgccggaagctacgcgcgcggcgttgcagaccttcagacgataaaattcggcgagcacgacatgatgctggcgctgtccgtcagcggcaaaacgccatgggtttggggcgcgatgcgtcatgcgtggtctctgggctcaacggtcgcgctcattacggaggatgcgcaaagtgaagcggcgcagctggcgagcatggttattgcccccgatctgggcgcggatgtggttgccgggtataccaacgccaaagcgggcattgcgcaaagcatgataatgcatatggtcaccaccggtctggcgatacggacaggacgggtgtacagcaacctgcgtgttgatctggaggcaagcaataccagatgggccgagcgacaaattgccattgtaaaggaagcggggggatgctcccgggcgcaggcgaaggcggcgctggaaagctgtaaccatcagtgtaaaacggcggtgctaatggtgctgacgggtatggatgcctggaaagcacatgaattactggcgcagaataacgggtttgttcgcctggccttgcaggaagcgccgtaa

SEQ ID NO: 525310 - DNA, 1167 bp, Stenotrophomonas maltophilia
atgaaaagaaaagttctggcaattctcgtacccgcgttattaatggctggcgcagcaaatgcggcggaaatgtataacaaagacggcaacaaagttgacctgtacggtaaagttgatgcacgtcataccttctccgacaacccaggcgacgacggcgatgaaacctatgtccagattggtttcaaaggcgaaacacaaattaataacgatcttattggttacggccagtgggaatataaaacctacgctaacgataccgaaggcgcaggcgacacctcttttaaccgtctggcctttgctggcctgaaatacggcgaatatggctcattcgattacggccgtaattacggcgtcgtgtatgacgttgaagcctggaccgatatgctgccagtatttggtggcgactcctatacctggaccgacaactatatggttggccgtactaacggtgtggcgacctaccgtaataatgacttcttcggtctggttaacggcctgaactttgcactgcaatatcagggtgctaatgaaggcgctaacgcaaacgaaaatcaggaaggcaccaaaaacggccatgatgatgttcgtttccagaacggcgacggcttcggtatgtcaactacctatgacttcgatttcggtctgtcgctgggtgccgcttattcatcgtctgaccgtaccaacgaccaggttgcttacggcgcaggtacctataatcgcttcagcaaatatgccggcggtgaacgtgcggaagcgtggacaatcggtgcaaaatacgatgcgaatgatgtctacctggcaatgatgtatgcggaaacccgcaacatgactccgtacggcaacgatggcatcgccaacaaaactcagaactttgaagccgtagcgcagtaccagtttgacttcggtctgcgtccatccctggcgtgggtctattcaaaaggcatcgatttgggtggtaacgattatcatccaggcaatggttatgactatgttgaccaggatctggttaactacatcgacgtgggcatgacctacagcttcaacaagaacttctccacctacgttgattataaaatcaacctgctggacgaagatgatgccttctacagtgacaacggtattgcaaccgatgacatcgttggcatcggtatgatctaccagttctga

SEQ ID NO: 525311 - DNA, 702 bp, Stenotrophomonas maltophilia
atggaacttgcgcagtggcagcaccgttttgagcgctggctcgacgaaaatcattttactgatgatgcggcgcacgatatcgcccattttcgccgcgtctggatgacggcgcagaccattatggctgacggggattgcgatccgctggttgtgctgaccgcatgctacttccatgacattgtcagcctgccgaaaaatcacccgcagcgtagtcactcctcgcggctggcagcgcgagaaacgcgccagatcctgagccgcgattttcctgattttccgcccgatcggtatgcggccgttgagcatgccattgaagcgcacagcttcagtgccggtatcgcgccgcaaagcccggaggccaaaacggtccaggatgccgaccggctggaggcgttaggcgccatcggccttgcgcgcgtctttgccgtgtccggtgcgctgggcaccgcgttgtttgatgccgacgacccgtttgccggggcgcgtgcgctggatgataaagctttcgcgctcgatcactttcagaccaaactcctgcgcctgccggacaccatgcaaaccgcacggggacgcgaacttgcgcgtcacaatgccgattttctgatccagtttatggcgaagctgagtgccgaattacagggcgattacctcggaaccgacagccagatattgacccatttccgtcgcagtgtgcgatcctga

SEQ ID NO: 525312 - DNA, 1416 bp, Stenotrophomonas maltophilia
gtgactgtgcccgcgcctgagcgggttgagaaatcaacggcagccgtgcaggcactcctgcgtcagctgctggaaatgtacgatgctaaaacgctggcaaaccagctggtggcacatggcgagagccactggagcccggcaatactcaagcggctgctgataagcgacagggcagggcaccgcctgagcgacggcgagttctgttatctgcgtaacctgctgccgcacccgcctgctgcgcatccgaattatgcctttcgctttatcgatctctttgccggtattggcggcattcgccatggttttgaagctattggcgggcagtgcgtgttcaccagtgaatggaacaaacatgccgtccgcacctataaggcgaactggtactgcgaccccgacgagcaccagtttaatgccgacatccgcgacgtcaccctgagccacaaaaccggcgtcagcgacgaagaagccgctgagcacattcgcaacaccattccggcgcacgatgtgctgctggcaggctttccgtgtcagccgttctcactggctggcgtgtcgaaaaagaacgcgctgggacgtgcgcacggctttgcctgtgatacgcagggcacactgttctttgatgttgcccggattattgatgcccgccgcccggcaatttttgtgctggagaacgtcaagaatttaaagagccatgacggcggcaaaaccttccgcattatcatgcaaacgctggatgaactgggttacgacgtggcggatgcagaggacatggggcctgacgatccgaaaattatcgacggcaaacacttcctgccacagcaccgcgagcgcatcgtgctggtgggattccgccgcgatctcaatctgaaaggcgattttacgctgcgcgatttgccctcgctgtatccggcgcgccgtccgacagtggccgatctgctggagcccgccgtcgatgcgaaattcattctgacgccagtgctgtggaaatacctctatcgctatgccaaaaagcatcaggccaaaggcaatggctttgggtttggcatggtcaatccgcttaatcctgacagcgtgacgcgtacgctgtcggcgcgctattacaaagatggcgcggaaattcttatcgatcggggctgggataaggcgctgggcgaaaaagatttcgacgaccctcagaatcaacagcaccgaccgcggcgcttaacgccgcgcgagtgcgcccgcttaatgggctttgaggcgccgcagggctacagttttcgcattccggtgtcggatacacaagcctatcgtcagtttggcaactcggtggtggtgccagcctttgccgccgtcgcagaactgctggcctcgcgcatcagcaaggccgttcagctgcgtcagagtgaggccgtcaatggcggacgttcacaataa

SEQ ID NO: 525313 - DNA, 492 bp, Stenotrophomonas maltophilia
atggcggacgttcacaataaggccacgcggagtaaaaacatgcgtgccatcggcacgcgtgataccgcgatcgaaaaacggatcgctggcctcctgacctccatcgggtttgaattcagggttcaggatgccacgcttgccgggcgtcctgatttcgtgatcgatgcgtatcaatgcatcatctttacccacggctgtttctggcatcatcacgactgctatctgtttaaagtcccggcgacacgcaccgacttctggctggagaagattggcaggaacgtcgagcgtgataaacgcgatgtttcgcagctttacgcccagggctggcgggtgctgattgtctgggagtgcgcactgcgcggaagaatgaagctgaatgacgtggaactgacggagcggctggaagagtggatctgcggcggcggtcaggccgcgcagatcgatacccagggcattcacccgatcacggtttctccacctcacacgccgtga

SEQ ID NO: 525314 - DNA, 915 bp, Stenotrophomonas maltophilia
atgcgttttcggcatttattaccgctcattggagcacttttttccctgtatatcatctggggatccacctactttgtcattcgtattggcgtggaaagctggcccccgctgatgatggccggtattcgtttccttacggctggcgtgctgctgatggcgtttttattgctgcgcggccacaagctaccgccgctgcgtcccctgcttaacgccgccctgattggcctgctgctgctggcggtgggcaatggcgcagtaaccgtcgccgaacaccagaacgtgccgtcgggcatcgccgccgtggtcgtcgcgaccgtgccgctgtttacgctctgctttagtcgtctgttcgggatccgcacccgtaagctcgaatggctgggcatcgcgattgggcttgtaggtattatcatgctgaacagcggcggaaacctgagcggaaacccctgggctgccgttatgatcatgatcggctcgatgagctgggccttcggctcggtctacggctcccgcattgagctgccctccgggatgatggcgggtgccattgaaatgctcgcggcaggcatcgtgctgctgattgcctcggcgttgacgggtgaaaaactgacggcaatgccagatctctcaggtttcctggccgtcgggtatctggcgctgtttggctcgattattgccatcaacgcctatatgtacctgatccgcaacgtctcaccggcggttgccaccagctacgcctacgttaacccggtggttgccgtgcttctgggtaccggttttgcgggcgaagtgctgtcgacgattgaatggctggcgctgggcgtgattgtctttgccgtggtgctggtcacgctgggtaaatatttactgcccgcgaaaccgattgtcacggcgtgtgaggtggagaaaccgtga

SEQ ID NO: 525315 - DNA, 912 bp, Stenotrophomonas maltophilia
ttggcaggaagtagcttattaacattactggacgatatcgccaccttgctggatgacatttcagtcatgggaaaactggcggcgaaaaaaaccgccggggtactgggggatgacttgtcgcttaacgcgcagcaggtcagcggcgtgcgggcgaaccgtgagctgccggtggtgtggggcgtagcgaaagggtcctttattaacaaggtgatccttgttccgctggcgcttctgattagcgcctttataccctgggccattacgccattgctgatgattggcggggcgttcctgtgcttcgagggtgccgaaaaagtgttgcatatgtttgccgcacgcaaagagaaagacaccccggaaatgcgccagcagcgtctggaagcgctggccgcgcaggatccaaaaacgttcgagcgcgataaggtcaaaggtgcgatccgtactgacttcatcctttcggccgagattgtggcgattacgcttgggatcgtatccgaagcaccgctgataaatcaggtcatggtgctttcgttgattgccattcttgtaacggttggggtgtatggcctggtcggtctgatcgtcaagctggatgatatcggcttctggctggaaaaaaaatccagcgccattgcacgcgttatcggcaaaagcctgctggtgctggcgccgtggctgatgaaaagtttgtcgatagtgggaactctggcgatgttcctggtcggcggcggtattatcgtgcacggcgttgcttcgctgcatcatgcaattgaacatctggcgtcgggacatggttcggtgatcgccgccattctgccgacgctgcttaaccttgtgttgggctttatcgtaggtgtcattgtggtggcagtggtcaagctggtagaaaaagtacgcggaaaatcgcattaa

SEQ ID NO: 525316 - DNA, 183 bp, Stenotrophomonas maltophilia
atggtctttttggtcagtgatgaagttaagccaaagaatggtggtccatgcatgattgtcaccggttattccagtggaatggtggagtgccggtggcatgacggatacggcattaagcgggaggcttttcgtgaagatgagcttcagcctggtgataaaaggcaaaaacgcgataaggcttaa

SEQ ID NO: 525317 - DNA, 1728 bp, Stenotrophomonas maltophilia
atggtgagcgacactcagggagtgcgtgtgcagcacaatacctttgttgtaaaacaatcttttttgcagtggctgcataagcgtagcaatccccgtttggttgttaacctctgttttatcgttgtcctgatcttttccaccctcctgacctggcgcgaagttgtggtactggaagatgcctatatctccagtcagcgtaaccatctggaaacggttgccagtgcgctggacagacaactccagttcagcgtcgataaaatgctgttttttcgccacagcatgcgtgatgcgctggaaacgccgctggcgtttggcgtgctgcatgatgcggtaaagcgttttgcccgtttgcgcgcatcccccacctggcaaattgaggttgataaacagcgcacattgccgatcaacggtgtgtctgatgccttcgttgaaaagaccacccttctgaatcgcgatgatgagtttcttgataatgaactgtccgccgcgcttgaagtggggtatttattgcgtctggcatccagttcttccggcaacgaagagcgcgtgatttatgtctctcgcgccggattctttctggaaacggatacgccggaaaatgccagcgatatcgtgcagcgttactaccatctggtcactcagccctggtttacccaacagtccgagcgtgagaaccgtgcgcgtgccgtgcgctggtttatctcgcctccttcctcctttgtgggcaaaaagccgctgatcaccgccagtgtgcctgtttattacaatcacgtctggtatggcgtggtggcgatggatttcacctttgccaccctgcgtcgtctgctggtggaggccgtaggcgataacccggaaggggaataccagctgtatgacagtcgtctcaccctactcgcgacgtctggatcatctgctgcggacgttaatcattttgacgcgcccgaactagcgcagatagcgcacgcaatagaatcggattccgaaggcggcattcgcctggggagtcgttttgtcagctgggagcgtctcgaccactttgatggcatcgtcctgcgcgtgcacaccctggaagaaggggtgcgcggcgatttcggcagcatcagtattgtgctggcattgctttgggcgctgttcaccgcgatgctgctcatctcatggctggtgatccggcgcatggtcagtaatatgtattcgttgcagaattcgctgcaatggcaggcctggcacgaccctctgacccggttgaataatcgtgggtcgctgtttgagcgggcgaaaatactggcgaagcagtgtgaacagcaggcgctgcctttctctgtcatccagatcgatcttgactgctttaagagcattaatgaccggttcgggcaccaggcgggtgataaggtgttgtcccatgctgcggggctgattgccagtaccctgcgcactaaagatattgccgggcgcgtcggcggcgaagagttctgtgtggtgctgcccggcatgacgcttgaagaggcagcggaagttgcagagcagatccgtgagcgtatcgacagcaaagagatcctgattaagaaaagtactaccctgcgcgtgagcgcgtcgtttggcgtctctggcgcgcaggagaagggcaattatcacttcgaaaatctgcaatccaccgccgatgcgcgtctgtatgaggcgaaacagcgcgggcgtaaccgggtcatctggcaggatcacgttaaaaagtaa

SEQ ID NO: 525318 - DNA, 801 bp, Stenotrophomonas maltophilia
atgccttcgctaaaggagactctgctcgtctttaccgatctcgacggtacgctgctggattttcacactctcgactggcagcctgccgcttcctggctgaagagattacaggatgaacaggtaccagtcattctgtgcagcagcaaaaccgcgtccgaaatgcgtgacatccagcaggaacttggccttggcgggctgccctacattgcggaaaacggcgcggtgatccagcctgacgtacggtgggaaaacgccgcacggttcatctcagaaaagaagcatgacgatatctggcagtttattgcccgggtacgccaggagatgcatctgaaattcaccaccttcgacgatgtggatgagcgcgtggtcgccgaatggaccgggctaagccgtccccgtgcggcgcttgcacgtaaacacgaggcttccgtgacgctgatctggcgtgacagtgatgaacaaatgaaacgcttcgcagccgaactggcccggcaggggctgaagatcgtcccgggtgctcgcttctggcatattctggacacgagctgtggcaaagacgtggcggtgcactggcttgtggaacagtatcgcctgcacgacggatttgacccgacaacgctgggcctgggcgacggccccaatgatgcccctctgctggacagcgtagccttcgccgtggtggtgaaaggcttcaaccgggagggggtcagccttaagaacaacgatcccacacgggtttatcgcactcagcacaccggaccggccggctggcgcgaggggcttgattactttttaacgtga

SEQ ID NO: 525319 - DNA, 228 bp, Stenotrophomonas maltophilia
atgaagactgacaaagagtacagcgacaccattaagcgtgaggtggaagtggatgtcgatgccctgcttgccgccattaatgaaatcagtgagtccgaagttcatcgcgcggaggataattcagaccgtgtcgtggtcaatggtcgtgattaccatacctaccgtgaactggctgaagcattcgagctggatatccatgactttagtgtctcggaaacgaaccgctaa

SEQ ID NO: 525320 - DNA, 189 bp, Stenotrophomonas maltophilia
atgaaggtcaacgatcgggtaaccgtcaaaacggacggtgggccgcgccgcccgggcgtggtgctggcaatagaagagtttaatgaaggcacaatgtatctggtgtcgctggaagattacccgctcggcatctggttcttcaacgaactggggcacccggatgggatctttgtggaaacggcggaatag

SEQ ID NO: 525321 - DNA, 624 bp, Stenotrophomonas maltophilia
atgtcaacgatcattatggatttatgcagctacacccggctagggttaaccgggtacttagcaagcagaggggtaagaaagagagacatcaacgatgcacacaccgttgaagaactcgcagccgcttgtgagtctcacaagcccggcgtggtgtttattaatgaggactgtttcattcacgaccccgctaacagtcagcacattaagcagatcattaatcagcatcccagaaccctgtttattgtttttatggcgatcgccaatattcatttcgatgagtatttgttggtgcgtaaaaacttattaatcagttcgaaatcgattaaaccagagtcgcttgatgacattctgggcgattatttgaataaagaagttaagaatgtaggagcggttaacttacccaccctatcattaagcagaactgaatcaagtatgctaagaatgtggatggctggacaagggacaattcagatctcagaccagatgaatatcaaggcaaaaacagtatcgtcacacaaaggaaatattaaaaggaaaattaaaacgcataataagcaagtgatataccatgtcgtacgcctgacagataatgtgacgaatgggattttcgttaatatgcgctaa

SEQ ID NO: 525322 - DNA, 270 bp, Stenotrophomonas maltophilia
atgacgcctgagtcggtcatgatgatgggcacggaagcgatgaaagtcgcgattgccgtcgccgcgcccctgcttctggttgcgctggtaaccggtctgattatcagtattcttcaggccgccacgcagattaacgaaatgaccctgtcgttcatcccgaagatcatcgccgtcttcgtggcgattatcgttgccgggccctggatgctcaatttgctgctggattacatgcgcaacctgttcaccaatctgccttacatcatcggctga

SEQ ID NO: 525323 - DNA, 738 bp, Stenotrophomonas maltophilia
atgcgtcgtctgttattgcttacgctggcaggcctgggcctgttcgcgccctccgtgtatgcgcagctgccgggactggtttccacaccgctggcgaatgggggccaaagctggtccctgtccgtgcagacgctggtgttcatcacctcgctgacctttatcccggcgatcctgctgatgatgaccagctttacccgcatcatcatcgtgtttggcctgctgcgcaacgcgctcggcacgccttccgcgccgcccaatcaggtgctgctgggtttagccctgttcctgacctttttcattatgtcgccggtgatcgacaagatttacaccgaggcgtaccagccgttcagcgaagataaaatttccatgcaggttgccctggaaaagggggctcagccattacgtgaatttatgcttcgccagacgcgcgaagcggatttggccctgtttgcccgtctcgctaacacgggcgagttacagggaccggaagcggtgccgatgcgcattctgctgccagcgtatgtgaccagtgagctgaaaacggcgttccagattggcttcaccattttcattccgttcctgattattgacctggtgatcgccagcgtcctgatggcgctcgggatgatgatggtcccgcccgcaaccattgccctgccctttaagatcatgctgttcgtactggtcgacggctggcagctgctggtcagctcgctggcgcagagtttctacagttga

SEQ ID NO: 525324 - DNA, 375 bp, Stenotrophomonas maltophilia
atgaaaacccaggcaacactgtccgcgccctccgccgtacccggctccccgctgcttcaggtgagcggcgcgctgttcggtattattgcctttatccttatcgctgcctggctggcaaagcgtttcgggctggcggggaaaacggccggcacgcgcggactgaaggtcagcgccagcaccacactcggcccacgcgagcgcgtggtcattgtggaagtggaagatgcgcgactggtgctaggcgtgaccgcctccagcattaacgttcttcacacgctgcccccttcgcctgtcacggtggaggctaacgcccaggcccctgcggattttcagtccgttatgaagagtttgctcaagcgttccgggagatcctga

SEQ ID NO: 525325 - DNA, 414 bp, Stenotrophomonas maltophilia
atgagtgacatgaacaatccgtccgatgaaaacagcggagcactggacgaactgtgggctgacgcgttaaacgagcaaaaaacgacgccgacgaaaagcgcggcagacgcggtcttccagcagttaggcggcggcgacgtcagcgggacgttacaggacatcgacctgattatggacattccggtcaagctgaccgttgagctgggccgcacccgcatgactattaaagagctgctgcgcctgacgcagggttccgttgtagccctggacggtttagcgggtgagccactggagattctgatcaacggctacctgattgcacagggcgaagtagtggtggtggccgataaatacggcgtacgtatcaccgacatcattaccccttccgaacgtatgcgtcgcctgagccgttaa

SEQ ID NO: 525326 - DNA, 1005 bp, Stenotrophomonas maltophilia
atgggcgacagtattctttctcaggcagaaatcgatgcgctgctcaatggcgacagcgataagagtgacgatccgaagccgggtctgaccggcgacgataatattcgtccctacgatcccaatacccagcgtcgcgtggtgcgcgagcgtttacaggcgctggagatcatcaacgaacgtttcgcacgtcagttccgaatggggctgtttaacctgctgcgtcgtagcccggatatcaccgtcggtgcgatccgcattcagccgtatcatgagtttgcccgcaacctgccggtgccaaccaaccttaacctgatccatctgaaaccgctgcgcggtaccggcctggtggtgttctcgccaagcctggtattcatcgcagtggacaacctgttcggtggcgatggccgtttcccgaccaaagtggaaggccgcgagtttacccataccgaacagcgcgttatcaaccgcatgctgaagctggcgctggaatcctacagcgacgcgtggaaagcgattaaccctctggaagtggagtacgtgcgttccgagatgcaggtgaagtttaccaacatcaccacttcaccgaatgacatcgtggtgaacaccccgttccacgtcgagatcggcaacctgacgggcgagttcaacatctgcctgccgttcagcatgattgaaccgctgcgcgaactgctggtgaacccgccgctggagaactcacgccatgaagatcagaactggcgtgagaacctggtgcgccaggttcagcactcgcagctggagctggtggctaactttgccgacatctccatgcggttatcgcagatcctgaaattacaacccggcgacgttttgccgatagataaacccgaccgcattattgcccatgtggatggcgtacccgtgctgacaagccagtacggcacgattaacggccagtatgcgttacgcgttgagcacttgatcaacccgattttgaattcgctgaatgaggaacagcccaaatga

SEQ ID NO: 525327 - DNA, 471 bp, Stenotrophomonas maltophilia
atgacagactccgctatcaccaaaaaaagcaagcgttccatctggatcccgctgctggtgttgattaccctcgcggcctgcgccaccgcaggctacagttactggcgtatgcagcaggaaccctccagcgcagccgccaaagctgaagcgccgcctccaccggcgccggtcttctacccgctggatacgttcaccgtgaacctcggcgatgcggatcgcgtgctttacgtgggcattacgctgcgtctgaaagatgaagcgacccgtgcacgtctgaacgactacctgccagaagtgcgtagccgtctgctgttgctgttttctcgtcaggatgcctccgcgctcgccaccgatgtgggcaagcaaaagctggtcgatgcgatcaaacagacgctggcgaccccgctggtcaacggccaacctaagcaggaagtcactgacgttctgtatacagccttcattctgcggtaa

SEQ ID NO: 525328 - DNA, 1215 bp, Stenotrophomonas maltophilia
atgatcacactgcaacaactgctgatgaccgacagcgacccgtccggcggcacgctgaccggaaaaggcgctgagggcgcgcaagattttctctctctgctggcgggcgcgctgaccgagaccaccggcaaaggcaaagatgctccgctgacgctggccgatctgaaagcagcgggaagcaagctgtcgacagcggcacaggaaaaaaacggtgataccacgctccagtccaaaatcgccgagctgctctcccgccaggagacgctgaccggtgaagataccgccgtctccctgcaaagccttgtctccggtctgaaacccgcagcgaatacggatgcgctgaaggcgctgacccggatggacgcgaaagcaaacagcgagaccacgactgaagaagaggagctggccgggttaagcgcgctgatggcaatgttaccgcaccagcagactaccaccccaatggcgacgcagccagcaagcaccggggaggtcgcccctcgtgccgccctaccctctgcgctagcccagacggacaacggccagcatcagccgcttagccatgcgttaacgggtcaggaaaaaacgtcggttcaggacagcgacacgtcgctgcccgccacggcagccgttacgccagctgttgccgccgtcgcggagaagcaggacgtagtgagcacggcgtcgtctgccgccagcccaaccgcgacgctggccccgatcgttagtcacctggcacccccccagcctgccgctaccgttgcgaccgcgccggtgttaagccagccgctgggcacgcacgaatggcagcagaatctaagccagcacatcaccctgttcaccagacagggccaacagaccgcagagctacgcctgcacccggaagatctgggtcaggtgcaaatttcgcttaagctggatgacaaccaggcgcagttgcagatggtttcgccccacagccacgttcgtgcggcgctggaagcggccctgccgatcctgcgcacgcagcttgcggaaaacggcattcagctttcccaaagcagcgtcagcagcgaaggctttgccgggcagcagcaatcttcatccgggcaacaacagcatgcttcgcgttcaggccagcatggcgggtttaacgaggagagcgaagagttattgccaacccctgccgccctgcaatccgccgcgcgcggcagccgtgccgtagacatctttgcctaa

SEQ ID NO: 525329 - DNA, 444 bp, Stenotrophomonas maltophilia
atggcgcagaacagcgcgttatcaacgctgaaagatctggctgaaaaagaagttgatgatgccgcattgcaacttggcgcaatgcgacgcgggtgccaacaggctgaagaacagttgaagatgttaatcgactatcagcatgaatatcgcaccaaccttaacaccgacatgacgcagggcattggtagccagcgctggattaactatcagcagtttatccagacgctggaaaaggcgattgagcagcatcgccagcagcttaaccagtggacgcaaaaagtcgataccgcgctgaatttctggcgcgagaaaaaacagcggttgcaggcctggcaaaccttacaggaccggcagattgcagcctcgaccctggcggaaaaccgtctggatcagaaaaaaatggatgagtttgcccagcgcgcatcaatgaggaaaccagaatga

SEQ ID NO: 525330 - DNA, 1371 bp, Stenotrophomonas maltophilia
atgaccgcacgccttacgcgctggcttaacacgctcgataattttgaaacgaagatggcgcagctgccatccgttcgtcgttatggacgcctgacgcgtgccaccggtctggtcctggaagccacgggtctgcaacttccgctcggcgccacctgcgtgattgagcgtcaggacggaagtgagacgcgtgaagtggaaagtgaagtggtcgggtttaacggccagcgactgtttctgatgccccttgaggaagtggaagggattttgcccggcgcccgcgtctacgcgaaaaacatcagcggtgacggcctgcaaagcggcaaacagctcccgctcggtccggcgctgctgggccgcgtgctggacgggagcggcaaaccgctcgatggcctgccctccccagataccaccgaaaccggcgcgctgatcacccaaccctttaacccgctgcaacgcacgccaatcgagcacgtactggataccggcgtgcggccaattaacgccctgctcaccgtgggacgcggccagcgtatggggctgtttgccggctccggcgtgggtaaatcggtcctgctcggcatgatggcgcgttatacccaggcggacgttatcgtcgtcggcctgattggtgagcgtggtcgcgaagtcaaagatttcatcgaaaacattcttggtgcggagggtcgcgcccgctcggtggtgatcgccgccccggctgacgtgtcgccgctgctgcgtatgcagggtgccgcctacgccacgcgtatcgcggaagatttccgcgaccggggccagcacgtgctgctgattatggactccctgacccgctacgcgatggcgcagcgtgagattgcgctggccatcggcgagccgcccgcgaccaaaggttacccgccgtcggtcttcgccaagctcccggcgttggttgagcgtgcggggaacggcatcagcggcggaggctccatcaccgcgttctatacggtactgaccgaaggcgatgaccagcaggacccgattgccgattctgcgcgcgcgatcctcgacggccatatcgtgctgtcgcgccgtctggccgaagccgggcactacccggcgattgatattgaagcctcgatcagccgtgcgatgacggccttgatcaccgaacaacactacgcgcgcgtgcgtaacttcaaacaactgctctccagcttccagcgcaaccgcgatctggtaagcgtcggggcgtacgccaaaggcagcgatccgatgctcgataaagcgattgccctgtggccgcagctggaggcatttctgcaacagggtatttttgaacgcgccgactgggaagattccctccaggcactggagctgattttcccgcaggtgtaa

SEQ ID NO: 525331 - DNA, 708 bp, Stenotrophomonas maltophilia
atgtctgatgaactgtcgtggaagcgctggacgcctgacgacctctcccctcccaccgcagagttcacccctgccatagtgtcgtccgatgagggcgacgccggggcgggcgtgcccgagctgagtgaagaggaacagcgcgcccagatgctggcccagatgcaaatgcaggcgcacgagcagggcttcaacgccgggatgaacgaaggccgtcagaccgggcacgcacagggttatcaggaagggctggcgaaaggtttagagcagggcattgagcaggcgcgccagcagcaggcgccgctgcatgcccgcatgcagcagctggtgagcgagtttcagcacacgctggatgcgctggacagcgtgattgcctcgcgcctgatgcagatggcgctggaggcggcccgtcaggtgatcggccagacgccggtcgtggataacgccgcgctgattaagcaaatccaggggctgctccagcaggagccgctgttcagcggcaaaccgcagctgcgcgtgcatcctgatgatttgcagcgcgtggaagagagcctcggcgcgacgctgagcctgcacggctggcggctgcgcggcgatccgtcgctccatcacggaggctgtaaggtctcggcggatgagggcgatctggatgccagcgtcgcgacccgctggcaggaactgtgccgcctggcggcaccgggagtcgtctga

SEQ ID NO: 525332 - DNA, 999 bp, Stenotrophomonas maltophilia
atgagtaatacgcttacaggcaccgataagagcgtcatcctactgatgaccattggcgaagatcgcgcggcggaggtgtttaaacacctctctcagcgagaagtgcagatcctcagcgcggcgatggccaacgtgcgccagatctccaacaagcagctgaccgaagtgctggcggagtttgagcaggaagccgagcagtttgctgcgctcaacgtcaacgccaacgaatacctgcgctccgtgctggttaaggcgctgggcgaagaacgcgccgccagcctgctggaagatattctcgaaacgcgcgacaccgccagcgggatcgaaacgctcaactttatggagccgcaaagcgccgccgatcttattcgcgacgagcacccgcagattatcgccaccattctggttcacctcaaacggggccaggcggccgatattctggcgctgttcgacgagcgcctgcgccacgacgtgatgctgcgtatcgccaccttcggcggcgtccagccagccgcgctggcggagctgaccgaagtgctgaacaacctgctcgacggccagaacctcaagcgcagcaaaatgggcggcgtgagaacggcagcggaaatcatcaacctgatgaaaacgcagcaggaagaggcggttattacggcggtgcgcgagttcgacggcgaactggcgcagaaaattatcgacgagatgttcctgttcgaaaacctggtcgaagtggacgatcgcagcatccagcgcctgcttcaggaagtggattcggagtccctgcttatcgccctcaaaggcgccgagcagccgctgcgcgagaagttcctgcgcaacatgtcccagcgtgcggccgatatcctgcgcgacgacctggccaaccgtggcccggtgcgtttgtctcaggtggagaacgaacagaaagcgatcctgcttattgttcgtcgtctggcagaaaccggcgagatggtgattggcagcggagacgacacctatgtctga

SEQ ID NO: 525333 - DNA, 1683 bp, Stenotrophomonas maltophilia
atgagtgcgacagcagcatcgacagcgccgcagaataaatcactcgagtggatgaaccgccttcgcgccaaccctaagatcccgttgattgtggcaggcgctgccgccattgcgatcgttgtcgcgatggtcttatgggcaaaaagcccggactaccgcacgctctacagcaacctttccgaccaggatggcggtgccatcgtcacccagttgacccagatgaacatcccgtatcgctttgccgataacggcggtgcgcttgaagtgccggcagataaagtgcacgagcttcgcctgcgtctcgcccagcaggggctgccgaaaggcggcgcggttgggtttgaactgctggatcaggaaaaattcggcatcagccagttcagcgagcaggttaactaccagcgcgcgctggaaggtgagctggcccgtacgattgaaaccttaggcccggtgaaaagtgcccgcgtgcacctggcgatgcctaagccgtccctgtttgtccgcgaacaaaagtccccttctgcctctgtgacggttaacctcgaacccggtcgtgcgctggatgaaggccagatcagcgccgtcacgcacctggtctccagtgcggtagccggtctgccgccgggtaacgttacgctggtggatcagagcggtcacctgctgacgcagtccaacaccgccgggcgcgatctcaacgacgcccagctgaaatacgccgccgacgtggaaggccgtctccagcgtcgcatcgaagcgattctgggcccggtggtgggcaacagcaacgtgcatgcgcaggtcaccgcgcagattgatttctcgaataaagaacagaccgaagagcagtacgccccgaacggggatgcttctcgcgccgtgttacgctcgcgtcagatcaatgagacggaacaggtcggtggccagtatcctggcggtgtgccgggtgcgctctctaaccagcctgcgcctgccaacgccgcgccaatctccacgccgccggccaacccgcagaacggtcagcaaacgaatcagcagacgacctcgaccgcgaacagtgccggcccgcgtaacagcagccgtaacgaaacgaccaactacgaagtcgaccggactatccgccataccaaactgaacacgggagatattcagcgtctctctgttgccgtggtggtgaactacaaaacgctgccggacggtaaaccgctgccgctcacggcagagcagatgaagcagatcgaagatttgacccgcgaagcgatgggcttctctgaaaaacgtggcgataccctcaacgttgtgaactcaccgttcaacccggtggatgagaccggtggcgaactgccgttctggcaacagcaggcgttcttcgatcagctgatgtccgcaggccgctggctgctggtgctgattgtcgcgtggctgctgtggcgtaagggtgtccgtcctcagcttcagcgtcgcgctgaagccgaaaaagctgcgctggaacagaagaacgcgcgtccggacgaggaagaagcggttgaagttcgtctcagcaaagatgaacagatgcagcagcgccgtgctaaccagcgtatgggcgcagaggtgatgagccagcgcattcgcgaaatgtcagataacgatccgcgcgtcgtcgcgctggtcatccgcggttggatgggtaacgaacatgagtaa

SEQ ID NO: 525334 - DNA, 315 bp, Stenotrophomonas maltophilia
atggctatacagggcattgaaggggtactcagtcagttacaggcgacggcgatgaccgcccgtaatcagagcgtaactgaccagccgcagggcattagcttcgccggtcaactgcatgcggcgctggaccggatcagcgataagcaaaacgcggcccgtacccaggctgagagatttaccctcggtgaacccggcgtggcgctcaacgatgtgatggccgatctgcaaaaagcgtcggtgtcattgcagatggggttgcaggtgcgtaacaagctggtgtcggcgtatcaggacgtgatgtcgatgcaggtgtga

SEQ ID NO: 525335 - DNA, 414 bp, Stenotrophomonas maltophilia
atgaaaaaagtagcaattgtggctgcaattctgacgttagcgggatgcgttcaggtcgaaaactatcaggaagtggttaagcatccggcaccttcgcatctggcaggttactggcagtcgaaagggccgcagagcgcgatggtgagcccggaggcgattgccacgctggtggtgacgccagagggtgataccctggactgccgtcagtggcagcgcgttatcgcggtgccgggtaagatcatgctgcgttcagatgattattataacgtgaccgaaaaacgagacgtctatccgctcgatcgtgatggggcggcgctggagtatgacggcatggaactgtacaaggttgaccgcccaacggtggaatgcgcagatttcctgagcaagaatccgctggagagtaagcttccgtaa

SEQ ID NO: 525336 - DNA, 927 bp, Stenotrophomonas maltophilia
atgaataaacttgatgcctttatccagcacgcagtcagctctgttcccgtcagcggaacgtcgcttatctcttcgctgtatggcgacgcgctttcccatcgcggcggagagatctggctcggcagtctggcggccctgctggaagggatgggattcggggagcgctttgtgcgcaccgcgctgtttcgcctcaacaaagagggctggctggacgtgtcccgcattggccgccgcagcttttaccgtctcagcgacaaggggctgcgtttgacccgacgcgcggaaaataaaatctaccgtgcagaattgccggcgtgggatggtaaatggctgctactgctttccgaggggctggataaaaccacgctcgcggacgtgaaaaaacagctcatctggcaagggttcggcacgctggcgccgagcctgatggcctcgccgtcgcagaacctcgcggacgtgcagtcgctgttgcatgacgcgggcgtggcggaaaacgtcattttctttgaagctcattcgccgctggctttgtcacgcgcggcattacgatcccgcgtggaagagtgctggcagctgaccgaacaaaacgcgatgtacgaaacgtttatcaactcgttccgtccgctgctgccgctgctgaaagaggcgtcgcccgaggatttaaccccggaacgctgctttcagatccagctgttactcattcatttttatcgtcgcgtggtgctgaaagatccgctgttgccggaggagttactcccggcgcactgggcgggacagagcgcgcgacagctgtgcattaacatctaccagcgcgtggcagcgggagccctggcgtttgtcagtgagaagggggaaacctccgtcggcgagctgcccgcgcccggcacgctttatcaccagcgttttggtggtctgaatatcacataa

SEQ ID NO: 525337 - DNA, 606 bp, Stenotrophomonas maltophilia
atgcctgtttatcaaattgatggtctgacgccggtcgtgcctgaagagagctatgttcacccgaccgcggtgctgattggcgacgtgatcctcggcaaaggtgtttacgtaggccccaacgccagcctgcgcggtgattttggccggatcgtggtgaaagacggcgcgaacattcaggataactgcgtgatgcacggttttccggagcaggacacggtggtggaagaggacgggcatatcggccacagcgcgatcctgcacggctgcattatccgccgtaatgcgctggtggggatgaatgcggtggtgatggacggagcgacgatcggcgaaaacagcatcgtcggggcggcggcgtttgtgaaggccaaagcgggaatgcctgcgaatcacttaattcttggcagtccggcgaaagcgattcgtgagctaagcgcgcaggaaatagagtggaaaaagcagggcacgcgggagtatcaggtgctggtggatcgctgtaagcagacgctgcatcaggtagagccgctgcgggaagaggagcccggacgcaaacggctggtattcgatgagaacttacggcccaagtcggctggccgggataattaa

SEQ ID NO: 525338 - DNA, 1998 bp, Stenotrophomonas maltophilia
atgagtgaaaacgacactatcccaaagcagtccaaaagccagattaacaaagcggtattttacacatctgctttgttaattttccttcttgtcgcctttgccgcgattttccctgacgttgccgataaaaactttaagctactgcaacagcaaatattcaccaacgccagctggttttacattcttgccgtcgcgctgattttaatgagcgtgacgttcctcggcttgtcccgctacggcgatattaaactcgggcccgaccactcccagcctgacttcagctaccactcctggttcgccatgctgttctcggcggggatggggatcggactgatgttcttcggcgtggcggagccggtcatgcactacctttccccgccggtggggacacctgaaacggtcgctgcggccaaagaggccatgcggctgacattcttccactgggggctgcacgcctgggctatctacgccatcgttgcgttgattctggcattcttcagctaccgccacggcctgcctttgacgcttcgttcggcgctttatccgattatcggcgaccgtatttacggcccgataggtcatgcggtggatatcttcgcggtaatcggcaccgtatttggcgtggcgacctcgttaggttacggcgttttacaggtcaatgccgggctgaaccacctttttggcgtgcccatcaacgataccgtgcaggtgatccttatcgtcctgattaccgggctggcgaccatttctgtggtgtccggtctggataaaggcattcgcattttatcagagctcaatctggggctggcggtactgctgctggtgctggtgttgtgcctggggccaaccgtactcctgctgaaatcctttgtggaaaataccggcggatacctgtccgagctggtgagcaagacgtttaacctgtacgcttatgaaccgaaatccagcaactggctgggaggctggacgctgctgtactggggctggtggctgtcctggtcgccgtttgtcgggatgttcattgcccgtgtgtcccgcggcagaaccatccgcgagttcgtgaccggcgtgctgtttgtcccggcgggctttaccctgatgtggatgacggtgttcggcaatagcgccatttacctcatcatgaacaagggagcgtccgatctggcgaataccgtccagcaggacgtggcgctggcgctgtttaatttccttgagcattttccgttctcttccgtgctgtcatttattgccatggcgatggtcatcgtcttctttgtgacctcagccgactccggggcgatggtggtggataccctcgcgtccggcggcgaagccaatacccccgtctggcagcgcatcttctgggccgcgctgatgggcgtagtcgctatcgcgctgctgctcgcgggcggactgagtgcgctgcaaaccgtgaccatcgccagcgcgctaccgttctcgatgatcctgctggtctcaatctatgggttgctgaaggcgctccgacgcgatttgaccaaacgcgagagcctgagtatggccacgatcgcgccgacagcggcccgtaaccccattccgtggcagcgcagactgcgtaacatcgcatacttacctaaacgctccctggtgaaacgctttatggaagaggtgatcaaaccggccatggtgctggtgcaggatgaactgaataagcagggaacgcagagccatatcagcgacgcgtcggacgatcgtattcgccttgaggtggatttaggcaatgagctgaatttcatttatgaagtcaggctgcgtggctataactcgccgaccttcgcgctagcggccatggagaatgatgagaatcaggcagaacagcaccggtactatcgggcagaaatctacctcaaggaaggtgggcaaaattacgatgtgatgggctggaaccaggagcagttaattaacgatatcctggaccagtatgaaaaacatctgcacttcctgcacctggtgcgttaa

SEQ ID NO: 525339 - DNA, 636 bp, Stenotrophomonas maltophilia
gtgaattttcaggatatccatacctattatcagcaactcaatattgggcaattttttccgcaaatgctttgtaaaggcgaggtcttaaccgttgccgcaaataaaaaactcaccgttgaacctggctatatttatttttgtactgaagggtcactgacgatattaatgcctgatgatgggctgaatattggcaatactattgagtatatgccgatcgggttaatggaaaggtattgtccactggcgaagtatgaatatcgcagcagtgccagggtgaaactggtgagaatatcctgggccgacttcgaccagatatttttccagggtgggcctgagcgcatgcaggcgctggccaccatactgacctatatgtcgatattcaccatcgacctgcataacgaacgcaggcaggtcaccagctaccagaccattaaacctatgctctatcgctatctttatcggcaggaaacccacacgggagagaatgagggtctggcgctgtttatcatcaagcgcactaacctgtcgcgaacgcatgtctttcgcgtgctggcggatcttaaagccgggggctatatcaccatgaagcgcggaaagctggtgtcgatagaccgtccgctgccggaggcgtattaa

SEQ ID NO: 525340 - DNA, 1977 bp, Stenotrophomonas maltophilia
atgaaattaacgataatcgctaaacatctggcgctggccggtgtgttgacgtcgctgtcgctttccgcgtttgcggaagtacagccgcaggatgccactcctacaacccagcaggctaataacgccctgtataacaaattaccgtttgccgataaaaccgactttgaaaatgcccataaaggctttatcgccccgctgccgcaaaacatgatcaaaggcgagcaggggaacgttatctggaacccggcgaaatatgatttcgtcaaagagggtgaaaaagccccggatacggtaaacccgagtctgtggcgtcagtcacagttgatcaacattggcgggctgtttaaggtcaccgacggcgtgtatcagatccgtaatctcgatctctccaacatgaccatcattgagggcgagaagggcattaccgttatcgacccgctgttaagcgctgaaccggcgaaagaagcgctggatctctactatgcaaaccgcggcaagaaaccggtcgtcgctgtggtgatcacccacagccacgttgaccactatggcggcctgcgcggcgtggttgacgaagctgacgtcaagtctggcaaagtgaaaatcttcgcgccggatggctttatgaaagaggcggtttccgaaaacattatggccggaaacgcgatgagccgccgtgcgagctatatgtacggcaacctgctgaagccggatgcaaaaggccaggtgggtgcaggccttggcaccaccacctctgcgggtactgtcaccctcatcccgccgaccgactacattacccataccggtcaggaagaagtgatcgacggcttgacctacgactttatgatggcgccgggttcagaagctccgtcggagatgctgtggtacgtcaaagagaagaaaatgatcgaggccgcagaggacgtgacccatactctgcacaacacctactccttgcgcggcgcgaaaatccgcgacccgctggcctggtcgaagtacattaacgccgccattgagcgctggggcgcggacgcggaagtgattattgcgcagcaccactggccgacctggggtaacgagaatatcgtcaagctgatgaaaggccagcgcgatatgtaccgctacatcaacgaccagaccctgcgtatggccaacaaaggcctgactcgcgatgagatcgccgcagaatttaagctgccggaatcgctcgagaaacagtgggcaagccgcggttactacggctccgttagccacgacgtcaaagccacttacgtgttttatctcggctggttcgacggcaacccggcaaccctcgacgagctgccgcctgaacaggctgcgaagaagttcgtgcagtacatgggcggcgctgatgccatcatgcagaaagccaaagcggattatcagcagggtaattaccgttgggttgctcaggtggtcagcaaagtggtctttgccgatcctaacaaccaggctgcccgtaatctggaagccgacgcgcttgagcagttaggttaccaggcggaagcgggcacctggcgtaacttctacctgaccggcgcgcaagaactgcgtaatggcgtgaagaagctgccgacgccgaacaccgccagtccggataccgtgcgagcgatgaccccggaaatgttcttcgactacctgggtgtgcacatcaacggggtgcgggccggtaacgcgaaggcggtcttcaatgtcgatctcggtaaggatggcggcaaatacaagctggagctggaaaacggcgtgctgaaccataccgccaacgcgcaggcgaaggatgccgacgcaactatcgcgcttgaccgcaccacgctgaacaacatcatccttaagaaagagacgctgaagcaggcgatggataaaggtgacgtgaaggtgagtggaaacggggcgaagctggaagagatgctgagctacatggacaaatttgacttctggttcaatatcgtaacgccataa

SEQ ID NO: 525341 - DNA, 762 bp, Stenotrophomonas maltophilia
  misc_feature (14)..(23): n is a, c, g, or t
atgggattgatggnnnnnnnnnnattcatggtattgatggtatgcggctactggtacaccagccgcgatctctcaacccggttcaaaattaagcgttcattcggctgggatgtctatttccttgtggcgctgtatggctgcattttcgttttacagggcgtgatcgccaccggcctgctctggctgctgttgttcgccctctccgccgccgacaacacgttccatttcacgtccgcaaaatacgccgactggcaaattgattttatgaactggagctttttagggattcaggctccggtcgtggtgatgctggcctttgcgatcctgttttgtctctatcgttctaactgggccggcagcgcgcggctggacggcgaaggccggaaaaagctctacaagcggctggcgcaatcgagcgggattgaacaactgctctatcagtgcatggaggaaggtgaacttgcgcacgtcacgctgaagtcgcggcggatttatattggcatgatccataccgccacgctggagtatgaaaaaaccgccaatatcgtgcttatcccgatgctgagcggctaccgcgacggggagaacatgcagctgtgtattgagcacaactacagcaaatggtacgccgagcatgaggttacgctcgactcagagccaaaaagcgctatggatttccgtaaggtgatcatgcttgatcagatcgagagtatttcgctgttcgatccggcaagtgccagcgcgctggcgatgcgtgaataa

SEQ ID NO: 525342 - DNA, 198 bp, Stenotrophomonas maltophilia
atgaaaaatttactgatggcgctcttttccagcccggaatccttgttgcaggttatgagtcaccaggaaattatcgaagccgtagaggatggcgaccgcatcatcatcgatcaggatggaaacgcctcggttaactacaaaagtaacgaggttcggcaggactttctgcgccatgtcaacgcgctgaagagggcctga

SEQ ID NO: 525343 - DNA, 435 bp, Stenotrophomonas maltophilia
atgagcacgttgccgtccgtcatcagtcgattcgttgattattacgccacgctggatacccagccaccttcggctctggcaaagatttatcgcgccgatgccacgcttatcgatccctttggcgaacacagcgggttgttcgcgattcagcgctatttcactcacctgctggctaacgtccagcggtgccgctttaccgtcgatgcacccttgcagcagggcgatcgctttgttgttacctggatgatgcactggtcgcacccgcgtattgcccggggggcaatgcgccagctgccgggctgctctgtggtagacatgcgcgacgatcgcattgttcgccagcgggattactacgatgccggagagatgatttacgaacatcttccggtgctcggctgggccgtacgcggcgtgaagcggagagtgaaatcatga

SEQ ID NO: 525344 - DNA, 720 bp, Stenotrophomonas maltophilia
atgaaaacggttctgatcaccggcgcaagctcgggcataggggccgggctggcgaaatcttttgccgacgatggctaccgggtgattgcctgcgggcgcgatgcgcaacgtctggcagccgtgcatcagcacagccccaacattacggtgcgcctgttcgatatgacagacagggacgcctgtcgccaggcgctggcggactgtgctgccgacacggtgattctttgcgccggaacctgcgagtatctcgatcgcggcgaggtggatgccgcgttggtggcgcgcgtcatgaccaccaatttcatggggccggtaaactgccttgcggcgttgcagccgcagctgatatccggcaaccgcgtggtgctggtcagttcaatggcgcactggcttcacttcccgcgagccgaagcctatggcgcctctaaagcggcgttaacctggtttgctgagacgctgcgcctcgactgggagccgaaagggatcgccgtcacggtcgtttcacctggttttgtcgacacgccgctgacccgaaaaaatgatttcccgatgccgggccgggtcagcgtggaggacgccgtccatgccattcgtcgcggtctggcaaaagggaaggatcatatcgcgtttcccgccgggtttagcctggcgctgcgcctgctctccggtctgcccgataaacttcagcgcgcactgctgcgcaggatggtgcgaccatga

SEQ ID NO: 525345 - DNA, 1260 bp, Stenotrophomonas maltophilia
atgaagatcgcgattatcggcagcggtatcgccgggttaacctgtgcctggcggctcgccggacatcatcaggtcacgctgtttgaagcgcaggccacgccgggcggtcataccgcaacggtggatgtcgacacgccgcagggcaactttgccatcgacaccggttttattgtctacaacgaccgcacctatccgcgcttcatggggctgctgagcgaactgggcatcagtgggcaaaaaacgcagatgagtttttcggtacataacccgcagagcgggctggagtacaacggccacacgctgacgtcgctgttcgcccagcgtcgtaatctgttaaaccctgccttctggacgctgctgaaggagatcgtgcgctttaaccgactggcgaaacagacgctccggggtgacgtcagcgagtccgccacgctggagacgttcctgcaccagcaccgcttcacgcctttttttgcccgtcactacattctgccaatgggggcggctatctggtcatcctcgctacaggagatgaaacgcttcccgctgccgctctttttacgctttttcgagaaccacggtctgctggacattacccatcgtccgcagtggtacgtggtgccgggtggctcccgggagtacattcgcgcgatgctggacaagcttggcgatcgcctgacgctgcacctcaatgcgccggtgcagcagattattcgccacgatcgcggggttgatattacgcgtgagggcgtaacagacaactttgatcaggtgatcttcgcctgccactccgctcaggcgctggcgatgctcgccagcccaacgcaggctgaacgtgaggtgctgggtgatatcggctggcagcgtaacgaggtggtgcttcacagcgatccgcgctggctgccggtgcgcaagcgcgcgtgggcgagctggaactaccgcctcagcgagcaggatcgggccagcgcctgcgtcacctacaacatgaatatcttgcagggactgccgccgggtagcccgctgttttgcgtcaccctcaacccggaaacgccggtggaagaacgctatgtgctgcgccgctttgtctatgagcatccgctttttaacccgcaaagctggcaagcccaggcccggcgtggcgaaataaacggtcgccagcggagctggttctgcggcgcgtactggtacaacggcttccacgaagatggggtacgcagtgcgctggatgtggtaaacgctatcgcggccggggagggcaactga

SEQ ID NO: 525346 - DNA, 723 bp, Stenotrophomonas maltophilia
atgaacagctgcctttaccacggcacattgcgccatcgccgtctttcgccaaaagcgcaccactttacctacagcgtctttatggcctggctcgatctcgatgagctggacgcgctgccctccgtcggtgtgcgccgtaaccgcgttgcgcccgcggcattttatgatgcggactacccgctgggcaccccgctcaaagagtgcgtccttgagcgtctggaaaatctgaccggcgaacgcccggcggggcgggtcatgcttctaacccaactgcgttatttcggctttcattttaacccagtcaatttttactactgctatgacggggaagacaccctgcgctgggttctcgccgaagtccgcaacacgccgtggaatgaacgacactactacgcggtagcggggcgggacgccccgccgacggaaaaagcgtttcacgtctcgccctttaatccgatggacatggtctaccactggcgcttcaacagtccggccagcacgctgcgcatgcatatcgaaaaccatcaggagacgaaggtgtttgatgccactctgacgctgcgccgggagccgctgacgcgcgcagcgctgcggtcgctgctggcgcggatcccgttgatgaccctcaaaaccgttttcgccatttactggcaggcgctcaggctgtggctgaagcgcgtgccgctgcataaccatcccctcagcaggagtgaacgctcatga

SEQ ID NO: 525347 - DNA, 1221 bp, Stenotrophomonas maltophilia
atgaccgatcccgtctttgcgcttgaacccgatatcccgcgaaacgtccgcgtcgcgcgatggttgctcttccgcctgctgaacgggctgcgcggcggctcgctgacgctgcgtgaaggcgcgcagacgttccagttcggcgacgcctccgccgcgcttcatgctgaggtgcaggtacttgctccgggcgtctactggcgcattttaaccgggggcagcctcgccgcggcacaagcgtggatggatggcgactgggagacgccccacctgacgccgctgctggagctgattgcacgtaatagccaaatcctcgggcaactggaaaaagggtttcgcctgctcgggaaaccggtagagcggctacggcactggatgcggcgcaactcccgcgcgcaggcacgggaaaatattgccgcccattacgatttgggcaacaccttttacgcccatttccttgatgaacaactcctttactccagcgcgctgtttaccggggaagagcaggatctggcagcggctcagcaggcaaaaatggccaggctgtgcgaccaactggcgctcaccgcaaacgatcatctgctggagattggtaccggctggggggcgatggcggaatatgccgcccgtcattatggctgccgggtcacaactaccacgctatcgcaggagcagtaccattgggccaccgcgcggatcgcgcgggcaggtttacaggatcgcgttgaggtgctgctctgcgactaccgcgatctgaccggagtgtacgataagctggtgtcggttgagatgattgaagccgtcggccaacgctatctgccaacgtttttccgcacctgccaggcgcgtctgcgtccgggcgggcggatggcgattcaggccatcaccattcaggatcagcgctatcgcgactacagcaaaagcgtcgattttattcagcgctacatcttccccggcggctttttgcccagcatcaccgccatgaatgaactgatgacccgccataccgattttgtcgtgcgtaacctcttcgatatggggccggactacgcccgcacgctggcgcactggcgtcagcgcttcgttcacgcctggcaggagattgaaaagctcggatttgatgaccgtttccgccggatgtggctgtactacctcggctactgtgaggcagggtttaacgcccgcaccatcagcgtggtgcaactgactgcggaacgcgtatga

SEQ ID NO: 525348 - DNA, 486 bp, Stenotrophomonas maltophilia
atgaagcgctacgggcaggtctttctgctggccatcgggtttgatctctactggacgctggtggtgctgtttcgcgagcaggggctggtcatctggatcgcgctggcgctgattgcctggctgttgttaccgccatcacaccgggtatacgcccttgtgctggcggcgtcgggcgcgatgctggacgccctctgggcgctgacggggttgatttcattcactggcacgtctctgatgccgctatggatggtggcgctgtggctgatgtttgccaccgtctggacgcaactgacccgcacgaccaccttgccgggctggctgctgacggcgctggcgaccctgggcgggccgctggcctacctgtttggcgagcgtttgggggccatcacgttcctggagccgacttttatcgtcgtcagctggatgatcccgggctggctggtgctgatgctgtttttccacctgctgatggggagacaacaatga

SEQ ID NO: 525349 - DNA, 525 bp, Stenotrophomonas maltophilia
atgagacatctgttactcgcgctcgcgctaaccgttatggcctgtaacgcgcaggcgactgactggctgagctggcgcaaggtaggcgatgccaccctcacctgggggctgtttaccgtttatacctctcagctgctgacgcccgacggcagatatacaggaacaaacagcgataacgcgctgattatcacctatgcccgggatatcgatggcgacgacctggtcgaggcgacccgcgaccagtggcaggcgcagggcattttgcagcaggagccgcagagtgaagcctggctgcggatgctaaaagcgctctggcccgacgtcacgcccggcacgcagctcgcgtttgtggttaataacggtcaggggcaattctggtatcgccccacggcgtcgcagaaaaaatttacgcccctcgggccgcgccagtcggcagcgtttagctcgcgctttctggcgatctggctcgatccccgcaccgagtatcctgaactgcgtcagcagttaatcggaggaccacaatga

SEQ ID NO: 525350 - DNA, 534 bp, Stenotrophomonas maltophilia
atgaaacgattcctgttaatggcgcttacactgacaatgctggtggccgggtgcagcacagaagtgaccgagtatcgtcagcagcagccaaggcttgatattttccactacttccagggcaaaaccgaggcgtgggggatggtgcaggaccgcagcggtaagcagatccgccgttttcacgtcgagatcgccggagatgttatcggcgatacgctgacgctgaacgagcattttgtctatgacgacggcgagaagcaaaagcgcgtctggcatatccgccgcattggccacgatcgttacgaaggcacggcgggtgacatagaaggtgtcgcgacaggtcaggtttcgggcaacgcccttaactggcgctacagcatgaacgtgaaggcggacggcaaaacctggctgctgcactttgatgactggatgtatttgcaggacagcacccgcctattcaataaaaccgagatgaagaaatttggcgtcaccgtcgccacggtgacgctgttctttacccgcaaagagggcggttaa

SEQ ID NO: 525351 - DNA, 459 bp, Stenotrophomonas maltophilia
atgacagtgattatgattattctggcggtgattggcggcgcgacactgagcattcaggctgccattaacgggcaattaggcagcagcgtgggggtattcaaaagcgcgtttctgaccttttccgtcggcgcgctggtaaccgccctgctcatcttcttttttgagccgaaacaggcggtcagcctgatggatgtgcccaagtggcagcttctgggcgccctgtgcggcgtgccctatatagtgattatggtactcgcggtgcaacgtatcggcaccgccgttgccacggtagcggtgatcctgggtcagctggccatgagcatgctgattgataactttggctggctgaacaatgaagccattccgttttcagcgagccgtttcggggccgtggtctgcctgagtatcgcgctcgtcttcatctactcaagcagtaaacctcagcccgaagaggattaa

SEQ ID NO: 525352 - DNA, 435 bp, Stenotrophomonas maltophilia
atgcacattattttaattttactggtgattgccggcggcatggggttgtccgtggaagccgggctgctggggccgctgggcgcggaggtgggcgacctgtgggcggcgttcagcatatttagcgtgggaaccgggctgacgtttctgctgatgctgtttttcagcccccgcaacagtccctcattttttgcgcagccgtcatggcacctgctgggcggcgtgctcggcccggtctacgtcatcattctcaccattgccacgccagcgatcggtattgctatgacgatgatcggcattctggcaggccaggtctttaaaagcctgattattgaccactatggcctgctgggtacgccgcaccgcaggatcgatacaaaacgcattattgcgctgggatttatcatcgccgcgctcattctcgtggcgcaggggtaa

SEQ ID NO: 525353 - DNA, 933 bp, Stenotrophomonas maltophilia
atgatggatgccggacatatcagcgttcgcgcgctgctgatcttcatcgacgtttatgaaacgcagaatttttccgtggtggcgaggcgggaagggatttctgcgtcgcaggtttcccgcatgatccaccagcttgaggatgccctcgggcaacagcttttctaccgcaacacgcgggcgattatgcccacagagagcgggcatctttttgtgcgctatgcccgggcgatggccggaaatctggaggatgcgcgacgcgagctggatgaacgcgcccgcgagccgtcgggcacgctgcgtatcaatggcccggtctttttcggacaacggcacatcgcgccgggcctgccggggcttctggcgcgttatcctcgtctctccattgaactgaccctcaccgacgattttatcgatccgcaccgcgacgccgcggacgttatcttccgcatcggcgcgctgacggactcctcgtttcacgcccgggtgttcggtcagcagttctaccatctggcggcctcgccggactatctgcaaaaacatggcgcacccgaggggccggacgatctcagtcgtcaccactgtctggtttaccgcggttcgtccgggcctaaccgctggctgatccggcagccgggcgaggcgtgggttcactatcccatcgtaccgctgatgacttccaataacgcggaaacgctcctgattgcggcgctgggcggcatgggcgttgtgctattcccggactggatggtgagcgaacggctcaaaagcggtgagctggtggcactgctgccggaaatggagtgttctattaatacggagccactgacgattgcggcgatttacccgaacgcgcgtcatccgcccctgaacgtcagggcggtgattgactactatattgagcggttcggtacgccactgtactggcaaacctga

SEQ ID NO: 525354 - DNA, 1029 bp, Stenotrophomonas maltophilia
atgaaaacattgctcccgacatcgacggctggcagcctgccgaaacccacctggcttgcgcagccggaaacgctctggtcgccgtggaaactccaggatgaggaattactggcagggaaacaggatgcgctgcgtttgtctctggatgaacagattcgcgccgggattgatatcgtcagcgacggggaacaaacccgccagcatttcgtcaccacctttattgaacatctcagcggcgtggattttgaaaatcgtcagacggtgcggatccgtaaccgttacgatgcgagcgtgccgaccgtggtagacgcggtggcgcgccagaaaccggtgtttgtagacgatgcgaaataccttcgccagctgacggataagccgatcaagtgggcgctgcccggcccgatgaccatgatcgacacgctatacgatgctcactataaaagccgcgaaaagctggcctgggagttcgctaaaattctcaatcaggaagcccgcgagctggaagcggccggcgttgacattattcagttcgacgaacctgcttttaacgtctttttcgacgaagtgaatgactggggcatcgccgcgctggagcgcgccattgaagggctgaaatgcgaaaccgcagtacatatctgctacgggtacggcatcaaagccaatacggactggaaaaaaacgctcggctccgagtggcgccagtatgaagaggcgtttcctaagttgcagacctcaaagatcgatatcatctcgctggagtgccacaactcgcgcgtgccgatggatctgctggagcttatccgcggtaaaaaagtgatggtcggggcaattgacgtcgccacccagaccatcgaaacgccggaagaggtggccgatacgctgcgcaaggcgttgcagtttgttgatgcagacaagctctatccgtccaccaactgcggcatggctcccctttcccgccaggtcgccaacggtaagctgaaggcattaagcgccggggctgacattatccgtcgcgagcttgcccgctaa

SEQ ID NO: 525355 - DNA, 975 bp, Stenotrophomonas maltophilia
atgagtcaggctttcacatttacccttaagcgcagttgctttgatgaaaattataacccgtcagaaaacacgcgtaccaccaccaacttcgccaacctggcgcgtggcgagaagcgtcaggagaacctgcgcaatacgctgatgatgatcaacaaccgctttaacgcgctggcgagctgggataacccaaaatccgaccgctatgccgtcgagctggagattatttcagtcgatatgaatatcggcggcgattttactttcccggccatcgaaattctgcaaacgacgatcgtggataaaaagacccacgagcgcatcgaaggcatcgtcgggaataacttctcatcctatgttcgtgactatgatttcagcgtcctgctgctggagcataataaagatcagccccgttttaccctccccgagaattttggcgagctgcacggcaatatctttaaaagcttcattcattctgcggaatatcaggcgaactttaaaaaagcgccggtgatctgcctgagcgtctccagcaaagacacctatcgtcgtaccggtaaccaccacccggtgctggggtatgagtaccagccggacggcgagtcgctaacggaacagtacttcgcgaagatgggcctcaaggttcgctatttcatgccggaaaacagcgtcgcgccatttgccttcttcttctccggcgatttactccgtgattacaccaatctggaactgatcggcaccatcagcaccatggagacgttccagaagatctatcgaccagaaatttacaatgccaattccgctgcgggacagtgctatcagcccgacctgaatcagcaggatcactcattaacaaaaatcgtctatgaccgtgaagagcgcagccggctggccattgaacagggtaaatataccgaagagcggttcatcaaaccctataaaacccttcttgagcagtggtctcatcacttcacgctttaa

SEQ ID NO: 525356 - DNA, 540 bp, Stenotrophomonas maltophilia
atgacaaaactcaccctacaagagcagatgctgaaagcgggcttagtcagcagtaaaaagatggcgaaggttcagcgcacggcgaaaaaatcccgcgtccaggctcgcgaggcgagagaggctgttgaagagattaagaaagcccagctggagcgtgataagcagctgagcgaacagcaaaaacaggcggtgctggcaaaagagttcagggcgcaggtgaagcagctgattgagatgaaccgcatcaccgtggcgaagggcaacattacctttaactttaccgatggcagcctgatcaaaaaaatcgacgtcgataagcagacgcaaacccagctgatcaacggtcgtctggcgattgcccgactggtgattaacgcgaatggcgactgtgattacgcgattatcccggcggtggtggcggataaaattgcccagcgcgatgcggacagcattgtgctaaacagcgcgctgagtcaggaagagcaggacgaagacgatccgtacgcagacttcaaaatccctgacgatttaatgtggtaa

SEQ ID NO: 525357 - DNA, 687 bp, Stenotrophomonas maltophilia
atgtctgtcataatcgatacgtttattgcaccaccctgtcacgacgacattgagatcctctggcaggacgagcatctgctgctgatcaacaaaccctcaggtctgctcagcctgtccgggaaaaatccgcaaaaccgcgattccgtccaccaccgtctggtgcaaacctttcccggctgcacgctggtgcatcgtcttgattttggcacttcgggtctgatggtgattgcacgtaacaaagcgattaacgccgcgctttgccaccagttcagccaacgcgccgtgaccaaggtttacaccgccctgttgtgcggacatgtggaacaggacgaagggaccgtggatgccccgattgccaaagatccggcgctgtttccgctgatgacgatctgcgcgcgcactggtaagcccgctcgctcccgctatcgggtgatggaacgtatttaccaggatacgacaatgccgttgacgcgggttgagcttaccccggagaccgggcgcacccaccagctgcgcattcactgccagcagttaggccaccctattttggggtgcgatctgtatgggggtctggaatggccgggggcggaagaaacgccccggctgatgctgcatgcaagcgttctgagttttattcatccgctgagcggcgagaccatgaatgcccgtcacgccgcgccattctga

SEQ ID NO: 525358 - DNA, 606 bp, Stenotrophomonas maltophilia
atgagcaaagtattagtgttgaaatccagtattctggcagggtattcacagtctggtcagctggctgactatttcgttgaacagtggcgtgaacagcacagcgcggatgaaatcaccgtgcgtgacctggcggcaaacccgattcctgtgctggacggcgagctggttggcgcgctgcgtccgagcgatgcgcctctcaccccacgtcagcaggaagccctggcgctctccgacgagctgattgctgagttgcaggcccacgacgttatcgtgatcaacgccccaatgtataactttaacattcctacgcagctgaagaactacttcgacctggtggcgcgcgctggcgtaaccttccgttacaccgagaacggcccggaaggtctggtgaaaggtaaacgcgctatcgtcctgaccagccgcggcggtattcacaaagatacccctaccgatctggtcgcgccgtacatgacgctgttcctgggcttcatcggcattaccgacgtgaacttcgtgttcgctgaaggtatcgcttacggcccggaagtagccaccaaagcgcagaccgacgcgaaagccgctatcgacagcctggtcgcagcctaa

SEQ ID NO: 525359 - DNA, 3654 bp, Stenotrophomonas maltophilia
atgacagaacaacagaaattatccttcccgatgctgatgcaacagcttgattcgctgatgctgcgcgataaacagcggtttgcgcgccgtctgcacggcgttaagaaggttaaaaatcctgatgcacaacaggccatctaccaggagatggccaaagagattgaacaggcggcagggaaagttgtgctgcgtgaagccgcacgcccggagattacctatccggaaaacctgcccgtcagccagaaaaaacaggacattcttgaggccgtgcgcgaccaccaggtggtgatcgtcgcgggggaaaccggttcaggtaaaaccactcagctgccgaagatctgcatggaattaggccgcggggtgaaagggttgatcggtcacacccagccgcgtcgtctggcggcgcgcactgtggcgaaccgtattgccgacgagctgcaaacggagccgggcggctgcatcggctacaaggtgcgattcagcgaccacgtcagcgataacaccatggttaagctgatgaccgacggtatcctgctggcggaaatccagcaggatcgtctgctgatgcagtacgacaccatcatcatcgatgaagcgcacgagcgcagcctgaacatcgacttcctgctcggctacctgaaagagctgctgccccggcgtccggatctgaaaatcatcatcacctccgcgaccatcgacccggagcgcttctcaaaacatttcaataatgcgccgatcattgaagtctcaggccgaacctacccggttgaagtgcgctatcgcccgattgtagaagaggcggacgataccgagcgcgaccagcttcaggccatcttcgatgccgtcgacgagctgggcaccgagagttctggcgacattctgatcttcatgagcggcgagcttgagatccgcgataccgccgatgcgctcagcaagcgcgatctgcgccataccgaggtcctgccgctgtacgcgcgcctgtccaacagcgagcagaaccgcgtgttccagccgcacagcgggcgccgcatcgtgctggcgaccaacgtggccgaaacctcgctgaccgtaccgggcattaaatacgtgatcgacccgggtacggcgcgcatcagccgctacagctacagaaccaaagttcagcgtctgccgatcgagccggtttcgcaggcgtcagctaatcagcgtaagggccgctgcggccgcgtgtcggaagggatctgtattcgtctctattcggaagacgatttcctgtcgcgcccggagtttaccgatccggagatcctgcgaaccaacctggcatccgttatcctgcaaatgaccgcgctggggctgggcgatatcgccgccttcccgtttgtggaagcgccggataagcgcaatattcaggacggggtgcggctgctggaagagctgggggccattactaccgacgagcaggcgacggcctacaagctaacgccgttgggccgccagcttagccagctgccggtcgacccgcggctggcgcgcatggtgctggaggcgcaaaaacacggctgcgtgcgcgaggcgatgatcatcacctcggcgctctccattcaggatccgcgcgagcgtccgatggacaaacagcaggcgtcggatgaaaaacaccgtcgcttccacgataaagagtccgatttcctcgcattcgtcaacctgtggaactacctcggcgagcagcaaaaagcgctctcttcgaatcagttccgccgtcagtgccgggtggatttcctcaactacctgcgcgtacgcgagtggcaggatatctacacccaactgcgccaggtggtgaaagagctgggcatcccggtgaacagtgaaccggcagagtaccgcgaaattcatatcgccctgctgaccggcctgctgtctcatatcgggatgaaggatgcggataaacaggaatttaccggcgcacgcaacgcgcgtttctccatcttcccgggctccggtttgttcaagaagccgccgaagtggaccatggtcgccgagctggtggaaaccagccgtctgtgggggcgtatcgccgcgcgtatcgatccagagtgggttgagccggtggcgcagcacctgctgaaacgctcatacagcgagccgcactgggagcgcgggcagggcgcggtgatggcgacggaaaaagtcaccgtttacggcctgccggtggttgcagcgcgtaaggttaattacagccagattgacccggcgctgagtcgcgagctgtttatccgccatgcgctggtggaaggcgactggcagacgcgccatgcgttcttccgcgaaaacctcaagctgcgcgccgaggtggaagagcttgagcacaagtcccgccgccgcgacattctggtggacgacgagacgctgtttgagttttacgaccagcgcatcagccacgatgtgatctcggcgcgccatttcgacagctggtggaagaaagccagcaaagagaccccggacctgctcaactttgaaaagagcatgctgatcaaagagggcgcggagtcggtcagcaagctcgactacccgaacttctggcatcagggcaacctcaagctgcgtctgacctatcagtttgagccgggcgcggatgccgatggcgtgacggtgcacattccgctgccgctgttaaaccaggtggatgagagcgggtttgagtggcaaattcccggcctgcgccgcgaactggtcattgcattaatcaaatccctgcctaaaccagtgcggcgtaactttgtaccggcgccgaactacgccgaagcgtttttaggccgcgtcacgccgctggaactgccgctgctggacgcactggagcgtgagttccgacgcatgaccgggaccaccattgaccgcgacgactggaactgggatcaggtgcccgatcacctgaaaatcacattccgcgtagtggacgataaaaacaaaaagctgctcgaaggccgttctctgacggagctgaaagaagcgctgaaaggtaaagtccaggagacgctctctgcggtggccgatgacggtattgagcagagcgggctgcacatctggagctttggtcagcttccggaaagctatgagcagaagcgcgggaactacaaggtgaaagcctggcccgcgctggtggatgagcgcgacagcgtggcgattaagctctttgacaatccgcaggagcaacagcagatgatgtggcgcgggctgcgtcgcctgctgctgcttaacatcccgtcgccgattaagtatctgcacgagaagctgccgaacaaagccaagctggggctctactttaacccgtacggtaaggtgctggatctgatcgacgactgtatctcctgcggtgtggacaaactgatccacgaggcgggcggtccggtctggacggaagagggctttgctcagcttcatgaaaaggtgcgcgcggagctgaacgataccgtggtagagattgcgaaacaggtcgagcagatcctcaccgccgtgttcaatatcaacaagcgcctgaaggggcgggtggatatgaccatggccctgggtctgtcggacgtgaaggcgcagatggcggggctggtgtatcgcggctttgtcaccggcaacggctttaagcgtctgggtgatacgctgcgttatgggagatccgctggatga

SEQ ID NO: 525360 - DNA, 660 bp, Stenotrophomonas maltophilia
atgcaacagcagtggtgttcagtagataattacatgatttcgtcgcttattcctgaagatgaagttctccagaacgtccttgaaaacaacaaacgcgccggtttacccgagcacgacgttgccgcaaatcaggggcaactgctggctctgtttgtccgcatgacgcaggcgcgtcgaatactggaaatcggtacgctgggcgcgtatagctcaatctggatggcgcgcgccctgccgccggatggaaagctgattacgcttgaagcggacccgaaacatgccgctgttgcacgccagaacattcaccttgcgggactcagcgatcgtatcgaactgattacaggcccggcgctaaagtcgctcgagaatttcggtgacgtcccgccctttgacctgatctttattgatgccgataagccaaacaatcccggctacctggagtgggcgctgcactactcccgtcccggcacggtcataatcggcgataacgtggtgcgcgacggcgaggtggttaacgggcaaagcgacgatgcacgcgtgcagggggtacggaagtttatcgagatgactggagataacccacgcttaaccgccaccgcgctgcaaacggtgggcgttaaggggtgggatgggtttacgctagcgatggtggaacgataa

SEQ ID NO: 525361 - DNA, 741 bp, Stenotrophomonas maltophilia
atgcaatcggattctgagctgcgcgccacccgcgctcaggttccactgcttcagcaccagattgcgcagcaggagaatgcgcttagcctgctgctgggcagcaacccgggtaacgttgcgcgcggtgaaagctttgatgccctgacgccgctgaaactgccctcccagttgccgtcgacgttactgaaccggcgtccggatatcgtccaggctgaacgtcagctgattgcggcggacgcgacgctggcggcatcgcgcgccagcctgctgccgtcgatcaacctcacggccacaggatcggtgcaggatcgcacgctgtcgggattgctggataaccccctccagctctggagcgtgggcggcagtattcttgcgccgctgctgaaccgacagacgctgaatgcacaggtggatatctcccagtctcagcgtaatcaggcgttgtacagctacgaaaaaaccgtacgtaatgcgtttgccgaggtgaatgacagccttgatgccatcacccgttatcaggaacagcttaccgagctgctggctcagcaggcggtcgcgcaggagacgctgcggatagcgcaaaaccgctaccgcaacgggtactcttcttatctggatgtgctcgatgcacagcgcacgctgttctcggtgcagaccagcgtggtacaggtgaaaaacaacctgctgctggcgcaaattgatttgtataaagcgctgggcggcggttgggtcagtgcgtga

SEQ ID NO: 525362 - DNA, 426 bp, Stenotrophomonas maltophilia
atggcagttgaagcagagaaggccgcagcagtgagcgaagctaccgcagaaccagccccgcaacacattccggcggcaagcctggacgattacaccgtgtacaccttgcatgaacctattgaagcggaagaaggcaagccatacgcagagaagcgcgtaactcgcgcctacgttgcccgcagcatgacccgcgccctggcgagccaggagaagcatgtagagaagtacaaagcgcaggatgttatctggctggcggaacacaacgcagaccacgcttttagaatgggcgttttaagcccggaagaattcacagagatctatcacatgatacgtgcagagaacgcgcagcccctgcttattctggcggccttgcgtgatgccctgctaaccggagcgccagcacttgccgccgcccgtgcggcataa

SEQ ID NO: 525363 - DNA, 207 bp, Stenotrophomonas maltophilia
atgaaacaacatatcgctgcaattatccgcgaatacaacacccctacagtaaccgtcgaagtagccaatacagaccgctacgatagtgagcaaatcgagatccgccaggttgttgatggtcgccttatctggcgggcgtgggactatgaggcaggttttgaaagcgccctgcatcgcgagatggcctattaccatatcccggcctga

SEQ ID NO: 525364 - DNA, 183 bp, Stenotrophomonas maltophilia
atgacaaaagccactacaccgtcccagctgaaaacagagctggagagccagaaaacctaccttctcgaagcctgcctgatggccttcaatcagttacctaaccagcgaacaaaaggcgcgtacccgtcaacatacgcactcgcagcaaagattgatcacctgttgcagcaggaaaaaaaataa

SEQ ID NO: 525365 - DNA, 357 bp, Stenotrophomonas maltophilia
atgaacatggataaaactgaacgcgagaggatgttagccaggcggcggcaagctcgccgccgcgaacggttacgcaatgaaggcgttagcgtgacggtcacgctaacgcatgatgaagccgcgcagctggaagaactacggcaggtgcgcaggataggtaaacagccctattcaccaaatgagtttttccagctgctgctgatccgcaactggcaacagtgggagaaagaaaaagccgcgctgggtacatgccagcactgcggaaaatcaaaagccggtggcggctgcggcggggagtttcaaaaggaaacataccgatgctggctggcgcaggacgcaaacgcacttaatctttag

SEQ ID NO: 525366 - DNA, 369 bp, Stenotrophomonas maltophilia
atggataagcagcccgataaattagacgtattgatggactggtttttgggagacgcgaaggaaattttagaagccatgaagttaatgaaggccgaacaagccgacatgcttcagcagctgggcgaactcaaaagcgcacttgaattgacggcagacgattcgagagcggaaatcatcggcagcctgagagacatacagacagcgatgaaggaggaaaacaaggcgcggtcagacttcctgacgcgctggcaatcactccagcacaacaacgccagcaccatcgttaaccgcgtcgtgatcatgacggctgtttgttccatcgtcggcgcggccattggtgcggcgctgaccttgctgatcctgaagtaa

SEQ ID NO: 525367 - DNA, 717 bp, Stenotrophomonas maltophilia
atgaaagtagcggttattaattacagtggcagcgttggcaaaactttagtttcaacttaccttctcgccccgcgcctgaaagatgcgaaatttttcgctgtcgaaacaattaaccaatcagcgtctgatttaggaattgaaaacgtcaccagttttaaaggggatgatttttcccgcctgattgaagatgttgttttcgaagatgcagcgattattgatattggcgcgtcaaacgtagaaccgtttttaatggcaatgtcccgcttcgatggcggcgcaaatgaatttgatatgtatttcatcccggtaacgccggaagataaagctattaaagaaagcatgaaaacggcacacacgttaagcaaggctggcgtggataacaaaaaaattatctttattccaaaccgtgttaatccgggcgacgatgttgaaaatgttttcggcccgattttcgattttgtgaagcaaactaaagtaggccgcattaataaaaattctgcgatctataatagtgaggtatacgaatatcttgcacatcacaaaatttcgtttgaaacgctgaccgctgaagatgcggaagaatttaaagcccgcgctaaagcatcagctgacgtagacgaacgccgcaaaatggcgcgtcgttatacttacatgaaacaggctatcccggtaaaaagtaacctggataaaacattctccctgttaatcggagattaa

SEQ ID NO: 525368 - DNA, 432 bp, Stenotrophomonas maltophilia
atgaagcccaaaagcatcagggcagcaattcagatgatgttgccggaagtagaagaaatgctgtcactgggagtctccagagaggaggttttcaaagcggtatctgaacgcttcagcctggagaatgtgaacgttcgaagttttgatactgccctgtatcgggccaggcaaaaccgggcgaaacatgccgcccctgattctgtattgcacaatacagaatcaaccggagccagtgagcaaaaaaagaaatctgtattgcacaatacagaaaagcccgcgcagtctgagcaggcaaaaaaagatgtattgcacaatacacaagacgcgaccgaaggagacaaaaagaaacagtcaccgggtatcatcggaaaggaattttttgacgaggcaaaagccgagttcgatcctaatgagttcatcaaaaaatattga

SEQ ID NO: 525369 - DNA, 423 bp, Stenotrophomonas maltophilia
atgccgatcatcacatgcaaggtaacggacgaagaaaaagagcttatcgacaggctggccggaacgaacagatcggactatatgcgccgttgtttgttggccggatcaggtggccggataggtggattgagtcaggttacggaacagataaatgaagtaaatcgacgcctcgatattctgtttgaccaggtatcagagacagatatgagcgcgttttcctcggagctaaaaggtctggtcaaacagctgtcacaactcaaattgccgcctcccggtcagatgatgctgcacgaatccctggcaatcgagacggtgatcctgctgcgttcgatggcgaccccggccaatatgaaagccgcctggggagagctggaacgtaacggatacaaagtatgggaaagtaaacaagagaggaaggaataa

SEQ ID NO: 525370 - DNA, 1533 bp, Stenotrophomonas maltophilia
atgacggaacaagagagaggacttatatttttatgctcgctgctggggccaataccctttgtatggtttattacggcgaagttcgtttatggtattaatagcgagacggctcactaccttgtcccctatttgctaaaaaacacgttcaacctgtggccgttatgggtgtcgattatttcaggctcggttatagggttgtgtggttttattggatttatcatttacgataagggcagggtatataaaggaccacgtttcaaacgtatcttgcgtggaaccaaattagccagagcatccacgctagccgaaaaaacaaaggagagaggtaaaaagcaattaatgattgcaggtgttccagtgcctactgaatatgaaacgcttcatttttcaatcggcggggccactggtacgggtaaatcaaccgttatcaaagaagccatatattcaagcctgaaaagaggcacagataaacgcatagttcttgacccgaacggagaatatgttgagacgttttatcgccccggcgacgtgattcttagtccctatgataaacgctctcccggttggtcaatgttcaacgaaatacgcgatgattttgattatgatctctatgctgtatctattattcaggaaagtaaggaacgttcagcagaggaatggtacaggtatgggcgtcttatttatcgtgaggtgtcaaagaaattactcacgctaaaacgtaacccaacaatggaagaagttatgcactggtgtaccattgttgagaatgacaaattaaaagagtttgtgaaaggtacacctgcggaagctctgtttattaaaggtgccgaaagggccaccgggagtgcccgttttgtcctgggtgacaaattagccccacacctgaagatgcccgctggcgatttctcgctgcgtgactggctggaagatgataaacccggcacgttgtttatcacctggcaagagcagatgaaaaagagcctcaatccgctgatttcatgctggctggatattatgttttcaagcctgttgggtatggggaaacgcgatcagcgcacgctgttttttatcgacgagctggaatcactggaatacctgccaaacctgcaagacttactgacgaaagggcgaaaaagtggcgcgtcggtatgggctggctaccagacgtactctcagctgattgagcgctacggcatcaacatagcggaaacactgctaggaagtatgcgctccggtatcgtcatgggtagcagtcgattaggtaaagaaacccttgagcaaatgtcccgcgcattgggcgagattgagggtgaagtggaacacaagcaaggcaatccattccaggcgggcattggtaacaggccacgcattgaaacgcgtactgtcagagccgttaccccaacggaaatatcagagctgaaaaaccttaccggatacgtctattttcctggtgatctgcctgtcggcaagttcaaaactaaatatgtgaaatacacgcgtaaaaacccggttccgggcatcatcatgaggtag

SEQ ID NO: 525371 - DNA, 3219 bp, Stenotrophomonas maltophilia
atgcttgatattacgactatcacccgtatcgatattgcgtcagttgtaggttactacgctgacgcaaaagacgattactacagcaaagacagtagctttactgcgtggcatggtcagggcgctgaagcgctgggcctttccggcgaggtcagttcccaacgcttcaaagagctgcttgtcggggatgttgaccctttcacacagatgaagcgctccagcggtgatgcaacgaaagaacggctgggatacgacctcacattttccgcgcctaaaggcgtatcgatgcaggcgctgatccacggcgataagacaataatcgccgcccacgaaaaagcggttgccgctgccgtccaggaagcggaaaagctggctcaggcccgcacgacccacgcagggaaaaccattacgcagaataccggtaatctggttgttgcttccttccggcatgaaacatcacgcgcccttgacccggagttgcatacccacgcctttgtcatgaatatgacgcagcgcggggatggtcaatggcgagcacttaaaaacgatgaactgatgcgggccaagatgcacctgggggatgtctataagcaggagctggcgctggagctgacaaaggccgggtatgagctgcgctataacaacaaaaacaacacctttgatatggcgcattttacggatgaacaaatccggggattctcacggcgttccgctcagatagaagaagggctggcggctatggggctgacccgcgaaaccgctgacgcacagaccaaaagccgggtatcgatggcgacccgcgacaaaaaaacagacgactattcgcgtgaagatattcataaagagtgggttaatcgggctaacgagctggggatagacttcaatgatctgtcctgggcgggcaaaggcaaggatggcccgcaaacgtcaatgaataccgtccctaacttcacaagcccggaggtaaaagccgaccgggcgatccagtttgcacttaaatctctttcagagcgcgatgcgtcttttgaccagtcgcgcttgctggccgtggcaaataaaaaggcaatcgggcaggcatcaaaacaggatgttgaagcggcctattatcgtgctgtggcgaaaggggccattattgaaggtgaagcgcgatacaccaccacaaccgaccaacgaagcaaagatgcgccgccactccctgcaatgacgaaagctgaatggcaggcgcagctgaccgacaaaaaagggatgaacgacagccaggcgaaggcattagttgctgaaggtatcaagtctggccgcctgaaaaaaaccagccatcgggtaacgaccgttgaaggtatccgggtagagaaagcggtgctgaatatcgaggctcgcggtcggggcaaggtgatcgccgcgctgacaagcgaacaagtcaccgcgcagctggtcggcaagacgctgaaggccgagcaacagaaaagcgtcgtagatatttgcaccacgacagatcgctttgtggcggctcatggcttcgccgggaccgggaaaagctatatgaccatgagcgcgaaggccgttctggagtcacagggctataacgtcaccgcactgactccctacggtacgcagaaaaaatccctggaagatgaagggatgcccgcccgtaccgttgccgctttcgtgaaggcaaaggacaaaaagatagacgagaaaagcgtggtctttatcgatgaagcgggcgttattccggccagacagatgaaggtgctaatggaaaccatcgagaaggccggggccagagcggtattcctgggcgatacctcgcagacgaaagccgtcgaggcgggcaagccatttgaacagctgatcagcgccggaatgcagaccagctatatgaaggatattcagcgccagaaaaatgacgtgttgcttgaggcggtgaagctggccgcagagggccacatatccggctcgctggcccgactcagcaatattagcgcagagaaggaccaggataagcggctggaggctgtagcgaatcgctggctgtcattctccccggagcagcgcgaaggtacgctgattatttccggtacaaacgaatcaagggtaatcctcaacagccagattcgggaggcgttgcagctgcaaggaaagggcgtggaggtgaattttctggagcgcgttgactccacgcaggccgaacgccgggacagtaaatactaccaggcagggcaaattattatccccgaaaaagactataaaaacgggcttcagcggggtgagtcttaccgggtactggatacaggtccggggaacctgctgacggtggccgggagtgacggccagaaaatcagcttcagcccgcgcacccataaaaatctgtccgtttataccagcgtggccgccgagctggccgtgggcgataaagtgatggtgacgcgtaacgataagacgctggacgtggcgaacggcgaccgtttcaccgtgaccgggaccaccgagaaaggcacgtttacgctgaccaacgcgaagggccgggaaatcgagctggaccagaaacaggccgcctatctttcgtatgcctatgcaacgaccgttcataaagcgcaggggcttacctgtgaccgcgtgttgtttaacatcgatacccgttcgctgacgacttccaaagacgttttttacgttgggatttcccgcgcccgccatgaagtcgagattttcaccgacgataaaagccgcttgttaagcagcgccagccgcaacagccctaagactacggccagcgaaatagaccgttttttggggatggaggaacgctataaagacgtaaaccggagctatggccatgacgatggccaacaagcaaaaagttatggccatgatgctggccaacaaaccggagagaaggaaaccaccatgaaaaacgcgacagaaaccgcgcatgatggccccgatatgtcgggcgctgaaaactcgtctcaggatctgcgccagcacgaacaagaggaagtaaacgcagctatccggtacgagcagaggcaagaagccacaccggaaatggaggcgaacccctaccacgactatgaacggtatgctgatgaaggcccggactatggcgacatgcaggactacagcacatatgaagaatatgaacatgcgcgtgatgtggaactaccacagcatgaacacgaaaatcatcaacatgaccacgacaaggaaggctacggactgtga

SEQ ID NO: 525372 - DNA, 663 bp, Stenotrophomonas maltophilia
atgttctggaaccgaaataagaaagaagaagccgctgccggcagtgaaaaaaatcgcttcgatcacctgctttcggtggccgaaaaattacccgttaaagcactgcctgatctcattcgcgcaatcgtgcggccagtgcagagtgatttcctgctggcagtcgcagaggaagggacagatgcccgcccggacatgaccccgcaggagtttttctttgaggggcttatccaggtgcaatcttacgagaagatgaaagagggcgagctggacggcgctgactatccgctgtcgctggcatgtgacatggtgttgccgtggccgtggaagttaacagactatatttctaacgtttctggcattggaacgcataagggcaggccgtggaagcaggataaaaccaaccattatgttgacctgtggttgccctggcgcattggctttgtgcgcggcggcaaccattccattacggcgggcattctggccggggaagggacgctgatcccggaacacgtttatgatatgtcctggctgtttgagctggtccgaacggacggtaatcactggtttgttgacggccagaaagccgaagcggtgaagtcggggcggtcagctgcggtgtttgagatagggcggctgttagtggaaggatctaaagatcgttga

SEQ ID NO: 525373 - DNA, 531 bp, Stenotrophomonas maltophilia
gtgagaaaaggagcagtcatattcctgacgggccttctggccctttcctccctgccctcgatggccgccgattcgccatcggtacaggtagggttttctcctgaaggtagcgctcaaacgctggtaattggcgctatcgactccgcgcaatcctctattcgaatgatggcctacagcttcactgcaatggatataatgcaggctcttgtcaaagctaaaaatcgcggtgtcgatgtgaaaatcgttatcgacgaacgcggcaatcgtaatgatgtaagccaccgggcgatgaagtacattgtgaaaaacgagataccgctgcgggtggatagcgactttgctatccagcacgacaaggtgatgattattgatgaacggtcagttcagacgggcagcttcaactacaccaaagcagcagaatcaaaaaactcggaaaacgcggtggtgatctggaacatgccccagctggcaaaaccttatcttgagcactggcaggaccgctggcagcgcgggaaggattaccagccataa

SEQ ID NO: 525374 - DNA, 1002 bp, Stenotrophomonas maltophilia
atgaaccaatcatcggcttattaccaactggggccgctgcgggaatatttcgaagatccgagcgtatttgaagtccgtatcaaccgctataacgaagtcgtttgtgacacgtttgaaggccgtaagattatccagaacgatagcattaccggcgcgtttatcgacaacctgaccagtgcattaaccagcgccaacaacgttacgcgccagatgattaatgacgtggtgttgccggacggctccaggggaattatctgtttaccgcctgcggtgatcgataacactgccgctatcgcctttcgtaaaaatatcgcgctggataaagacctggcgacgttaagcaaggaaggtatctttgagttttgccgggaaattgacagccataagcgcgagctggacgacgacgatctcctgttgaaagagttataccgggctaaacgccgggaagaatttttacttactgcggtacggaaaaagcgaaccgttgtcgttgtgggggaaaccgggtcagggaaaacggtactcacccgcgccctgctcaaagccattagcccacaggaacgcgtgataatcatggaggatgctcatgaagttgaagctacccaccttgaagaagccgtttatatgaaatatggcggtaaagataaaccagggctggctacgccgacgcagtgccttaaagcctgtatgcgcctgacaccagatcgtatcttcatgacagagttgagggatgatgctgcatgggattaccttcaggcgttgaataccggacaccctggcggcttaacctccacacatgctaactcggcgatggatgccttcacccgtatagggttgatggttaaagctactgaagtgggccgtatgctggatatttcggacattatgcgactgctgcactctacgattgatgtggtcgttttcatggcgaaaaggaagattcgcgaaatctactattcgccagaatataagtatgagtgcatgaatggagggataaagtga

SEQ ID NO: 525375 - DNA, 1131 bp, Stenotrophomonas maltophilia
atggcccgtaaagtcgatattgatagcgagctggatagcaacagcttcgacgatgaacgcgggggaatgcccgcacagaaacgccgtacagcaccagggctaagagcctttatcgctattctggcgatcatagctatgtgcttcgtaggcgtcacaatttacacgcacacacgcaaagcgccggacacggccaaagctgacagcagtaataaaaacgatggagttagcagtctgcctaactaccagttcaactctaacccgaacgttggcgggactgcggctcctgatgctaatcagaaggcgatgcaggataaagccaaagcggattatgaggccagccataacaatacgggccgggccagcaacgggaagaagcagctgacaccggaagaagtcgccatgcagcgtcgtcttgatggcgatctttccggcgaacagggaggtagtcagactccggccaaaaaagagcaacaaggcgatgaaggcagcgaaggcagcagcgcgttagcaaaagagcttacgcctgcccgcctgaaaggcagcagagcgggcgtgatgcagaatatgagcatgaccattgccaaagggacgatgataccgtgtggcacgtctacagagctggatacgaccgttccgggcatggtgtcctgtcgtgtaacgcgtgatgtgtattccctcgatgggttggtgaaactgatcgacaaaggcgcattcgttacggggcagatgaacggtggcctcaaaaatggtcaggcccgcgtctttgtgctgtgggaacgtgtggtaaacccggatggcacattcgttaatctggatagcgccgggaccaactctctcggtagttcaggtgttcccggacaggttaactcccatttttgggatcgcttcgaaggtgcggtgttcatttccgttatctctgacggtctgcaaatgggggttaatgctgcacaagccggaaacgatgtccagtttaacaacacgcaaaataactcgcaggagctggcctctgaagcactgagagccactattaatatcccaccaacactctacgaccagcagggcgacgcaatcagtatctatgtcgttcgtgacctcgatttcagtgatatttactcactggcagacaactaa

SEQ ID NO: 525376 - DNA, 888 bp, Stenotrophomonas maltophilia
atgaacaaagtagtcttatccgcagtgatcgcaatggcgctggccggggccacattcaacgcggcggcgcttgaagcgccgaaaagttcaccctatgactaccgtatcaaaacggtagtttataacccggttgatgtggtgcgaattgatgcagtagcgggcctgtttacgcatatcgtcgttgccccggatgaaagctatatcactcacgctttcggtgattctgctggctggattttctcacacaaacttaatcactatttcgtgaaacctaagaccgaaatgagtgatacaaacctgaccatcgttacggataagcggtcttataacatcgtgctgcactatatcggcgagacgacaacaaagaacgctgacggcacagagacaaaatcgtttattaaaacgccgtggtcaatgaaacaggccacgcttcagctgacctatgaatacccgtttgacgagcagaaaaaagcctccagcgtggccgagaaaaaacgcctgacggagaagctacgggagtctgctttcgctggccctaaaaactaccagtacgaaatgagcgacgagccggaaatggcagatattcagccgatccatgtttgggataactaccgtttcacgcgctttgagttcccggaaaacgccgacttaccgcaggtttattacatatcgtccagcggtaaagagacgctccctaactgtcgtccggttggcgaacatcacaacatactggaatgccagaacgtagcgaaggaatggcgtgtaaggcttggctggacaaaggttgttggtattaaaaatatcaactacgtgccgtcagctggcgcaattgccacaggcacagcctccccggatgtaagaagggtgcaaaaaggaggggataactaa

SEQ ID NO: 525377 - DNA, 696 bp, Stenotrophomonas maltophilia
atgagagagaaaaagaaagggctgaccaaagaggccatcaaagagttcaacgaaagccgtaaagggctggaagtggacgttatgcacgaggtgctatcttcacgccgcacggcgtggatagtcgcgacggttgctgttgttgtggctgttgcagcgatcattaacgcgtcgtatgtgaattaccgttatagccagccaataccgccgttcctgttgacgctgaaccccagcaatcacgaggtatcacaggtcaagctgacgcgtgacgatgccacctatggcgacgaaattgataagtatttccttactcaatacgttatccaccgtgaatcctacgatttttactccctgcaagtggactatgacgcagtaggtttaatgtccatgccgaacgtggctgaagcctacctttcccggttcaagggcaagcaagggattgataaggtcctgggtgacagcgagacgacacgagtaagtatcaactcaaccattctcgatagagagcatggtgtggcgactattcgctttacgaccgttcgccgctctcgtagcaataactttgacgatccaccgaagcgctggattgccatcctgggctacgagtacaaatcgctggctatgaatgcgtcgcagcgctacataaacccgcttggcttccgcgtcaccagttaccgcgttaaccctgagtcgaactga

SEQ ID NO: 525378 - DNA, 132 bp, Stenotrophomonas maltophilia
atgcgcgcaatcgtacttttaggggtgttgttgttaggggcatgttccagcagttacaagccgccgccggagccggactggagccataccgtgccagtcaataaaacgcttccagtagatacacagggataa

SEQ ID NO: 525379 - DNA, 1038 bp, Stenotrophomonas maltophilia
atggcatttgatactgtccaacagatatttgacataattgatgatctgataaatatgatggttgataccaacgtaacaaccattattgcaaccgtcacaccaacggttgcaatatttttgaccatcaagtttatggctcaaggtgcatattccgctcttagccccggagggggcggggaggctcttggggatttaattacgcaatatatgaaagctgctgttgttttgagttttgcaacggctggcgggttatatcaaaccgaccttgtacatttggctttatccctgcctgataactttgcatcaatattggttactcaaaacaaaacctcaagtacagggatggcagccattattgatactggtgtagatcagtctataacggcaatacaaaccgcgtttgaaggggctggcattagcgctaacggcataatgagtgctgtaatcggactcattctaatagctgcgactgttgttctgtgcgggttgggttctgcctttgtcattatggctaaagtgctactggctataagtctgtgtttagggccaatagctattttctgtctcctgtggaatccaacaaaaggcatatttgctaagtggatggggaccgttattaattacagtctagtcatagttcttttggctctcgtatttgggttgttaatgagcctctttacaaaaatgatttccggccttaacggcagcgaaggctttgatgccttatcaacggctattgggctggtcattctcaccattgtttccgtctatgtgttgttccaggttcctgcggtagcgtcgaatttcggtagcggtgtttctgctgatattgcatctgcggcccgccatgcgggccactcgatgaatacgatgggtaatgttgcctctaatgggatttttggtggagcgaagccttcagcaagaccttcagcagctggcggcggcggtggacaaagtggcagcagtagtggcagtgcaggggctggcggttcggggcttacaggaaaggcgcgtggtagccggggaaaagctgcataa

SEQ ID NO: 525380 - DNA, 711 bp, Stenotrophomonas maltophilia
atgaaagctaagttaatagctattgcactggctgggttgttaggcgcgggaaccatcggaaccgctgccgctgtcggtactggtgttgtggtctacgatccgaccagcctggctaaaacgcttgaggaaatggcgaaccagctggaccagttgaagcagcaactggctacccaaaaagcgacgtatgagagcctggcaaagacaaccaatattggggatttgctggatacttcaacaagcagcctggctaataaccttcctgacgattggaagaaagtttatagcgatgccatgaactcatcatcttcagttactggcgatgttcaaagtatggttggtgattttaattcagaagttgatgatatgaatccttccgatgcaattaaatcgctaaataaaaaattggccgaaaaaggggcgtatgaccgtgttatagctgaaaaggcatataacaaccagatgcaggaattaagtgatatgcaagcgctaaccgagcagatttccacaactaaagatgtaaaggaagttgctgaccttcaggctcgcattcaaaccgcgcaaggtgcaattcagggcgagcaagcgaaactgaagctcatgagtatgctccaggagtcgcaagataagttgtatgaagctcaaagagaacgcgctgtaggtaattttatatatggtactgatggcggtcataaccccgcctcgttgaaataa

SEQ ID NO: 525381 - DNA, 2574 bp, Stenotrophomonas maltophilia
atggtggcattgcttaaacctaaaacgttcagagacgagccgagcgttaatgaaaaatatttgcagcatagccagcaccttgatgattatattatctcgatgcgtaatggcgatctgcttgcattctttaaagtcgatggccggacacatgattgtgcctctgaccgcgagctggttgcatggaacgatgatcttaatacgttgattaagtccttcgggaccgaccacgtagaggcctggtcgcacgagtatcatcaccagtctaaagagtatccagactctgagtttacccaattcttcccgcgctacctggatgaatacaaccgccgtctgcaaacggggtctaaccagatggttaatgacctgtacctgacggtgctctatcgccagataggtgataagacgcagaaattcctggctaagtttgagcgtccatctgctgacgaactggctcaaatgcaggctgaagccttcaccggaatggaagaagtctgtgagcagatcatggaggggatgaagggctatggcatcaagcgcctgggtatttattacagggataaaaacggcgaggaaataacgttaactgacgctgaagaaaagcagtcgctgcttgaagtggatgaagctgatattttcgacgagccggtaatgctcaatgtcgccgattccatcccgccgacagctcacgcctattctaaagcgctggagtttctttatttcctggtaaatctggaatggtccattgttcctgtttgccgtgaccgcatcggtacttacatcatggaaaaccgtgttgttagctctgtatggggggatattgttcaggtcagaacgctggacaacaatttttatactacagctatcgaaatccgtgattacgaaaaaaacacagaaccgggtcagttcaatttactgaaagaagctgactttgaatacctgctgactcaaacgttttcttgcatatccgaggcttcagctaaaacgctgctggagcgccaggagaagtccatgatggaaactggcgacagaagccagtcccagcttgaacaactgaatacagcgcttgatctgctgctttctaaagaaattgtgatgggctatcaccatgccactattcacgttttcgataccgatcagcgagcagtgcagcgcaaggcccgcaaagctaaagtcatgttaagccagtgtggcttcgtgggcggcggcgtagggctggcctctgaagcggcctactttgcgaagattccaggtaatcagaaatgggcgccgcgcccgactccgatcaactcatggaatttcttccatttctccccgtaccataatttcatgcgcggtaaaccggacaataatccttggggtccggcagtgacgatgttccgtacagcgaacggcacaccgctgtattttaacttccacgtcaccccactggaggaacgctcaatcggaaagcgcccgctggggcatatgttacttacaggtacgtctggtgaggggaaaactacgctgctggatttcctgttatgccagtgcatgaagtttagcccgcgtatgttctgctatgaccgtgaccggggaatggagccgtttattcgcagtgtcggcggttattataaagttttacaacagggcgtaaaaactaacttctcaccgctcaaacagaaaggcactccgcgtaatattgcgaccactaaaaatatcatgcgtgtctgtgctgaaattacaaataacggcccgttagataaagatatgggaatggaactcaataaagccgtagacgctgtaatgggcgagcattctttagttcctgttgaggccagagatataacccgactgaaagggtacatcacaaatctatacctcaaagacctgattaacgactggaccaatgacggtcagtatggctggcttttcgataatggtgaagatgcgttagatctcgatgcccatgatgttttcggcttcgacctgacagaattcattgctgcggaaggtgagattccaagccctgccagaacgccgttattaatgtacctgctttaccgtatccgtaattcaatagacgggaagcgccgtgtcattcagtgctttgatgaatttcatgcttatctagatgatcctgttttaaagctggaaataaagcgcggtattaaaacagaccgtaagaaagatgcgatttatttgttttccacgcaagagccaaatgacgcactcgcaagcagcataggtaaaacggtcatgtcgcaaacgccatcgaaaatctgcctgcgtgatcctgatgccagccgtaaggactactccttcctgactgatgcggagtttgaggtactgtccaaaatccctgagcactcgcgccagtttttggttaagcaagggtcacagtcagctctcgccacattcaacctgaatatcaacggtagcaatacacctgaacgggatgaaatcgagaagaacaacattatcagtattctttccggggagccgcagaatgctgaactggccgaagaattgatagataaatacggtccagagccggaaaactggattgaggaatactggcgtctttgccgtcactaa

SEQ ID NO: 525382 - DNA, 297 bp, Stenotrophomonas maltophilia; identical to SEQ ID NO: 18401

SEQ ID NO: 525383 - DNA, 279 bp, Stenotrophomonas maltophilia; identical to SEQ ID NO: 18400

SEQ ID NO: 525384 - DNA, 648 bp, Stenotrophomonas maltophilia
atggcctatatcgtcggccatgaatcagggaacaacccgtactttattaacgttaaccgtggcgcaaacctgaagcgccaaccgcaaaccgaagctgaagcggtggaagtcgccaaccggctaatcaaaaacctcaagaaagatgaaagcatcgatatggggcttgcgatgattaattctaacaatttgagttcgttaggtatcacggttgagcaggtatttaaaccctgcgtcaatctccgcgccagtcagaccattttaaaagactgttatagtacggccctgaaatccaacccgcccggccaggtagctttaagacacgcgctgtcctgctacaacactggttcacaagtgcgggggatttcaaacgggtatgtcacgaaggttattaacgtggctaaacagtctgatttaaagatccctacgttgctacctgatgggcagaacgaggaagcggagagccagccagtgaatgcaaagggcgcaacctttgagggtgagcatgatgcgtttactggtgaaagtgatagtggtggtgatgtgttttcgcaggataacactgacgcgtttctgaccaaagcagagcaaaaagggagtgaggttatgaatgacgaaaatctatctcctgttgcagtctcaaataattga

SEQ ID NO: 525385 - DNA, 306 bp, Stenotrophomonas maltophilia
atgcttgttcctttgcagtcggagaagcgaccaaaagggacgcctgtataccgtgacccagaaaatccatttaacacctggagcgggtacggaaagcggcctgtctggttacaggaacgattgagtgatgggtatcttctggaagaaatgaagctgcctggtgcagtggtggatcgggataccaaatccccccgataccgtgaccctgctaacccggataacacctggactggcgttggccgccgccctaaatggttagttgaactgctggaaaatggtgtggatttggacgatctgaagatttga

SEQ ID NO: 525386 - DNA, 351 bp, Stenotrophomonas maltophilia
atgggcaatgtgattgagtttaagaggccgaaaggcgaaagaaaccaaaaagacaaaatgcctgaaagggggatactgctgtggttcaaaaagactgccctgtccctcaaaaacaacctctttacctactctaagtcatgttgttgtatttgtttgttttttgtaagcactgtgtcaagaaaactattgaaattaatagtcacactatcaatagtgctgtttcttgtcgagtggtttatggaccgtttaggaacgcgtgaattttataacttgttgttcctaatgggattactgttggtaatcaatgtgatttcaacaagctgtatcaaatggataagagggaacgtatga

SEQ ID NO: 525387 - DNA, 339 bp, Stenotrophomonas maltophilia
atgagtaagctaagaatcgttgcaaaatttttattgatgtactgcatcttcagcagtgccagcgccattgcggaggaaaataaacaaggcgacccggaccttgcattcatttgcatggccgggaagttacaaggtaacgctgccacatccggtttagattgcgttaaaggccgtcagagcttcttcgaaatacggatttacacgccctactacaatcccggcgcaacagctgcggcgcgaaaagtatttttaatgactagccctatgactagcatcgccgaaaacaaaaccacgctggagctgattattcagcgatacggacgttcatttcaggagtaa

SEQ ID NO: 525388 - DNA, 309 bp, Stenotrophomonas maltophilia
atgaagaaactaatcccagccattattgccgccgccctgctctccgggtgtgccactcagaatgacgcggtagcactctcaaaccgaatcagcgatcagcagaaacagattaacgcgctttctgttcgtctccagtctgccgagtatcgcttgagtcagcaggaatcagccttccgcgcagaacaaacacagaatggcagctactgctatctgaacggtgtcaaatattcacagggtacgatgtacgctggccgcatctgcgatgcgagttccggcagcgccgcatggcgtatctactcccatcgctga

SEQ ID NO: 525389 - DNA, 186 bp, Stenotrophomonas maltophilia
atggccgaaccctatttaaaaaatcgccgacgcttcacctcgtctcttgataatcagcttgtcccactgtttgacgctttagcggccaaaacgcggatacctaaaagccgcttgctcgatgaagctatagaggatttgctggtcaagcatggcgttcccgataaaaaggccgatagccagaattaa

SEQ ID NO: 525390 - DNA, 609 bp, Stenotrophomonas maltophilia
atgtacatatttggatacctccgggcttctgcgcacgatcaggatgcgtcacgcgcccagcagcgacttaaagcctttgcacttgagcataatcaccgggttgccggatggtacgtggagaacgcttctggcgcgtccctgcaacgtcctgagcttatgcgcctgctaaatgatgctgagaagggcgatcttatcctgattgagcaggtagaccgcctttcacgcctggatgatgaaggctggcagcagctgaagcgaatgatgcaggaaaagagcctggcgattatcagtctggacctgccaaccagctacgcggcgttaatgccccacggtagcgatgaatttacacggagtatgctgacggccatcaacagcatgatgcttgatatgctcgcggccatcgcccgaaaagactatacagatcgccgccgtcgccaggaggaaggcgtaaagaaagccaaagagaagggggtttatcgtggccggatacccgaccagaataagcacgacctgatccgttctttgcggcaccaggggaaatctatcagtgagacagccagacttgcaggcgtatcggaacggacggttacgcgggtgagcaaaaattaa

SEQ ID NO: 525391 - DNA, 495 bp, Stenotrophomonas maltophilia
atgaacgatagtgtggccgtagtaagagttaataatattgaagtcggctctatgccggtaacacaatatgaagaaatagtaaggagtgtaaaaaaggactggcgtacacgtatcgcatctgtattcagctatatacgctttattagtagaatggctatccgcttatggtcttatttcgttaagagcttcgcggtgatttttgcgttatttatgctctattcgatttttcatttggacgaaataacgcagttcattagtgaaatgcgaaaccttccatcagaaagcattgccgtaggcattcgctcgattgcgaatatatgtttcacactgacgatttttgcctttgcagccagcctttttattaatggcacacctgtatttgtgagtgccactgaaaacgctatcaataaaaaaattcgtgaggtaatggaagttccagcagaagggcaagtcagcataaccttcacaaaggatggtgcttattgtgtcagataa

SEQ ID NO: 525392 - DNA, 882 bp, Stenotrophomonas maltophilia
atggcagaggacagcaaacagctaaccaaacggcagcagaaagccattgatacagcggcgctaatccggcaggaaccgccgcagggtgatgatatggcgttcactcactccattctgtgccaggtcggtttgcctcgatctaaagtggctgggcgtgagtttatgcgccgttctggtgatgcctggcttgttgtccaggccggatggctggatgaaggtaatggcccggtagagcagccgctaccttatggggctatgccgcgactcacgttcgcctggatttcatcgtatgcactgcgtaacaaaacgcgggaaatctccatcggccacagcgctaacgagtttcttcacctcatggggatggactcacagggaacccgtcataaaacgctgcgtacacaaatgcaggcgctggccgcgtgtcgtttgcagctgggttttaagggccggacctataacggccagcccgtcgaacagttcgatgcctggatcaaagatggagacgcgaagcagctcacgctatggccgggaacactcacactgtccgaaggatattataacggcctgatagacagcgccgttccgctcgacaatagggcgttacatgtgctgaaaggctctgcgttggcgcttgatatatacgcgtggcttgctcaccgccttcaccgtatcgggaaccgcccggtcatgctgtactggatgaagctacgggaacaattcgcacaagagtacggcgggaagaatgccgacaaagattttaaacgggcattcatgccagcactaaagctggtgctttcagtgtatccggcggcaaaggtcgaacaggttaaaggtggcctactgctgtattgttccccgcctcctataccgtataaatcctga

SEQ ID NO: 525393 - DNA, 1590 bp, Stenotrophomonas maltophilia
atgcaacaacgtcgtccagtccgccgcgctctgctcagtgtttctgataaagccggtatcgtcgaattcgctcaggcactttccgcacgcggtgtggagctgctttctacaggcggtaccgctcgcctgttagcagagaaaggtctgccggtaaccgaagtgtccgactacaccggtttcccggaaatgatggatggacgcgtcaaaaccctgcacccgaaagtgcacggcggcattctgggtcgtcgcggtcaggacgacggcattatggagcagcacaatattgcccccatcgacatggttgtcgttaacctctatcccttcgcccagaccgtcgcccgcgaaggctgttctctggaagatgccgtagagaacattgatatcggcggcccgaccatggtgcgctccgcagccaagaaccataaagatgtggccatcgtagtgaagagcagcgactacagcgccattattaatgagatggacgccaacgaagggtccctgacgcttgatacgcgtttcgacctcgccatcaaagccttcgaacacaccgccgcgtacgacagcatgatcgccaactacttcggtagcctggttcctgcctaccacggtgaaagcaaagatccatctggtcgcttcccgcgcaccctgaacctgaacttcattaagaagcaggatatgcgctacggcgagaacagccaccagcaggcagccttctatatagaagaagaggtgaaagaagcctctgttgcgactgctcagcaggtacagggcaaagccctctcttataacaacattgccgataccgacgccgcgctggaatgcgtgaaagagttcagcgagccggcctgcgttatcgtcaaacacgccaacccatgcggcgtcgcagtaagcacctccattatggatgcctacgatcgcgcctacaaaaccgacccgacctccgcgttcggcggcattatcgccttcaaccgcgagctggatgcggaaaccgcgcaggccatcatctcccgtcagtttgtcgaagtgatcatcgcgccatccgcatccgaagaagcgctgaaaatcaccgcggcgaaacagaacgtgcgcgtgctggtttgcggccagtgggcagagcgcgtgccgggcctggacttcaagcgcgtgaacggcggtctgctggttcaggatcgcgatttgggtatggtgacagaagccgacctgcgcgtggtcaccaaacgtcagccgaccgaacaggagctgcgcgacgcgctgttctgctggaaagtggcgaagttcgtgaagtctaacgccattgtttacgccaaagagaacatgaccatcgggataggcgcaggccagatgagccgcgtttactctgcgaaaatcgcgggtattaaagcaggtgacgaaggtctggaagtcaaaggttccgccatggcctctgacgccttcttcccgttccgcgacggtatcgatgcggccgctgctgtgggcatcacctgtgtgatccagcctggcggttcaatccgtgatgacgaagtgattgccgctgccgacgaacacggcatcgcaatgatctttaccgacatgcgccacttccgccattaa

SEQ ID NO: 525394 - DNA, 1293 bp, Stenotrophomonas maltophilia
atgaaagtattagtgattggtaatggcgggcgcgagcacgctttggcgtggaaagcagcgcagtctccgcaggttgaaaccgtctttgtggcaccgggtaacgccggtaccgcactggagcccgcgctacagaacgtcgccatcggcgtaaccgatatcccggcgctgctgagctttgcccggaacgagaatatcgatctgacgattgtgggcccggaagcgccgctggtgatcggcgttgtagatgccttccgcgccgcgggcctgaaaattttcggcccaacggaaggtgccgcacagctggaaggttcaaaagccttcaccaaagatttcctcgcgcgtcataacatcccgacggcggaatatcagaacttcaccgaggttgagcctgctctggcttacctgcgtgaaaaaggcgcgccgattgtgattaaagccgacggtctggctgccgggaaaggcgttatcgtggcgatgacccttgaagaagcggaagccgctgtgcaggatatgctggcgggtaacgcctttggcgatgcgggccaccgcatcgtgattgaagagttcctcgacggcgaagaagcgagctttatcgtgatggttgacggcgagcacgtcctgccgatggccaccagccaggatcacaagcgcgtaggcaatgccgacacgggtccaaacaccggcgggatgggtgcttactcccctgctccggtggtcactgacgaagtacaccagcgcaccatggaccgcatcatctggccaaccgtaaaagggatggcggcggaaggcaatacctacaccggtttcctctacgcaggcctgatgatcgacaagcagggtaacccgaaggtgattgaattcaactgccgcttcggcgatccggaaactcagccgatcatgctgcgcatgaagtccgatctggttgatctgtgtctggcggcgtgcgaaggcaagctgaatgagaaaacttccgagtgggacgagcgtgcctctttaggtgtggtgattgctgcgggtggctatccgggtagctacaacaccggggatgagatccacggcctgccgctggaagagattgacggtgcgaaggtgttccacgccggtacaaagctctctgacgatgaccgcgtgctcactaatggtggacgcgtgctgtgtgcgaccgcgctgggtcataccgtggcagaggcgcagaagcgcgcctatgcgttgatggcggatattcactggaacggcagcttcagccgccaggatatcggctatcgtgccattgcgcgggagcagggggagtaa

SEQ ID NO: 525395 - DNA, 693 bp, Stenotrophomonas maltophilia
gtgaacagttttaacgaaggggcggcaacgccccttttgtcattctggcgtggaccgctcgcgctggcaggcgtactgttgctgtctgcctgtagtcatgattcctcactccccccgtttaccgccagcggctacgctgacaaccaaggtgcggtcaggatctggcgcaaagattccagcgatgaagtgcatatgcttaccgcgttcagtccgtggcataacggcaatacctcgaccgcagaataccgctggcagggcgatgcgctgtcgctcattgaactgaatatctacagtaagactcccgaacacgtgaaggtgcgttttgacgaccacggcgagctgagctttatgcagcatgaggtcagtggactgaaacagcagctttccagcgatcaggtcgcgctctaccgctaccgtgctgaacaacttcgccagaccagcgatgcgctgcgtcagggccgcgtggtgctgcgccaggggcgctggcatgccgacggcacggtgaccacctgcgaagggcagacagtgaaacctgagcttgaatcctgggcaaccgaacacattcagcgtcgtcagcggcattcatctgtggaggtgagtgtggcatggctggaagcgccggaaggctctcagctgttgctggtggcgaacgaagatttctgcacctggcagccgacagaaaagagtttttga

SEQ ID NO: 525396 - DNA, 273 bp, Stenotrophomonas maltophilia; identical to SEQ ID NO: 118363

SEQ ID NO: 525397 - DNA, 591 bp, Stenotrophomonas maltophilia
atgttacaaaacccgattcatctgcgccttgagaagctggaaagctggcagcacgtgacgtttatggcttgcctgtgcgagcgcatgtaccccaactatgccgcgttctgtaagcaaacggagtttggcgaaggccagatttatcgacgtatcctggatttgatctgggagacgctgacggtcaaagacgcaaaggtaaacttcgactctcagcttgaaaagctggaagaggcaattccggcggcggacgattacgacctgtatggcgtctacccggctatcgatgcctgtgtggcgttgagcgagctgatccactcccgtctgagcggtgaaaccctggagcacgccattgaagtcagtaaggcatccatcaccaccgtcgcgatgctggaaatgacccaggaaggccgtgaaatgaccgacgaagagctgcgtgctaacccggcggttgaacaggaatgggatattcagtgggaaattttccgtctgctggcggagtgtgaagaacgtgatattgagctgatcaaagggcttcgcgcggacctgcgcgaggccggcgagagcaatattggtataatttttaaccaatga

SEQ ID NO: 525398 - DNA, 672 bp, Stenotrophomonas maltophilia
atggatctcgcgtcgctacgcgctcagcaaatcgaactggcttcatcggtgatccgcgaggatcgtctggatacggaccctccgcggtacattggcggggcggacgtcgggtttgagcagggcggtgaagtgacgcgagcggcgatggtggtgctgaaatacccgtcgctggagctggtggagtacaaggtggcgcgtatcgccaccaccatgccctatatccccggctttctctccttccgcgaatatcccgcgctgctggccgcgtgggagcaactctcgcaaaaacccgatctgctgtttgttgatgggcacggtatctcccatccgcgtcgcttaggcgtcgccagccactttggtctgctggtagacgtgccgaccatcggcgtggcgaaaaaacgcctgtgcggtgcgtttgagccgctctctgccgaaccgggtgcgctggcgccgcttatccataaaggcgagcagctggcgtgggtctggcgcagtaaagcgcgctgtaatccgctgtttattgccaccgggcatcgggtgagcatggacagcgcgctggcgtgggtgcagcgctgtatgaagggctaccgcttacctgagcctacccgctgggctgacgccgttgcctcttcacgtccggcattcattcgttggcaggaaattcagccgtga

SEQ ID NO: 525399 - DNA, 1065 bp, Stenotrophomonas maltophilia
atgaccgaactgaagaacgatcgttatctgcgtgcgctgctgcgccagcccgttgatgtcaccccggtgtggatgatgcgccaggcgggacgctatctgccagagtacaaagccacgcgtgcgcaggcgggcgattttatgtcgctgtgcaaaaacgccgaactggcctgtgaggtgacgctccagccgctgcgccgcttccccctcgatgccgccattcttttttcggacattcttaccattccggacgcgatgggccttgggctctatttcgaaaccggcgaggggccgcgttttacctcaccgatcaaaagcaaagccgacgttgataagctgccgatccccgatccggaaggcgagctgggctatgtgatgaacgccgtgcgcaccatccgccgcgagctcaaaggcgacgtgccgctgattggcttctccggtagtccgtggacgctggcaacctacatggtggaaggtggcagcagcaaagcctttaccgtcatcaaaaagatgatgtacgcagagccgcaggccctgcatgccctgctcgacaagctggcgaagagcgtcacgctctatctcaacgcgcagattaaagcgggcgcgcagtcggtgatgattttcgacacctggggcggcgtgctgaccgggcgtgattatcagcagttctccctgtactacatgcacaaaattgtcgatggtctgctgcgtgaaaacgaaggccgtcgcgtgccggtaacgctgtttacgaaaggcggcggtcagtggctggaagcgatggcggccaccggctgtgatgcgctgggcctcgactggaccactgatattgccgatgcgcgtcgtcgtgtgggggataaagtggcgctccagggcaacatggacccgtccatgctctatgcgcagcctgcccgtatcgaagaagaagtgtcgactatactgtctggtttcggccagggtgaaggccacgtcttcaacctcggtcacggtattcatcaggatgtaccgccagaacacgctggcgtatttgtggaggcggtgcatcggctttctgcccagtatcacaagtaa

SEQ ID NO: 525400 - DNA, 774 bp, Stenotrophomonas maltophilia
atggatcgtattattgaaaaatcagatctgggttggtggatcgtcagccacgaacaaaaattatggctgccctcaggagagttgccctacggtgccgcggaaacgttcgatctggtgggccagtccgcgctgaagatcggcgagtggcagggcgatcccgtgtggttgatccaacaggcgcgccgtcaggatatgggatccgtacgtcaggtgctggatctggacgtcggcctgttccagctggcggggcgcggcgtacagctggcggagttttaccgctcgcacaaatactgcggttactgcggccacaccatgcacccgagcaaaaccgaatgggcgctgctctgcggccactgccgtgaacgttactacccgcaaatcgcaccgtgcatcattgtcgccatccgccgtgatgattccatcctgctggcgcagcatacccgccatcgcaacggcattcacaccgtcctcgccgggttcgtggaagtcggcgaaacgctggaacaggcggtggcgcgcgaggtgatggaggagagcggcattaaggtgaaaaacctgcgctatgtgacgtcgcagccgtggccgttcccgatgtccctgatgaccgcgtttatggcggaatacgacagcggcgagattgttatcgatcagaaagagctgctggaggcgaactggtatcgctacgacgatttaccgctgctgcccccgccgggaacggtggcgcgtcgcctgatagaagataccgtggcaatgtgtcgggccgagtatgagtag

SEQ ID NO: 525401 - DNA, 498 bp, Stenotrophomonas maltophilia
atgttaaaccagctggaaagcctgactgagcgcgttggaggaagtaacaccctggtggatcgctggctacatgtgcgcaagcatctccttgtggcgtattacaatctggttggtcttaagcctggcaaagaatcctttatgcgactcaatgaaaaagcgctggacgacttttgtcagagcctggtcgactacctctccgacggccatttcaacctttatgaacgcattatccgcgaaatggaagggacaacgccgtatttagcggccagtaaactctttccgttgcttgaagccaacacccagcagatcatggactactacgattccacgcttgagaacgctatcgatcacgataaatatcttgagtttcagcaggcgctttccgaccttggcgaagcactggaagagcgattcacgctggaagacaagctcatcgccctcgtgctggacaacaacctgactatcagcaccagcgataacgttgcgcgccctgcttga

SEQ ID NO: 525402 - DNA, 1896 bp, Stenotrophomonas maltophilia
atgtctacaacaaaactgacccgccgcgaacagcgcgaacacgcacaacgcttcatcgacaccctggaaggcaccgctttcccgaactcaacgcgcatctacatcaccggttcacaggccgatatccgcgtgccgatgcgcgaaatccagctcagcccgacgcttatcggcggcagcaaagagcacccgcaatttgaagacaacgaagccgtgccggtgtatgacacctccggcccgtacggcgatcctgatgttgctatcaacgtgcagcagggtctggcaaagcttcgccagccgtggattgacgcccgtaacgactgcgaagaactgagcgtgcgcagctcggcgtacaccaacgcgcgcctggccgacgacggtctggacgagctgcgctttactggcctgctgacgccgaaacgcgctaaagcgggcaaatgcgtaacccaactgcactacgcgcgacagggtatcgtcacgccggagatggagttcatcgccatccgcgaaaacatgggccgcgagcgcattcgcagcgaagtgctgcgccaccagcatccgggtgaagggtttggcgctcgcctgccggagaacatcacgccggaattcgtgcgtgatgaagtagccgccgggcgcgcgattattcccgccaacatcaaccacccggaatccgagccgatgattatcggccgcaactttctggtgaaggtcaacgccaacatcggcaactctgccgtcacctcttccatcgaagaagaggtggaaaagctggtctggtcgacgcgctggggcgcggacacggtgatggacctctccaccggccgttacattcacgaaacccgcgaatggatcctgcgtaacagcccggttccgattggcaccgtcccgatttatcaggcgctggagaaagtaaacggtatcgccgaaaacctcacctgggaagcgttccgcgacacgctgctggagcaggcggaacagggcgtggactacttcaccattcacgcgggcgtactgctgcgctacgtgccgatgaccgcgaagcgtctgaccggtatcgtctctcgcggcggttcgattatggcgaaatggtgcctttcccatcatcaggaaaacttcctctacgagcacttccgcgaaatctgcgagatctgcgccgcttatgacgtttctctgtctctgggcgacggcctgcgtcctggctccatccgtgacgcgaacgacgaggcgcagtttgccgagctgcacacgctgggcgagctgaccaaaatcgcctgggagtacgatgtgcaggtgatgattgaaggcccgggccatgtgccgatgcagatgatccgccgcaacatgaccgaggagctggagcactgccacgaagcaccgttctacaccctggggccgttgaccaccgatattgcgccgggctatgaccacttcacttccgggatcggcgcggcgatgatcggctggttcggctgcgccatgctctgctacgtgacgccgaaagagcacctcgggctgccaaacaaagaggacgtgaagcaggggctgatcacctacaaaattgccgcccacgcggcggatctggcgaaaggccatccgggcgcgcaaattcgcgacaacgccatgtccaaagcgcgctttgaattccgctgggaagaccagttcaacctggcgctggatccgttcaccgcccgcgcctaccacgacgaaaccctgccgcaggaatcgggcaaagtcgcgcacttctgctccatgtgtgggccgaagttctgctcgatgaaaatcagccaggaggtgcgcgactacgccgccgcgcagaccattgaagtcggcatggcagacatgtccgaaaccttccgcgccaaaggcggcgaaatctacctcaaaaaggaggaggcgtaa

SEQ ID NO: 525403 - DNA, 642 bp, Stenotrophomonas maltophilia
atgtaccagcccgatttcccacctgtccccttccgcttagggctttacccggtggtggacagcgtggcgtggatagagcgcttgctggaggcaggcgttcgcaccctccagctgcgcatcaaggataaacgcgacgaagaggtggaggccgacgtggccgccgctatcgcgctgggacgtcgctaccacgcccgcctgtttatcaacgactactggcggctggcggttaaacaccaggcgtatggcgtgcatctgggacaggaagatctggaaacgaccgatctcaacgcaatccgtaacgccggtctgcggctgggcgtttccacccacgatgatatggagatcgacgtggcgctggcggcccgcccctcctacatcgccctcggccacgttttcccgacgcaaaccaaacagatgccgtctgccccacagggtttggctcagctggcagcccacgttaagcgccttgccgattaccccaccgtcgccatcggcgggatcagccttgatcgtgcgcccgccgtgctggaaaccggcgtcggcagtatcgccgtcgtcagcgctatcacccaggccgcagactggcagaccgccaccgcacggcttttacaactggcaggagcaggcgatgaaagatcgtga

SEQ ID NO: 525404 - DNA, 756 bp, Stenotrophomonas maltophilia
atgaaagatcgtgattttatgcgctacagccgccagatcctgctggaggatatcgccattgacgggcagcaaaagctgctcgccagccgggtactgattgtcggtttgggtggcttgggcgcgcccgccgcgctgtatctggccggggcgggcgcgggaacgctggtactggccgatgacgatgaggtacacctcagcaacctgcaacggcaaatcctcttcacgacagaagatgttaaccagcctaaagcacaggttacgcgcaagcggctgaaccagcttaaccccgatattgaactggtggcgctccagacgcggctgagcggagaagatctgcaacgcgaagttgcccttgccgacgtggtgctggactgcacggacaatatggcaacgcgtcaggccattaatgcggcctgtgttgcacagaacacgccgctgatcaccgccagcgcggtcggtttcggcgggcagataatggtgcttacgccgccgtgggcgcagggctgctaccgctgcctgtggccggacgaggctgaaccggagcgtaactgccgcacggctggcattcttgggccggtggtgggcgtgatgggtacccttcaggcgctggaagccatcaagttgctcagcggcatggaaacagagcgcaacacgctccggctgttcgacgcccgttccagcggctggcgccatctggcgttaaaccgcgccaaccgctgcccggtatgcggaggccgcgatgcgcattctgtttaa

SEQ ID NO: 525405 - DNA, 201 bp, Stenotrophomonas maltophilia
atgcgcattctgtttaacgatgagccgatgacgtgcgacgacgatctcaccgttgccgccctgctcgacacgctgcgccagatgaagccgggaacggcgctggcgctcaatcaacagatcctgccgcgcgagcggtgggaacatcagcaggtcaatgaaggcgaccagatcctgctgtttcaggttatcgctgggggctga

SEQ ID NO: 525406 - DNA, 768 bp, Stenotrophomonas maltophilia
atgttacgtattgccgacaaagtctttgattcacatctgtttaccggaaccggaaaattcgcctccccgcagctaatggtggatgctattcgtgaaagcggcagccagctggtgacgctggcgatgaagcgcgtggatctgcgtcagcacaacgatgccatacttgcgccgttactggaggcaggcgtgacgctcttacccaatacctccggtgcgaaaacggccgaggaagcaattttcgctgcgcatctggcccgggaagcgctcggcacctgctggctgaagctggaaattcacccggacgcccgctggctgttgcccgatccgatcgaaaccctgaaagcggcagagacgctggtgcagcagggattcaccgttctgccctactgtggtgccgatcccgtgctgtgtaagcgtctggaagaggtcggctgcgcggccgtgatgccgttaggggcgcccattggctccaaccagggactggagacccgcgcgatgctggagatcatcatcgagcaggcgaccgtgcccgtggtggtggatgcgggcatcggcgtacccagtcacgccgcgcaggcgctggagatgggggccgatgcggtgctggtcaataccgcgattgcggtggccgacgacccggtgatgatggcgcgtgcgttccgccttgccgtggagtccggtctgctggcacgacagtccggccccggctcgcgcagctttcaggcgcaggccaccagcccgctgaccggttttctggaggcactctga

SEQ ID NO: 525407 - DNA, 1134 bp, Stenotrophomonas maltophilia
atggctacctttaccgatcgctggcgtcagcttaactgggacgatattgccttacgcatcaacagtaaaacctctgcggacgtagagcgggcattaacagcccggcatgtgacccgcgaggatttgatggccctgctttctccggctgccagcgcataccttgaaccgatggcgcagcgcgcgcaacgcctcacccgccagcgctttggcaacacggtgagcttttacgtgccgctttatctctctaatctgtgcgccaacgactgcacctactgtggcttctcaatgagcaaccgcattaagcgtaaaacgctggatgagcatgagatcgcccgcgagtgtgcggctattcgtgagatgggttttgaacatctcttactggtgacgggtgaacatcagggcaaagtggggatggactattttcgccagcatcttccggccatccgccgcgaatttgcctcattgcaaatggaagtgcagcctctgtcgcaagaggaatatgcggaactgaaaacccttgggctggacggcgtaatggtttatcaggaaacctaccacgaggcgacctatgcccggcatcacctgaaagggaagaagcaggatttcatcttccggctggaaacgccggacaggctggggcgcgccggtatcgataaaattgggctgggcgcgcttatcggtctgtccgacagctggcgggttgattgctatatggtggcagagcatctgctgtggctacagcagtactactggcaaagccgctattccatctcattcccacggctgcgtccgtgtacgggaggcattgaacccgcctcgctgatggatgagcgccagctggtgcaaaccctgtgcgcatttcgcctgttcgcgccggaagtggaattgtcgctctccacgcgtgaatcccccgcgtttcgcgaccgcgcgatccctctggcgatcaacaacgtcagcgccttttccaaaacgcagccgggcggttacgcggacgatcgcccggaactggaacagtttgcaccgcacgacggacgacggcccgacgcggtggcggaagccctgactgcacaggggctacagcccgtgtggaaagactgggacagctggctgggaagagcttcgcatttgcgctga

SEQ ID NO: 525408 - DNA, 1500 bp, Stenotrophomonas maltophilia
atggtcagcttcgcggggattctgttcagtttcgcgataatcgcgatcctggtcatcctttcacaacggaaggattttattgaggattatcataaaattaatggtaacttcacccataatctggcggtgaactataccgaatccattctgcgagaaaacgactatattcttggtcgcgctgcgatgtactacgcccgtgacgacagagtgaatcagacgataaatatcgatccagcacagggtttgcagatgttaatgcatttgcagaacctgatgccgacggtgtcgtctatctctctggcggacaccgaagggcaccatctgcgcgcgccggaagtactgccaacggagaagagtaggtcgttcgacgcacgaacacgcccatggtttatcgggcaagcggaagccagcaactttcctcactacacccgcccctatctggactatttcacccaacatcctacggtcaccctctataaaccggtcatttcaccggaaggccgtctgaagggcacgctcgctttccatcttgatttaacctccatggggtataccttgcgccagatggtggcaccggttcagggtgagttttttgtcgtggaacgtgacggcgccgttgtgctgcatccggacacgggggcgctctttaagcagtacgtaagcgaagcgctgatggacaaaatgaccagcggcgaagggcatcttttcgaccccaaaagtaaaacctggtattactactactctttcaccaatccggactggtttgtgatttatcgggtctccgatgccacgctttccgtcatcacccggcatgaaaccaccgtcgtcggctggggatttgcgctggcggcaatcatcatcattctgttcgggctctacctgcgccatgcctcgcgttctgtgctgatgaacattatcaacgccatcaaaaccggagacgtcaatcaggcgccacgacttgaggcgatgctcagccataccattcgaaccaataaggaacgtgagatggcctatgtccgtcaggccacccatgatgcgctgacaggctgcaagaaccgccgtgctttcgacaacgatgtggatgagctgctgaccgctcatcaacccttcgttctggcgctggtcgatatcgataacttcaaatctattaacgacacctggggccacctgagcggggatattgttctgcgcagcgtggcgcgcgaaggtattcagatcatgcagccgcaccacgtttccgtttaccgctacggtggggaagagttcggggtgattttcccggccgagctgatgaactccgcgcacgcgctactggaagcctggcgcaccgccgtggaaaaacggacctggcgggaagagaacctgcgagtaaccttcagcgcgggggtgggagagtggcacttcgaaccgctggaacaatttatcggcaacgtagatgaagcgctgtataccgctaaacaacagggtaaaaaccgcatcgtaagcacggctagccgataa

SEQ ID NO: 525409 - DNA, 309 bp, Stenotrophomonas maltophilia
atgaagaacatcgttttatgctgtgcagcgggaatgtcaaccagcatgctggttcaacgtatgaaagatgccgcgcagaaaaaaggagtcgaagtaaccattaaagccgttccggtcgcggagtttaaagataacatcgcgacggctgatatcgtattactggggccacaggttaaatacgaacaggcaaaactccaggcgcaggccgatccgctcggaaaaaaggtcgcggttatcgacatgatggattacggcatgatgaaaggtgatgccgtactggaaaaagcgctcaagctgctggagtcataa

SEQ ID NO: 525410 - DNA, 318 bp, Stenotrophomonas maltophilia
atggaagacttagaaaccacaatcatggagctactggtcaatgcaggtgcggcgcgcagtgcggccctgacagcgttgcagatggcgcgaaaaggtgactttgacgaagccgagaaagcgatggaagagtcgcgtgaatatgtgaaacatgcgcatacgatccagacgcagctcatcggtcttgacgaagggaccgggaaacttccggttaacctgatcaccgttcactctcaggatcacctgatgaacgcgatggtcattcaggatctggcgggcgatatgattgagctttatcgacgcatcccgttagtgaattga

SEQ ID NO: 525411 - DNA, 3411 bp, Stenotrophomonas maltophilia
gtgatcaaccgtaacaaccgtctgaaacgtctgctggatctggctgcgccggacatcatcgtacgcaacgaaaaacgtatgctgcaggaagcggtagatgccctgctggataacggtcgtcgcggtcgtgcgatcaccggttctaacaaacgtcctctgaaatctttggccgacatgatcaaaggtaagcagggtcgtttccgtcagaacctgctcggtaagcgtgttgactactccggtcgttctgtaatcaccgtaggtccatacctgcgtctgcatcagtgcggtctgccgaagaaaatggctctggagctgttcaaaccgttcatctacggcaagctggaactgcgtggcctggccaccaccatcaaagccgctaagaaaatggttgagcgtgaagaagctgtcgtttgggatatcctggacgaagtgatccgcgaacacccggtactgctgaaccgtgcaccaactctgcaccgtttgggtatccaggcatttgagccagtcctgatcgaaggtaaagcgatccagctgcacccgctggtttgtgcggcctataacgccgacttcgatggtgaccagatggctgttcacgtaccgctgacgctggaagcccagctcgaagcgcgtgcgctgatgatgtctaccaacaacatcctgtctccagcgaacggtgaacctatcatcgttccttctcaggacgttgtattgggtctgtactatatgacccgtgactgtgttaacgccaaaggcgaaggcatggtgctgactggcccgaaagaagctgagcgtatttatcgcgctggcctggcctctctgcatgcgcgcgttaaagtgcgtatcaccgaatacgaaaaagatgaaaacggcgaattcgtggcgattaccagcctgaaagacacgaccgttggccgtgcgattctgtggatgatcgtaccgaaaggtctgcctttctccatcgtcaaccaggcgctgggcaagaaagcgatctccaaaatgctgaacacctgttaccgcattctgggcctgaagccgaccgttatcttcgctgaccagacaatgtacaccggctttgcttatgcagcgcgttcaggtgcatctgttggtatcgatgacatggtcatcccagagaagaaacacgagatcatctctgaagcggaagctgaagttgctgagatccaggagcagttccagtctggtctggtaaccgcaggcgaacgttacaacaaagttatcgatatctgggctgcggcgaacgatcgtgtatccaaagcgatgatggataacctgcaaaccgaaaccgtgattaaccgtgacggcgtagaagagcagcaggtctccttcaacagcatctacatgatggccgactccggtgcgcgtggttctgcggcacagattcgtcagctggcaggtatgcgtggtctgatggcgaagccagatggctccatcatcgaaacgccaatcaccgcgaacttccgtgaaggtctgaacgtactccagtacttcatctccacgcacggtgcgcgtaaaggtctggcggataccgcactgaaaacggcgaactccggttatctgacgcgtcgtctggttgacgttgcgcaggatctggtcgtcaccgaagacgattgtggcaccctcgaaggtatcaccatgaccccggttatcgagggtggtgatgttaaagagccgctgcgcgatcgcgtactgggtcgtgtgaccgcggaagacatcctgaagccgggcaccgcagacattctggttccacgcaacactctgctgcacgaacagtggtgtgacctgctggaagcgaactctgttgactctgtgaaagtgcgttccgttgtatcctgtgacaccgactttggtgtgtgtgcgcactgctacggtcgtgacctggcgcgtggccacatcatcaacaaaggtgaggctatcggcgttatcgcagcacagtccatcggtgagccgggtacacagctgacgatgcgtacgttccacatcggtggtgcggcatctcgtgcggctgctgaatccagcatccaggtgaaaaacaaaggtagcatcaagctcagcaacgcgaagtctgttgttaactccgcaggcaagctggttgtgacttctcgtaacaccgagctgaagctgatcgacgaattcggtcgtaccaaagagagctataaagtgccttacggtgcggttatggcgaaaggtgatggcgagcaggttgccggcggcgaaaccgtagcaaactgggatccacacaccatgccggttatcaccgaagtaagcggtttcatccgcttcactgacatgatcgacggccagaccattactcgtcagaccgacgagctgaccggtctgtcttctctggtggttctggattctgctgaacgtactaccggtggtaaagatctgcgtcctgcactgaaaatcgttgatgctcagggtaacgacgttctgatccctggcaccgatatgcctgcgcagtacttcctgccgggtaaagcgattgtacagctggaagatggcgtacagatcagctctggtgacaccctggcgcgtattcctcaggaatccggcggtaccaaggacatcaccggtggtctgccacgcgttgcggacctgttcgaagcacgtcgtccgaaagagcctgctatcctggctgaaatcagcggtatcatctccttcggtaaagagaccaaaggtaagcgccgtctggttatcacgccagtagatggcagcgagccgtacgaagagatgattcctaagtggcgtcagctcaacgtgttcgaaggtgaacgcgtggaacgtggtgacgtggtctccgatggtccagaagcgccgcacgacatcctgcgtctgcgtggtgtgcatgctgttactcgttacattgttaacgaagtacaggacgtataccgtctgcagggcgttaagattaacgataagcacatcgaagttatcgttcgtcagatgctgcgtaaagcaaccatcgaaaacgcgggcagctccgacttcctggaaggcgagcaggttgaatactcacgcgttaagatcgctaaccgcgatctggaagcgaacggcaaaatcggtgcgacctttgcacgcgatctgctgggtatcaccaaagcgtctctggcaaccgagtccttcatctctgctgcatcgttccaggaaaccactcgtgtcctgaccgaagcagctgttgcaggtaaacgtgatgaactgcgcggtctgaaagagaacgttatcgtgggtcgtctgatcccggccggtaccggttatgcgtaccaccaggatcgtatgcgtcgtcgtgcagcgggtgaactgccagctgcaccgcaggtgactgccgaagatgcatccgcgagccttgcagaactgctgaacgcaggtctgggcggttccgacaacgagtaa

SEQ ID NO: 525412 - DNA, 846 bp, Stenotrophomonas maltophilia
  misc_feature (808)..(817): n is a, c, g, or t
gtgaaagatttattaaagtttctgaaagcgcagactaaaaccgaagagtttgatgcgatcaaaattgctctggcttcgccagacatgatccgttcatggtcttttggtgaagttaaaaagccggaaaccatcaactaccgtacgttcaaacctgagcgtgacggccttttctgtgcgcgtattttcgggccagtaaaagactacgagtgcctgtgcggtaagtacaagcgcctgaaacaccgtggtgtgatctgtgagaagtgcggcgttgaagtgacccagaccaaagtacgccgtgagcgtatgggccacattgagctggcgtctccaactgctcacatctggttcctgaaatctctgccgtcccgtatcggcctgctgctggatatgccgctgcgcgatatcgaacgtgttctgtacttcgaatcttatgttgtgatcgaaggcgggatgacgaatctggaacgaaaccagattctgaccgaagaacagtatctggacgcgctggaagagttcggtgacgaattcgacgcgaagatgggtgcggaagctatccaggccctgctgaagagtatggatctggagcaagagtgtgaaactctgcgcgaagagctgaacgaaaccaactccgaaaccaagcgtaaaaagctgaccaagcgtatcaaactgctggaagcgttcgttcagtctggtaacaaaccagagtggatgatcctgaccgttctgccggttctgccgccagatctgcgtccgctggttccgctggatggtggtcgtttcgcaacgtcggatctgaacgatctgtacnnnnnnnnnngatctgtaccgtcgcgtgatcaaccgtaa

SEQ ID NO: 525413 - DNA, 3864 bp, Stenotrophomonas maltophilia
gtgttcccgattcagagctacagcggtaattccgagctgcagtacgtcagctaccgccttggcgaaccggtgtttgacgttcaggaatgtcagatccgtggcgtgacctattccgcaccgctgcgcgtaaaactgcgtctggtgatctacgagcgcgaagcgccggaaggcaccgtaaaagacattaaagaacaagaagtctacatgggtgaaattccactcatgacggacaacggtactttcgttatcaacggtactgagcgtgttatcgtttcccagctgcaccgtagcccgggcgtcttcttcgacagcgataaaggtaaaacgcactcttccggtaaagtactgtataacgcacgcatcattccttaccgtggttcatggctggacttcgaattcgatccaaaagacaacctgtttgtccgtatcgaccgtcgtcgtaagctgcctgcaaccatcattctgcgtgcactgaactataccactgagcagatcctggacctgttctttgagaaagtgatctttgaaatccgcgacaacaagttgcagatggagttggtgccggaacgtctgcgtggtgagaccgcgtcgttcgacatcgaagccgacggcaaagtgtatgtggaaaaaggtcgccgtatcaccgcgcgccacatccgccagctggaaaaagatgatatcaaacacatcgaagttccggttgaatacattgcaggaaaagtagccgcgaaagattacgttgatgaatcaactggcgagctgatctgcccggcgaacatggagctgagcctggatctgctggctaagctgagccagtctggccacaaacgtatcgaaacgctgttcaccaacgatctggaccacggtccgtacatctctgagactgtacgcgtcgacccaaccaacgatcgtctgagcgcgctggttgaaatctaccgcatgatgcgtcctggtgagccaccaactcgcgaagcggcggaaagcctgttcgagaacctgttcttctccgaagaccgctacgatctgtccgcggtaggtcgtatgaagttcaaccgttctctgctgcgcgacgagatcgaaggttccggtatcctgagcaaagacgacatcattgaagtgatgaagaagctcatcgatatccgtaacggtaaaggcgaagtggatgatatcgaccacctcggcaaccgtcgtatccgttccgtaggcgaaatggcggaaaaccagttccgcgttggcctggttcgtgtagagcgtgcggtgaaagagcgtctgtctctgggcgatctggataccctgatgcctcaggatatgatcaacgccaagccgatttctgcggcagtgaaagagttcttcggttccagccagctgtctcagttcatggaccagaacaacccgctgtctgagatcacgcacaaacgtcgtatctctgcactcggcccaggcggtctgacccgtgaacgtgcaggctttgaagttcgagacgtacacccgactcactacggtcgcgtatgtccaatcgaaacgcctgaaggtccaaacatcggtctgatcaactccctgtccgtgtacgcacagacaaacgaatacggtttccttgagaccccgtatcgtaaagtgaccgacggtgtggttaccgacgaaattcattacctgtctgctatcgaagaaggcaactacgttatcgctcaggcgaactccaacctggatgacgaaggccactttgtagaagatctggttacctgccgtagcaaaggcgaatccagcctgttcagccgcgaccaggttgactacatggacgtatccacccaacaggtggtatccgtcggtgcgtccctgatcccgttcctggaacacgatgacgccaaccgtgcattgatgggtgcgaacatgcaacgtcaggccgttccaactctgcgtgctgataagccgctggttggtaccggtatggaacgtgctgttgccgttgactccggtgttacagcagttgctaagcgtggcggtaccgttcagtacgttgacgcatcccgtatcgttatcaaagttaacgaagacgagatgtatccgggcgaagcgggcatcgacatctacaacctgaccaaatacacccgttctaaccagaacacctgtatcaaccagatgccttgcgtatctctgggtgagccagttgagcgcggcgacgtgctggcagacggtccgtccaccgacctcggtgaactggcgctcggtcagaacatgcgcgtagcgttcatgccgtggaacggttacaacttcgaagactccatcctcgtctccgagcgtgtggttcaggaagatcgtttcaccaccatccacattcaggaactggcctgtgtgtcccgtgacaccaagctggggccagaagagatcactgccgacatccctaacgtgggtgaagctgcgctctccaaactggatgaatccggtattgtttacatcggtgcggaagtgaccggcggcgacattctggttggtaaggttacaccgaaaggcgaaacccagctgacgccagaagagaaactgctgcgtgctatcttcggtgagaaagcgtctgacgttaaagactcttctctgcgcgtaccaaacggtgtttccggtacggttatcgacgttcaggtcttcactcgtgacggcgttgagaaagataagcgtgcgctggaaatcgaagagatgcagctcaaacaggctaagaaagacctgtctgaagaactgcaaatcctcgaagcgggtctgttcagccgtatctatgcggtgctggttgccggtggcgttgaagctgagaagctcgacaaactgccacgcgatcgctggctggagctgggcctgaccgacgaagagaaacagaatcagctggaacagctggctgagcagtatgatgaactgaaacacgagttcgagaaaaaactcgaagcgaaacgccgcaaaatcactcagggcgacgatctggcaccaggcgtgctgaagattgttaaggtgtatctggctgttaaacgtcagatccagcctggtgacaagatggcaggtcgtcacggtaacaagggtgttatctctaagatcaacccgatcgaagatatgccgcacgatgctaacggtacgccggtagatatcgtactgaacccactgggtgtaccgtctcgtatgaacatcggtcagatcctggaaacccacctgggtatggctgcgaaaggtatcggcgacaagattaacgccatgctgaagcagcaggaagaagtcgcgaaactgcgcgagttcatccagcgtgcctacgatctgggtaccgacgtgcgtcagaaagtcgacctgaacaccttcagcgatgatgaagttctgcgtctggcggaaaacctgcgtaagggtatgccaattgcaacgccggtattcgacggtgcaaaagaagctgaaattaaagagctgctgcaactgggtggtctgccaacgtctggtcagattacgctgtttgacggccgtaccggtgaacagttcgagcgtccggtaaccgtaggttacatgtacatgctgaaactgaaccacctggtcgacgacaagatgcacgctcgttctaccggttcttacagcctggttactcagcagccgctgggtggtaaggctcagttcggtggtcagcgcttcggggagatggaagtgtgggcgctggaagcatacggcgcagcatacaccctgcaggaaatgctcaccgttaagtctgatgacgtgaatggtcgtactaagatgtataagaacatcgtagacggcaaccatcagatggaaccgggcatgccagaatccttcaacgtactgttgaaagagattcgttcgctgggtatcaacatcgaactggaagacgagtaa

SEQ ID NO: 525414 - DNA, 1650 bp, Stenotrophomonas maltophilia
atgaagcgagtcctgacggcgcttgccgccacacttccctttgctgcccatgcggcagatgcccttaccggcgaggtccagcgccagccaaccaactggcaggcgattatcatgttcctgattttcgtggtgctaacgctttacatcacctactgggcgtcgaaacgcgtgcgctcccgtaacgattactacaccgcgggcggcaacattaccggcttccagaacgggctggcgattgcgggagactttatgtctgccgcctcgttcctcgggatctccgcgctggtttatacctcggggtatgacggcctgatctactccctcggcttcctcgtcggctggccgatcattctgttcctgattgccgagcgcctgcgtaaccttggccgctacacctttgcagacgtagcttcataccgcctcaaacaaggccccatccgcatgctctccgcctgcggttcgctggtggtggtggcgctgtacctgattgcccagatggtcggcgcgggcaaactgatcgagctgctgttcggtctgaactaccacgtcgcggtggtgctggtaggcgtgctgatggtgatgtacgtcctgttcggcggcatgctggccaccacctgggtacagatcatcaaagcggtactgctgctgttcggcgccagctttatggcctttatggtaatgaagcacgtcgggttcagcttcaataatctgtttaccgaagccatgtcagtgcacccgaaaggggaagcgatcatgagcccgggcgggctggtgaaagatccgatatccgcgctctcgctcggtctcggcctgatgttcggtaccgctggcctgccgcatatcctgatgcgtttcttcacggtgtctgatgcacgtgaagcgcgtaaaagcgtgttctacgccaccgggtttatgggctacttctacatactgacctttatcatcggctttggcgcgatcatgctggtgggggcaaacccggcgtttaaagacgcggcgggcgcgcttatcggcggtaacaacatggcggcggtgcatctggccgacgcggtaggcggtaacctgttcctcggctttatctctgccgtggccttcgccaccatcctcgcggtggttgccgggctgacgttggctggtgcgtctgcggtatcgcacgatctctacgccaacgttttccgcaaaggcgcaagcgagcgcgatgagctgaaagtctccaaaatcaccgtactggtgctgggcgtcgtcgccatcctgctggggattttgttcgagaagcagaacatcgcctttatggtggggctggccttctcgattgcggcaagctgtaacttcccgatcattctgctctccatgtactggtcaaaactgaccacccgtggggcgatgattggcggctggctggggctgctgacggcggtgattctgatgatcctcggcccgaccatctgggtgcagatcctcggtcacgaaagcgctatcttcccgtatgaatacccggcgctgttctccattgccgtggcgtttatcgggatctggttcttctcagcgaccgacaactcgccggagggtaacctggagcgtgagaaattccgcgcccagtttatccgctcgcaaaccggcctgggtgttgagcagggccgcgcgcactaa

SEQ ID NO: 525415 - DNA, 315 bp, Stenotrophomonas maltophilia
atgaataacgatatttgtcagcagatagagaatagtgcgcactacagggagctcgtcgaaaaacggcaacggtttgcctttatcctttccatcatcatgctggttatttacgtcggctttattctgctgatcgcctttgcgccgcagtggctcggtacgccgctgcacgccggaaccagcgttacgcgcggcatcccaattggcattggcgttatcgttatttcgtttgtgctgacaggtgtgtatgtctggcgtgcgaacggtgaattcgatcgtcttaacagagaagttctgcgcgaggtaaaagcatcatga

SEQ ID NO: 525416 - DNA, 1959 bp, Stenotrophomonas maltophilia
atgagccaaatacacaaacacgacattcccgcaaacattgcggaccgttgcctgataagcccggagcagtaccaggagaaataccagcagtccatttccagccctgacgcattctggggtgaacagggccacatcctcgactggatcaaaccttatcagaaggtaaagaacacctctttcgcgccgggcaacgtctccattaaatggtatgaagacggcacgctgaacctggcggcgaactgcctggaccgccatcttgccgaacgcggcaacgaaacggccattatctgggaaggcgacgatgcctctcagagcaaacacatctcatataaagagcttcatcgcgacgtctgccgcttcgccaacgtgctgctggcccagggcattaaaaaaggcgatgtggtggcgatctatatgccgatggtgccggaagccgcggtggctatgctggcctgcgcgcgcatcggcgcgatccactccgttatttttggtggcttctcgccggaggcggttgccggacgtatcgtcgactcgaactcaaagctggtgatcaccgctgacgagggcgtgcgtgccgggcgcggcattccgctgaagaaaaacgtcgatgaagcgctgaaaaacccgaacgtgaaatccatccataacgtcattgtcttcaaacgcacgggcggcaacattgactggcacgagggccgagacctgtggtggagcgatctgattgaaaacgcaagcgaccagcatcagccggaagagatgaacgcggaagatccgctgtttatcctttatacctccggatccactggtaagccgaaaggcgtgctgcataccaccggcggctatctggtttacgcggccaccacctttaaatacgttttcgactaccatccgggcgacatctactggtgtaccgccgacgtgggctgggtcaccggtcacagctacctgctgtacggcccgctggcctgcggcgcaacgacgctgatgtttgaaggcgtacctaactggccaacgccggcacgtatgtgccaggtggttgataagcatcaggtcaacattctctacaccgcgccaacggcgatccgtgcgctgatggcggaaggcgataaagccatcgaagggaccgaccgctcttccctgcgcatcctcggttccgtgggcgagccgatcaacccggaagcctgggagtggtactggaagaagatcggcaacgagaagtgcccggtgatggacacctggtggcagaccgaaaccggcggcttcatgatcaccccgatgccgggcgccacgcagttgaaagccggttcggccacccgtccgttcttcggcgtgcagcccgcgctggtggacaacgaaggcaatccgcaggaaggggccaccgaaggcaacctggtaatcgtcgattcctggcctggccaggcgcgtaccctgttcggcgaccatgagcgcttcgaacagacctacttctcaacctttaaaaacatgtacttcagcggcgacggcgcgcgccgggacgaagacggttattactggatcaccggacgcgtggacgatgtgctgaatgtttccggccaccgtctgggcacggcggagattgagtctgcgctggtgtcgcatccgaagattgccgaagcggcagttgtcggcattcctcacaacatcaaaggccaggcgatctacgcctacgtcaccctgaaccacggcgaggagccgtcgccagagctgtataccgaggtgcgtaactgggtgcgtaaagagatcggcccgctggccacgccggacgtgctgcactggaccgactcactgccgaaaacccgttccggcaagattatgcgtcgtattctgcgcaaaatcgcagcaggcgacaccagcaacctcggtgatacctcaacgcttgccgatcctggcgtggtggacaaactgctcgaagagaagcaggccatcgcaatgccttcctag

SEQ ID NO: 525417 - DNA, 1314 bp, Stenotrophomonas maltophilia
atgaaaaatttgaaagtcagcctggcctggcagatcctgctggcccttgtgctgggcatcttgctgggcagttacctccattaccatagcgacagccgcgagtggctgattgcgaaccttctctcgccagcgggcgatatctttattcatctgatcaagatgattgttgtgccgattgtgatctcgacgctggtggtcggtattgccggggtaggtgatgcgaaacagttaggccgcatcggcgttaaaaccattctctatttcgaagtgatcaccacggttgccatcattcttggtatcaccctggcgaacgtgttccagccaggttccgggattgatatgtcgcagctggcgacggtggatatttcgaaatatcaaagcaccaccgccgacgtgcagagccattcgcacggtctgatgggcacaattctgtcactggtgccgaccaacattatcgcgtcaatggcgaagggcgagatgctgccgatcatcttcttctcggtgctctttggtctggggctttcttccctgcccgcgacgcaccgtgaaccgctggtaacggtgttccgctctatctctgaaaccatgttcaaagttacccacatggtgatgcgctatgcgccggtgggtgtttttgcgctgatcgccgtaaccgtggcgaacttcggctttgcttccctgtggccgttggcgaagctggtgattctggtgcacttcgcgatcctgttcttcgcgctggtggtgctggggattgtggcgcgcctgtgcgggctgagtatctggatcctgatccgcattctgaaagatgagctgattctggcgtactccacggcaagctccgagagcgtgctgccgcgtatcattgagaagatggaggcctacggtgcaccggcgtccattaccagcttcgttgtaccgaccggttactccttcaacctggatggttcaacgctgtatcagagtattgcggcaatctttatcgctcagctgtacggcattgacctgtcgctgtggcaggaaatcgtgctggtgttgaccctgatggtgacctcaaagggtatcgcaggcgtgccgggcgtctccttcgtggtgctgctggcgacgctgggcagcgtcggtattccgctggaaggcctggcgtttatcgccggtgtggaccgtatcctcgacatggcgcgtaccgcgctgaacgtggtgggtaatgcgctggcggtgctggtaatctccaagtgggaacacaagttcgaccgtaaaaaagcgctggcgtatgaacgcgaggtgctgggtcgttttgataaaacggctgaccagtga

SEQ ID NO: 525418 - DNA, 1158 bp, Stenotrophomonas maltophilia
atgccctggactgagacccgacctatgcaacgccttgattttatccgtgcctgccatgcaggtacggattctttttctgccctctgccgtctcttcggcatcagtcgaaaaaccggttacaaatggcttcagcgttttgacccctctgacctgtcatctctctctgaccggtcgcgtgctccgcactcccactcccggacagttcctgatgatatcgccgggcagcttacggccctgaggcaaaaacaccctgactggggccccaaaaaactgcggatgtggctgctcaatcatcacgtcgattttaccgtccccgctgccagtactatcggcgatatcctcaagcgtgaaggcctggttccggataaaaagcgaaaacgcagaaccccgggcaatcgccagcccctgaccatcatcagtgagaacaatcaggtctggagcgctgattttaaaggcaagttcaggctgctgagccggaaatactgtcatcccttcaccctcaccgacaatcacagccggtatcttctgagctgccggggagcagaccgggagagcgagcccttcgtcaggcagtgcctgacggatgcgttcctggagtacggtctgccggaagtcctgagaacggataatggtcagcctttcgcaggaacaggtatcgccgggttaagtcgccttgcagtctggctgataaagctgggcatcagaccggaacgcatcagaaaggggcatccggaagaaaacggccgtcatgagcgaatgcatcgttcgctgaaaagtgcagtaaaacagggcaacatatttatgacgatggaagaacaacagcggtggttcagtggctaccgggaagagtttaactacgaaaggccgcatgaagccctggcgggtgcaacgcccggaacggtatggcaaccctcaggccggcactgggatggcagggttcctgaatatgcttatccggaaggaggtacggtctacagggtgaaatcaagggggacactctatatggggaaaaaggggacggtgttcctgagtgaagcgctgactgatgagtacatcatgctggaagaacaagatgatggcctggaggccatcatctttaatggaataacgcttgcgtactacgaccgaaaaacccagagtgtgctccggatagactga

SEQ ID NO: 525419 - DNA, 675 bp, Stenotrophomonas maltophilia
atgaaagccatttttctgttgttgttatttttaaccgcctttgcccgtgccgatgagataggcagccagtatcgaaaacaggcggaagccggtgatgcgcgcgcccagtattatcttgccgatacgtacttcagctccggcgacagcaagcaggccgcgctgtgggccgagaaagcggcgaaaggcggcaatatcgacgccatggcgctgctgtcgcaaatcctctttacgcagggcgactacgcacaggccaaagctctggcccaacaggcaaacattgcgggcagcaaacgcggcgcgatcatgctggcgcgggtgctggtgaacacgcaagcaggcaagaccgactacccgcaggccattaaactgctgcaaacgtcgaccgaagacatcgatagcgactcggcggtagacgcgcaacagctgctggggctgatctatgccaacggcgttgaagtccctcaggatgacgtgcaggctgcggcgtggttcaagcggagttcggctctgtcccggacgggctatgcggagtactgggcaggcatgctgttcaggcagggtgagaaaggctttatcacaccgaataaacagaaagcgctttactggttaaacctgagctgtacggaagggtttgataccgggtgtgaagagtttgatgcgttgagcggggagtaa

SEQ ID NO: 525420 - DNA, 153 bp, Stenotrophomonas maltophilia
atgacgctattaaaaactgcgttaggcatcgtttttattatttgcctgacgatagtgatctttacctttattactcgcggtaagttatgtgagttttcaataaagagtgaacatcaggaggtggcggcgaaattagcctgtaacgcaggctaa

SEQ ID NO: 525421 - DNA, 852 bp, Stenotrophomonas maltophilia; identical to SEQ ID NO: 118697

SEQ ID NO: 525422 - DNA, 522 bp, Stenotrophomonas maltophilia; identical to SEQ ID NO: 92461

SEQ ID NO: 525423 - DNA, 1680 bp, Stenotrophomonas maltophilia
atgagtaatgccatcaatgagatagataacaccgatctggtgttcatcttcggctataacccggcggattctcaccctatcgtcgcgaatcacgtgattcgcgccaaacagaacggggcgaaaatcatcgtctgcgatccgcgcaaaattgaaaccgcgcgcattgccgatatgcacatcgcactgaaaaacggctcgaacatcgcgctgttaaatgcaatggggcacgtcattattgaggagaacctctacgaccaggcgtttgtcgcgagccgtacggaagggtttgaagagtatcgcaagattgtcgaaggctatacgccggagtccgtagaggcgataaccggcgtcagcgcacaggagatccgccaggcggcgcggatgtacgccggagcgaaaaccgccgccattctgtggggtatgggcgtgacccagttctaccagggcgtggaaaccgtgcgctcgctcaccagcctcgccatgttgaccggcaatctgggtaaagcgcatgtgggcgtgaacccggtacgtggtcagaataacgtgcagggcgcgtgcgacatgggcgcgctgccggacacctatccgggctaccagtacgtcaaattcccggaaaatcgcgagaaattcgcgaaggcctggggcgtggagagcctgcctgagcacacggggtatcgcatcagcgagctgccgcaccgcgcggcgcacggtgaagtgcgtgcggcctacatcatgggtgaagatccgctccagaccgacgccgagttgtctgcggtgcgtaaagggtttgaggatctggagctggtgattgttcaggatatctttatgaccaaaaccgcggcggcggcggatgtgattttaccgtcgacctcctggggagagcatgaaggtgtctatacggcggcagaccgcggcttccagcgcttcttcaaggctgtcgagccgaagtgggatctgaaaacggactggcagatcatcagcgaaatcgccacccgcatgggctacccgatgcactacaacaacacccaggagatctgggacgagttgcggcatctgtgcccggacttttatggggcaacctatgaaaaaatgggtgagctaggctacatccagtggccgtgccgggatgagtcagaggcggatcagggaacgtcgtacctctttaaagaaaaattcgacaccccgaacgggctggcgcaattcttcacctgcgactgggtcgcgccgatcgataaactcaccgacgagtatccgatggtgctctccaccgtgcgtgaagtgggccattactcctgccgttccatgaccggcaactgcgccgcgctggcggcgctggcggatgaaccgggctacgcgcagatcaacaccgccgatgccgaacggctcggtattgaagatgaagcgctggtgtgggtgaactcgcgtaaaggccgcatcattacccgcgcgcaggtcagcgaccgtccgaacaaaggcgcggtctatatgacctaccagtggtggattggcgcctgtaacgagctggtgacggagaacttaagcccgataaccaaaacgccggagtataaatactgcgccgtaaacgtggagcccatagcggatcagcgcgcagcggaacagtacgtgatcgacgaatataacaagctgaaagcccgcctgcgtgaaagcgcaatgggatga

SEQ ID NO: 525424 - DNA, 420 bp, Stenotrophomonas maltophilia
atgaaaaaagtcgtcacggtttgcccttattgtgcctcaggttgcaaaatccacctggtggtcgataacggcaaaatcgtccgggcggaagcggcgcagggtaaaaccaatcagggcacgctgtgcctgaaagggtactacggctgggattttattaacgatacccaaatcctcaccccgcgcctgaaaacccctatgatccgccgcgagcgcggcggcaagctggaagccatctcctggaatgaagcgctggattatgttgccacgcgccttagcgccatcaaggccaagtatggcccggatgcgattcagaccaccggctcctcacgcggaaccgggaatgaaaccaactatgtgatgcaaaaattcgcgcgcgccgttattggtaccaataacgtcgactgctgcgctcgcgtctga

SEQ ID NO: 525425 - DNA, 732 bp, Stenotrophomonas maltophilia
atgaaaccggcgattctggtggttgatgatgatgtcgcagtctgcgaactgctacaggatgtgctcagcgagcacgtctttaccgtgctgacgtgtcacaccggtcaggaagcggtgaaccgtgtccagcaggactccggcattgcgctggttctgctggacatgatgctgccggatatcaacggattacaggttttgctgcagatgcaaaagcggcgaccgtcgctaccggtggtgatgctgacggggctgggaagtgaatcagatgtggtcgttgggctggaaatgggcgctgatgattacatcggaaaaccgttcaatccgcgcgtggtggtcgcccgcgttaaggcggtgctgcgtcgtaccggcgcgctggccgcggagcctgccgcgccgcgcgttgagggtattgcttttaacggctggaggctggacaccacccgctgcgagctgagcgatccgcagcgtaataccgtaccgttaacccagggtgaatacggcctgctgctggcattaacgcaaaacgcccgccgggtactgagccgtgaacaactgctggagctgacccacagcgaaagcgccgaggtctttgaccgcactatcgacgtgttgatcatgcggttgcggcgaaaaattgaggttaatccgcaccagcctctgctgatcaaaaccattcgcggtctgggctatgtttttgccacggacgtttcccatcatgagaaagccgcctga

SEQ ID NO: 525426 - DNA, 1020 bp, Stenotrophomonas maltophilia
atggaacgcaaagggatcgtcgccgcaggcaatatgctggtggatcacgtccaccagatcgtacagtggccggagcgcggctggctggcagaaatcacccacagcgaacgctcaaccggcggtgcgccgctcaacgttctgctgacgctggcaaaaatgcacgtcggcctgccgttacaggcggtggggctgattggggaagacagcgacggagactatattctggcgatgctcgaccagtatcacgtcaatcgccagcgcgtgcagcgcacgacgttctccccaacgtcgatgtcgcaggtgatgaccgaccccagcggacagcgcacctttttccactcgccgggcgccaaccgcctgctggatcttcccgccttcgatcgtttagacggatcgctgaagatcttccatctcggctatctgctgctgctcgacagcctggatatgccggacgaggaatttggcacccgcagcgcgcggttactggcacagatgcacgatcaggggtatgaaacctcgctcgatctggtgtcccgcaagggcgacccgcgctatcagccgctggtgctccctgccctgcgccatcttgattatctggtgattaacgagctggaagccggtgagtttagcgggcttgagatccgcgacagccatgatgcgctgaacatggcccatatcgccgacgctgccgcacagctgctggcggcaggcgtgcggcagcgggtggtgatccactgtccggaaggggcatggggtgaatcgccgggtgaaaaagggcaatgggttccgtcgtggaagctgacgcaggacgagattatcggcagcgtcggcgcgggcgacgcgttttgcgcgggctttttatacggctgccatgaatccctgccgctgacggagagtatttatctggcgcacgcctgcgcgcgggccagcctgctggcggctaatgcaattgacggcgcgaaaacgctggccgagcttcagacgtttattcaggagaacggtcaggcggctttctcatga

SEQ ID NO: 525427 - DNA, 861 bp, Stenotrophomonas maltophilia
atgccattgatttctcttgccgacggtctggcccacgccagggaacaccgctacgccctgggcgcgttcaacgtgctcgactcccatttcctgcgcgcgctgtttgccgccgcgaagcaggaacgctcgccgtttatcatcaacatcgccgaagtgcattttaagtacgtgtctctggagtcgctggtggaagcggtgaaattcgaagctgcccgccacgatattcccgtggtgcttaacctcgaccacggactgcattttgaggcggtggtgcgcgccctgcgtttagggttcagctcggtgatgttcgacggctccacgctgagctatgaggaaaatatccgccagacccgggaagtggtgaagatgtgccacgcggtgggcgtctcggtagaggcggagctgggcgcggtaggcggggatgaaggtggcgcgctgtacggtcatgcggatgaagccttctttaccgacccgcagctggcgcgcgaatttgttgattcaaccggcatcgatgcgctggcggttgccattggcaacgcgcacggcaaatacaagggcgagccgaagcttgattttccgcgtctggacgccattcgccagcagacgggcctgccgctggttttacacggtggctctggcataagcgacactgatttccgccgcgccattgaactcggtattcataaaatcaatttctataccggcatgtcgcaggcagcacttgccgccgttgagcaacgcatggcgaaccgacaatcgctttacgatgagtttgccgagctgctgctgggcattgaagaggccattaccgatacggttgcggaacagatgcgcatcttcggcagtgcggggcaggcctaa

SEQ ID NO: 525428 - DNA, 687 bp, Stenotrophomonas maltophilia
atgaaacgctccgacataaatgaaatcctcggccacacgcggcagttcttctccatgcacggcgtgcatctcccgccgtttgccagctttccgccgacaaaatggcagcagcttgaccaggcagcatggcaggaggtgttcgacctcaggctcggctgggacgtgacggcgttcggcggcaacagctttgccacccagggcctgacgcttttcaccctgcgcaacggctcccccaacggcgtgccctatgaaaagtgctatgccgaaaaaatcatgcatgtccgcgacggccaggtgacgccgatgcattttcactggcgcaagcgggaggacattattaaccgcggcggcgggaatctgattattgagttatggaatgcgggcgcgcatgaagagaccgaaaacaccgacgtgaccgtaacgatagacggctgtcggcagacgcacgcgcccggcagccagctgcgcctcacgcctggggagagcatctgcctgacgcccggcctgtaccacagtttctggggtgaacgcggctttggtgacgtgctggtgggcgaagtgtcgtcggtcaatgacgatgaacacgacaaccactttttacagcccattgaccgctacaacaccattgaagaagacgaaccggcggtgctggtgctgtgcaacgagtacaccctctttcggatataa

SEQ ID NO: 525429 - DNA, 942 bp, Stenotrophomonas maltophilia
atgagattgaagcccttagtgaccgcgctctgtgctggcgcgctgctggccgcaaccccgtttgcgcaggcaaaagatctgaaatccatcggcgtgacggtgggtgacctggctaacccgttcttcgtgcagatcaccaaaggtgccgagctggaagcgcgcaagctggcgggggacaacgtcaaggtgacgctggtctccagcgggtacgatctgggccagcaggtgtcgcagatcgataacttcattgcggcgaaagtagacatgatcatcctcaatgccgcggattccaaagggatcggccccgcggtaaaacgcgctaaagaggcggggatcgtggtcgtggcggtggacgtggcggcggaaggggccgatgcgaccatcacctccgataacactcaggcgggggaaatggcctgtaagtacattaccgaccgcctgaaaggtaaaggcaacgtggtgatcatcaacggaccgccggtttctgcggtacaaaaccgcgtggagggctgccagaccgagttcaggcgccacccggatatcaaagtgctctcggataatcagaacgccaaaggcagccgcgaaggcgggctggaggtcatgacctccctgctggcggccaatccgaagatcgacggcgtattcgcgattaacgatccgaccgcgatcggcgccgatctggcggctaaacaggctcaacgcaacgaattctttatcgttggcgtggatggcagcccggacggtgaagaagccctgaagcgcgaaaactcgctgtttgttgctaccccggcgcaggatccgcaggtgatggcggcgaaggcggtggagatcggctatgacattcttcagggcaaacctgcgccgaaagagcctgtgctgatcccggtgacgatgatcgataaaaagaacgtcggcacgtataaggggtggacggttaagtaa

SEQ ID NO: 525430 - DNA, 996 bp, Stenotrophomonas maltophilia
atgacaactccaacccatccgcagcaggtggcgaaatccgcctccgccaaaaaaatgctgatgagcgatctgatgcaaacgatcggcattttgccgattttaatcctgattgtggcggtatttggctttatcgccccgaactttttcaccgagagtaatctgctcaacattacccggcaggcgtcgatcaacattgtgctggcggccgggatgaccttcatcatcctgaccggcgggattgacctctccgtgggctcgattctgggcaccacggcagtggcggcgatggtagtgtcgcttatccctgaatttgcgatgctctccattccggcggcgctgatgctcggtatggtgctggggctgttcaacggtgcgctggtggccttcgccggacttccgccgtttatcgttacgctcggcacctatacggcgctgcgcggcgcggcctatctgctggcggacggcacgacggttattaactccaacattaacttcgagtggatcggcaataactacctcggcccgattccgtggctggtggtgatcgccctggcggtgattgtggtgtgctggttcatcctgcgccgcaccaccctcggtgttcacatctatgcggtcggcggcaatatgcaggcggcacgcttaaccggcattaaggtctggctggtgctgctgtttgtctacggcatgagtggcctgctctcgggcttaggcggcgtgatgagcgcttcacgtctctacagcgccaacggcaacctcggtacggggtacgagctggatgcgattgcggcggtgatcctcggcggcaccagcttcgtcggcgggatcggcacgatcaccggcaccctggtgggcgcgctgatcatcgccaccctcaacaacggcatgacgctgatgggcgtctcctatttctggcagctggtgatcaaaggggcggtgatcatcatagcggtgctgatcgacaaataccgtacccgacaccatcaaagtgcataa

SEQ ID NO: 525431 - DNA, 1515 bp, Stenotrophomonas maltophilia
atgagcagaaccccggttttagagatgcgccacattgccaaaacctttggcaatttccacgcgctcaagggcgtggatttgacggttttccccggtgagatccacgcgctgatgggggaaaacggcgccggaaaaagcacgctgatgaagatcctcgcaggtgcctataccgccagcagcggcgacatcctcatcgacggtaagccgtttcatatcaaagggccgaaggatgcgctggccgcaggcattaccctgatttatcaggagatgcagcttgctcctaacctgaccgtggcggaaaacatttttctcggcagcgagctgtcgcgcggcgggctggtccagcgcaaagagatggctgcccaggcgcaggcggtcattgaccgcctcggtgcgcagttcagcgccaccgacctggtcatgaagctgacgatcgccgagcagcagcaggtggagatcgcccgcgccctgcaccgcaacagccgcattctggtgatggacgaacctaccgccgccctctcctcgcgcgaaacccaccgtctgttcgaactgattttgcgcctgcgcgatgaaggcatggcgattatttacatcagccaccggatggcggaagtgtatgaactctctgaccgcgtcagcgtgctacgcgacgggcaatacgtcggcagcctgacgcgcgacaggctcaacgcctccgagctggtgcgcatgatggtgggccgtccgctcagcgatctgtttaacaaagagcgcgatattcccctcggcagcccgcgtcttaacgtccaccacctcaccgacggcaaaaaagtacagccgtgcagtttgcaggtgcgctccggtgaaatcgtcgggctggcagggctggtcggggccgggcgttccgagctggcgcagctgatcttcggcgtgcgcaaagccaccggcggcatgattgaggtggacggcgaaccggtggtgatccactccccgcgcgcggccattgagaacggcatcggttttcttaccgagaaccgcaaggagcaaggtctgtttctggagctggcggcgcaggagaacatcaccatggcgacgctggagcgcgacgccaccttcggctggctgaaccgcaaaaaagcgcagtcgatttccgacgacgccatcgccctgcttaatatccgcgtgccccattcacaggtgcgcgcgggcgggctctccggcggcaaccagcaaaaactgctgatctcccgctgggtggcgataggcccgcgcattctgattctggacgaacccacgcgcggcgtggacgtcggcgcaaaaagcgagatctaccgcatcatgaaccagatggcgcgcaaaggcgttgcgattctgatgatctccagcgagctgccggaagtagtagggatgagcgaccgggtgtacgtgatgcgggaaggcagcattgcgggtgaactgcacgggcgcgacatctctcaggaaaacatcatgacgctggcaaccggcgtaaacgacacacatcatcaggcggtgtaa

SEQ ID NO: 525432 - DNA, 2280 bp, Stenotrophomonas maltophilia
atgtcttcacgccccccgttcttcaccagcgcccgcggacgcctgctgatttttaatctgctggtggtcgccgtcacgctgatggtgagcggtgtggcggtgctcggctttcgtcacgccagccagatccaggagcaggtccaacagcaaacgctggatgacatgaccggcagcatgaacctcgcccgtgataccgcaaatgtggcaacggcggcggtgcggctgtcgcaggtggtcggtgcgctggagtacaaaggcgaagccgagcggctgaaacagacgcagatggcgctgcgccactcgctggatcaacttgccgatgcgccgctggcgcagcaggagccggcgctggtggcgcgaattattcgcaggagtaatgaattacagcagagcgtgacgggaatgctggagcgcgggcaaaagcggcatctggagcgtaacgcgctgctcagctcgctctatcaaagccaaagctacctgcgtcatttgcaggatatcaaccgccgttacgcgagcaatgtgccagacgcccgacagcttgcagagatggacaggctgatcgttgccgccattgataccccttcaccgcgcgccacggtgcagcagctggatgcagtaaccgcggggttatccgcgagcgccctgcaaccggtggccaacctggtgctcccggattttaatgatgagctgcgcaagctcgcaccactgtcgacgcagctggaggagagcgatctgtccatcagctggtacatgttccacatcaaggcgctggtggcgatattaaacagcgacattaatcagtacgttgaacaggtggcgcaggcttcccggcttcgcacggcccagagccatcacgagctgcaatccatcagcgtgtttatcagcatcttcgcggtgctggcgctgatcatcaccggctgtgcctgctggtatatttaccgcaatctgggctccaacctgacggctatctcaagggcgatgtcgcgtctcgctcatggggagcaggatgtgtcggtgcccgctctacagcggcgtgatgagctgggggaactggcgcgcgcgtttaacgttttcgcccgcaataccgcttcgctggagcacaccacgcggctgctgaaggagaagacctcacagatggaggttgaccgcatcgaacgtcaggggctggaggaggcgctgctgcacagccagaaaatgaaggcggtcgggcaactgacgggtggcctggcgcatgattttaataacctgctggcggtgattatcggcagtctggagctgaccgattcggcatcaccggacgcgccgcgcatcatccgtgcgcttaaagccgcggaacgcggggccatgctcacccagcgtctgctggccttctcgcgcaagcaatccctgcatccccatgcggtagagatgaagccgctgctggagaacctgagcgagctgatgcggcactcgcttcccgccacgctgacgctggatattgaagcgcaaaccccggcgtggcccgcatggattgacgtcagccagctggaaaacgccattatcaacctggtgatgaacgcccgtgatgcaatggaggggcaaaacggtgtgattaaaattcgcacctggaaccagcgtgtgacccgcagcgacgggcgcaggcaggatatggtcgcgctggaggtgattgaccacggctgcgggatgtcgcaggaggtgaaatcgcaggtctttgaaccgttcttcaccaccaaacagaccggcagcggcagcgggttagggctgtcgatggtgtacggctttgtgcgccagtcgggtggtcgcgttgagatcgaaagcgcgccggggcagggaaccaccgtgcggctccaactgccgcgctcgacgctgcccgcgttctccgatgatgtcgtgctggcgaccacggccccggcagaaagtgagctgcttgtgctggtcctggaagatgaggcaggcgtgcggcagaccctgtgcgagcaactgcaccagcttggctacctgacacttgaagccgaaaacggcgagcaggcgttgaacatgctggacgcatcaccggatatcggtatgtttatcagcgacctgatgttgccgggcggcctgagcggtgcggaggtgatcggccatgtacgcagccactatccgcagttgccggttctgctgatcagcgggcaggatttgcgcccggcgcataacccgcagctgccggacgttccgttactgcgaaaaccgttcacccgcgcacagctggcgcaggcgctgcgcaaggtgatggtaatttga

SEQ ID NO: 525433 - DNA, 324 bp, Stenotrophomonas maltophilia
atgaaacgttactctaccgctctgttattgggtctgctgactttaaccagccaactggcgcatgccgatgtgattgatgatgctattggcaatattcagcaggcgatcaacgacgcctataaccccggcagcagccgtaatgacgatgacgacgatcgttacgatcgcagccgtcaaaccgacagccgccagtacgacgatcgtcgccggcagttagaagaccgacgccagcgcttagacgagcgtcagcggcagctggatgacgaccggcgtcggttagaggaggatgagcgccggttagaggatgattacgatcggtggtaa

SEQ ID NO: 525434 - DNA, 759 bp, Stenotrophomonas maltophilia
atgagtctgacgatcacgctaacaggaacgggaggggcgcagctggtgccggtgtttggctgcgactgcgcggcgtgccgacgggcgcgtttacaggaaaattatcgccgtcgcccctgcagcgcggcggtgaaattcaacgatgcggtcaccttgctggacgcgggtattccacacctgatggacgactggcccgcagggagtttcaggcagtttttgcttacccattatcatatggatcacgttcaggggctgtttcctctgcgctggggcgtgggggcgaccattccggtttacggtccgccggacgacgcaggctgtgacgacctgttcaaacatccgggccttctggatttcagccacacggtggagccgtttgtgacgtttgaacttcagggcttgcgggtcacgccgctgccgctcaaccattcaaaactcacatttggctatctgctggagtccgcccacagtcgcgtggcgtggctttctgataccgccgggctaccggataaaacggtgacatttctgctaaataatcagccgcaggcgatgattattgactgtagccatgaaccgcgccaggagacgccgcgcaaccactgtgatttgaatacggtgattgcgctgaacgaggtgattggctgtccgcaggtgatcctgacgcatatcagccatcagtttgacgtctggatgatggataacccgctgccgtccggcattgaagcggggtatgacgggatggtgctggtgctggattag

SEQ ID NO: 525435 - DNA, 435 bp, Stenotrophomonas maltophilia
atgcctgactgccagcttcgccccgccaccgccgacgatgcgccgatcgtttacgctctgatctgcgaacttaagcaggccgagttcgatcatcaggcgtttcacgccgggtatctggccaacttgcaggatcacaatatgcgctaccagctggccgagctggacgggaagatcatcgggatgatcggcctgcacatgcagtttcacctgcaccacgcccgctggatcggcgagatccaggagctggtggtgatgccgcaggcgcgcggattgaaagtgggtagccagttgctggcctgggcagaggagatcgcacgccaggcaggcgccgagctgaccgagctttccaccagcgtgaagcgcgtggacgcgcaccgtttttatgttcgtgaagggtatacgcaaagccatttccgcttcaccaaaccgctgtag

SEQ ID NO: 525436 - DNA, 549 bp, Stenotrophomonas maltophilia
atgggaagactcatctggttaatgggcccgtccggctccgggaaggacagcctgctgtcggcgttacggcagcgggaacactcacagctgctggtggcgcaccgctatatcacgcgcgatgccaacgccggaagcgaaaaccatatcgccctgagcgagcaggagttttttacccgcgccggacaaaacttgctggcgctaagctggcatgccaacggttactactatggcgtcggcattgagatcgacctctggctgcacgcggggttcgacgtgctggttaacggctcacgggcgcatctcccgcaggctcacgcccggtacgaagcggcgctgctcccggtctgtttgcaggtttccccggaggttctgcgtagccggctgcaaaagcgggggcgcgaaaacgcgcgcgagatcgaccagcggctggaacgtgcggcgcgctacaccccgtcgggttgccatctcctcaataacgacggaagtttgctacagtcagtcgagacctttctatcgcttattcgccagaaggagaaacagcatgcctga

SEQ ID NO: 525437 - DNA, 561 bp, Stenotrophomonas maltophilia
atggcgcgctacgaagaagagcagctccagcttgcggcccagtggtcgcagccgaatcgcctctccattgccgctatgtgccgggaccgtaatattgccctggccagccatgatgatgccacgcacgaccatgttcgcgaatcccaccagcttgggagcgtgatcgccgaatttcccaccacgttcgaggcggcagaggcatcgcgtaagcatggcatgaacgtgctaatgggtgcgccgaacatcgtgcgcggcggatcacactccggcaacgtggcggcaagcaagctcgcctccctcggcctgctggatatcctctcatctgactattaccccgccagcctgctggacgcggccttccgcgtcgcggacgacgaaggcaatagcttcacgctgccgcaggcgattcgcctggtgacgaaaaacccggccaccgcgctcaatcttcacgatcgcggggaaatcgccgaggggaaacgggccgatctggtgctggcgcaccgtaagggcgagcacattcatatcgaccacgtctggcgtcagggaaaaagggtgttctga

SEQ ID NO: 525438 - DNA, 210 bp, Stenotrophomonas maltophilia; identical to SEQ ID NO: 491571

SEQ ID NO: 525439 - DNA, 1029 bp, Stenotrophomonas maltophilia
atgatcagaattatagggtgctccttctgttcgatcaccgaacacgaaggtcgtattattcagagccgttccgaagagtcgattgttaacgagatcgaagcgattcgcgacacggtcccgggctttaccggcgtaatctccgatttgggtggtccaacggctaacatgtacatgctgcgctgcaaatcgccgcgcgctgagcagacctgtcgtcgtctctcctgcgtctatccgagcatttgcgagcatatggacaccaaccacgagccgacgatcaacctttaccgtcgcgcccgtgacctgaaaggcatcaagaagatcctgatcgcctccggcgtgcgttacgacattgcggtggaagatccgcgctacatcaaagagctggcgacgcaccacgttggcggttatctgaagatcgccccggagcacaccgaagagggcccgctgtccaaaatgatgaagccgggcatgggcagctatgaccgctttaaacagctgtttgataccttttcaaaacaggcggggaaagagcagtatctgatcccatacttcatctccgcgcaccccggcacccgtgatgaagacatggtgaacctggcgctgtggctgaagcagcgtcgattccgtctggatcaggtgcagaacttctacccgtcgccgctcgctaactcgacgaccatgtattacaccggcaaaaacccgctgagtaagattggttataagagcgaagacgtggtggtgccgaaaggggataaacagcgccgtctgcacaaagcgctgctgcgctatcacgacccgaaaaactggccgctgatccgtcaggcgctggaagagatggggaaaaagcacctgatcggctcgcgtcgtgattgcctggtgcctgcgccaacgctggaagagatgcgcgaagcgcgccgccagaaccgcaatacgcgcccggcgctgaccaagcacacgccaattgtgcatcagcgttcgaacggtggggcttcggggacgaaaaaaacgggaaaacgtaagatcggataa

SEQ ID NO: 525440 - DNA, 828 bp, Stenotrophomonas maltophilia
atggcaaaccaaaccgtaatcaagctacaggacggtaacgtgatgccccagctggggctaggtgtatggaaagccggtaacgacgaggtcgtctccgccattcataaagccctggaagtcggctatcggtccattgataccgccgccgcctataaaaacgaggacggcgtggggaccgcgcttgccagcgctggcattccccgcgatgagttattcatcaccaccaagctgtggaacgacgatcaaaagcgtccccgcgaagcgttgcaggagagcctggagaaactccagctcgatttcgtcgatctttatctcatgcactggccggtaccggctatcgaccattacgttgatgcctggaaagggatgattgagctgcaaaaagaggggctgattaaaagcatcggcgtctgtaatttccaggttcatcacctgcaacgcctgattgatgaaacgggcgtcgcgccggtgattaaccagattgagctacacccgctgatgcagcagcgccagcttcattcgtggaacgccacgcacaagatccagaccgaatcctggagcccgctggcccagggcggcgaaggggtgtttgaccagaaaatcattcgtgaactggcggataagtacggcaaaacgccggcgcagatcgtcattcgctggcatctggatagcggtctggtggtgatcccgaaatcggtcacgccatcgcgtatcgccgagaacttcgacgtctgggatttccgcctggataaagacgagctgggtgaaattgcgaagctggatcagggcaagcgtttagggccggacccggatcagttcggcgggtag

SEQ ID NO: 525441 - DNA, 1164 bp, Stenotrophomonas maltophilia
atgaacaactttaatcttcacaccccaacccgcattctgtttggtaaagacgctatcgctggcctgcgcgcgcaaatcccgacggacgcccgcgtcctgattacctacggcggcggcagcgtgaaaaaaaccggcgtactggatcaggtttacagcgctctggaagggctggacgtacgcgagttcggcggtatcgagcctaacccgtcttatgaaacgctgatgaacgcggtaaaaatcgcccgtgacgagcagatcactttcctgctggcggtgggcggcggttccgtgctggacggcaccaaattcatcgcggcggcagcgcattacgctgacggcatcgacccgtggcatattctggaaacgggcggcagcgacatcagcagtgcgatcccgatgggctccgtgctgacgctgccggccaccggctctgagtccaacaaaggcgcggtcatctcccgtaaaaccaccggtgacaagcaggcctttatgaacgaacacgttcagcccgtgttcgcgatcctcgatccggtttacacctataccctgcctgcgcgtcaggtggcgaacggcgtggtcgacgcctttgttcacaccgttgagcagtacgtcacttacccggtgaacgccaaaattcaggatcgtttcgcggaaggcattctgttgacgctgattgaagaaggtccgaaagcgctgaaagagcctgaaaactatgacgtgcgtgctaacgtgatgtgggctgcaacacaggcactgaatggccttatcggtgcaggcgtgccacaggactgggcgacccatatgctcggtcacgagctgacggcgatgcacggtctggatcacgcccagacgctggcggtggttctgcctgcgctgtggaatgaaaaacgtgacgctaaacgcgccaaactgctccagtacgccgaacgcgtctggaacatcaccgagggttccgacgatgcgcgtattgatgccgcaattgcagccacccgtcacttctttgaaagcctgggtgtgccaacgcgtctctctgactacggcctggacggcagctccatccctgccctgctggcgaagctggaagcacacggtatgacgcagatcggcgagcatggcgacatcaccctggacgtcagccgtcgcatttacgaagcggcacgctaa

SEQ ID NO: 525442 - DNA, 900 bp, Stenotrophomonas maltophilia
atgaaccgtgatgccatctgccgccagctaacgtcgcagattaaaagactgatagataacggaaatgattcggctgagctgttgccggatatccgattgctctacggtacccagcccggaacgcgcaccccggtgatgtatcagcccggcatcgtgtttctcttttctggccataagattggctatatcaatgagcgcgtgttccgttatgacaccaatgaatatctgcttctgactgtacctttacccttcgaatgtgaaactttcgcgacagaggaggtaccgctggccgggatccgcgtcaacgtcgacattctccagttgcaggagttgctgatggagattggggaggacgaacttttccggccgtcgatggcggcaagcggtatcaactccgcgaccttatcggaggaaattctctgcgcgattgaacgcctgttagacgtgatggaaaggcctctggatgcgcgtattctcggaaagcagattatccgcgaaattctttaccatgtgctgctgggaccgggcggcggggcgctgctggcgctggtaagccggcaaacgcacttcagcctgattagccgcgtgctgaagcgcatcgagagccagtacacggaaaacctcagcgttgatcagctggcggcggaagccaatatgagcgtctcggcgtttcaccataactttaaatccgtcaccagcacgtcgccgttgcagtacctcaaaacctaccgtctgcataaggcgcggatgctgatgatccacgatggcatgaaggccagcgccgcggcgatgcgggtcgggtatgaaagcgcttcgcagtttagtcgggaatttaagcgttacttcggcgtcacgccgggggaagatgcgtcacgtatcagaaccatgcagggagcgtga

SEQ ID NO: 525443 - DNA, 660 bp, Stenotrophomonas maltophilia
atggctgttattcaaaatatcatcacggcgctctggcaacacgattttgccgcgctggcggacccacatgtcgtcgggattgtctatttcgtgatgttcgcgacgctgtttctggaaaatggattactgccagcctcatttttacccggtgacagcctgctcctgctcgcaggggcgttaatcggcaagggcgtgatggacttcgcaccgacaatggtgatcctcacctctgcggccagtctcggctgttggctgagctacctgcaagggcgctggcttggaaacacccgcgtggtgaaaggctggctggcgcagctgccgcataaatatcatcagcgcgcgacctgcatgtttgaccgtcacggcctgctggcgttgcttgccgggcgttttctggcgttcgttcgcaccctgttgcctaccatggcgggtatttcaggcctctctaaccgccgcttccagttcttcaactggctgagcgccctgctctgggtgggcgtggttaccacactcggctacgcgctgaatatgatcccctttgttaagcgccatgaagaccaggtgatgaccttcctgatgatcctgccgattttcctgctggttgcagggctggtggggaccattgcggtggtgatcaagaaaaagtattgcagcgcataa

SEQ ID NO: 525444 - DNA, 1188 bp, Stenotrophomonas maltophilia
atgactaaaaagcagcttgagaccacgctggtgcaggcaggacgcagtaaaaaatacacccagggctcggtcaacagcgtgatccagcgtgcctcctcgctggtgtttgataccgtcgaagataaaaaaatcgccacgcgtaatcgcgcgaagggcgggctgttttacggtcgccgtggcacgttaacccatttctcgttgcaggaagccatgtgcgaactggagggcggcgcgggctgcgcgctgttcccgtgcggtgctgcggcggtcgccaataccattctggcgtttgttgaacagggtgaccacatcctgatgaccaataccgcctacgagccaagccaggacttctgcaccaaaatactcagcaagctcggcgtcaccaccagctggttcgatccgctgattggggccggtattgccgggcttattcagcccaacacgcgcgttgtgttcctggaatctcccggctccatcaccatggaagtgcatgatgtcccggccatcgtgaaggcggtgcgcagcatagcgccggaagcgatcatcatgatcgacaacacctgggcggcaggtgtgctgtttaaagccctggaatttgacatcgatatctccattcaggcggcgaccaaatacctgattggccactcagacggcatgatcggtacggcggtatctaatgcccgctgctgggagcaattgcgtgaaaacgcctacctgatgggccagatggtggatgccgataccgcctacatgaccagccggggcatccgtacgctcggcgtgcgtctgcgtcagcatcacgaaagcagcctgcaaattgctcagtggctggcgctgcatccgcaggtggagcgcgttaaccatccggcgctgccgggcagcaagggccacgaatactggcaacgtgactttacgggcagcagcgggttgttctcatttgttcttaagaagcgcctgaatgacgccgagctggcaagctatctggataactttaccctcttcagcatggcctattcatggggtgggtttgaatcgttgatcctgcccaatcagccggagcagattgcggccctgcgcccgggcggcgaggtggacttcgaggggaccttaatccgcctgcatatcgggctggaaaatgtggacgatttaattgcggatttatcggcaggatttgagcgcatcgtgtaa

SEQ ID NO: 525445 - DNA, 732 bp, Stenotrophomonas maltophilia
gtgggtaataatttgatgcagacggatctctccgtttggggcatgtatcaacatgctgacatcgtcgttaaggttgtgatgatcggcctgattctggcgtccgtgatcacctgggctatcttcttcagcaagagcgccgaacttctttcacaaaaacgccgcctcaagcgtgagcagaagcagctgacggaagcccgctctctggatcaggcttctgatatcacctcatccttccatgcgaaaagcctgactaccctgttagtgaacgaagcgcagaacgagctggaactctccgcaggcagtgaagataacgaaggcattaaagagcgtaccggcttccgtctggagcgtcgcgttgcggccgtgggtcgtcatatgggccgcggtaacggctacctggcgactatcggcgctatctccccgttcgtcggcctgttcggtaccgtctggggcatcatgaacagctttatcggtatcgcccagacgcagaccactaaccttgcggtcgtcgcgccgggtatcgcagaagcgctgctggcaacggctatcggtctggttgccgctatccctgcggtagttatctataacatcttcgcgcgcatgattggcagttacaaagccacactgggtgacgttgccgcgcaggttctgctgctgcaaagccgcgatctggacctgaacgccagcgccgttaaaccggtgcatgcggcgtccaaactgcgcgtaggttga

SEQ ID NO: 525446 - DNA, 426 bp, Stenotrophomonas maltophilia
atggcaatgcgtcttaatgaaaatctggacgataacggtgaaatgcatgagatcaacgtgacgccgtttatcgacgtcatgctggttctgctgattatctttatggttgccgcgccgctggcgacggtggacgtgaaggtgaatctgcctgcgtcctccagccagccgcagccgcgtccggaaaagcctgtctacctgtccgtgaaggccgataagtccatgttcctgggcaacgatccggtgacggatgcctcggttattccggcgctggaccagctgaccggcggcaagaaagacaccaccgtcttcttccgcgcggataaaaccgtcgattatgaaaccatgatgaaggtaatggacacgctgcatcaggcgggatacctgaagattggtctggtcggcgaagagaaagcggccgcgaagtaa

SEQ ID NO: 525447 - DNA, 438 bp, Stenotrophomonas maltophilia
atgattaacgtgaatgatgatagcggtaataacgtttatttgactttagatgataagaaaagcgatgaatttatcttaaagcagaatctcgacgccctgaaaaagataaaaaatgacgagatgacgcgaataacgcaggacttggtttcgattccggccacgctggtgcgcctgaaatggcagaaccgtcgggaaatttatgccttgcaggccaaagaggagatttacggcgcggtgatgaacgccattattgagctgcgccctgagcttaaagagaagatccttgggcgactggagacgaactatcagtacctgctggcacgcgagacagccaccctgcgcctgacccgtaaactctcggaaggcaactatcgcacatcaaacgtcacctgcgtggcgctcgatgaagaggcgtcaacaacatcttctaactgctga

SEQ ID NO: 525448 - DNA, 405 bp, Stenotrophomonas maltophilia
atgctgcccgacaatcttgtcccggcaaagtaccacattacgcctgtggaacagccttcgacggaagcagataaagaggcgaatttcactcaaggaaaaagaaaactctccgactatgaagccgatatattaattggtgtttcacgcaccggcaaatcccgtaatatggtgctggaagagcacgatcgccatttaaaagaacggttatttcgtgccatcaagattgaagccttagttcatctgctaaatgatttacaggccgaaggggaaatagatgcccaggctctaagtcaaataatggccgagaaaacaaagcaaataaatgaagctggcaatgaaatttggcttaacttaattacgcgtgaaaaaagcaatcccattttttataacctgggggatgattaa

SEQ ID NO: 525449 - DNA, 504 bp, Stenotrophomonas maltophilia
atgaacagcattttcttcacggtcgtaacgttactattactgaccgctggcgtgcttttattgatgcaagagttcaataaaacgaaagtgtcaaatgacgccagtgaaccaccgcagcctgaattgatgtccaaagaggagggggaagatcatttctccgtcttgatgaacgccgtgacgccagtctggtactggcgggtgaatcacgaatatatcgattttctccatgcgacaattaagcgaatgaaaatggccgaaattaatgatacgcccggcctgttcgacgcgcagcgccgctgtagcgaccttaattcggcggtctataaatattacgacaatatcaaaaagcgctgtctgaatggcgagaaggtgtcgtattccgatttagacgtattaaatctgcgccagtgttttcgcgagtttagcctggaagcctacccggaactggtcgcactggtctggccggagtatgcgcgtccggatgtggatcccaacgaggtatag

SEQ ID NO: 525450 - DNA, 489 bp, Stenotrophomonas maltophilia
atggaacgcttctttgaaaacgcaatgtatgcctctcgctggctgctcgcacccgtctattttggtctctctctggcgctggtcgccctgacgatcaagttcttccaggagatattccacgtcctgccaaacattttctccgtggcagaagccgatttgattctggttctgctgtcgatggtggatatgacgctggtaggaggattactggtgatggtgatgttttccggttatgagaatttcgtctctcagcttgatatcgccgagcacaaagaaaagctcaactggctggggaaaatggacgcctcatcgctgaaaaataaagtcgcggcgtcgattgtggcgatttcgtctattcacctgttacgtgtctttatggatgctaaaaacgtcccggataataagctgatgtggtatgtgattatccacctgacgtttgtactgtcggcgtttgtgatgggatatctggataagatcagtaagaaataa

SEQ ID NO: 525451 - DNA, 1041 bp, Stenotrophomonas maltophilia
atgtcctggcacccttacaccggccgatacgaaaacatgcagtaccgatactgcggcaaaagcggcctgcgcttaccggcgctgtcgctgggtctgtggcacagctttggccacgttcaggcgctcgattcccagcgcgcgctgctgcgtaaggccttcgatctcggcattacccattttgaccttgccaacaactacggcccccctccaggcagcgctgaagaaaattttggccgcctgctgcgagaagattttgccgggtatcgcgacgagctgatcatctccaccaaagcgggctacgacatgtggccaggaccgtatggttcgggtggttcacgtaagtatctgctcgccagcctcgaccagagcctgaaacgcatgggcgtggagtatgtggatattttctattctcaccgcgtagacgaaaacacgccgatggaagagaccgccgccgcgttggcacacgcggtgcagagcggaaaagcgctgtacgtcggcatttcgtcctactccacggaacgcacgacggcgatggccgaattgctgcgcgagtggaagatcccgcttttgatccaccagccgtcttacaacctgcttaaccgctgggtcgacaagactggtctgctggacgcgctggagaaaaacggaacgggctgtatcgcctttaccccgctggcgcagggcctgctgaccgggaaatacctgaacggtattccggacggttcacgtatgcagcgcgaagggaaaaaagtacgcggcctgacggagaaaatgctgaccgaagccaacctgagcagccttcgtctgctgaacgagatggcgcacgcgcgcgggcagacgatggcgcagatggcgctaagctggctgttgaaagatacacgtgtaacgtcggtgctgatcggcgcgagccgcccggagcaactggaagagaacgttcaggcgctgaataacctgtgctttaccgaagatgaactgacgcggattgaccagcacgtggcggatggtgagctgaatttgtggcaggcgtcgtcggataaataa

SEQ ID NO: 525452 - DNA, 888 bp, Stenotrophomonas maltophilia
atgacgcgcctgactgccaaagattttccgcaagagctgcttgattactatgactattacgcccacggtaaaatcagcaaacgcgaatttctgaatctcgcggcgcgctatgccgcaggcggcgtaacggcgctgatgctgtttaatatgcttaaacccaactacgccctcgcggagcaggttaaattcaccgatcccgatattcttccggaatacatcacttatccctcgcccaatggtcacggcgaagtgcgcggttacctggtgaagccggccaaagctaccgcgaaaacgcccgcggtagtggtcgtgcatgagaaccgggggctgaatccgtatattgaagacgtggcacgacgcgtggcgaaagcggggtatatcgcgctggctcccgacggcctgagctcggtggggggataccccggcaacgacgacgaaggaaaggttttgcagcagaaggtcgacccgacaaggctgatgaacgacttttttgccgccatagagtttatgaaaaatcatccggaagccaccgggaaggtggggattaccggtttttgctacggcggcggcgtatcgaatgccgccgccgtagcgtatccggaactcgactgcgcggtgcccttctatggtcgtcagccgcgggtggaggatgtgccaaaaattagcgcgccgctcctgcttcattatgccgagctggacaaaaatattaacgagggctggcctgcctatgaggccgcgctgaaatcaaataataaggtttatgaagcgtatatctaccccggcgtaaaccatggatttcacaacgattctaccccacgctatgaccagcccgcagccgagctggcctggtcaagaacgttaagctggtttaaaaaatatctggaatga

SEQ ID NO: 525453 - DNA, 1548 bp, Stenotrophomonas maltophilia
atgaagatgcttcgtaatttcaccatccgtttcgtcatgctgacggtactggggatcttttgtgtcatgtgggcaggcgtggggctttacagcacctggtctctgtctcgtgtttctgatggtaatgacgttgaccgccagctggtcaggcaaatgacggtgctgagccagggcaacgatcagtatttccgtttcgtcacccgcctgagccgggcgatggaagctaaagcagcgggcggcacgccggacctggctcctgctcagcaggcgctggataacatgagtaaaaagctggcagagatgaaggctatctccccgggcccgatggatgaaaaggtctctgcgcaggtgatttccacctggcaggcgctgctcgatcggggcgttacgcctcagatggtgcaggcaaagcaggcgacgctcgaaggctatcgtcagcatgccaacaacgttacgccgccgctaagccgcgcgtttggcgccgcggttgagaactttaacaattctgcggtgaaggcgctcgacagtacgcgcgttgtggtcgacagcctgaccagcatgacccggacggtgattatcaccgccacgctcgtgggtctgctgatcctgctgttcaccgaccgctacctggtggcgctgctggtaaaaccgctggagcgtatccgtcagcagttccgccagattgcgcagggcgatctcagccagccgattgagcccattggccgcaactgcgtggggcaactggttccgctgctgagcgccatgcaggacagcctgcgggaggcggtcagcacgattcgttccggcagcgagaatatctggcgcggggcaacggagatctccagcgggaataacgatctctcttcgcgtaccgaagagcaggccgctgcgctggaagagaccgcggccagcatggaacagcttaccgcaacggtgaagctgaacgccgaaagcgcgcgccaggccagccagcttgcggatgtcgcctccagtacggccagccgcggcgggtcgctggtagacgatgtggtcacgaccatgagcggcatttcggacagctcgaagaaaattgctgaaatcactaccgttatcaacagcatcgccttccagaccaatattctggcgctgaacgccgcggtggaagcggctcgggccggggagcaggggcgcggttttgcggtcgtggcgggtgaggtgcgtaatctggccagccgcagcgcgaatgcggcaaaagagatcgaagggctgattgcggattccgttgcccgcgtggagcagggggcgcagctggtgaacgataccggcacgacgatggaagctatcctgcgcgacgtgacggaggtgaccgtcattatgaagcagatcgccaccgcgtcagaggagcagagcaaaggtatttctcaggtcggcgtagccatcacgcagatggacggcgtgacccagcagaatgcctcgctggtggagcaggtttccgccgctgcggctgcactggaacggcagaccgaagaactccagcgctcagtgcagaagttccgtctctccgcgtaa

SEQ ID NO: 525454 - DNA, 750 bp, Stenotrophomonas maltophilia
atgtcagaccagacgctaaaagcgacccgacagcagagcatcatcaccctgctgagtaaaagtgactggctgaccaccgatgccctggctgaaaagctctccgtcagcaaagagacgatccgccgggatctgaagtcgttacagcagcaggggaaacttctgcgccagcacgggcgtgcgcgtctgattcacccggacagccgcgacagcggtgaaccctttggcgcacgcctgaaaagccattatgccgacaaagccgatattgcccgacacgcgctgggctggatcagcgaagggatgaccatcgccctcgacgccagctcgacctgctttcatctggcgcgccagcttccggatatcgaactcaccgtgtttaccaatagcctgcctgtctgccacgagatggcaaagcgcgagcggatcacgcttatctgctccggcggaacgcttgagcgtaagtatcgctgctatgttaatccggcgctggtgacgcagcttaaagggctggagatcgatctgtttatcttctcgtgtgaaggggttgatgagcatggcgtcctttgggatccgtccgagcacaacgcgggctttaaggcgctgctgttaaaccgggccagccagtcgctgctgctgatcgacaaaagtaaatttatgcgggcaagcgaagtgaaaatcggtcagctgtcgcaggtgacacagattattcagagcgataaatgtcaggccgccagagacggcctgacgcgatga

SEQ ID NO: 525455 - DNA, 867 bp, Stenotrophomonas maltophilia
atgtcagataacacctatcagccaccgaaagtgtgggaatggaaacagaataacggcggcgcgttcgccaatatcaaccgtcccgtctcgggcgctacgcacgagaaagagctgcctgtgggcgagcacccgctccagctgtactctctgggtacgccgaatggacagaaagttaccatcatgctggaagagctgctggcgctgggcgtgacgggcgcggaatacgacgcatggttaatccgcatcggtgagggcgatcagttctccagcggttttgtcgacgtgaacccgaactcgaagatcccggcgctgcgtgaccactccaccaccccgccgacgcgcgtctttgaatccggcaatatcctgctctatctggccgagaaatttggtcacttcctgccaaaagatccggcaggacgaacggaaaccctgaactggctgttctggttacagggcgcggccccgttcctcggcggcggttttggccacttctataactacgcgccggtgaagattgagtacgctatcgatcgcttcaccatggaagctaaacgcctgttcgacgtgctggacaagcagctggggcgcggtcgttatgtagcgggtgaggaatataccattgcggatatggcagtctggccatggtttggctgcgtggcgctgggcagcgtctacaacgccgccgaattcctcgacgccgggaagtacaccaacgtgcagcgctgggcaaaagatgtggcgaatcgcccggccgttaaacgcgggcgcattgttaaccgcaccaacggcgagctgaacgagcagctgcatgagcgccattcagcgagcgacttcgatacccagacggaagataaacgtcaggattga

SEQ ID NO: 525456 - DNA, 1863 bp, Stenotrophomonas maltophilia
atgcgtaaaggaacgttaagcagtgacgcacccttcgggacgttattaggttatgcgccgggtggcgtggcgatttactcttcaaattacggcagtctcgatccgcggcactacccggaagacgcggaattccgcagctatatcggcaacgaatacatgggccataaatggcagtgcgttgagtttgcgcgccgtttcctgtttctcaaccacgggtttgtctttaccgatgtcgggatggcgtgggagatcttctccctgcgttttttacgccaggtggtgaatgacaacatcctgccgctacaggcctttgctaatggctcgaagcgcgcgccgcaggccggtgcattgctcatctggcaaaagggcggtgaatttcaagagaccggccacgtcgccgtcatcacccagttgctggacgacaaagtgcgcattgccgagcagaacgttattcactccccgctgccgatggggcagcagtggacgcgcgagctgcgtctgagcgttgagaacggttgctatacgcttcatgatacgttcagcgataccgagatcctcggctggatgatccagacggaggagacggaacacagtatacctcagccggagatcgacggtgagctgctgaaaatcagcggcgcgcggttgaagaacaaccgtcagttcgacggaaaatggctcaatgaaaacgacgccctgcaacaggcgtacgttcgcgcgaacggccacgttattaacaacgatccctgccagtacttcaccattaccgaaagtgccgagcaggagctgatcaaagccaccaacgaactgcacctgatgtaccttcatgccaccgacaaggtgctgaaagacgacagcttactcgcgcttttcgacatcccgaaaattctctggccgcgtctgcgcctctcgtggcagtggcgtcgtcaccatatgatcaccggtcgtatggatttctgcatggatgagcgcggcattaaggtttacgagtacaacgcggactccgcctcctgccataccgagggcgggctgattcttgaagagtgggtgaaaaacggctatcgcggcaccggccacaatccggcggaaggcttgctggaggagctgaccggcgcctggaagcacagccacgcgcggccgttcgtccatatcatgcaggacaacgatatcgaagaggattaccacgcgctctttattcagcgctcgctgatcctggccgggtttgaaaccaaaatcctgcatggactgggcgcgctgagctgggatgctgccgggcaactgattgatgatgaaggccgtcacgtcaactgcgtatggaaaacctgggcgtgggaaacggcgatcgagcagatccgcgaggtgagcgaaaccgagtacgccgccgtgcccatccgtaccggtcacccgcaaggtgaagtgcgcctgattgacgtcctgctgcgcccggaagtgctggtctttgaaccgctgtggacggtgatcccaggtaacaaggcgatcctgccggtgctgtggcagctgttcccgaaccaccgttacctgctggataccgattttgaggtgaatgcgctgctgaaacggacaggctatgccgttaaaccgatagccggacgctgcgggagcaatatcgatctgatcggcgcccaggatcaactgctggaccagtccagcggcaagtttgttgaccgcaaaaatatctaccagcagctatggtgcctgccaaaggttgacggcagatacatacaggtctgcacctttaccgtgggcggaaactatggcggaacctgtctgcgtggggatgactcgctggtggtgaagaaagagagcgatattgaaccgctgattgtggtgaaggataaataa

SEQ ID NO: 525457 - DNA, 435 bp, Stenotrophomonas maltophilia
atgaacgagaatacgttaattttgactgaacatcggctggcaccgcgtcttttcgatgccgcactaacgctgatagcctggggaggattcctgtttttcctgtatgccaggctgtggatgcagttaaccgaggcgagcgatcaccgctggagcgtgattatcgcctcttttaatacagtactggtctatctgctgattgccgcgttcaacggctggctgctgatcctgtggtatcagtacaatcgccgccgcgcgcatgtgaggcggcgtcatccgcaaatgttgcgccatgacgagcttgcccaaagttttaacgtcacgccgcaaattatgtccgagatgagccagtacaacctgctgacggtctatcatgaccagatcggccgcatcattgatctgaagatcagcgagcagcaggtcgaggaagaagagtaa

SEQ ID NO: 525458 - DNA, 1332 bp, Stenotrophomonas maltophilia
atgactgatcgcattatcgccttctctattttgtgtctggtattcgggttgccgttaggcgtagccgcgctgtttaccggcgaactgattctggactttgtctttttctggccgctgtttatgtccgtgctctgggtaaccggcggcctctatttctggtttcagcttgaacggcactggtcgtgggataacgcaacacccgcgcctgccttagccggtgaaccgttaatctcgattcttattccctgctttaatgaggaacgcaacgcacgggagaccattagcgccgcgctgggtcagcggtactggaatgttgaggttatcgccatcaacgacggctcttcggacaataccgcgcaggtgctgcatcaactggcgcaggagcagccgcgcctgcgggtgattaatctcgctgagaatcaggggaaagccgtggcgctcaaggctggtgcggcggcggcccggggcgatctgctggtctgcattgacggcgacgccctgctcgatcgcgatacggccgcgtatctggtggcaccgctgattcagtatccccacgttggggccgtcaccggaaatccgcgtattcgcacgcgctcaacgctgattggtcgtattcaggtgggcgagttttcttccattattggtcttatcaagcgaacgcagcggatctatggccgggtctttacggtctccggcgtcatcgccgcctttcgccgacaggcgctggcggatgtcgggtactggagcccggatatgatcacagaggacattgacataagctggaagcttcagctgcgccactgggatatctttttcgagccgcgggcgctgtgctggatcctgatgccggagacgctcaaggggctgtggaaacagcgtctgcgctgggctcagggcggtgcagaggtgtttctggttaacctgcgcaaaatggcccgctgggagcatcatcggatgtggcccctgtttctcgaatacgcgctatcaacgctgtgggcgtttgcctatggagcgaccgtggtgttgttcattcttagccatattatccctcttcccgcgaacctggccgttgcgagtctgtttcccccggcgtttaccgggctgctgctgggggtgatgtgcctgctgcaattcctcgtcagtttgtatatcgagcggcgctacgagcggaaagtggcaggctcgctgttctgggtgatttggttcccgatggtgtactggatgattggcctgtttaccaccctcgtggcatttccgaaagtcatgcttaaacgtaaacgcgcccgcgcgcgctggatcagtccggaccggggaaaagggagcattcaatga

SEQ ID NO: 525459 - DNA, 1938 bp, Stenotrophomonas maltophilia
atgctgaatacacgtttttctgtaagcctgatcgtcatcggctggctctgcctcagcgcgagtctctgcgcgcagccgctctcctttatggctcctgaagagaggccgcagctggaggccagcaaaccctggccggagaatcagtttctggtcctggcctaccacgacgtcgaagatgatgctgccgatcagcgctacctctccgttcgcaccagcgcgttaaacgagcagataagctggcttttgcacaacggctatcacgccatcagcgtgcaggacattgtggatgcgcatgaaggaaaaaaagcgctgccgccgaaagccgttttgctcagcttcgacgacggctacagcagtttttacacccgggtctggcccctgcttcaggcctggaacgttcctgcgctgtgggcgccggtgggcagttgggtggatacgccggcaaatcaaaaagttaacttcggcggtctgatgacgccccgcgatcggttcgctacatgggacatggtacgcgagctcagccgctccccgctggttgaaatcggctcgcatacctgggcctcgcattacggcatcccggccaacccgcagggaagccgtgaacccgctatcgccaaccgttttttcgataacgtgacggggcattacgaaaccgatgaacacttcaaccagcggatcgccgcagacgtacggaaagtcaccgaaaaaatcacccaggtgacgggaaaagcgccgcgtgcctgggtgtggccctatggggctgccaacggtacatcgctcgctatcgcccagaaacagggctatcagctggcctttaccctggaggacgggctggcaaacgtgcgcgacctcggcaacatcccgcgcctgctgattgccggaaatccgtcgataaaaacctttgccaacacggttagccgcgttcaggagtttgacccggtgcgcgtcatgcatgttgatctcgattatgtctacgatcccgatccggcccagcagacgaaaaacatcaacaaactcgtccagcgggtctacgacatgaaaatcagccatgtgtttctccaggcgttttcggatccgcggggcgacggcaggatcggcgcgctctatttccccaaccgtcgtcttccggtccgggccgatctttttaattttgtcgcctggcagctacaaacccgcgcgggagtgaaagtctttgcgtggatgccggtcctctctttcgatctcagtccagccctgccgcgcgtgcagcgccgggatcgccaaacgggagagttgaccgtggccgccgagccctatatccggctctccccctggagtccacaggttcgccaacaggtgacggagatctatgaagatctggcccgctatgccagcttcaacgggatcttgttccatgacgacgcggtgctgacggacgttgacgatgccgggcaggagacgacgcgccagaaaagccagcagcttatcggctttacccgcaccctgagccaggcggtgaaaaacatccgtggcccgcagatcaaaaccgcgcgcaatatgttcgccctccccattctgcagcccgaaagcgaagcgtggtttgcgcaaaatctggatgattttctgtcggcctacgactggacggtgccgatggcaatgccactgatggagtccgtcccggcagaagagagcaatgcctggctgacgcgtttagtcaacgccgtcgccgcacgccccggcgcgctgaataaaacgatttttgagctacaggccagggactgggcgcagaaaccgcagcgtgccgtagccgatgaacgtctggtggagtggatgcaggtgctccagctgaacggcatcaaaaattacggttattaccccgacgacttcctcaacaaccaacctgatatttcgcgtatcaggcctgaattttcttcgtactggtatcctgacaatgactga

SEQ ID NO: 525460 - DNA, 2439 bp, Stenotrophomonas maltophilia
atggaaagatcgcttagcttcactacgttattcttttatcgcaccacaatattattgttcctgcttttactctttcctgttctggttcaggctgatgaatccgtttatgagcatcagatacaacaggcacgtaacggtaattacgctctgtttcttgattacctacagcgctatgagcaacagcatgctttaacacctggacaggttgcggactggttacaggtagcctcctgggcaggacgcgatgatgaggttattcgagtctggcagcgttatggtatttatatgccgctgcccgctcgcgccatcgctgctgtcgcccagtccagaagaaaccaaaaagcctggccatccgccttatcgctgtggaaagaggcgctcagccttgcgccggataacgacgattaccgcatcggctatgttaagaccctggccgatgcccgcagagatcgcctcgcgctttcgaaagcccggcagctggttaaggacgatccttctcccgcgcaccttgagacgctctcctatgtctggatgcgccagggaaaaaacgcggaccggctgctggcggacatgcgcgcgctaaacgccgcaccggggaataacgcccttcttcgcgagacgatcgatgcgttaacggataaccgggtaagcacacccgcactctggctgtcgcaaagcgcagcgatgtcccccgcggagcgtcgccgccttgagcgtaacgccgcggctgaaaaggtacgcctggcggatgtgcctggcagaacggagaaagagcggctgcggctggcacaaaacgcattagatcgctatcacgtcctgctttcccgctggcaaaacgaaccgcaggcggctgaagacgtcatccttgcccgtatcgatcggcttggcgcgctgtatgcgcagggtgattaccggcaggttattagcgaatatgaggcgctgacgaccgcacagcatccggtgccggactgggccatcggctgggtgatctctgcatatttgcaggagaaaaacaccgtcgccgccttctcgcttgtacaacgctatccacactacgcctccgatccgcaggatgaggagcatgcgcttttctacgcctggctggatacggggcagtatcaaaccgcccgccgctacgttgagcgcgagacccgcagcgttccctggacccgctacgatttcggatccccgaccgctcagccgaacgatcggtggctcaccggacagtcactcaaacttaactatttgctggcgaccaacgccctgccggaagccgaaaagctgtcgtatcgtctggcgtcaacggcgccgggaaatcagggattacagattgattatgccgccctgcttcagggcaggggcctgccgcgcgcggccgagcaaaagcttaaacgagcagaggcgctcgaacccacgaatctggagcttgaaaaacagcaggcttacgtcgcaatggaccttcaggagtggcgccagatggatttactggctgatgacgtaattgctcgcgcccccgccgatcgcagcgcccgccgcctggacaggctcagagcggtccaccatatgtcagagctgcgtctgaacgcgggtaaaggattgcactcagataaccccgtcagcggtagccacgacatgagctgggacgccacgctctatggcccacccgtggcagataactggcggctatttgctggcgcccgctatgcacaggggaatttcgacgaaggtaaaggcatcagccgccacctgttgggcggcgttgagtggcgcccacgtgacctcacgctcgaagccgagctctccagcaaccgctatcacggcacaaacaggccgggcgcacggctctcaacaacctacagcctgagtgataactggcaggtcagcggtagcctcgagcgcttatcacgcgcgacacccttacgggcattacgcaatgggatcagtgccaaccggggtgaaggtggggtgcgctggtatcaaaacgagcgacgtgaataccagttcaacgccgccgtcagccgcttctcagaccacaaccgccgtcaggaatacaccctctctgggaaagagcgtctctggcagaccccgaccctgacgctggatctcgaaccggggatcgccgccagtaaaaacagcctgcggaatacgctctattacaacccggcacgggatctgtccgtgacggcagccctgtccgttgaccatgagatgtaccgccactacgacaccctctggagccagctgttcgtggcaggcggcggcagctactggcagaaaaatcagtcgcctggcgccattaccctgctgggttacgggcaacgcattcagtggaacaacgttgtcgatactggcgtgatgctgaactgggataaacgcccttacgacggcaaacgcgagagcaatctctccgtcacgttagatgcgactttacgcttttaa

SEQ ID NO: 525461 - DNA, 633 bp, Stenotrophomonas maltophilia
atgatgatctcatatcaggaacttgttcgcaccttccctaaatatggtaatggcattgtgattgtacgaattaaattccccctgattttattgtttattattgcgcagttatcatttgcgtctgctgttaatgcacagagcaatacagcggataaaagctggttcaccaccttcacggataacgttgcgcaaacatggaacgaacctgaacattacgatctctatattccggccattacgtggcatgcacgttttgcctacgataaagaaaaaacagaccgttataacgagcgtccgtggggggctggtttcggtcagtctcgctgggatgaaaaaggtaactggcatggcctgtacctgatggcgtttaaggactcctacaataaatgggagcctattggtggctacggctgggaaaaaacctggcgtccgttatcagacgacaacttccgtctgggactgggctatacggcagggtttacggcgcgtgataactggaagtacattcctgttccggtactgttgccgcttgcctccatcggctatggtcctgcaacgtttcagatgacctacataccgggtacgtataacaacggtaacgtttactttgcctggatgcggtttcagttttaa

SEQ ID NO: 525462 - DNA, 210 bp, Stenotrophomonas maltophilia; identical to SEQ ID NO: 115107

SEQ ID NO: 525463 - DNA, 282 bp, Stenotrophomonas maltophilia
atggggacactggcggcaaacctgatcggggcatttatcatcgggatggggctggcgtggtttaatcgcatgaccaatatcgaccctatgtggaaggtattgattacgaccggtttctgcggcggtttaacgacgttttctaccttctctgcggaggtggtgtttctgtttcaggaaggccggatgggctgggcgctgacgaacattgctgttaacatgcttggctcgtttgcgatgactgcgatcgcattctggttattttcctccgccagcggacattaa

SEQ ID NO: 525464 - DNA, 789 bp, Stenotrophomonas maltophilia
atgtatgttgcagtagggcagtttgcggtgacgccggactggaatgaaaacgcggacaagtgcatctccctgatgaaccaggcgaagcaaaaaggggcggcgctgctggtgcttcctgaagcgttactggcgcgcgatgatggcgatccggacctgtcggtaaagtctgcgcaaatgctggaaggggcgtttctgaaacgactgctggccgaaagcgtcggtaacgcgctcaccaccattttgactatccatgttccctccacgccggggcgggcggtgaacacgctggtggcgatacgtgaaggcgctattgtcgcaagctacgccaaacttcatctgtatgatgcgttcagcgtccaggagtcgcgactggtcgatccggggagtgtaattccgccgctgattgaggtggagggttttaaggttggcctgatgacctgctacgatatccgttttccggagctggcgctgaacctggcactacagggggccgaggtgctggttctgcccgccgcgtgggtcagaggaccgcttaaggagcatcactgggtaacgctactggccgcacgcgcgctggacaccacctgctatgtagtggctgcgggtgaatgtggcaataaaaatattggacagagcagggttgtcgatccgctgggagtgaccgtagccgcggcggcggaagcgcctgctttactgctgacggagataacgtcagcacgaataacgcttgcgcgtcagcaattacctgttctgcgcaaccgcaggtttgcgccaccgcaattaatatga

SEQ ID NO: 525465 - DNA, 204 bp, Stenotrophomonas maltophilia
atgggtgagattagtattaccaaactgctggtggttgccgcactggtcgtcctgctgttcggtaccaagaagttacgcacgctgggtggagacctgggtgctgccattaagggctttaagaaagcaatgaacgatgacgacgcggcagcgaagaaaagtgccgaagatgacatcgcagcacagaagctttcacacaaagagtaa

SEQ ID NO: 525466 - DNA, 966 bp, Stenotrophomonas maltophilia
atgagtaaacccattgtgatggaacgcggtgttaaataccgcgatgccgataaaatggcccttatcccggttaaaaacgtggctacagagcgcgaggcgctgttaagaaaaccggaatggatgaaaattaaacttccggctgactcttcgcgtattcaggggatcaaagcggcgatgcgcaaaaatggcctccactctgtctgtgaagaggcctcctgccctaaccttgctgaatgtttcaatcacggtaccgcgacgtttatgattctgggtgccatctgcacccgccgctgtccgttctgtgacgttgctcatggccgtcctgttgcgcctgacgctaacgaaccgcaaaaactggcgcagaccattgccgatatggcgctgcgttatgttgttatcacctccgttgaccgtgacgatctgcgcgatggcggtgctcagcatttcgctgactgcattaccgccatccgcgaaaaaagcccgaacattaagattgagacgctggtgccggacttccgtggccgtatggaccgcgcgctcgatatcctgaccgtgacgccaccagacgtgttcaaccacaacctggagaacgtaccgcgtatctaccgtcaggtgcgtccaggtgcagattacaactggtcgctgaagctgctggagcgctttaaagaagcccatccgcatattcctaccaagtctggcctgatggtgggactgggtgaaaccaacgctgagatcattgaagtgatgcgcgatctgcgccgccacggcgtcaccatgctgacgctggggcagtatctacagccaagccgtcaccatctgcctgtacagcgttacgtgagtccggatgagttcgatgaaatgaaagccgaagcgatggcgatgggctttacccacgctgcgtgcggtccgtttgttcgctcctcttatcacgccgatatgcaggcgaagggcgaagaagtgaaataa

SEQ ID NO: 525467 - DNA, 303 bp, Stenotrophomonas maltophilia
atgtccgaaggacaggggcaggatccgctgcgacaacgtattgacgaactcttcccggaccgtccgatcagctttagcagttacaatatgtttaccctcgcggccctgattggcagcagcgacttgctctgtatcatgcctgtgcgtctcttcactttgcttcaaaagtgctggccactggagagcattccattaagtcaacttacgacggaatctattgaaatctcactgcattacaacaagctaagcctgcgcgatccggtgctggaaaacgtcatcaatgtgatccgccagactttttga

SEQ ID NO: 525468 - DNA, 501 bp, Stenotrophomonas maltophilia
gtggagcctactaatttaccagccaaacgcctgaatgaaaccagcggcgaagataagccgcaaatttttcggactttacgtaatattgatctcaatttattgactatttttgaggcggtatatgtccataaaggtatcgttaatgctgcgaaaattcttaatctcacgccctctgctattagccagtcaattcaaaaattgcgcgcgatatttcccgatccgttatttattcgtaaaggccagggcgtaaccccaaccgcgtacgccacccatctgcacgagtacatcagccagggtctggaatcaatactgggcgcgctggatctcaccggcagttacgataagcaacgaactatcaccataggcacctctccctcagtgggcgttctggtcatgccggccatctatcaggcggtgaaacagcatgcgccacagttgcttaccgcaacgtgcccgtcaccgatccggaaacacagctggcgcaattccagacggacctga

SEQ ID NO: 525469 - DNA, 642 bp, Stenotrophomonas maltophilia
ttgtaccaggataaaattcttgtccgccatcttgggctacagccttacgagcctgtctctcaggctatgcatgactttaccgacaggcgcgatgacaccacgcctgatgaaatctggctggttgaacacctgccggtgttcactcaaggccaggcaggaaaagccgaacatttattgatgacgggcgatatcccggtgatccagagcgatcgcggtggacaggtgacctaccacggcccgggccagcaggtgatgtatgttctgcttaacctgaaacgcagaaagctgggcgtgcgtgagctcgtgaccttactggagcaaaccgtggtgaatacgctggctgagtacgatattgacgctcaccctcgcgccgatgccccgggcgtttatgtgggagagatgaagatctgttcgctggggctgcgtatccgaaaaggctgctcgttccacgggctggcgctgaatatcaatatggatttggcccccttccagcgcatcaacccatgtgggtatgccggtatggaaatgacgcaaatgcgccagtgggtcgataccgccacgcctgacaatatccggcccgtgcttctgaagaactttttagcactgcttaacaatcccacctacgaatatattgctgcttaa

SEQ ID NO: 525470 - DNA, 264 bp, Stenotrophomonas maltophilia
atgaaaaccaaacttaacgaactgcttgaattccctaccccttttacttacaaagtaatgggtctggcgaaacctgagctggttgatcaggtggttgaagtggtacagcgccatgcgccgggcgactactctccatcagtcaaaccgagcagcaaaggtaactaccactcggtctcaatcaccatcactgcgacacacattgagcaggttgagacgctgtacgaagagctcggcaatattgaaattgttcgtatggtgctgtag

SEQ ID NO: 525471 - DNA, 1212 bp, Stenotrophomonas maltophilia
atgaagaccactttttctgctcgttttgtgcagcgcatggcgctgaccacggccctttgcgctgctgcgttctccgcagctcacgcggatgacctgaacatcaagaccatgatccctggcgttccgcagatcgacgcggaatcctacatcctgattgattacaactccggcaaagttctggcagaacagaacgccgatgcccgccgcgacccggccagcctgaccaaaatgatgaccagctatgttatcggccaggccatgaaagcgggtaaatttaaagaaaccgatctggtgactatcggtaacgatgcgtgggcaaccggcaacccggtgttcaaaggttcatcgctgatgttcctgaagccaggcatgcaggttccggtctctcagcttatccgtggcatcaacttgcagtccggtaacgacgcctgcgtggcaatggccgattttgcagcgggcagccaggacgcgtttgtgggcctgatgaacagctacgtctctgcgctgggcctgaaaaacagccacttccagaccgttcacggcctggacgccgaaggtcagtacagctccgcgcgtgacatggcgctgatcggtcaggcgctgatccgcgacgtgccaaacgagtactctatctataaagagaaagagttcaccttcaacggcattcgtcagaccaaccgtaacggcctgctgtgggacaatagcctgaacgtcgacggcatcaaaactggtcacaccgacaaagccggctataacctggtggcttctgccactgaaggccagatgcgtctgatctctgccgtgatgggaggccgcacgtttaaaggacgcgaaacggaaagtaaaaaactgctgacctggggcttccgcttcttcgaaaccgtgaatccgctgaaagccggtaaagaatttgcctctgaacctgtctggtttggcgataacgaccgtgcttccctgggtgtggacaaagatctctatctgacgatcccacgcggtcgtatgaaagatctgaaagccagctacgtgctgaataccaccgagctgcacgccccgctgcaaaagaatcaggtcgtgggtaccatcaacttccagctggatggcaaaaccatcgatcagcgcccgctggtggtgctggaggaaattcctgaaggcaatttcttcggcaaaatcattgattacattaagctgatgttccatcactggtttggttaa

SEQ ID NO: 525472 - DNA, 1107 bp, Stenotrophomonas maltophilia
atgcgtaagcagtggctggggatctgcatcgcagcaagtttacttgccgcctgtacaagtgatgatggtcagcaacaggcaaccgtcgcgccgccgcagcctgcggtctgtaatggcccgattgttgaaattagcggtgccgatcccgtttatgaaccgctgaacgccagcgtgaatcaggattatcagcgcgacggtaaaagctataaaatcgttcaggatccttcccgtttcagccaggccggctttgctgccatctatgacgctgagccaggcagcaatctgaccgcgtcaggtgaaaccttcgatccgatgcagatcacggcggcacacccgacactgcctattccaagctatgcgcgcatcactaacctggcgaatggccggatgatcgtggtacgtatcaacgatcgtggcccttacggcaacgatcgcgtgatctccctgtcacgcgcggcagccgaccgtctgaatacctcaaataatacaaaagtgcgtatcgacccgattatcgtggcgcaggatggttcgctgtctggcccgggcacggcctgtaccacggtcgcgaaacagacctacgccctgcccgcgcgcccggatctaagcggtggtatggggggcgcttcaatgccagcagagcccgcgcagccgcagggtgaagtgcacgccatcagcaacgatacgctacaaagtgaagatgcgacaggcgccccggtgaaaagcagtggtttccttggtgcacccaccacgttagcgccgggcgtgattgaatcaaatgaacctgccccagcgcctgcgcccgttgttgctgcacccgctacacaacccgccccggtgaccgcaccggctgctacgcagactgcggcgcctgcgacggcgagcggcagctacgtggttcaggttggcgccgtcagcgatcgggcccgtgcagagcagtatcagcagcgtttaagccagcagtttggcgtgccaggccgcgttgagcaaaacggtgcggtatggcgtatccagatgggtccgtttgccagcaaatcgcaggcagcgtccctgcaacagcgtttgcagagcgaggctcagctccagtcgtttatcgctgttgcgaagtaa

SEQ ID NO: 525473 - DNA, 1056 bp, Stenotrophomonas maltophilia
atgacggataatccgaataaaaaatcgctgtgggataagatccacatcgaccctgccatgctgctgatcctgctggctctgctggtgtacagcgccctcgttatctggagcgccagcggccaggatatcggcatgatggagcgtaaagttggccagatcgccatgggtctggtcattatggtggtgatggcgcaaataccaccgcgcgtgtatgagggctgggcgccctatctctatattttctgtatcattttgctggtggcagtagatgcgttcggtgctatatcgaagggggcgcaacgctggctggatctggggattgtccgcttccagccgtcagaaatcgccaaaatcgccgttccgctgatggtggcgcgcttcattaaccgcgacgtctgcccgccgtcgttgaagcctgacctcggtacctcgattctcatcgccctctccggcctgttcgtcctgttcctgtccggcctgagctggcgtctgatcggcatcgcggtggtcctgctggctgcctttattcctattctctggttcttcctgatgcatgattaccagcgccagcgcgtgatgatgctgctcgatcccgagaccgatccgctgggcgcaggctatcatattattcagtcgaagattgcgattggctccggcggcctgcgcggaaaaggctggctgcacgggactcagtcgcagctcgaatttttaccggaacgccacaccgactttatctttgccgttctggctgaggagttagggctggttggcatcctggtgctgcttgcactctacgtgctgttgatcatgcgtgggctctacattgccgcacgcgcacagaccacctttggccgggttatggcgggtggattaatgttgattttgttcgtttatgtcttcgtaaatattggtatggtgagtggtattctgccggttgttggcgtaccgctgccgctggtgagttacgggggctcggcactgatcgtgttgatggccgggtttggtatcgtcatgtcgatccatacccacaggaaaatgttgtccaaaagcgtataa

SEQ ID NO: 525474 - DNA, 1902 bp, Stenotrophomonas maltophilia
atgaaactacagaattcttttcgcgactatacggctgagtccgcgctgtttgtgcgccgggcgctggtcgcctttacggggattttgctgcttaccggcgtgctgatcgccaacctctataatctgcaaattgtccgctataccgattaccagacccgctcaaacgaaaaccgtatcaagctggtacccatcgcgcccagccgcggcattatctacgatcgtaacggcaccccgctggcgctaaaccgcaccatctaccagatagagatgatgccggagaaagtggataacgtgcaggatacgttgaacgcgctgagaagcgttgtcgacctgactgatgacgacatcgctgcgttcaaaaaagagcgcgcacgttctcaccgcttcacctctattccggtaaaaaccaacctgacggaagtgcaggtcgcccgttttgccgttaaccagtaccgtttccccggtgtggaagtcaaaggctataaacgccgctactatccttacggctccgcgctgacgcacgtcattggctacgtctccaaaattaacgataaagacgtcgaacgccttgataaagacggcaagctggctaactacgccgcaacccatgatattggcaagcttgggattgaacgttattacgaagatgtcctgcacggtcagaccgggtatgaagaggttgaagttaacaaccgtggccgcgtgatccgtcagctcaaagaggttcccccacaggcgggacatgacgtttatctgacgctcgacctgaagctacagcagtatatcgaaacgctgctggcgggtagccgggccgccgtgatcgtgaccgacccgcgtaccggcggtattctggcgatggtttctatgccaagctacgatccgaacctcttcgtggatggcatctccagcaaggattactccggcctgctcaacgatccaaacaccccgctggtgaaccgcgccacgcagggggtttatcctccagcctcaacggtaaaaccgtatgtcgccgtttctgcgctgagcgcgggcgtcattacccgtaataccagtctgtttgaccctggctggtggcagttacctggctctgaaaaacgctaccgtgactggaaaaaatggggtcacggccatctgaacgtgaccaaatcactggaggagtcggcggataccttcttctatcaggtcgcctacgacatgggaattgatcgtctgtctgaatggatgagcaaattcggctacggacattacaccggtatagatttggcggaagaacgttccggcaacatgccaacccgcgaatggaagctgaagcgctttaaaaaaccctggtatcagggtgataccattccggtgggcatcggccagggctactggacggcaacgccgctgcaaatgaacaaggcgatgatgatcctcatcaacgatggcgttgtgaaagtaccgcacctgctgcaaagcaccgtagaagacggcaaaaaagtgccatggatacagccgcacgagccgccggtgggtgacattcattccgggtactgggaaatcgccaaagacgggatgtatggcgtagccaaccgccctaacgggacggcgcacaaatatttcgctggcgcaccgtataaggttgccgcgaaatcaggtacggctcaggtcttcggtctgaaagcgaatgaaacctataacgcacataaaattgccgaacgtctgcgtgaccacaagctcatgacggcgtttgccccttatgataacccgcaggttgcggtggcgatgattcttgagaacggcggcgcaggcccggcggtgggtaccatcatgcgtcaaatcctcgaccacatcatgctgggtgataacaacaccgaactgccagctgaaaacccggcagccgctgcggcggaggaccaataa

SEQ ID NO: 525475 - DNA, 468 bp, Stenotrophomonas maltophilia
gtgaagttgcaactggtcgccgtcggcaccaaaatgccggactgggtacaaaccggttttactgagtatctgcgtcgtttcccaaaagatatgccgttcgaactggtggagatcccagcaggaaagcgcggcaagaacgcagatatcaaacgtattctcgataaagagggagagctgatgctggctgccgcaggcaaaaaccgcatcgtgaccctcgatatcccgggaaaaccctgggatacgccgcagctggcgcacgaactggagcgctggaagcaggatggtcgtgatgtcagtctgttgattggcggaccagaggggttatctcccgcctgcaaagcggcagcagaacaaagttggtcactctcggcgctgacgttgccccacccgcttgtgcgggttctcgtggcagaaagtttgtatcgcgcatggagcatcactaccaaccacccttatcaccgcgagtaa

SEQ ID NO: 525476 - DNA, 318 bp, Stenotrophomonas maltophilia; identical to SEQ ID NO: 115094

SEQ ID NO: 525477 - DNA, 639 bp, Stenotrophomonas maltophilia
atgtatggcgggaccttcgacccggtacactatgggcatcttaaaccggtagaaatcctcgcgaatttgattgggttgcagcgggtaatcatcatgcccaacaatgttcctccgcatcgtcctcagccagaagcaaccagcgagcagcgcaaagcgatgctcgcgctggctatcgcagataagcctctcttcacgctggatgagcgcgaattgcgcagggataccccttcctggacatcgcaaacgctgcgggagtggcgcgctgagcaggggcctatgcaaccgctggcgtttatcatcggccaggattccttgctcaactttcccagctggtaccagtacgaaaccattctggaaaacagtcatctgctggtctgccgccgtccgggctacccgttgaccatgcgcgacgcgcagcatcagcagtggcttgacgcgcatctgacggacaatatagaagacctgcacagtctacccgccgggaaaatttacctcgctgaaacgccgtggtttgatatttccgcgaccctcatccgcgagcgtctccagcagggtttagactgtgacgatctcctgccctcgcccgtgctggcctatatccacgcacacggtttgtatcagaaaagtacagatgcctga

SEQ ID NO: 525478 - DNA, 1032 bp, Stenotrophomonas maltophilia
atgatcaggttgtatcctgaacaactccgcgcgcagctcaacgaagggctgcgcgcggcctatctgctactcggcaatgaccccctgttacttcaggaaagccttgatgcggttcgccatgcggcagccgcgcagggtttcgatgagcatcatacgttccagatcgataacagtaccgactggaacgctatcttctcgctttgtcaggccatgagcctgtttgcctctcgtcagacaatccagatcgtgctgccagagaatggtcctaacgcggccatcaatgaacagctgaccatgctggtgagtttattacacggcgatctgctgcttatcgtacgcggtaacaagttcacgaaagcgcaggaaaacgcggcctggtttacccagcttgccaccaatgcggtactggttacctgccagacgccagaacaggcgcatctgccaaaatgggttgccgcgcgcgcaaagctgcacaatctgcaactggatgatgccgccagccagctcctttgctattgctatgaaggcaaccttctggcactggcgcaggcgctggacaggctcgccctactgtggcccgatggcaagctgacgctaccgcgcgtggaacaggcggtgaatgatgccgcgcactttactcccttccactgggttgatgcgctgctgtcggcgaaaagtaagcgagccctgcacatactgcaacagctgcgcctggaagggagtgagccgatcattctgctccgcacgctccagcgcgaattactgctgctgaacaaccttaaacgtcagtcggcacatacgcccctgcgcgccttattcgataaacatcgcgtctggcagaaccgtcgggcgatgaccacggaggcgataaaccgcctgagccaggagcagttgcgtcaggcagtgcaacttctgatgcgcgccgaactgacgttaaaacaggactacggccagtctgtctgggcggagctggagagcctctctttgctgctctgccataaggcgctggcagacgtatttatcgatgggtga

SEQ ID NO: 525479 - DNA, 570 bp, Stenotrophomonas maltophilia
gtgcgacacctggcaacaatactcttatctctggcggtgctggtcaccgctggctgcggctggcacctgcgcaataccacggcagtgcctgctcagatgaaaacaatgatcttcgactcatccgatccgaatggaccgctgagccgggccattcgtaaccagctgcgtttgaacgatgttgagctgatcgagaagggaaccctgcgtcaggatgttccttcgctccgcgtcctgaaatcaacgctgtcacaagacacggcatcgatcttccaggatggacgaaccgcggaatatcaaatggtgcttaccgttgatgcggccgttttaatgccaggtaaagatatttaccctatcaataccaaagtctaccgctcgttcttcgataacccgcagacggccctggcaaaagacgccgaacagcagattatcatcaaggaaatgtatgataaggccgcggagcaactgatccgcagactgcctgccattgccgcgtcgacgaaaaaaggcgctgacgttatcgaaacaccggatgccagcacgccggatatgccaacgtcgctgggtaactga

SEQ ID NO: 525480 - DNA, 2583 bp, Stenotrophomonas maltophilia
atgcaagagcaataccgcccggaagagatagaatcaaaagtccagcaacactgggacgagaagcgcacctttgaagtaaccgaagacgagagcaaagagaagtattactgcctgtcgatgcttccctatccttctggtcgactacacatgggccacgtgcgtaactacaccatcggtgacgtgattgcacgctaccagcgtatgctgggcaaaaacgtacttcagcctatcggctgggatgcgttcggcctgcctgctgaaggcgcggcggtgaaaaacaacacggcaccggctccgtggacgtacgacaacatcgcgtacatgaaaaaccagctgaaaatgctgggctttggctatgactggagccgcgagctggcaacctgtaccccggaatactaccgctgggagcagaagttcttcaccgagctgtataaaaaaggcctggtctacaagaaaacgtccgccgttaactggtgcccgaacgaccagaccgttctcgcgaacgagcaggttatcgatggctgctgctggcgctgcgacaccaaagttgagcgtaaagagatcccgcagtggtttatcaaaatcaccgcctacgctgacgaactgctgaacgatctggataatctggatcactggcctgacaccgttaagaccatgcagcgcaactggatcggccgttccgaaggtgtggaaattacctttaacgtagaaaactacgaccagacgctgaccgtctacaccacccgtccggacaccttcatgggcgcgacctacctggccgtggccgcaggtcacccgctggcgcaaaaagcggcggaaaacaatccggagctggcgacctttatcgacgaatgccgcaacacgaaagtggccgaagccgacatggcgacgatggagaaaaaaggcgttgataccggcttcaaagcgatccacccgctgacgggcgaagccatccccgtctgggccgccaacttcgtactgatggaatacggcacaggcgccgtgatggccgtgccgggtcacgatcagcgcgactacgaatttgccaccaaatacggcctgaccatcaagcctgttattcttgctgctgacggctctgaacccgatctctctgagcaagcgctgactgaaaaaggcaccctgtttaactccggtgagttcagcggcctgagcttcgaagagggcttcaacgccatcgccgacaaactggcctcgctgggcgtgggcgagcgtaaagtcaactaccgtctgcgcgactggggcgtttcccgtcagcgttactggggtgcgccaatcccaatggtgaccctggaagacggcaccgtgatgccaacgccggaagatcagctgccggtgatcctgccggaagacgtggtcatggacggcatcaccagcccgatcaaagccgatcctgagtgggcaaaaaccaccgtcaacggtcagccagcgctgcgtgaaaccgacacctttgacacctttatggaatcctcctggtactatgcgcgctacacctgcccgcagtacaaagaaggcatgctggattccgatgctgcaaactactggctgccggtagacatctatatcggtggcattgaacacgccatcatgcacctgctctacttccgcttcttccacaaactgatgcgtgacgcaggcctggtcaactccgacgaaccggcaaaacagctgctgtgtcagggtatggtgctggcagatgcgttctactacgttggcgcgaacggtgaacgtaactgggtttctccggttgatgcgattgtggagcgcgacgagaaaggccgtatcgtgaaggcgaaagacgccgaaggtcatgaactggtttataccggcatgagcaagatgtccaagtctaaaaataacggtatcgacccgcaggtgatggttgagcgttacggcgctgacaccgtgcgtctgttcatgatgttcgcctccccggcagatatgacgctggaatggcaggaatccggcgttgaaggggcaaaccgcttcctgaaacgcgtctggaaactggtttacgagcacacctcacaaggtgatgcgccagcgctgaacgtagctgcactgagcgaagatcagcaggcgctgcgtcgtgatgttcataaaaccattgcgaaagtcaccgatgatattggtcgtcgtcagaccttcaataccgcaattgcggctattatggaactgatgaacaagctggcgaaagccccgcaggacggcgagcaggatcgcgcgttaatgcgcgaagcgctgctggcggtcgttcgcatgctgaacccgttcacgccgcacgttagcttcaccctgtggcaggagctgaaaggcgaaggggatatcgacaacgcgccgtggccagtggcggatgaatccgctatggtggaaaacaccacgctggttgtggtgcaggttaacggtaaagtgcgcggtaaaattaccgtcgcggtcgacgcaaccgaagaacaggttcgcgagcgcgcaggccaggagcatctggtcgcgaaataccttgagggcgttaccgtacgtaaagtgatctacgtacccggtaaactgctgaatctggtcgttggctaa

SEQ ID NO: 525481 - DNA, 486 bp, Stenotrophomonas maltophilia
atgatgaacaaggttgctcaattttaccgtgaactggtagcgactctgacggaaaggctgcgtaacggcgagcgtgatatcgacgcgttggtcgaacaggcacgcgcacgcgtgacgcaaacgggtgagttatcgcgaaccgaagtggaagaggtgacgcgcgccgtgcgccgcgacctggaagagtttgcgcgaagctatgaagagagccaggacgaaatcgccgacagtgtttttatgcgggtaattaaagagagcctgtggcaggagctggcggatattaccgataaaacccaactggagtggcgcgaggtattccaggatttaaaccaccacggtgtctatcacagcggcgaagtggtggggctggggaacctggtgtgtgagaagtgccaccaccatatcgccgtttatacgccggaggtgctgtcgctgtgtccgaaatgcgggcacgaccagttccagcgtcggccgtttgagccgtag

SEQ ID NO: 525482 - DNA, 942 bp, Stenotrophomonas maltophilia
atggcacagcctattattctcgactgcgatccgggtcatgatgacgcaatcgcactcgtccttgctcttgcctcccctgaactggacgtaaaagctgtcacctcctctgcagggaaccagacgccggataaaaccctgcgaaacgtgttgcgcatgttaacgctgctaaaacgcaccgatattccggtcgcaggtggcgccattaagccgctaatgcgcgagctgatcattgcggataacgttcacggtgaaagtgggctggatggcccggcgctgccggagccgggtttcgcaccacaaaactgtactgccgtcgagctcatggcgaaagttctgcgtgaaagcgcagagcccgtgacgctggtgtcgaccggcccacagaccaacgtagcgctgctgctgaacagccatcctgaactgcacagcaatatcgcccgtatcgtcatcatgggcggggcaatggggctggggaactggacgccagtcgcggagttcaacatctttgttgacccgcaagccgcggaaatcgtcttccagtcgggcctgccgattgtgatggcggggctggacgttacccaccgcgcacaaattatggcgcaggacatcgaacgatttcgtactgtgggtaacccggttgcaacaaccgtggcagagctgctcgatttctttatggtgtatcacaaagccgagaagtggggattccacggcgccccgctgcatgacccatgcaccatcgcctggctactgaagccggaaatgtttaccacggtcgagcgttgggttggtgtggaaacacaggggaaatatacccagggaatgacggtggtggactattactcgctgacgggaaagaagccgaataccacagtgatggtggatatcgatcggaaagcgtttgtggatttgctggcggagaggctggcttattattctgcggcctga

SEQ ID NO: 525483 - DNA, 726 bp, Stenotrophomonas maltophilia
atgatttccctgaaaaatgtttctaaatggtatgggcactttcaggtgctgaccgactgctcaacagaagtgaaaaaaggcgatgtggtggtggtatgcggcccgtccggctccggtaagtcgacgcttatcaaaaccgttaatgggctggaacctgtccagcagggcgagattgtcgttaacggcaccaaagtgaatgaccgcaaaaccaaccttgcccagcttcgctcccacgttgggatggtgttccagcattttgagctgttccctcacctctccatcattgagaacctgacgctggcgcaggtgaaagtgctgaagcgcgacaaaaaagcggcgcgtgaaaaggggctgaagttgctggaacgcgtcgggctgtctgcacatgcggataagttccctgcgcagctttcaggtggccaacagcagcgcgtggcaatcgcgcgtgcgctgtgcatggatccggtggcgatgctgtttgatgagccgacgtccgcgctcgatcctgagatgatcaacgaagtgctggacgttatggtggaactggcgcacgaagggatgaccatgatggtggtgacgcacgaaatgggcttcgcccgtaaagtggccaaccgtgtgatcttcatggatgaagggaaaattgttgaagactcaccgaaagaagagttcttcgcaaatcctaaatctgaacgtgcaaaagacttcctcgccaaaatcctgcattaa

SEQ ID NO: 525484 - DNA, 675 bp, Stenotrophomonas maltophilia
atgtacgaatttgactggagttccattgttccctccatgccttatctgctggatggactggcgatcaccttaaagatcaccgtaatcgccattatcgtcggtattgtctggggcaccctgctggcagtgatgcgcctgtcgagctttaaaccgctcgcctggtttgctacggcttacgttaacgtgttccgctccattccactggtcatggtgctgttgtggttttacctgattgttcccggctttttacagaacgtgctgggactgtcgccgaaaaccgatatccgcctgatctctgccatggtggcattctccatgtttgaagccgcctactactccgagatcatccgcgcaggtattcagagtatctcgcgcgggcagtccagcgctgcgctggcgctcggtatgacgcactggcagtccatgaagctcattattctgccgcaggcgtttcgcgccatggttccgctgctgctgacgcagggcatcgtcctgttccaggatacctccctggtctacgtgctgagcctggcagacttcttccgtaccgcctccaccattggcgaacgtgacggaacgcaggttgagatgatcctcttcgcgggcggggtctattttgtgattagtttaagcgcatcgctgttggtcagctggctgaagaaaaggaccgtataa

SEQ ID NO: 525485 - DNA, 741 bp, Stenotrophomonas maltophilia
atgtcaattgactggaactggggcatctttctgcaacaagccccgttcggcaacaccacctatctcggctggctgtggagcggctttcaggttaccgttgcgttatcgataacggcgtggattatcgcgtttcttgtcggttcgctgttcggtattctgcttaccgtccctaaccgttttctctcttcgattggcacgctctatgtggaactgttccgtaacgttccgctgatcgtgcagttctttacctggtatctggtgatcccggaactgctgccggaagatctcggcatgtggttcaaggccgagctggatcctaacgtacaattctttgtctcctccatgctgtgtctgggactgttcaccgctgcgcgcgtctgcgagcaggtgcgtgccgccatacagtcactgccacgcggacaaaagaatgcggcactggcgatgggcctgaccctgccacaagcctaccgttacgtactgctgcctaacgcttaccgcgtcatcgttccgccgatgacctccgagatgatgaatctggtaaaaaactcggccatcgcctcaaccattggtctggtagatatggcggcgcaggcgggcaaactgctggattactccgctcacgcatgggaatccttcacggcaatcacgctcgcctatgttctgattaacgctttcatcatgctggtgatgaacctggttgaacgcaaagtacgcctgccgggcaatctggggggcaagtaa

SEQ ID NO: 525486 - DNA, 906 bp, Stenotrophomonas maltophilia
atgcaattacgtaaactggccacagcaatgctggttatgggaatgtctgcgggcatcgttcacgctgaagacgctccggcagcaggaagcactctcgacaagattgccaaaaacggcgtgatcgtggtcggccaccgtgaatcttctgtcccgttctcttactacgacaacacgcaaaaagtcgtgggctattcacaggattactccaacgccatcgttgaagccgtgaagaaaaagctgaacaaacctgacctgcaagtgaagctgatccccatcacttcacagaaccgtattcctctgctgcaaaacggcacatttgattttgaatgtggctcaaccaccaacaaccttgagcgtcagaaacaggccgctttctcggacaccatcttcgttgtaggcacccgcctgctgacgaagaaaggcggcgatatcaaagattttgctgacctgaaaggcaaagcggttgtcgtgacctccggtaccacgtccgaagtgctgctgcacaagctgaacgacgagaagaaaatggacatgcgcatcatcagcgcgaaagatcacggcgactccttccgtaccctggaaagcggtcgtgccgttgcgtttatgatggatgacgctctgctggcaggcgagcgcgccaaggcgaagaaaccagacaactgggaaatcgtcgggactgcgcagtcgaaagaagcttacggctgtatgctgcgtaaaggcgatgaaggcttcaaaaagctgatcgatgacaccatcgctcaggcgcaaacctctggcgaagcggcaaaatggttcgacaaatggttcaagaacccaattccaccaaaaaacctgaacatgaactttgaactgtctgacgacatgaaagcgctgttcaaatcaccaaacgacaaagctcttaactaa

SEQ ID NO: 525487 - DNA, 693 bp, Stenotrophomonas maltophilia
atgatggacgatctgctgcgcgcgcgcggcagtacgctgattaccggaattgtggatgcgcgtctcaatcagcagaaccgctatgacacgtacaacacgatcattacgctcggtaaggacagcgaatacagctatacctccaccaatcgttacaacaaaaatcaccttgtaccgtttggcgagtttgttccgctggagtctattctgcgcccactggcaccgttctttgacctgccgatgtcctcattcagccggggcccttacgttcagccgcagctgcatgcgcacggttttgccctgacggccgctatttgctacgagattatcctcggcgagcaggtgcgcgataacttccgcccggacaccgactatctgctgaccatctcaaacgatgcgtggttcggtaaatcgatcggcccgtggcagcacttccagatggcacgaatgcgttctctggagctggcacgtccgctgttgcgcagcaccaataacggcatcaccgccgtgattggcccgcagggtgaaatccaggccatgatcccgcagttcacccgtgaggtgctgaccacgaaagtcacgccagctacgggcctgacgccttatgcgcgcaccgggaactggccgctgtggatcctgaccacgctgttcggttttgccgccgtagtgatgagcctgcgtcagcgtcgtagataa

SEQ ID NO: 525488 - DNA, 264 bp, Stenotrophomonas maltophilia
atgtggcccggtgccctgcgccgcctcgttggaatagacgccgcgtttaacgccccacatgatagcctggcccagaatagcgccaaatcccgcttcaaggccaaatgcacttttccagatcagcaggataacagcaggcagtttttcaatattgatcgcgataataacgcaggcaacaataatatagccgagcgccataaacggaacgaccatactgctaaagctggcgatcctttttacaccaccgaaaataatgaagcttaa

SEQ ID NO: 525489 - DNA, 792 bp, Stenotrophomonas maltophilia
atgggaagacagaaagcagtgatcaaagctcgtcgcgaagcaaaacgtgtgctgagacgggattcacgtagccataaacagcgtgaagaagaatcggtcacctcgcttgtgcagatgagcggcgtagaatccattggcatggcgcgggacagccgcgatgcatcgccaatagtggcgcggaatgaagctcaggcgcactacctgaatgctatcgagagtaaacagctcatctttgcaaccggggaagccggatgcgggaaaacctggatcagtgccgccaaagcggcggaggcgctgattcataaggacgtggaaaggatcatcgttacccgtccggtactgcaagcggatgaagatctgggcttcctgcctggcgatatttctgagaagtttgccccgtacttcaggcccgtctatgacgtgctggtgaagcggttgggcgcttcctttatgcagtactgcctgcgaccagagattggcaaggtggaaatcgcgccgttcgcctatatgcgcggacgtacatttgaaaatgcggtcgttattcttgacgaggctcagaacgtgaccgctgcgcaaatgaagatgtttttaacgcgcctcggggagaacgtgacggttatcgtcaacggcgatattacccagtgtgacctgccgtcgggcgtgaagtctggcctgagcgatgctatgtcacgttttgaggaagatgagatgataggggtggtccgcttcacaaaagaggactgcgtccgctcagcgctgtgtcaacgaacgctggaagtgtactccgactaa

SEQ ID NO: 525490 - DNA, 1284 bp, Stenotrophomonas maltophilia
atgaataagcatgatgagtacgacgtggcggaaccttcccgacgtcggttgttaaaaggggtaggggcgctgggcggcgcgtttgccctggcgggcggctgtccggtggcgcatgcggcaaaaccacaaagcgcccccggcacgctctccccggatgcgcgtatggaaacgcagccattttatggtgagcaccaggcaggaatcctgacgccgcagcaggcctcgatgatgctggtagctttcgattcgctggcgagtgataaggctgaccttgagcgtctgttcaggctgctgaccacgcgcattgccttccttacggcgggcggtccggcaccggaaacaccgaatccgcgcctgccgccgatggattccgggatcctcggggcgtttatcgctcccgataatctgaccatcaccgtgtcggtgggggaatcgctgtttgatgatcgctacggtctggcgaagcagaagccgaaagcgctgcaaaaaatgacgcgattcccgaatgactctctcgacgcggcgttgtgccacggcgatctgctgttgcagatctgcgccaatacccaggatacggtgatccacgccctgcgcgatatcatcaagcacactccggatctgctcagcgtgcgctggaagcgggaaggttttatctctgaccacgccgcgcgcagtaaagggaaagagacgccggtcaacctgctgggcttcaaagacggtaccgccaacccggacagcagcaataccgtgttgatgaaaaacgtggtctgggtgacggcggatcagggcgaaccggcctgggcggtgggtggcagctatcaggcggtgcgtatcattcagttccacgtggagttctgggaccgcacgccgctgaaagagcagcagacgatcttcggccgcgataagcaaaccggcgcaccgctcggcatgaagcacgagcacgatgaacccgactacgcccgcgatccgaacggagatgtcatcgcgctggacagccatattcgtctcgccaatcctcgcaccaaagagacccagtccagcctgatgatgcgcaggggctacagctactcgttgggggtgaccaattccggtcagcttgatatgggactgctgtttgtctgctatcagcacgatctggagaaagggttcctcaccgtgcagaagcggctcaacggcgaagcgctggaggagtacatcaagcccatcggcggcggctatttctttgccctgcccggcgcgcgtgacgcgaagacctggctcgctcagggtctgatagaagcctga

SEQ ID NO: 525491 - DNA, 1128 bp, Stenotrophomonas maltophilia
atggctattcaattccgtcgtagcgcgttacaggttggtgtggcagcgctgttcgcgtctgccttcgccgctcaggcagcagatattccgcaggtaaaagtcaccgtcaacgataaacagtgcgagccgatgactatcacggttaacagcggtaaaacccagtttattattcagaaccacagccagaaggcgctggagtgggagatcctgaaaggcgtgatggtggtagaagagcgtgaaaatatcgcgcctggcttcagccagaaaatgaccgctaatcttcagccgggggaatatgacatgacctgcggcctgctgactaacccgaaaggtaagctgatcgtcaaaggcgcagcgacggcggacgcggccaaaggcaccgcgctgctgagcctcggcgacgccattaccgcctataaagcctacgtcaccaaagagacggctgacctggtggcaggcaccaaagcctttaccgacgcggtgaaagcgggcgatatcgaaaaagcgaaatccctgtatgcgcctacacgtcagcactacgagcgcatcgagccgattgccgagctgttctctgacctcgatggcagcattgacgcccgcgaagatgactacgagcagaaggccgccgatccgaaattcaccggcttccaccgcctggaaaaagccctgtttggcgatagctccaccaaagggatggagaaatacgccgatcagctcaacagcgacgtgctggagctgcaaaaacgcatcagcgagctggccttcccgccgtcgaaagtggtgggtggtgctgcgggtctgattgaagaagtggccgcgagcaaaatcagcggcgaagaagatcgctacagccacaccgacctgtgggacttccaggcaaacgtcgacggcgcacagaaaattgtcgatctgctgcggcctcagctgcaaaaagagaacggcgaactgctggcgaaagtggatgccaactttaagaaagttgacgccatcctggcgaaataccgtaccaaagacgggttcgaaacctacgacaagctgaccgatgctgaccgtaacgcgctgaaaggcccgattacgacgctggcggaagatctctccctgctgcgtggcgttctgggtctggactaa

SEQ ID NO: 525492 - DNA, 834 bp, Stenotrophomonas maltophilia
atgtttgttccttttctcattatgttacgtgaaggccttgaagcggccctgattgttagccttatcgccagttatctgaagcgcacccatcgtggacgctggatcggcgtgatgtgggttggcgtcttcctggccgcggcgctttgcctggggctgggtattcttatcaacgaaaccaccggagaatttcctcagaaagagcaagagctttttgaaggcattgttgccgtaatagcggtggtgatcctcacctggatggtgttctggatgcgcaaggtctcccgtaacgtgaaggtacagctggagcaggcggtggataacgccctgcaaaaaggcaaccaacacggctgggcgctgatcatgatggtttttttcgccgtggcgcgtgaaggcctggagtcagtgttcttcctgctcgcggcttttcagcaggacgtgggcatctggccgccgctgggcgcgatgcttgggttggccacggcggttgtgcttggcttcctgctctactggggcggcattcgtcttaacctgggcgcgttcttcaagtggaccagcctgtttattttgctggtggccgcggggctggcggcaggggcgatccgcgccttccatgaagcgggcctgtggaaccacttccaggacgtggcgtttgatcttagtaacgttctctccacccactcactgaccggcacgctccttgaaggtatcttcggctatcaggaaacgccgagcgtcagcgaggtggcgatgtactttatctatcttattccggcgctggtgctgttcttcatgccatcgcgccccagcgctcagccgtcgcgtactgcgccgtga

SEQ ID NO: 525493 - DNA, 1185 bp, Stenotrophomonas maltophilia
atgtttaaaattgtccatttcctgctggcgctggtgattattcttgcgcttgcctggctggtgagtttcgaccgccgaaaaattcgcattcgtttcgttttacagctgatcgtgattgaaatcgcgctggcattcttttttctgcatgcagaaagcggcctcttcattattaaacatgtctccggtttctttgaatcactgcttaaattcgctgccgaagggacgaattttgtctttggcgggatgggtgaaaaagggctggcgttcattttccttggcgtgctctgccccattatttttatctcggcgctgattggtattctgcagcactggcgtattctgccgatctttattcgggttatcgggacgctgctgtcaaaactgaacggcatgggcaagctggaatcctttaacgcggtgagctcactgatactcggtcagtctgaaaacttcattgcctacaagggcgtgttgggcgatctctcctcacgccgcctgtttacgatggctgcaacggcgatgtcgacggtttcgctgtcgattgtcggtgcctatatgaccatgctcgacgccagatttgtcgtcgcggcactgatcctgaacatgttcagcacctttattatcctttcggtcattaacccggcccgcccggaagccgaacccgatatcaaactggaaaagctgcatgaatcccagagcttctttgaaatgctgggcgaatatattctggccggttttaaggtggcgatgattattctggcgatgctgataggctttatcgcccttattagcgccgttaatgccctcttctccagcgtatttggcctgagcttccagcagattctgggttacgtgttttatccgctggcgtggcttattggtattccgctgagcgatgccttaagcgcgggcagtattatggcaaccaaactggtggcgaatgaatttgtggcgatgatcgagctgcaaaaaatagcccaccaaatgtcaccgcgcggactggggattttgtcagtgttcctggtgtcgttcgctaactttgcctccattggtattgtggcgggggcaataaaaggcctgaacgagcaacagggtaatgtggtgtcgcggtttggtttacgcctggtgtacggggcaacgctggtgagtttgctgtcggcgagctttgcggggttggtgttgtaa

SEQ ID NO: 525494 - DNA, 420 bp, Stenotrophomonas maltophilia
atgagaattaaaacagggctaatggtggcagcattcgtaatgctggcgggctgtaacgcacccgcgcagcatgcggcggtggaaacctgcaaagcagaaaatcagatgcagcaaaccacgctctatttcggcttaaaccgtcctgccggggcgcaaattacaggcaacgaatggcagcagtttgtcgaccaggacgtgacgccgcgctttcgcgatggcttaacggtgtttgatgcccgtggtcagtggctgggtaacgacggcaaggtggcgcgcgagccgagcaaggcgctgatgctgatccacggcaaagacgcgcagagcgagaaaaacattgaggctttacgcggtatttataaatcccgcttcgcacaggagtcggtgatgcgggtcgaccagccggtgtgcgtacagttttaa

SEQ ID NO: 525495 - DNA, 1215 bp, Stenotrophomonas maltophilia
gtgcataccgaagccaacaacaacgccctgacgctgccggattacttcaccggacgctttgaagataacagccgcatattgcgtattatctctgcggtggtgatcctgctgttcttcaccatctactgtgcctccggcattgtggcgggcgcgcgcctgttcgaaagcaccttcggcatgagctatgaaacggcgctgtgggccggtgcggccgcgaccatcctctataccttcgtgggcggattcctggcggtaagctggaccgataccgtgcaggcgagtctgatgattttcgccctgatcctgaccccgataattgtgatttttaccgtcggcggctttggcgaatcgctggaagtgatcaagcagaagagcatcgaaaacgtcgatatgctgaaagggctgaacttcgtggccatcgtctccctgatgggctggggcctgggctacttcggtcagccgcacattctggcgcgctttatggcggcggattctcaccacaccatcgttcacgcgcgtcgcatcagcatgacgtggatgatcctgtgtctggcgggggcgtgcgcggtcggtttcttcggtatcgcctacttcaacaacaacccggcgcaggcgggcgcggtgaaccagaacgccgagcgcgtgttcatcgagctggcgcagatcctgttcaacccgtggattgccggtatcctgctctccgcgatcctggcggcagtcatgtccaccctgagctgtcagctgctggtgtgctccagtgccatcaccgaagacctctacaaagcgttcctgcgtaagggcgcgagccagaaagagttagtgtgggtagggcgttttatggtgctgctggtggcgctggtggcgattgcgctggcggctaacccggaaaaccgcgtgctggggctggtgagctacgcgtgggcgggctttggcgccgcatttggtccggtggtgctgttctccgttctgtggtcacgcatgacccgcaacggcgcgctggcggggatgatcatcggtgcggttaccgttatcgtctggaaacagttcgcgtggctgggcctgtacgaaattatcccgggcttcatcttcggcagcctcggtattgtggtgtttagcctgctgggtaaagcgccgtctgcatctatgcagaagcgctttgcggaagcggatgcgcattaccactcagcgccgccgtctaagctccaggctgagtaa

SEQ ID NO: 525496 - DNA, 192 bp, Stenotrophomonas maltophilia
atggctattagcacaccgatgctggtgacatttctcgtttatatttttggcatgatcctgatagggtttttggcatggcgttccactaaaaactttgacgactacatcctcggcgggcgcagcttaggcccgatggtcaccgcgctctcagcgggcgcttccgacatgagtggctggctgctgatggggtag

SEQ ID NO: 525497 - DNA, 3963 bp, Stenotrophomonas maltophilia
atggggatgaccaccatgggggttaagctggatgacgctacccgcgaacggattaaaaccgctgcgacccgtatcgaccgcacgccgcactggttaatcaagcaggcgatttttaactatctggaaagactggagagtgaagaaggtctgccggagctgcctgccctgctggcgggcgctgcgaacgaaggcgaagaggccgcgacggccgctgatgagaaccaccagccgttcctggaatttgccgagcagatcctgccgcagtccgtcagccgcgccgccattaccggcgcctatcgccgtgccgaaaccgacgccgtgccgatgctgctggagcaggcgcgcctgccggaagccgttgccgctcaggcgcacagcctggcgtatcagctcgccgacaagctgcgtaatcagaaaaccgccagcggacgcgccggtatggtgcagggtctgttgcaggagttctccctctcctcgcaggaaggcgtggcgctgatgtgtctggcggaagcgctgctgcgtatcccagataaagccacccgcgatgccctgatccgcgacaaaatcagcaacggcaactggcactcccacattggccgcagcccgtccctgtttgtgaacgccgccacctggggcctgctgtttactggcaagctggtctccacccataacgaagccaacctgtcgcgctccctgaaccgtattatcggcaagagcggcgagccgctgatccgcaagggtgtggacatggcgatgcgcctgatgggcgagcagttcgtcaccggggaaaccattgccgaagcgctggcgaacgcccgcaagctggaagacaaaggcttccgctactcctacgatatgctgggcgaagcggcgctgaccgccgccgacgcgcaggcctacatggtctcttaccagcaggcgatccacgccatcggtaaagcgtccaacggtcgcggtatttatgaagggccaggcatctctatcaagctttccgccctgcacccgcgctacagccgcgcgcagtacgaccgggtgatggaagaactctacccgcgcctgaagtccctgaccctgctggcgcgccagtatgacatcggcctcaacatcgacgccgaagaggcggatcgtctggagatctccctcgatctgctggaaaaactgtgcttcgagccggagctggcgggctggaacgggattggtttcgttatccaggcctaccagaaacgctgcccgttcgtcattgactacctgattgacctggccagccgcagccgtcgccgcctgatgatccgtctggtgaagggtgcctactgggacagcgaaatcaaacgcgcccagatggaaggactggaaggctatccggtctatacccgcaaggtctacaccgacgtctcttacctcgcctgcgcgaaaaaactgctcggcgtgccgaacctgatttatccgcagttcgccacccacaacgcccacaccctggcggcgatctacagcctggcgggtcagaactactatccgggccagtacgagttccagtgtctgcatggcatgggtgaaccgctgtacgagcaggtgaccggtaaagtggccgacggcaagctgaaccgtccgtgccgtatttatgccccggtaggtactcacgaaaccctgctggcctacctggtgcgtcgtctgctggagaacggggcgaacacctccttcgttaaccgcatcgccgataccaccctgccgctggacgaactggtggccgatccggtacaggccgtagagaagatggcggcgcaggaaggccagattggtctgccgcatccgaagattgccctgccgcgcgagctgtatggtgcaggccgcgtcaactcggcgggtctggatctcgccaacgaacaccgtctggcgtcgctctcttctgccctgcttaacagcgcattgcagaagtggcaggccaaaccgatccttgagcagtccgttgaagacggtgaaatgcagccggtgatcaacccggcagagccgaaggatatcgtcggctacgtgcgcgaagccacagaagcggaagtggatcaggctttggagagcgcggtgaacaacgcgccaatctggtttgccaccccgccgcaggagcgtgccgccattctggaacgcgcggcggtgctgatggaagatcagatgcagcagcttatcggcattctggtgcgtgaagcgggtaaaaccttcagcaacgccatcgccgaagtgcgcgaggcggtcgacttcctgcactactacgccggtcaggtgcgcgatgatttcgacaacgaaacgcaccgtccgctcggcccggtggtctgtatcagcccgtggaacttcccgctggcaatcttcaccggccagattgccgcggcccttgccgcaggcaacagcgtgctggcaaaaccggcagagcagactccgctgattgccgctcagggcatcaacattctgctggaagcgggcgtaccggcgggcgtggtgcagctgttgccggggcgcggtgaaacggtgggtgccaaactgacctccgataaccgcgtgcgcggcgtgatgtttaccggttcgaccgaagtagcctccctgctgcaacgcaacatcgccacccgtctggatgcgcagggccgtccaacgccgctgatcgctgaaaccggcggcatgaacgccatgatcgtggactcctccgcgctcactgagcaggtcgtcgttgacgtgctggcctctgccttcgacagcgcgggtcaacgctgttccgccctgcgcgtgctgtgcttacaggatgacgtggctgaccacacgctgaagatgctgcgcggtgcgatggcggaatgccgcatgggcaacccgggccgtctcaccaccgatatcgggccggtgatcgacgcggaagccaaagccaacatcgaaaaccacattcaggccatgcgtgccaaaggccgtccggtgttccaggcggtgcgtgagaacagtgaagatgcccgcgagtggcagaccggcaccttcgtgccgccaacgctgattgagctggcaagcttcgacgagctgaaaaaagaggtcttcggcccggtactgcacgttgtgcgctacaaccgtaacaacctcaacgagctgatcgatcagatcaacgcctcgggttacggcctgacgctcggtgtacatactcgtatcgacgaaaccattgcccaggtgaccggcaatgctaaagtcggcaacctgtacgtcaaccgtaatatggtcggcgcagtcgtgggcgtgcagccgttcggcggtgaaggcctctccggcaccggtccgaaagcgggtggcccgctctacctgtaccgtctgctggctaaccgtccggagaacgccctgggcgtgaccctggcgcgtcaggacgcacactatccggtggatacgcaggtgaaaaccgtgctgacccagccgctggaggcgctgatcgcctgggcggaaaaacgtcctgaactgcgtgccgtcgcccggcagtacggcgaactggcacaggcgggaacacagcgtctgctgccgggtccaaccggtgagcgcaacacctggacgctgatgccgcgcgagcgtgtgctgtgcatggcggatgacgagcaggatgcgctggtgcagctggcagccgctacagcaacgggctgtgaggtgctgtggccggaagatgcgctgcatcgcgacctcgccaaacagttgccaaaagcggtctcggctcgcattcgctttgcgaaggccgatgccctgctgacccagccgtttgacgcggtgatctaccacggtgattccgaccagctgcgcgaactgtgtgagcaggttgcggcccgcagcggtgccatcgtttccgtgcagggctttgcgcgcggggaaaccaacctgctgctggagcgtctgtacgtggagcgctcgctcagcgtcaacaccgcggcggcaggcggtaacgccagcctgatgacaatcggttaa

SEQ ID NO: 525498 - DNA, 396 bp, Stenotrophomonas maltophilia
atgaaaagagtatttctcgcaggcgcagcactgctgctcagcgccagtgcgcttgccgacgagtgcgacaaagcgaccacccagacagaactcagtgcctgtgcggcagagcagtaccaggctgcggataaaaagctcaaccagacgtaccaggccgccatcaaacgcgcggcagcccctcagcgcgacctgctgaaaaaggcgcagcaggcgtggatcgccctgcgtgacgcagactgtaaattgatgggttcaggaaccgaaggtggcactattcagccgatgattatcaaccagtgcctgacggagaaaacagcggagcgcgaagcctttctggcctcgttgatgcagtgtgaagagggcaatttaagctgccctttccaaccggctgattaa

SEQ ID NO: 525499 - DNA, 639 bp, Stenotrophomonas maltophilia
atgacacaaggcgcagtgaaaacacccggtaaacgttcgcaggcggtgagcgccaagaaacaggcgatcctcagcgccgcgctggagacattttcgcagtttggtattcacggtacgcgccttgagcaggtggcggagcaggccggggtgtccaagaccaatctgctctactactacccgtcgaaagaggcgctatatgtggcggtgatgcagcagatcctggatatctggcttgcgccgcttaaggcgtttcgcgaagagctggctccgctggtggccatcggggagtatattcgcctgaagctggaggtgtcgcgcgattatccccaggcatcgaggctgttttgtctggagatgttacagggcgcgccgctgttgcaggcggagctgacgggagatctaaagcagctggtggacgaaaaatcggccattattgccggatgggtcgccagcggaaaactggcgcccgtcgatccgcagcatctgattttcatgatttgggcctcaacccagcactacgctgacttcgcggcccaggtcgaggcggtaaccggtaaaacgctccaggacgaggcgtttttccagagcaccctggaaaacgtgcagcggatgattattgaagggatccgcgtgcgttaa

SEQ ID NO: 525500 - DNA, 1092 bp, Stenotrophomonas maltophilia
atgaaaattggcgtatttgtaccgatcggcaacaacggctggcttatctcgaccacggccccgcaatacatgccgacctttgagctgaataaagccatcgtgcagaaagcggagcattaccacttcgactttgcgctctcgatgatcaagctgcgcggtttcggcggtaagaccgaattctgggaccacaacctggagtcctttaccctgatggcgggcctggcggcggtaacctcgcgcatccagatttacgccaccgccgccacccttacccttcccccggcaatcgtggcgcggatggcctccaccatcgactccatctccggcgggcgctttggcgtcaaccttgtcaccggctggcaaaagccggagtacgagcagatggggatctggccgggtgacgattacttctcccgtcgctacgactacctgactgaatacgtgcaggtgctgcgcgatctgtggggcaccggcaaaagcgatttcaaaggcgacttcttcaccatgaacgactgccgcgtcagcccgcagccgtcggtgccgatgaaggtgatatgcgccggacagagcgacgcgggaatggaattctcggcgaaatacgccgacttcaacttctgcttcggcaaaggcgttaacaccccggccgccttcgcgcccaccgcggcacgcatgaaagcggccgccgacaaaatcgggcgcgacgtgggctcctacgtgctgtttatggtgattgccgacgaaaccaacgacgccgcgcgcgccaaatgggaacgatacaaggacggcgccgacgaggaagccctgagctggctgaccgagcagagccagaaggatacccgctccggcgcggacaccaacgttcgccagatggccgacccgacgtctgccgtcaatatcaacatgggcaccctggttggctcgtatgccagcgtcgccagaatgctcgacgaagtggctgccgtgcccggcgccgaaggcgtgctgctgaccttcgatgattttctcaccggcgtggaaaccttcggcgagcgtattcagccgctgatgcagtgccgcgcccacatccctgccgtgacgaaggaggtggcgtaa

SEQ ID NO: 525501 - DNA, 699 bp, Stenotrophomonas maltophilia
  misc_feature (663)..(672): n is a, c, g, or t
atgacgaccctcaacgctcgcccggaggccatcacctttgacgcgcagcagagcgcgctgatcgtggtggatatgcaaaacgcctatgccagtaaaggcgggtatctggatctggccgggttcgacgtctcggccacgcagccggtgattgagaatatcaaaaccgccgtgagcgccgcgcgtgctgcgggcatgctgatcgtctggttccagaacggctgggacgaccagtacgtcgaagctggcggtcccggctcacccaactttcacaaatccaacgccctgaaaaccatgcgccaacggcctgaactccagggcacgctgctggcgaaaggcggctgggattatcaactggtggatgagctggtaccggaagctggcgatatcgtactgccgaaaccgcgctacagcggctttttcaataccccgctcgacagcctgctgcgcagccggggcattcgtcatctggtctttacgggcattgccaccaacgtctgcgtggagtccaccctgcgcgacggcttcttcctcgagtattttggcgtggtgctggaagacgctacccatcaggccgggccggattttgcccagaaagccgccctgttcaatatcgaaaccttttttggctgggtcagtaacgtcaatgatttctgcgacgcgctnnnnnnnnnnggagaaccgctatgccgaaatccgtga

SEQ ID NO: 525502 - DNA, 387 bp, Stenotrophomonas maltophilia
atgccgaaatccgtgattattccgccgggcaccagcaccccgatagccccgtttgtccccggtaccctcgccgacggcgtggtgtatgtctcaggcacgctgccgtttgataaagacaacaacgtggtgtttatcgatgacccaaaggcgcaaacccgccacgtgctggagacgatcaaaaccgtgatcgaaacggcgggtggcacgatggaggacgtgaccttcaacagcatctttatcaccgactggaaaaactacgccgcgattaacgagatctacgcggagtttttccccggcgataaaccggcgcgattttgcatccagtgcgggctggtaaagcctgaagcgctggttgaaattgccaccgttgcgcacatcgcgaagtga

SEQ ID NO: 525503 - DNA, 801 bp, Stenotrophomonas maltophilia
atgaaactgtccatttccccgcccccctttgcgggcgcgcccgcggtggtgctgattgccgggctcggcggcagcggcagctactggctgcctcagctcgccgtgctggggcaggagtatcaggtggtgtgctacgaccagcggggcacggggaataacccggataccctgccggaagattacaccctcgcacacatggccgacgagctcgcactggcgttagccggggccgggatcgcccgttactgcgtggtcggccacgcgctgggggcgctggtcggcctgcggctggctatcgataagcctgacgccctcaccgcgctggtttgtgtcaacggctggctgaccctcaatgcccatacccgacgctgttttgacgttcgcgaacgtctgctgcatgcgggcggggctcaggcgtgggtagaggcacagccgctgtttctttacccggcagactggatggccgcccgcgctccgcggctggaggccgaggaagcgctggcgctggcccatttccagggcaaagccaatctgctgcgcaggctgcatgcgctgaaacaggctgatttcagccgccacgctgcacgcgttcgctgccccgtgcagattatttgttccaccgacgatctgctggtgccgtccgtctgctccgcggaactgtacgccgccctcccgcacgcccgcaaaacggtcatgcgtcagggcgggcatgcctgcaacgtgaccgcgccggacatctttaacacgctgctgctgaacgggcttgccagcctgctgcacagccctgaacccgctttgtaa

SEQ ID NO: 525504 - DNA, 591 bp, Stenotrophomonas maltophilia
atgagcgaagccatcacgcccgccgcgctggaaacgctgtttaccggcgcacgtacccataacggctggctggatataccggtcagtgacgagacgctgcgcgagatttatgacctgatgaaatgggggccgacgtccgccaactgttccccggcgcgcattgtctttgtgcgaagcccggaaggaaaagagaagctgcgcccggcgctctccagcggcaaccttgagaaaacgctcacagccccggtcacggcaattgtcgcctgggacagcgagttttatgagcgcctgcctgtactgttcccgcacggcgatgccagaagctggtttacctccagccccgcactggcggaagagaccgcctttcgcaacagttcgatgcaggccgcgtacctgatcttcgcctgccgcgcgctcgggctcgacaccgggccgatgtccggctttgaccgggaaaaagtggacgcggcctttttcacgggcacgctgcttaaaagcaatctgctgattaacatcggctatggcgatatgagcaaagtctatgggcgcttaccgcgtctgaccttcgaagacgcctgcgggctggcgtaa

SEQ ID NO: 525505 - DNA, 495 bp, Stenotrophomonas maltophilia
atgacgacacccgatcaacaaaccttccgtgatgccatggcctgcgtcggtgcggcggtcaatatcatcaccaccgacggccctgcgggaatggcgggctttaccgcaagcgcggtatgcagcgtgaccgattccccgcccactctgctggtttgcctcaaccgtggcgcgtccgtctggccgattttcagcgagaaccgcaccttgtgcgttaacacgctgagtgccggacaggagccattatccaacctgtttggcggtaaaacgccgatggcggaacgctttgccgctgcccgctggcagacaggcgacacgggctgtccacgtctggaaaatgccctggcctcgttcgactgccgcatcagccaggtggttagcgtcggcacccacgacattctgttttgcgacatcgtatccatcgttcgccacccggcaccgcaagggctggtgtggttcgaccgcggctatcacgcacttatgcgacccgcctgttaa

SEQ ID NO: 525506 - DNA, 1317 bp, Stenotrophomonas maltophilia
atgttcggacttccccactggcagttgaaatcgacctccacagaagcaggcgtggtcgcgccggatgaaaggctcccgctcgggcagacaatggtgatgggcgtgcagcatgcggtcgcgatgtttggtgcgacggtgctaatgcccatgctgatggggctggatcctaacctcgccattttgatgtcgggtatgggtaccctgctgttcttttttgtcaccggcgggcgcgtgcccagctatctgggctccagcgccgcctttgtgggagtcgttattgcagcgaccgggtttaacggtcagggcattaaccccaacctgagcgtggccctcggcggcattatcgcctgtgggctggtctacaccctgaccggtctggtggtgatgaaagtcggcacgcgctggatcgagcggatgatgccccccgtcgtcaccggggcggtggtgatggcgataggcctgaacctcgcgccgattgcggtgaagagcgtatccggctcgccgtttgaaagctggatggcggtgattacggtgctgtgcatcggcgtggtggcggtctttacgcgcgggatgatccagcggctgctgatcctggtcgggctgattgcggcctgtctgatctacgcgctgctggcgaacgtgtttggtctcggcaagccggttgatttcacactgattcaccaggccgcctggttcgggatgccgcacatgacctcgcccacctttaacgctcaggcgatgatgctcatcgcgcctgtcgcggtgatcctggtggctgaaaacctgggccacctgaaagccgtagcgggaatgaccgggcgcaatatggacccgtatatggggcgggcgtttgtgggagacggtctggcgaccatgctctccggctcggtcggcggcagcggcgtgacgacctacgcggaaaacatcggcgtgatggcagtgaccaaagtctactcgacgctggtcttcgtggcggcggcggtgatggcgatactgctcggcttttccccaaaattcggcgcattgatccacaccatcccggcacccgtgattggcggcgcctcgattgttgtatttggtctgattgccgtcgcgggggcacgcatctgggtgcagaatcatgttgatctgagccagaacggtaacctgatcatggtggcggtcacgctggtgctgggcgcaggcgacttcgccctgacgctgggcgggtttacgattggcgggattggtacggcgaccttcggcgcgatcctgctcaacgccctgcttagccgccgcaaaggggataaagcgcaagcggaagccatcaccccctga

SEQ ID NO: 525507 - DNA, 921 bp, Stenotrophomonas maltophilia
atgtccgtttcccgttttactttctccattaagcctcaggaagccatcctgattttgatcaccatgttctggggcggaacctttcttgccgttcagtacgcggtcacgatgagcgatccgtttttctttgtagggctgcgtttcgcaaccgcggcggttgccgtggcgcttatttcgctgaaaaccctgcgcgggttgaccctgagagagcttaaagcgggtgtcgctattggcgtggcgattgccatgggctatagcctgcaaacgtgggggctccagtctatctccagcagtaaatccgccttcatcaccgccatgtacgtaccgctggtgccgctgttgcagtggctgtgcctgggcagaataccgggcctgatgtcgtgcattggtatcgtgctggcgttcatcggcctcattttattagccgggccgggaaataatctgctggcgctggggccgggagagatcatcacgctggtgggggccgttgccattgcggcagaaattattttgattagcgcctgggcaggaaaagtggacgtcaagcgggtgacggtcgtgcagcttgccaccgcgtcgctggtggcgttcgcgacgatggtgccggcaggggagtccgtcccgccgatgtctaccgggcttatcgtcgtggcgctggggctgggcgtttttagcgccattattcaggtcaccatgaactgggcgcagcgcagcgtatctccgacacgggcgacggtcatctataccggtgaaccggtgtgggcgggtattttcgggcgactcgccggggagcgtctgccgttgctggcgctggtgggcgcggcatttattgtcgccggggtgctggtgagcgagttaaagttaaaaaaacgacgtaagtcgattgccgggttgggcactgaacaaggggcagatagctaa

SEQ ID NO: 525508 - DNA, 171 bp, Stenotrophomonas maltophilia
atggcaaaccatcgtggtggttcaggtaatttcgctgaagaccgtgaaagagcatcagaagcaggtcgtaaaggtggccagtctagcgggggcaattttaaaaacgaccctcagcgcgcatcagaggctggcaaaaaagggggtaaaaatagccacggcagcaacaagtag

SEQ ID NO: 525509 - DNA, 597 bp, Stenotrophomonas maltophilia
atggcaaaagttctggtgctctattattccatgtatggacacattgaaaccatggctcacgcagttgcagaaggcgcaaacagagtagacggcgttgaggttgtggttaaacgcgtaccggaaaccatgcaggcggaagccttcgccaaagccgggggaaaaacacaaaacgcccaggtcgccaccccgcaggagctcgcggactatgatgccattatcttcggcaccccgacccgcttcggcaatatgtccggccagatgcgcaccttcctcgaccagacgggcgggctctgggcctccggcgcgttatacggcaagctggccagcgtgttcagctctaccggcacaggcggcggccaggagcagacgatcacctcaacctggactacccttgcacatcatgggatggtgattgtgccgattggctacggcgcgcaggaactgtttgatgtttcccaggttcgtggcgggacaccgtatggcgcgacaaccattgccggtggggatggttcacgtcagccaagcaatgaagaactttcgatcgcccgctatcagggtgaatacgtcgcgggtcttgccaaaaaactgaacggctaa

SEQ ID NO: 525510 - DNA, 228 bp, Stenotrophomonas maltophilia
atgccaactcaagaatccaaagctcaccacgtgggcgaatgggcaagtttacgcaatacctctccggagattgcagaagccatctttgaagtcgccaggtatgacgaaaagctggctgagcagatttgggaagaaggcaacgatgaagtgctggttcgcgctttcgaaaaaaccgacaaagactcgctgttctggggcgagcaaaccatcgaacgtaaaaacgtctga

SEQ ID NO: 525511 - DNA, 174 bp, Stenotrophomonas maltophilia
atgaaaattgagtatgtctaccagagttcagagcagttgcgtaatgccagcgtgctgtcgctgcaatctcctgcgcagcgcgtgacgctggagctgaagggctgtccggtagatggcaacggcttctgtacgatcgataaattcaatgcggtgatgaacaacgcggcgaaatag

SEQ ID NO: 525512 - DNA, 381 bp, Stenotrophomonas maltophilia
atgttggacggtggcctctcacccaacgtgaaagataaggttttccacgaaccgatcgtcttccagtcgcttaaagcgaaaaatacagagacgctggaagccatgctcgatcgcggtgctgacgtcaactcaaccaactcactgggtaaaacgctggtgtttgatgcgctggataaccaagcttacgatcatgtcttgttgctgctcgatcggggagcggatccgtcaattaaggccaaaaatggctggtcgatgagcaatgcgctcgcggacgcgctgaatggacttgaccgaggcagtgagcaatacgagaaattaaacgaaataaaagagaagctcatccagaaggggggcgaatggccacccgcgccggttaagtga

SEQ ID NO: 525513 - DNA, 456 bp, Stenotrophomonas maltophilia
atgaacgccagagataaggttttcgttttctggggatgcatggatgccctggccattgtgctctattgtgcccagtccgtgcgacatgacaggatcccttttatttccgatatacacgccttcagtacggttgtgaacacgctgtctgctggtgggtgtagcgctctggttattcttttctttattctcgatttcttgttgttggtctcttttattgcctcagcatggtgcttcttcgcccggaatttatacgcgagaagactggcgctctaccaggaaatactgcgtctggttggatttcgctactcagtttcccttttccccatggtgttaagtttcacgggcgtgatgaatgtctggctaaatggatttttactcattttgtcagagtttctgaaaatctattccctgtggatttataaatatgaaggggaaaggcccccggttaaagagtaa

SEQ ID NO: 525514 - DNA, 954 bp, Stenotrophomonas maltophilia
  misc_feature (908)..(917): n is a, c, g, or t
atgctcaaccgaattaccgttcagctcccggttgaggggctgcttttctggaaactctccggccgcgaggcgatgtcggagtcgttcgcgctgacgctgaccctgctcggcacggatgcgcgccttgaccgcagcaggctgctcggccagccggtcacagtgaccatccccacgcagagcctgcttactccccgctatatcaacggtaaggtgacgcgcgtggcggtgagtgccgtggagctgacgggcacccgctatgcggtctaccagctgactgtagagccggacctgtggccgatgaagcgcgaccgtaacctgcggattttccagggccagacgttaccacagattgtgaaaaccctgctgggtgagcatcaggttaaccttgaagacaaactcaccggcagctaccgggtgtgggactactgcgtgcagtatcaggagtcgagcctggacttcatcagccgcctgatggagctggaggggattgcgtatcacttcagccacgaggcggacaagcacaccctggtactgaccgacgccgcgacgcagcatcagccgttcagcggctatgaggtcattccttaccatcagacgccgtccggtggcagtacggatgaagagggcatcagccagtgggctctggaggacagcgtgacgccggggatttacagcctcgacgactacgacttccgcaagccgaacgcgtggctgttccaggcccagcagaacccggcgtcaccgaaaccgggcagcatcgacgtgtacgactggccgggccgctttgtggagacaggccatgcggagttctacgcccgcattcgtcaggagcgctggcaggtggagcatcagcagattcaggcgacggccacggcggcgggcattgcgccgggccacatctttacccnnnnnnnnnntctttaccctgaccaacgcgccattcttcagcgataa

SEQ ID NO: 525515 - DNA, 1635 bp, Stenotrophomonas maltophilia
gtgacggcggcggggtatcacttcgaggagaaccgctacgccagcggcgaaggtgaaaccattcaccgcaccgatttcaccgttatcccggcggcggtgtcgtatcgtccggcgcagagcacggcgtggccgcggacctacggcccgcagacggcgaaagtcgtggggccgcagggggagagtatctggacggacaaatatggccgtgtgaaggtgaagttccactgggaccgtctggcgaagggtgacgacaccagctcctgctgggtgcgtgtctccagcgcctgggcgggccagggctacggcggggtgcagatcccgcgcgtcggcgatgaggtggtggtggactttatcaacggcgacccggaccgtccgattatcaccggccgcgtgtataacgaagccagcatgccgccgtgggcgctgccggctgcggcgacgcagatgggctttatgagccgcacgaaagacggttccgtggacaacgccaacgccctgcgctttgaggacaaggcgggcgcagagcaggtgtggatccaggccgagcgcaacatggacaccagcgtcaagaatgatgaaacgcacagcgttggcggcgcgcgcagccattacgtgaagaaaaatgagctgcatcgtgttgaagcgaaccagatccaggccgtgaaaggcggaaccgagatcctgacgggaaaaggcaagctggatgcagcggtagagcagtatgtcattgcttccgggacgaagctgcggctggtctcgggtgagagtgctattgagcttaacgctaacggcaagattaacctgattggcaaagagtttaactttttcgttgagggagatgggtatatcaccacgggtggtaagctgcatctgaatacctcgggaaccaagccgggcacaacggcaccgggatcggggcataaaggggatattgatgcggcggtgcaggagaagttttctccaaataaaagtgctaagaatccggctcccgcagtttcagcgccagcagcatccagaccaaaaccaacaacaaaatttgcagcagctccaccattaaaagggagttacgtttatcaaaataattcctacaactctgatgtgatgcccttcagtgaagatgtagttaaggaaatcaataagtcaccaacgcttcagacacaattaaaagatctaaaagataaagggtgggctatccagccgggagccgcaggaggggggagttacgctgatactaataacaaattgattgtcatggaccctgaacacttggaggatacagccacaactgtgcaaactctggcacatgaggcagggcatgcaacttatcctgttgcggtagatgcttcgagtaaggaaaacttcatcaacagccagcttatggatgaaggtggagcaacgctgaataacattaaaatacaacgcgagatccttgcaaacggcggtattgatattgatatagcgggaagtgccgaaaacctaaaagcatataattctgcatatgataaaatggtgagcggtgagttatctcgcattgatgcagccaaagcaataggaaaagtgtatggtaaaggcgaaatagcctcagggactaatttaaattataatgattactatggaggattctatggaaagtag

SEQ ID NO: 525516 - DNA, 519 bp, Stenotrophomonas maltophilia
atggaaagtaggatgattaaagctacattcctcattgttcttccactattttcagcatttacctatgcagggcataataaaatgaatcaagattcgttgtggcaaatgatcaaagaaatgaaatcagtgtggggtaaacaagttgaggatgtcagtaaactgtttaaccaaccgctgattaataatacacaggagaaagaagaccgttatacttcagctccctttacgttaactgatggcacacggatcagcgatgtggatgttcgtttatggggaaatggcgataacagcgtatctttgatttctttcgtaattaatcatccatgtattactcttgaacaagtcaaatctcattttccagatctgaaattgtctaatatcccccgcggaaacacgccgggacaatcagttggatatcgcactcctaccgatgaacgcgggctggcatgggcatttagctttccagttctgaatcaggaatgcctgagcagggtagttatgtcacgctacgaacattaa

SEQ ID NO: 525517 - DNA, 441 bp, Stenotrophomonas maltophilia
atgaaatacaccctccaggaaggttcgttttcccttttccctgctgcctggcaggataacagcatgaacatcattcgcgatgacgaaagcgggttatctgtagtggtcagccgcggcgtcatcccggatggtagcgattacgaacaagagttccaccgtcagtgggaagtcctgcgccctcagatgggggagatcgcccagagcgaatttcagcacgtaaaagccgggccagacggaaacattagcggactggaagttgagaccacctttgaccgtaacggccagcgcctgtggcaaaaacagctggccgtgcagacgccgggcaaaccggtactgatgatttttaccctctcggccttaaaagcctttacggaagaggacgaggcgcgctggagcgcactgaagcagagtctgacgctaaacgacaaccggaatgtgtaa

SEQ ID NO: 525518 - DNA, 3153 bp, Stenotrophomonas maltophilia
atgagcgataacaacgcggcccgtaagggcgacgagattattcactccagcatttttgctgatattaccagcattgtggcggaaggcgctgcctatgcggtgattggcgcggcggtgggcgcggcagcgaccgtcgcggccccactgctgggagccggggccgcagcggcaggcgtggcggcaattggatccagctgtctgttgagcggcattattggtggggttctggcgaacgtcgcggggatcaccgacgatatcagcaatgctgctgaagggctgggcaacgcgctttttccgccgtcgcctgcgggtaagatcaccaccggttcaaataacgttctcaccaacgcaatccccgccgcgcgcgcggcaggcacgctgacgcccgccgataccccttcccctgagccgcagtcgccgggcagctttgccgattacgcgggcatgctgctttccgctgccggacagttcggcagcgaaatgtggcagccgagcgtggcctctgccgctgccgggacctcgccgctggaagaagacaaggtggcgtgcgagaaacactccgggccgcagtatctggcggaaggctcgaaaagcgtctttatcaacgggcagcccgcggtgcgtgcaaaagatcgcaccacctgcgaaggcaccgtttccgacgacgtctccccgaacgtgatcatcggcggcgacaccctcacggttcgcgatattaaaagcggcaaaacgccgggcctggcgctggggatgattgcgctctccctgctgcgcgggcgtccgggcaagatcctgaaaaacatgccctgcgcgctggctgctgccggtggcgggatgctggctgatatggccgtcaacgccgtgttcggctcctcgcacccggttcacgccgctaccggcgtgaaggtgctgaatgacgacgacgaactcgatttctcgctgccggggcgctttccgctacgctggcaacgcagctacaacagcctgaccacccgcgaagggctgtttggtctgggctgggctaccacctttgacagctatctgacgctggaagaaaacaacgccacctggttcgatgaaaccgggcgcgagctgagctttgaactgccgccggtcgaccgcgcgttttacagcatcagcgaaggcattatcatccgccgcaatgagagcggcgacgtggcgattgccgacgatgacggcgcggtgtggcgtctgtataaaccgacccgcgccaacccagccatcctgcgcctggcctccctcagcgacgagtacggcaacgcgttgctgacggcgtgggatgaacacgggcggctggtcggtctgcacgatgagccgcgggcgatcgacgtcactctgcgttatgaaaatgaacgtttcccgcagcgcgttacctcggcgagccattttgacggcaaccagacatggccgctgatgcagtgggggtatgacgcgcgcggccagctggccagcgcaacggatgcctccggcgtggttacccgtgaataccgttataacgatgatggcctgatggtctggcaccgtctgccgggcgggctggagagcgaataccgctggcaaaaattcgaccactggcgcgtggtggaaaaccgcaccagcaccggcgacggctgtcgctttagctacgatttagccgccgggctgacgaccgtcgatcactacgacggtcagacacgaaagcattactggaacgcgcaaaacctgattgttcgctacgttgacgagcgcggtgagaactggcgctacgagtgggatgacaacgaactcctcacgcgtcgcatcgatccgctgggtaatgccgttaccttcgtctatgacgagatgggcaaccgggtgcaggagatcgacgccgacggcaatacccgcaccaccacctggctggagcaccgtgcgcttccggcgtccatcatcgaagccgacggtagcgccacccggttcctgtatgacgaacatcacgggctgaaacgcgtggtggatccgatggggcagaccacgctgctgcgtcgggacgagtttggtcaggttgtggaagaagtcgatgccgccgggaacagccgttaccaggagtacaacgaggccgggcagatggtgcgtgcgacggactgttcgggccgtgtgacacaataccgttatcatccgctgggctggctggtggctgagataagcgccgacggcgaagagacgcgttaccgctacgacgccgcggggcgtccggtgcagctcgatcgcccggaagggtggacagagtcgctcaaatggaacgaacgtggtctgccggtgaagcatgcgggcgccgacgggaaagagagcgagttcagatacgacgaggcagggcgcttaaccgccacccgtaatacgcagggtgaagaggtgcgccgccgctgggacagccgcgggcgtctgattgccctggaaaacgaaaacggcgaagcgtatcagttccgctggggcgcagactcgctgctgctggaagaggtggggctggatggcgtggcctcgcagtatcgctacgatgcctgcgggcgtacgatagcgcgcacctttgccgccggacatccggaggccattacccattccttcgcctggagcgcgagcggccagctggtcgcccgcaccacgccggaggggcagacgcgctaccactacaccccgtccggccttctgagccggattgggctgcatcccgcgctttcagccgatgcctggagtgccgaggccgagcaggagcttgtgtttgagtatgacgcgctcgggcgcgtcacgcgcgaaacgggcgagcacggggagctggcgtgggagtatgacgcgctgggtaaccgcacctccgtcacgctgcccgatggccgggagctgaaacagttctactacggcagcgggcatctgctcagcatcgcgcttgataagctctcggtctccgactttacccgcgacgaacttcaccgtgaaaccagccgtacgcaggggctgctaaccacacgcagcgaatatgaccgtctcggtcgactgcatcgccgggacgtttttaccggcaatgcccagcgcccgtcgccgcgccgctggtcccgccgctgggattacgactatcgcaataacctggtgcgggaaaagcgggacgataaccctttcaactag

SEQ ID NO: 525519 - DNA, 483 bp, Stenotrophomonas maltophilia
atgaatgataaaaaaatacaaatagttgatctgctgatttcgcatagtcaaatattgttacgctccagagactatgatgagaaactgagtcagtgggggagaggaaatgtttcgcaaagtgctgtacttcacaaggattatgttatattcgatccattgccagaggacgcgtttggagcaaacgtcaatatcaaaatagagaatgatttcaaattagatgaacatgctcagcgctgtattgttgtaccatttttcattacggataaacataagctgcaaatcgcatctgcaactgagaaattcgatttaaatattgatgtgaacgataaagtttattcactcttttatgaggtttgtgaaggtgaagaaatttactataatttcactcttgtaccggcaaaagaagctattaatgctaagtttttgctagatgacccttggggaggaataaaagaccatcctctcaaagaaggtattttttaa

SEQ ID NO: 525520 - DNA, 1113 bp, Stenotrophomonas maltophilia
  misc_feature (897)..(906): n is a, c, g, or t
atgggattcaaatgcggtatcgtcggtctgccaaacgtgggcaaatccaccctgttcaacgcgctcaccaaggcaggtattgaagcggcgaacttcccgttctgtaccatcgagccgaacaccggtgttgttcctatgcccgatccgcgtctggaccagctcgcagaaattgtgaagccgcagcgcattctgccaactaccatggagttcgtggacatcgcgggcctggtaaaaggcgcatccaaaggtgaaggcctgggcaaccagttcctgaccaacatccgtgaaaccgaagcgatcggccacgttgtgcgctgcttcgagaacgacaacattatccacgttaacaacaaagtggatccggctgacgacatcgacgtcatcaacaccgagctggccctttctgacctcgacacctgcgagcgcgccattcaccgcgtgcagaagaaagccaaaggcggcgacaaagacgcgaaagcggaactggctgccctggaaaaatgtctgccacagctggaaaacgcgggcatgctgcgcgcgctgaaaaacctgactgaagaagacaaagcggcgatcaaatacctgagcttcctgaccctgaagccaaccatgtacatcgccaacgttaacgaagacggtttcgagaacaacccgtacctcgacaaagtgcgtgaaatcgcagcggctgaaggttctgtggtggtagcggtttgcgcggccgttgaatctgatatcgccgagctggacgatgccgaccgtgaagagttcatggccgagctgggtctggaagagccgggtctgaaccgcgtgatccgcgcgggctatgagctgctgaatctgcaaacctacttcactgctggcgtaaaagaagtgcgtgcatggaccatccctgtcggnnnnnnnnnncctgtcggtgcgactgcgcctcaggcggctggtaagatccacaccgacttcgagaagggcttcattcgtgcgcagactatcgcgtttgaagactttatcacctacaagggtgagcaaggcgcgaaagaagctggcaagatgcgtgctgaagggaaagactacatcgttaaagatggcgatgtgatgaacttcctgtttaacgtctga

SEQ ID NO: 525521 - DNA, 585 bp, Stenotrophomonas maltophilia
gtgacgattaaactgattgtcggcctcgccaatccgggcgcagagtatgccgctacccgccataacgccggcgcctggtatgttgatctgctggcggaacgtctgcgcgcgcccctgcgtgaagaacccaagttttacgggtatacctcacgcatcaatcttgcgggtgccgacgtgcggttgctggtgccaaccacctttatgaacctgagcggcaaagccgtgtcggccatggcaacgttctatcgcatcaatccggatgagatcctggtggcccacgacgaactggatctgccgccaggcgtggcgaagttcaagctgggcggcggtcatggcggccacaacggccttaaagacatcatcagcaaactgggtaatacccctaatttccaccgtttgcgcgtgggaatcggccatccgggcgataaaaacaaagttgttggtttcgtactgggtaaaccaccggtttctgagcagaagttgattgacgaagcggtggacgaagcggcccgctgcaccgagatttggcttcaggacggcctgacgaaagccaccaatcgactgcacgctttcaaagcgcaataa

SEQ ID NO: 525522 - DNA, 276 bp, Stenotrophomonas maltophilia
atgaaacgcaaaaacgcttcaatgctcggtaacgtgctaatggggttgggactgttcgtgatggtcgccggtgtcggttattcaattttaaaccaattaccgcagcttgacctcccacaatactttgcgcatggcgcggtgctgagtatcttcctcggtgcggtattgtggctcgccggggcgcgcgtgagcggacatgaggaagtctgcgataaatactggtgggtgcgccattacgataaacgatgccgccgcgaccagcataagcacggctag

SEQ ID NO: 525523 - DNA, 1059 bp, Stenotrophomonas maltophilia
atgttgattcaggtgggtgaactggcgaaacgtgctgggatcaccgtgcggactttgcatcactacgagcaaacagggctgttgttaccttctgccagaagcgcggcaggctaccggctttataacctggcggatgtgcagcgtctgcatatgatccagacgctggcaaaagccgggctggagcttgccgaaatcagggattttctggaacagcgttcgctgtcattagcggaattactcgacgggcaaatcactttgctggacaagcaactgcgtagcatccatacgctgcgcaaccggctggtggaattgcgtaccgggctgaccgacgatgcgacgccggatctggaatcctggctacagactctggagttaatgaatatgtacgatcgctggtttagcaaagaagagttgcagcaactgccgtttgcggtagagaaagaggcgctggcggatatctggtcgggtctggtgacggaggttaaacattcactggaacagaacgtcagcgtcacggacgcgcgggcgaccgatttggcttcacggtggatggaacgcctggaacaggataccgcaggcaaaccggaatttttgacccgtctgaacgaaatgcacagcgtggagccgcagatgcaggagcaaaccggcattacaccggagattacggattacatcacgcgggcgtttgccgaatcaaagctcagcatctgggagaaatatctcactgccgaagagatggcctttacccgggcgcactactttgaccggatgatggagtggccgccgctggtggcaaagctacatcaggcgcagcgggataatctcagtcccgcttctgacgatgcgcaaaagctggcagaaaagtggctggttttattccagtcctatgcgggaacaaacccgcagacccagcaaaaatttcgtctcgccatgcagcaggagccgcatctgatgaaaggcacgtggatgacgcctgccgtgcttgaatggctccagcaggcgatcggggtgatgatgcaaagacgtatctctgcatcagatgactcacagatccgctaa

SEQ ID NO: 525524 - DNA, 1680 bp, Stenotrophomonas maltophilia
gtgaaaaacgtaacctcctcacatgttctgccctttcgcgccctcatcgacgcctgctggaaagagaaatacacgtcgtcacgcttcgttcgtgacctgatagccgggatcaccgtcgggattattgccatcccgctggcgatggcactggcgattggtagcggcgtcgcgccgcagtacgggctgtacacctcagccgttgcggggattgtgattgcgctgacgggcgggtcccgcttcagcgtctccggcccaactgccgcctttgtggtgatcctctacccggtttcccaacagtttggtctggcaggcctgctggttgccaccctgatgtccggcatctttttaattctgttcggtctggcccgctttggtcgcctgattgaatatattcccctttccgtgacgctggggttcacctcggggattgggattaccatcgggaccatgcagattaaggatttcctcggcctgcaaatggcccatgttccggagcactacttacagaaagtgggcgcgctgtttatggcgttgccgacggccaacctgggcgatgcagccattggcatcgttaccctcggcacactcatcgtctggcctcgcttaggcattcgtctcccggggcatctccccgctctgctgctgggctgcgcggtgatgggcgtcgtcaacctgctcggtggacaggtcgccaccattggctcccagttccactatgttctggcggatggctcacagggtaacggtattccgcagctgctgccgcagctggttctgccgtgggacatgccgggctccagcttcaccctgagctgggattcccttcgcgctctgctgcctgccgcgttctccatggcaatgctgggcgcgattgaatccctgctctgcgccgtcgtgctcgacggcatgaccggcactaagcacaaagccaacagcgaactagtcggtcagggcttagggaacatcgttgcaccgttcttcggcggtattacggctacggctgcgattgcccgttccgccgcgaacgtacgtgcgggcgcgacatcaccggtttccgcggtcattcactccctgctggtgatcatggcgctgctgatccttgccccactgctttcatggcttccgctctctgccatggctgcgctgctgctgatggtggcctggaatatgagtgaggcgcataaggtggtgaatctgctgcgccgtgcgccgaaagatgacatcatcgtgatgctgatctgcatgtcgctgaccgtgctgtttgatatggttatcgctatcagcgtcggcatagtgttggcctcgctgctgtttatgcgccgcatcgcgcagatgacgcgtctctccccggttaacgttgaggtgcctgaagatgtgctggtgttgcgcgtgattggcccgctgttcttcgccgcggcggaaggtttgttcagcgatctggcgtcccgcatcgcgggcaaacggattgtggtgctgaagtgggatgccgtcccggtgctggatgccggcggtctggatgccttccagcgctttgttgcccgcctgccggaaggctgcgagctgcggatcagtaacctcgaattccagcccctgcgcaccatggcgcgcgcgggcgtacagccgatccctggccgattgtccttctaccctaaccgtgaagctgcattagcggatctgtga

SEQ ID NO: 525525 - DNA, 948 bp, Stenotrophomonas maltophilia
gtgcctgatatgaagctttttgctggtaacgccaccccggaactagcacaacgtattgccaaccgcctgtacacttccctcggcgacgccgctgtaggtcgctttagcgacggcgaagtcagcgtacaaattaacgaaaatgtacgcggtggtgatattttcatcatccagtccacctgtgctccaacgaacgacaacctgatggaattggttgttatggtcgacgcgctgcgtcgcgcttctgctggccgtatcactgctgttattccttactttggctatgcacgtcaggaccgtcgcgtccgttccgcgcgtgtgccaatcaccgctaaagttgtcgcagacttcctgtccagcgtcggcgttgaccgcgtactgacggtcgacctgcacgcagagcagatccagggcttcttcgacgtgccggttgataacgttttcggcagcccaatcctgctggaagacatgctgcaactgaatctggacaacccgattgtggtttctccagacatcggcggcgtggtacgtgctcgagctatcgcgaagctgctgaacgataccgacatggcgatcatcgacaaacgccgtccgcgtgctaacgtttcacaggtgatgcacatcatcggtgacgtggctggccgcgactgcgtgttggtggacgacatgatcgataccggcggtacgctgtgtaaagccgctgaagcgctgaaagagcgtggtgcgaaacgcgtattcgcttacgcgactcacccgatcttctccggcaatgcggtaaacaacctgcgtaactccgtcatcgacgaagttgtggtgtgcgataccattccattgagtgacgagatcaaagcgctgccaaacgtgcgtacgttgactctgtccgggatgctggccgaagcgattcgtcgtatcagcaacgaagaatccatctctgcaatgttcgaacactga

SEQ ID NO: 525526 - DNA, 870 bp, Stenotrophomonas maltophilia
atgatgacccactggccctctcccgcaaaactgaacctgtttctctacattaccgggcagcgcgctgacggctatcacaccctgcaaaccctgtttcagtttgtcgactacggcgacacgatctcaatcgaaccgcgtcaggacgggcagatttgcctgctgacgccagtcgacggcgtggcgcatgacgataacctgatcgtgcgcgctgcccgcctgcttatgaaaacggcgtcgtcgtcggatcgtctgccagcgggaagcggtgcggatatccgtatcgacaaacgcctgccgatgggcggcggtcttggcggcggttcgtcaaatgctgcaaccgttttggtggcgcttaaccatctgtggggttgcggtctgacaacggacgagctggcagcgttagggttgacgctgggcgccgatgtaccagtgtttgtgcgcggccacgcggcgtttgctgaaggggtgggcgaaatcctcacgccggtcgatccgccggaaaaatggtatctgatcgttcaccctggcgtgagcgttcctaccccggtcatctttaaagatcctgacctgaaaagaaataccccggtacggtcaataaaaacgttattaaattgtgaattcagcaacgattgcgaggatatcgcaagaaaacgttttcgcgaggttgatgcggtgctttcctggctgttagaatacgcgccgtcgcgcctgaccggtacaggggcctgtgtctttgctgaatttgacaccgaatccgccgcccgtcaggtgcttgagcaagcgccggactggctgcatggttttgtagcacgcgggatgaacacctcccccctacagcaggccattctggcgcagactgagtttcggtga

SEQ ID NO: 525527 - DNA, 612 bp, Stenotrophomonas maltophilia
atgacccgaatgattcgcctgctgcctctggcggccctggttctgaccgcctgttccgttcatcagccgaagggcccgggcaaaagccccgactcaccgcagtggcatcagcaccagcaggatgtgctgaaattaagccagtaccagacccgcggtgcatttgcatatctctctgacgaacaaaaagtttatgctcgcttcttctggcagcaaacggggcaggacaactatcgcctgctgctgctcaacccgctgggcagcaccgagctggagcttaacgcgaagcctggcgaagcgcagatcaccgataacaaaggccagcactacaccgcgactgacgccgaagagatgattggcaagctgaccgggatgccgattccgctcaatagtctgcgccagtggatccttggcctgccgggtgacgccaccgactatacgcttgatgaccaataccgtctgagccaggttaactacacccagggcggtaaaacctggaaagtggtgtacagcgcgtatgacagcaagactcaaccatcgctgccgtccaatatggagctgacgcagggtagccagcgtattaagctgaaaatggacaactggatcgttaaatga

SEQ ID NO: 525528 - DNA, 1257 bp, Stenotrophomonas maltophilia
atgaccctattagcactcggtattaaccacaaaacggccccggtttcactgcgagaacgcgttacgttttcgccggatacgctcgacctggcgctggatagcctgcttgcacagccgatggtgcagggtggcgtggtgctgtcgacgtgcaaccgtaccgagctctatttaagcgtggaagagcaggacaacctgcacgaggcgctaatccgctggctatgtgactatcacaacctcaacgaagaagagctgcgcaacagcctgtactggcatcaggataacgatgcggtcagccatctgatgcgtgtggccagcggtctggattcgctggtgctgggcgagccgcagatcctcggccaggtgaaaaaagccttcgcggattcccagaaagggcatctgaaagccagcgaactggagcgaatgttccagaagtcattctccgtggcgaagcgtgtgcgaaccgaaaccgacattggcgccagtgcggtttcggttgctttcgcggcctgtactcttgcccgtcaaatctttgaatcgctgtcgaccgtcaccgtactgctggtgggggcgggcgaaaccatcgagctggtggcgcgccatcttcgcgaacacaaggtgaagaagatgatcatcgctaaccgcacccgcgaacgtgcgcaggtgctggcagatgaagtgggcgctgaggtgattgcgctgagcgacatcgatgaacgtctgaaagaggcggacattattatcagttctaccgccagcccgctgccgattatcgggaaagggatggtcgagcgtgcgctgaaatcccgccgcaatcagccgatgctgctggtggatatcgccgttccgcgtgatgtcgaaccggaagtgggcaaactggcgaacgcctacctgtacagcgtggatgacctgcaaagcatcatttcgcacaaccttgcccagcgtaaggcggcggctgtgcaggcggaaaccatcgttgaacaggaaaccagcgaatttatggcctggctgcgcgcgcaaagcgtcagcgagaccatccgcgaataccgcggtcaggcggagcaggtgcgtgatgacctgacggccaaagcgttagcggcccttgaacagggcggcgacgcgcaggcgattatgcaggatttagcctggaaactgaccaaccgcctgatccatgccccaaccaaatctcttcagcaggctgcccgtgacggggacgatgaacgcctgactattctgcgcaacagcctcgggctggaatag

SEQ ID NO: 525529 - DNA, 1083 bp, Stenotrophomonas maltophilia
atgaagccttctatcgtcgctaaactggaagctctgcacgagcgccatgaagaagtccaggcgctgctcggcgatgccgggaccattgccgaccaggaacgttttcgcgcgctgtcgcgtgaatacgcgcagttaagtgatgtttcaaaatgctttaccgactggcgacaggtccaggaagatatcgaaaccgcgcagatgatgctcgacgatcctgaaatgcgcgagatggcccaggaagagttgcagcacgctaaagcgcggtcagaagagatggaacagcagcttcaggtccttctgctgccaaaagatccggacgatgagcgtaacgcttttgtggaagtccgcgccggtaccggcggcgacgaagcggcgctgttcgccggagatctgttccgtatgtacagccgttatgcggaatcacgccgctggcgcgtagagatcatgagcgccaacgaaggcgagcatggcggctacaaagaggttatcgccaaaatcagcggcgacggcgtttatggtcggctgaagtttgaatccggcggtcaccgcgtgcagcgcgtgcctgcgacagaatctcagggacgcattcacacctcggcctgtacggtggcggtcatgcccgagctgccggaagcggaactgccggatatcaacccggcggatctgcgcatcgacaccttccgctcttcaggggcgggtggtcagcacgttaacaccaccgactccgctatccgtattactcacctgcccaccgggattgtggttgagtgtcaggacgagcgatcccagcacaagaacaaagctaaggcgttatccgtgctgggtgcccgtatccacgcggcggaaatggcgaaacgccagcaggcggaagcctctacccgccgtaacctgctgggcagcggcgaccgtagcgatcgtaaccgcacctataacttcccgcaggggcgcgtaaccgaccaccgcatcaacctgacgctctaccgtctggatgaggcaatggaaggcaagctcgatatgctgattgagcctatcgtgcaggaataccaggccgaccagctggcggcgctgtccgagcaggattaa

SEQ ID NO: 525530 - DNA, 831 bp, Stenotrophomonas maltophilia
atggattttcagcgctggttacgtgaggcggcccgtgaactttcagaaagtgaaagcccgaagcgggacgccgaaattctgcttgagcatgtgacgggtaaagcccgcacgtatctgctggctttcggcgaaaccgaactgacagctgaacagctatcgcagctggaggcgctgctcgcccgccgtaaaaccggcgagccggtggcgcatctggttggcgagcgcgagttctggtcacttccgctgtatgtctcagcggcgacgctgatcccgcgcccggacaccgagtgtctggtggagcaggcgctggcgcggttaccggcgcagtcgtgtcagatcctcgatctgggtaccggcaccggcgcgattgcgctggcgcttgccagcgagcggccggactgcaccgtgacggcggtagacgtgatgcctgatgcggtcgccctcgcgcggcgcaacgttgaacggctgaggctgaacaatgtttccgttctgcaaagcagctggtttgccgcgcttgaaagccgcatgttcgaaatgattgtcagcaatccgccctacatcgacgaagacgatccgcatctcgcgcagggcgacgtgcgtttcgaaccgttgaccgcgctggtcgctgcgaatcagggacttgcggatctcgatcacattgtgacaacgtcacggcaacatttgcttcccggtggctggctgctggtggaacatgggtggacgcagggagaggcggtgcgagcactgtttacgcgtgccggatacgccgccgtggaaacctgccgggattacggcggcaatgaacgtctgacgctggggcagtggtcatga

SEQ ID NO: 525531 - DNA, 393 bp, Stenotrophomonas maltophilia
atgagcctgtttacgctgctaatctccgttcacctggtttccgttgccctgaccatcggctttttcattgtccgctactggtggcgctacagcaataatccgctgattaacgcccgctgggtacgtatcgccccacacggtatagacacagtgctgttcctttccggagccgggttaatgtggaagaccggctatctgccatttactgataaaggcctatggctgactgaaaagctgtttggcgttatcatctacatcgttttgggttttatcgcgcttgggcgtcatcgtccgcgcagccagcagacagggtttatcgcctttctgctgggtctggtggtgctgtacatcatcattaaactcgccaccacaagaataccgttactggggtaa

SEQ ID NO: 525532 - DNA, 810 bp, Stenotrophomonas maltophilia
atgaggtccttagccgatttcgaatttaacaaagtgccgctatgcgatggtatgatcctgatttcagagatgatccgcgacgatttcacatcacagtacgtttacgctgaactggaaaatctggtcagcctggcgcgcgaagagatcaatcaggcacgtccgcaagactggcaattagagaagctgattgagcttttctacggcgaatggggtttctgcgacacgcgaggcgtgtatcgcctgtctgacgcactgtggctggaccaggtgctgaaaaatcgacagggtagcgccgtcgcgttgggcgccattttactgtgggttgcgcaccgactggatattccactggtgccggtcattttccccacgcagatgattttgcgggcggagtggctggacggtgagatgtggttaatcaatccgtttaacggcgacacgctggatgagcatacgctggacgtctggctgaaaggcaacatcagcccgatagcggagctgttcaatgaagatctcgatgaagccgataacgccgaagtgatccgcaagctgttggatacgctgaagtctgcgctgatggaagagcgtcagatggagctggccctgcgcgcaagcgaagtgctgttacagttcaatccggaagatccgtacgaaatccgcgaccgcggcctgatttatgcgcagctcgactgcgaacacgtggcgctgaatgatttgaattatttcgtcgagcaatgtccggaagatccgatcagcgaaatgattcgcgcgcagatcaacgcgatcgcgcataaacacattacactgcattaa

SEQ ID NO: 525533 - DNA, 855 bp, Stenotrophomonas maltophilia
atgaaacaaaaagtggttagcattggtgatatcaacgtggcaaacgacctgccgttcgtgctgtttggcggtatgaacgttctggaatcccgcgatctcgctatgcgcatctgtgaacactacgtgaccgtgacccagaagctgggcatcccgtacgtgtttaaagcctcttttgacaaagccaaccgctcctccattcactcctaccgtggcccgggcctggaagaggggatgaagattttccaggagctgaaacagacgtttggcgtgaaagtgatcaccgacgtgcacgaagcgtctcaggcacagcccgtggctgatgtggtagacgtgattcagcttccggcgttcctggcgcgccagactgacctggtagaagcgatggcgaaaaccggtgccgtgattaacgtgaaaaaaccgcagttcgtgagccctggccagatgggtaacatcgtcgataagtttatcgaaggtggtaacgaccaggtgatcctgtgcgaccgtggttcaaacttcggttatgacaacctggttgtggatatgctgggcttcagcgtaatgaagaacgtctctaaccagtctccggtgattttcgacgtgacccactccctgcaatgtcgcgacccgtttggcgccgcgtctggcgggcgtcgtgcgcaggtgaccgaactggcgcgcgccggtatggcaaccggcctggcgggtctgttcattgaagcgcacccggatccggttaacgcaaaatgcgacggtccatctgcgctgccgctggataagctggagccattcctgaaacagattaaagcgattgacgatctggtgaagagcttcgacgagctggataccagcaactaa

SEQ ID NO: 525534 - DNA, 1101 bp, Stenotrophomonas maltophilia
atgacagcaacacacgaggcggtaaagacccgccacaaggagacctctctcattttcccggttctggcactggctgtgctgctcttctggggaagcagtcagtcattgccagtggttgtggggatcaatattctggctctggtgggtattttaaccagtgcatttagcgtggtacgccatgcggatgttttagcccaccgtcttggagagccgtatgggtcattaattttaagcctttcggttgtgattcttgaggtcagtctaatttccgcattaatggccaccggcgacgccgcaccaacgttaatgcgcgatacgctctactccatcattatgattgttaccggcggcctggtcggtttttcgcttttattaggtggccgcaaatttgccacccagtacatgaacctttttggcattaaacagtatctgatcgccctgttcccgctggcgattatcgtgctggtattcccgatggcattgccgggcgcaaacttcaccaccggccaggcgctgctggtggcactgatttccgcggcgatgtacggcgtgtttttgctgatccagaccaaaacgcaccagagcctgtttgtttacgagcatgaagacgacggcgacgatgatgacccgcatcacggtaagccgtcggcccacagcagcgcgtggcacacggtttggctaatcgtgcatctgattgcggtaattgcggtcaccaagatgaatgcgaacccgctggaggcgctgttaactgaactgaacgcgccggtcgcctttaccggtttcctggtagccctgttgatcctgtcgccagaaggcctgggagcgctgaaagcggtgctcaataatcaggtgcagcgtgcgatgaatctgttctttggctccgttctggcgaccatctcccttaccgttccggtggtaacgcttattgcctttatgacggggaatgaattgcagtttgcgctgggtgcaccagagatgattgtgatggtagcgtcgctactcctgtgccagatttccttctcaaccggccgcaccaatgtgctgaacggcgcggcgcatatggcgctgtttattgcgtatctgatgacgatatttgcgtaa

SEQ ID NO: 525535 - DNA, 315 bp, Stenotrophomonas maltophilia
atgcggacaataatagatgccatcaagatcgacgccacgatcggccagagaccagtccatccattccgtcagcgtctcgaactgcgcttcggtgaatttaccccgggcgataccggactgattagttaccaccaccagcgcatagcccatctctttcagctggcgcatggcatctattacgccctcaataaattcgaactcatcaatctcatggacgtaaccgtgatccacattaattgtgccgtcacgatcgagaaaaattgcgggtacagattttgccaccggtttgctcctgaaaaaggcttgttcagctag

SEQ ID NO: 525536 - DNA, 1032 bp, Stenotrophomonas maltophilia
atgattaaactttccaatatcaccaaagtgttccagcaggggaaccgaaccattcaggcgctgaacaacgtcagcctgcatgtgcctgctggtcagatttatggcgtcattggcgcatcgggtgcgggtaaaagtacgctgatccggtgtgttaacctgcttgagcgcccgacccagggcagcgtagaagttggcggccaggagcttaccgctctctcagaaaaagaactcaccaaagcgcgtcgccagattggcatgattttccagcactttaacctgctggcctcacgcacggtttttggaaacgtggcgttgccgctggagctggataacacaccaaaagaagaggttacccgacgcgtcaccgaactgctggatctggttgggctgggtgataagcatgacagctacccggccaacctctcaggcgggcaaaagcagcgtgtagcaatcgctcgcgcgctggcaagcaacccaaaagtgctgctgtgtgatgaagccaccagcgcgttagatccggccaccacgcgttctatcctggaactgctgaaagacattaaccgtcgtctgggcctgactatcctccttattacgcacgaaatggacgtggtgaagcgtatctgtgactgcgtcgccgtcattagcaacggtgagctgattgagcaggacacggtcagcgaagtcttctcgcacccgaaaacgcctctggctcagcagttcattcagtccacactgcatctggatattccggaagattatctggaacgtttaaaaacagacgcaacgcctgacagcgtcccgatgctgcgcatggagttcacgggccagtccgttgacgcaccgctgctgtccgaaaccgcgcgtcgctttaacgtgaataacaacattattagcgcgcagatggactacgccggtggcgtgaagttcggcattatgctgacggaaatgcacggcacacaggaagaaacccaggcggcaattgcctggctgcaagaacatcacgtaaaagtagaggtgctgggttatgtctga

SEQ ID NO: 525537 - DNA, 654 bp, Stenotrophomonas maltophilia
atgtctgagccgatgatgtggctactggttcgcggcgtttgggaaacgctggcaatgaccttcgtatcgggcttttttggttttgtgattgggctgccggtcggcgtactgctgtacgtcacgcgcccgggtcaaattattgaaaacgcgaagctgtatcgcacgctctctgcgctggtgaacattttccgttctataccgtttattatcctgctggtgtggatgattccgtttacacgcgttattgtcgggacgtcgattggtttgcaggcggcaattgtcccgctaaccgtaggcgccgcgccgtttatcgcccgtatggtggaaaacgccctgctggaaatcccaacaggcctgattgaagcttcccgcgctatgggtgcgacgccaatgcagatcgttcgcaaagttctgctgcctgaggcgctgcctgggctggtgaatgcagcaaccatcacgcttatcaccctggtcggttattccgcgatgggcggcgccgtgggtgctggcggtttaggacagattggatatcagtacggctatattggctataacgctaccgtaatgaataccgttctggtattgctggttgtgctggtttacttaatccaattctctggcgatcgtatcgtccgggctgttacgcataaataa

SEQ ID NO: 525538 - DNA, 816 bp, Stenotrophomonas maltophilia
atggcgtttaaatttaagacctttgcagcagtaggcgcactgattggttcgctggcactggtgggttgcggtcaggacgaaaaagatccgaaccacatcaaagtaggcgttatcgtcggtgcagagcagcaggttgctgaggccgcgcagaaaatcgcgaaagaaaaatatggcctggacgttgagctggtgaccttcaacgattacgttctgccgaacgaagcgctgagcaaaggcgacattgacgctaacgccttccagcataaaccgtacctggatcaacagatcaaagatcgcggctacaagctggttgctgtcggtaacaccttcgtttacccgattgccggttattccaagaaaattaaatctctggatgaactccagccgggttcacaggttgccgtccctaacgacccaaccaaccttggccgttcgctgcttctgctccagaaagtgggcctgattaaactgaaagaaggtgttggcctgttgccgaccgttctggacgtgaccgaaaacccgaaaaatctgaaaattgttgagctggaagcccctcagctgccacgttctctggacgatgcacagatcgcgctggccgttatcaacaccacttacgccagccagatcggtttgacccctgcgaaagatggcatctttgttgaagacaaagattccccgtacgtcaacctgatcgtgactcgcgaagacaacaaggacgcggaaaacgtgaagaaattcctgcaggcatatcagtctgaagaagtttaccaggaagccaataaggtgtttaacggcggcgcggttaaaggctggtaa

SEQ ID NO: 525539 - DNA, 405 bp, Stenotrophomonas maltophilia
atgcgtgctttaccgatctgtcttttagcactgatgctgagcggctgttctatgctaagcagatctcctgttgaacccgttcaaagcactgcaaccccgccaaaagcggagccagcaaaaccgaaagcgcctcgcgctgcgccggtacgtattattactaaagccgacgagctggtcggtaagccattccgtgaactgggcgaagtgagcggcgaatcctgccaggcaacgaatcaggactcccctccaaatatcccaacagcccgcaagcgtatgcaaatcaacgcgtcgaaaatgaaagccaacgcggtgctgctgcacagttgcgaggtcaccagtggtacgccgggctgctaccgtcaggcggtatgtatcggttctgcgcttaacatcacggcgaaatga

SEQ ID NO: 525540 - DNA, 708 bp, Stenotrophomonas maltophilia
atgagttcatttcagttcgagccgataggcgtgatccgctccccttataaagaaaagttcgccgtgccgcgtcagccgggactggtccttaacggcggcggcgagctgcatcttgtcgcgccgtataatcaggccgatgcagtgcgcgggcttgaggcattcagccatttatgggtggtgtttgtttttcaccagaccatggaaggcggctggcgtcctaccgtgcgtcctcctcgtctgggcggaaatgccagaatgggagtttttgccacccgctcaacgttccgaccgaatccagtcgggatgtcgctggtcgaactgaaagggatacgctgtcagaaagatcgggtgatcctggagttaggtagccttgacctggttgatggcacgccggtcatcgatattaaaccttacctgcccttcgccgaagcgctgccggatgcccgtgcaagctatgctcaggacgccccacaggcagagatgccggtttacttcacatctgaaataacgacgcaaatcagccagctggaaaagcgctatcctcgtctgcgtgactttatcgtcgaagtcctggcgcaggaccctcgtcccgcctatcgcaaagaggaagacgcaggaaaaacgtacgccgtctggctgctggactttaacgtgcgctggcgcgtaactgatgcaggttttgaagtgtttgccctggaacccaggtaa

SEQ ID NO: 525541 - DNA, 1719 bp, Stenotrophomonas maltophilia
atgcgtactagccaatatctgctctccactctgaaggagacacctgccgacgccgaggtgatcagccaccagctgatgctgcgcgccgggatgatccgcaagctggcctccgggttatacacctggctgccgaccggcgtgcgcgtcctgaaaaaagtcgaaaacatcgtgcgtgaagagatgaacaacgccggtgctatcgaggtgttaatgccggtcgttcagccctctgaactgtggcaggagagcggtcgctgggagcagtacggtcctgaactgctgcgtattgccgatcgtggcgatcgtccattcgtcctcggcccaacgcatgaagaagtgatcaccgatctgatccgtaacgagctgagctcttacaaacagctgccgctgaacttcttccagatccagaccaagttccgtgacgaagtgcgcccacgctttggcgtgatgcgctctcgcgaattcctgatgaaagatgcctactctttccatacttctcaggaatcactgcaagagacctacgacaaaatgtacgtggcctacagcaaaatcttctcccgcatggggctggatttccgtgctgtacaggctgataccggttcaatcggcggtagcgcctctcatgaattccaggttctggcgcagagcggcgaagacgatgtaattttctctgactcctctgattacgccgccaacattgagttcgcagaagcgctggcaccaaaagaaccacgcggcgcggcaacgcaagagatgacgctggttgatacgccaaacgcgaaaaccatcgctgagctggttgaacagtttaatctgccgatcgaaaaaaccgtgaaaaccctgctggtgaaatcggctgaaggcagcgcttacccgctggtagccctgctggtccgtggcgatcacgagctgaacgaagtgaaagccgagaagctgccgcaggttgccagcccgctgaccttcgcaacggaagccgaaatccgcgccgtggtgaacgcaggcccaggttctctgggtccggtgaacatgcctgttcctgtggtcattgaccgcaccgttgcggcaatgagcgacttcgctgcgggcgcaaacatcgacggtaaacactacttcggcatcaactgggatcgtgacgtggcgacgccggaagtggctgacatccgtaacgtggtcgcaggcgatccaagcccggacggcaagggtaccctgatgattaaacgcggtatcgaagtaggccacatcttccagctgggcgataagtactcgcgcgcaatgaacgctgccgttcagggcgaagatggtcgtaaccaggttctgaccatgggctgctacggcattggggtaacgcgcgttgttgcggccgctatcgagcagaactatgacgaacgcggaatcgtctggccggataacatcgcgccgttccaggtggcgatcctgccaatgaacatgcacaagtcttaccgcgtgcaggagctggcagagaaactctacgctgagctgagcgcgaaaggtatcgatgtgctgatggatgaccgtaaagagcgtcctggcgtgatgtttgctgatatggaactgatcggtattccacacaccatcgtcatcggcgaccgtaacctcgacagcgatgagattgaatacaagtaccgtcgcaacggcgaaaaacagatgctcaagacgggcgacattcttgattacctggtgaaagccataaaaggctaa

SEQ ID NO: 525542 - DNA, 699 bp, Stenotrophomonas maltophilia
gtgaaaaaagcattattatcagcgctggccgtgacaagcctgttcgcgctttttggctgtaacaaccgttcagaaacacaggtactacagccaacgcaaaacgaagaattgaagccgatgcagcagagctggcgcggcgtattgccatgtgcagattgtgaaggcatcgaaacctctctgttcctgcaaaaagatggcacctgggtgatgaaccagcgctatcagggggcgaaagagccgtcttcttttgcaacatacggaacatgggcgcgtacggctgaaaagctggtattgactgataccacgggcgataaaacgtatttccgcgccaaaggcgaggggatggagatgctcgatcgcgaaggcaatccgattgaatcccagttcaactacacgctggccccggtaaaagcgaccctgcctgcaaccccaatggcgatgcgagggatgtatttctacatggcggatgcggcgatcttcacggactgtgcaaccgggaagaaagtcagcgtggcgaacaatgcccagctggagcgtgactatgccgtcgcgcgcggtaacgacagcaaaccagtgttgctgacggttgaagggcattttacgctggagccaaaccccgatagcggtgagctggtgaaaacgctggtggcagataaagacgcgaagtttgctgcgggtaaagactgcgaaagcaaataa

SEQ ID NO: 525543 - DNA, 417 bp, Stenotrophomonas maltophilia
atgattgagttgtcccgaaacgtcagcatccctgatcacgagctggagatcaccgccatccgtgctcagggcgcaggggggcagcacgttaacaaggcctcaacggctatccatttgcgctttgacatccgggcctccagcctgccagagtattataaagaaagtctgcttgccgccagccatcatctgatcaccagtgaaggtgtgattgtgattaaagcgcaggaatatcgcagccaggaaatgaaccgggaagcggcactttccagactggcggcggtcataaaagagctgacggctgtacaaaaaagtcgccgggcaacacgtccaacgcgggcatcgaaagaacgtcggttgtcatcgaaggcgcagaaatccaccgtaaagtcactgcgtggcaaagtccgtcacccgtaa

SEQ ID NO: 525544 - DNA, 546 bp, Stenotrophomonas maltophilia
atggcgctgaaagcgacaatttataaagctgtggtcaatgtggcggatcttgaccgtaaccagtttctggatgcgtcattgacgctggcgcgtcacccttctgaaacccaggagcgcatgatgctgcgcctgctggcgtggattaagtatgccgacgagcgtctgcaatttacccgtggtttaagcgcggaagatgaaccggaagcctggctgcgcaacgatcatctgggtatcgatttatggattgagcttggcctgccggatgaacgccggatcaaaaaggcttgcacccagtcagctgaagtggcgttgtttgcctataaccagcgcgcggcggagatctggtggcagcaaaacaaaaataaatgtgcgcagttcaaaaatcttaccgtctggtatctggatgatgaacaactggcacagctgagcgcattcgccagccggacaatggcgcttcaggcaacgattcaggacggcgccatctggctttccgattctcagaataatctggaaattcatctcacggcctggcagcccgtatcatga

SEQ ID NO: 525545 - DNA, 201 bp, Stenotrophomonas maltophilia
gtgaataattattgtgagttgattcgcagacggtatgcggaaattgccagcggagatctggggtacatcccggatgcgttgggctgtgtattgaacgtgctgaatgaagtggcctctgatgagagcctttctgaatcggtcagggaaaaagcagcgtatgctgcggcgaatttactggtgagcgattatgtcgatgaatga

SEQ ID NO: 525546 - DNA, 261 bp, Stenotrophomonas maltophilia
atgtcgatgaatgatatctatcaacccatcaattgtgatgactatgacaacctcgaactcgcctgccagcatcatttaatactgacgctggagctaaaagatggcgaagtgctaaaggcaaaggccagcgatctggtttcccgtaaaaatgtggaatacctggttgtggaagatgcaggtgcaacgcgtgagctacgcctcgacaaaattgccagtttcagccatccggaaatcggcaccgtcgtggtgagcgaatcctga

SEQ ID NO: 525547 - DNA, 1287 bp, Stenotrophomonas maltophilia
atgaccttacccgctatcgcgcacgccgtttcaccctaccgccagctgctggtggggttcagcggtggcctggattccaccgttttgctgcaccgtcttaagctctggcgcgaccgtgagcctgacgtccagctgcgggcgatgcatatccatcacggcttaagcccccatgccgacgactgggtggcgcactgcgaagcggtgtgctcagggtgggcgatcccgctaatcgttgaacgcgtcacgcttgaggatgaagggctgggtattgaggcgcaggcgcgcaaagcccgctacgccgcgttttccggcgcgttacagcctggagaagcgttggtcaccgcgcagcatctggacgaccagtgcgagacgtttttactggcgctcaagcggggcagcgggcctgcgggtttatccgccatgcctgagcgtgctggttttgctgaaacagagctcatccgcccgctactgggtgagacgcgcgcatcactggaagcctgggcgcagcaacatcatctgcgctggattgaagacgaaagcaatcaggacgacagttacgaccgtaacttcctgcgcctgcgcgtcttaccgctgctgagtgagcgctgggcccatttttccgaagcggtggccagaagtgccatgctttgtgctgaacaggaaagcttgctggatgagttgctgagcggggagctgaatacgctgactaccgctgacggtgcccttaacattgcgccgttgaaagtgatgagccccgtgcgtcgggctgctctgattcgtcgctggctggcttcccaccgtgcggttatgccgtcccgggcgatgctcaaccgtatctgggaagaagttgcacaggcgcgggaagatgccgcaccgtgtatacgcctgaatggttatgacgtcaggcgctataaagagcaactctggtgggtgaaatctgtgccgtcgctggctgacgttgtgcttgactggccgtcgccggaaaaagcattaacgctaccgttgaatgccggtgtcgttgcgttaagccattcgggcaatgtgcgtctacctgagccggacgagaacgtcaccatacgcttcagggccagcggcatgctgcatatcgttgggcgtaacggcgggcgtaaactgaagaaaatctggcaggaacagaacgttccgccctggcaacgtgataccacgccgcttctgttttacggcgacacgctcatcgcggcggcaggtgtgtttattacccaggaagggtgggctgaagcgggtgtcaattttgaatggaaagcgtaa

SEQ ID NO: 525548 - DNA, 390 bp, Stenotrophomonas maltophilia
atgctgggtttaaaagctgttcatcatattgcgatcattgccaccgattacgcgaaaagtaaggccttttactgcgacattctcggctttacgctgttgagcgaggcctaccgcgaggagcgcgattcctggaaaggcgatctggcgttaaacggacaatatgtgattgaactgttctcttttcctttcccgccagcgcgtccttcgcgcccggaagcctgcggcctgcgccacctggccttcagcgtcgataacctggacagcgcggtaaagcatctggaagcccacggcgtggcctgtgaagcaattcgcatcgatcccttcaccgataaacgtttcacttttttcaacgatccggacggtctgccgctggagctttatcagcagtaa

SEQ ID NO: 525549 - DNA, 2133 bp, Stenotrophomonas maltophilia
atgaacatcattgccatcatggggccacacggcgtcttttataaagacgaacccatcaaggagcttgagcaggcccttaaagcacgcggatatcagctaatctggccgcaaaacagcgccgacctgctgaaattcatcgaacacaatccgcgcatctgtggcgtgatattcgactgggacgaatacgacatggagttgtgcagcgagatcaataagctcaacgaatatcttccgctgtacgcctttatcaacactcactcgaccatggacgtcagcgcccacgatatgcgtatggcgctgtggttcttcgaatacgcgctcggcgtggctgaggacattgcgacccgcattcagcagtacaccggcgaatatctggataacatcaccccgccgtttacgcgtgcgctgttcacctatgtgaatgaagggaagtacaccttctgtacgccaggccacatggcgggaacggcctatcaaaaaagcccggtgggatgcctgttctatgatttctttggcggtaacacgctgaaggcggacgtgtcgatttcggtcaccgagttaggctctctgctggatcataccggcccgcatctggaagccgaagagtacatcgcccggacctttggtgccgagcagagctacatggtgaccaacggaacctcgacatcgaacaagatcgtcgggatgtatgccgcgcctgccggtagcacgttgctgattgaccgaaactgccataaatcactggcgcatttgctgatgatgagtgacgtcgtgccgctctggctgtctcccacgcgtaatgcgctggggatcctcggcggcattcctcgccgtgagttcgcgcatgaagccattgaaaataagatcgcggcgatccccgaggcaagctggcctgtgcatgcggtgatcaccaactccacctatgacgggctgctttacaacacgaactggatcaagcagacgctggacgtgccgtcgattcactttgactccgcgtgggtgccttacaccaatttccacccgatttactcgggtaaaagtgggatgagcggcgagcgggtgccgggtaaggtgttcttcgagacgcagtcgacgcacaaaatgctggccgcgttttcccaggcgtctctcattcacatcaagggtgagtacgacgaggacaccttcaacgaagccttcatgatgcacacgaccacgtcgcccagctacccgctggtggcgtccatcgaaacggcggcggcgatgctgcgcggcaatcccgggaaacgccttattaatcgttcggtggagcgggcgctgcatttccgaaaagaggttcagcgacttaaagatgaagcggacggctggttctttgatatctggcagccggaagagattgatgaagcagaatgctggcccgtcgcgccgggggagagctggcacggttttcgggatgctgatgcagaccacatgttcctcgatccggttaaggtgacgatcctgacgccgggtatggatgagcagggtgtgatgggtgaggaagggatcccggctgcgctggtggcgaagttccttgatgaacgcggcgtggtggtggagaaaaccggcccctataatttgctgttcctgttcagtatcgggatcgataaaacccgcgcgatggggctgctgcgcggactgatggagtttaagcgcgcatacgatcttaacctgcgggtgaagaatatgctgccggatctctacgcggaagatcctgacttctaccgcaatatgcgtattcaggatctggcccaggggatccacaggctgatccgccagcacgatctgccgcgcctgatgctgcaggcatttgatgttctgcctgaaatgaagctgacgccgcacagggcgtggcagcgccaggtgaaaggggaggttgaaaccattgagctggagaacctggtcgggcgggtatcagccaacatgatcctgccttatccaccgggcgtaccgctgctgatgccgggcgagatgatcaccgaggagagccgggcggtgctcgatttcctgctgatgctttgttcgatagggcgccactatccgggctttgagacggatattcacggtgcgaaacgcgatgataacggcgtgtactgggtgagagtcctaaaataa

SEQ ID NO: 525550 - DNA, 960 bp, Stenotrophomonas maltophilia
atgagtctgaatttccttgatttcgaacagccgattgcagagctggaagcgaaaatcgattctctgacagccgtaagccgtcaggatgaaaaactggatattaacatcgacgaagaagtgcatcgtctgcgtgaaaaaagcgtagaactgacgcgcaaaatctttgccgatctcggcgcatggcagatcgcccagctggcgcgtcatccacagcgtccgtacaccctggattatgtccgcctggcgtttgacgaatttgacgaactggcaggcgaccgcgcatacgctgacgataaagctatcgtcggcggtatcgcgcgtctggatggacgtccggtgatgatcattggtcaccagaaaggccgtgaaaccaaagagaagatccgtcgtaacttcggtatgccagcaccagaaggctaccgtaaggccctgcgtctgatggagatggctgagcgtttcaatatgccaatcatcaccttcatcgacacaccgggtgcttacccgggtgttggcgcagaagagcgcggtcagtctgaagccatcgcacgcaacctgcgtgagatgtctcgcctgaaagtgccggtcatctgtaccgttatcggtgaaggtggttccggcggtgcgctggcaattggcgtgggcgataaagtgaatatgctgcagtacagcacctattccgttatctctccggaaggctgtgcctccattctgtggaaaagtgccgataaagcgccgctggctgcggaagcgatgggcatcattgccccacgtctgaaagagctgaagctgatcgacaccgttatccctgaaccgctgggtggcgcgcaccgtaagccggaagtgatggctgcttccctgaaagcgcagctgctggcagatctggcggatctggacgtgctgagcacagaagatctgctcaaccgtcgttatcagcgtctgatgacctacggttacgcgtaa

SEQ ID NO: 525551 - DNA, 3483 bp, Stenotrophomonas maltophilia
atggctgaaccacgtttcgtacacctgcgggtgcatagcgactactccatgatcgatgggctggcaaagaccgggccgctggtaaagaaggcggcctcgcttggcatgccagcgctggcgatcaccgattttaccaacctgtgtggcctggtgaagttctacggaacggcgcatggcgcaggattaaagcccatcgtcggcgcggatttccacgtgcagagcgacctgctcggcgatgagatgacgcaaatttccgtgttagccatgaataacacgggctatcagaacctcactctgctgatctcaaaagcctaccagcgcggctacggcgcgctgggtccatggattgaccgcgactggctggcggagctgaacgaaggtctgctgctgatctccggtggccgtatgggtgatgtcggcaaatgtctgctgcgcgggaacaacgtgctggtggatcagtgcgtctcgttctacgaagagtatttcccggatcgctattacctggagctaatccgtaccgggcgtgcggatgaagagagctatctgcatgcggccgtcgccctggcggaagcgcgtggcctgcctgtggtagccaccaacgatgtgcgcttccttgagccgggcgattttgacgcacatgaaattcgcgtcgctatccacgacggcttcaccctcgacgatccgaaacgtcctcgcaactactcatcgcagcagtacatgcgcagcgaagaggaaatgtgtgagctcttctccgacatcccggaagcgctggaaaacagcgtagagattgccaagcgctgcaacgtcaccgtgcgtctcggcgaatatttcctgccgcagttcccgacgggcgacatgaccacggaagatttcctggtcatgaaatcgaaagagggccttgaagagcgtctggaattcctcttcccggatgaagcggtccgtaaagagaagcgtcctgaatatgacgagcgtctggatattgaactccaggtgatcaaccagatggggttccctggctacttcctgatcgtaatggagttcatccagtggtcgaaggataacggcgtaccggttggcccgggccgtggttcaggtgccggctcgctggtggcgtatgcgctgaaaatcaccgacctcgatccgctggaattcgacctgctgttcgaacgtttccttaacccggaacgtgtctccatgcccgacttcgacgtcgacttctgcatggaaaaacgcgaccaggtgattgagcacgtggccgatatgtacggtcgtgatgcggtttcacagatcattaccttcggtacgatggcggcgaaagcggttatccgcgacgtgggccgcgttctgggccacccctacggttttgtcgatcgaatctctaagctggtgccgcccgatccgggcatgactctggcgaaggcctttgaagctgaacctcagctgccggaaatctacgaagccgacgaagaggtgaaagcgctgatcgacatggcgcgcaagctggagggcgtcacgcgtaacgccggtaagcatgcggggggcgtggttattgccccgaccaaaatcaccgacttcgcgccgctgtactgcgatgaagcgggccagcatccggtcacccagttcgacaagaacgacgttgaatacgccgggcttgtgaagttcgacttccttggtttgcgtacgctgaccatcatcaactgggcgctggagatgatcaacgcccgccgtgagaagaacggcgagccgccgctggatattgcggctatcccgcttgatgacaagaaaagtttcgacatgctgcaacgctccgagacgacagccgtcttccagcttgaatcccgcggcatgaaagatttgattaagcgtctgcaaccagactgcttcgaagatatgatcgcgctggtggccctgttccgtccgggcccgttgcagtcggggatggtagataactttatcgaccgtaagcacgggcgcgaagagatttcctatccggatgtgcagtggcagcatgaaagcctgaagccggtactggagccaacctacggcatcatcctgtatcaggaacaggtcatgcagatcgcccaggtgctttctggttacacccttggcggcgcagatatgttgcgtcgtgcgatgggtaagaaaaagccggaagagatggccaagcagcgttctatctttgaagatggggcgaagaaaaacggcgtcgatggcgaactggcgatgaaaatcttcgacctggtggagaaattcgccgggtacggatttaacaaatcccactccgccgcttatgctttggtgtcgtatcaaacgctgtggctcaaggcccactatcccgctgagtttatggcggcggtaatgaccgccgatatggacaacaccgaaaaggtggttggcctggtggacgagtgctggcgcatggggctgaagatcctgccgccggatattaactcgggcctgtaccatttccacgtcaacgatgacggggaaatcgtctatgggatcggcgcgatcaagggcgtgggtgaggggccgatcgaggcgatcatcgaagcgcgtaacaacggcggctatttccgcgagctgttcgacctgtgcgcccgcaccgataccaaaaaactgaaccggcgcgtgctggaaaaactgatcatgtccggtgcgtttgaccggctggggccacaccgcgccgcgctgatgaactcgctcggcgatgcgctgaaagcggccgatcagcatgctaaagcggaagccattggtcaggcggatatgttcggtgtgctggcggaagagccagagcagatcgagcagtcctattccaactgccagccgtggccagaacaggtggtgctggatggggagcgtgagacgttaggcctgtacctgacgggacacccgatcaaccagtatctgaaagaaattgagcgctatgtcggcggccacaggcttaaagacatgcatccgacagaacgtggtaaaatcaccacggctgcggggctcgtgattgctgcaagggtaatggtcaccaagcgcggcaatcgtatcggcatctgtaccctggatgaccgttccgggcgtctggaggtgatgttgttcaccgacgcgctggataaataccagcaattgctggaaaaagaccgcatacttatcgtcagcggacaggtcagctttgatgacttcagcggggggcttaaaatgaccgcccgcgaagtgatggacattgacgaagcccgggaaaaatatgctcgcgggcttgctatctcgctgacggacaggcaaattgatgaccagcttttaaaccgactccgtcagtctctggaaccccaccgctcggggaccattccagtacatctctactatcagagggcggatgcacgtgcgcggttgcgctttggtgcaacgtggcgtgtctctccgagcgatcgtttactgaacgatctccgtggcctcattggttcggagcaggtggaactggagtttgactaa

SEQ ID NO: 525552 - DNA, 597 bp, Stenotrophomonas maltophilia
atgatggaatttatttatccccatacccacctcgttgccggtgtggatgaagtcggtcgtggtccgttagtgggtgccgttgtgaccgcggcggtgatcctcgatccagcccgcccgatccctggcctgaacgactcgaaaaaactgagcgaaaagcgccgcctggcgctgttcgatgaaattaaagagaaggcgctggcctggagtctcgggcgcgcagagccggatgagatcgacgatctgaacattctgcacgccaccatgctggcgatgcagcgtgccgttgcgggcctgaagattgtgcctgagtatgtgctgatcgacggtaaccgttgcccgacgctgccgatgccttcaatggctgttgttaaaggcgatagccgcgtcgcagaaatcagtgcggcgtcaatcattgccaaagtgacgcgcgatgccgaaatggccgcgctggacctcacttatcccgcgtatggtttcgcccagcacaagggatatccaacggctttccatctggaaaagctggctgaacatggcgcaactgaacatcatcggcgcagctttggcccggtgaaacgcgcgctgggactggtgtcctga

SEQ ID NO: 525553 - DNA, 1149 bp, Stenotrophomonas maltophilia
atggtcgacagtcgtccgcttactatcgccctggtcgccggagaaacctccggcgatattcttggtgcaggtcttatccgcgcgcttaaagcccgtgtacccaatgcccgctttgtgggcgtggctgggccgctgatgcaggccgaaggctgtgaagcctggtatgaaatggaagagctggctgtgatgggcatcgtcgaggtgctgggccgcctgcgtcgcctgctgcatattcgcgccgatcttacccgccgctttaccgacctcaagcccgatgtctttgtcggcattgatgcacctgatttcaatattacccttgaagggaacctgaaaaagcaggggatcaaaactatccattacgtcagcccgtccgtgtgggcgtggcgacagaaacgcgttttcaaaatcggacggtccaccaatctggtgctggcttttctgcctttcgaaaaagcgttttacgacaggtttaatgtcccgtgccgttttatcggtcataccatggcggatgccatgccgctggaccctgataaaaatgcggcgcgtgacgaactgggcatcccgcatgatgtgcactgtctggcgctgctgccagggagccggggtgcggaagttgaaatgctaagtgccgatttcctgaaaacggcgcaaattctccgcaagacgtacccagaccttgaagtggtcgtgccgctggtgaatgccaaacgccgcgagcagtttgagcgtatcaaagccgaggttgccccggatcttcacgtccgcctgctggacgggaaagggcggcaagctatgtttgcgagcgatgccgcactgctggcttccggcacggctgcgctggagtgtatgctggcaaaatgcccaatggtggtcggttatcgcatgaaaccgtttaccttctggctggcaaaacgtctggtaaaaacagactacgtatccctgccaaacctgcttgcaggtcgcgagctggtgaaagaactcttgcaggatgaatgccagccgcaggcactggctgatgcattactgccgctgctggccaacggtaaaaccagccaccagatgcatgatactttccgtgaactgcatcaactgatccgctgtaatgctgatgagcaggcggccgatgcggtgctggagttagcacaatga

SEQ ID NO: 525554 - DNA, 789 bp, Stenotrophomonas maltophilia
gtgattgataaatccgcctttattcatcctaccgccattgtggaaacgggtgccatcattggcgcaaacgtccacattggcccgttttgtattgttggaccccatgtcgaaattggtgagggtacagtactgaaatctcacgttgtcgtgaatggtcataccaccattggctgtaacaatgagatctatcagttcgcctccatcggcgaagttaaccaggatcttaagtatgctggcgaaccgacccgcgtggaaatcggcgatcgtaaccgcattcgcgaaagcgtcaccattcatcgtggtacaacgcaaggcggtggattgacgaaggtgggcagcgacaacctgtttatggttaatgcgcatattgcgcacgactgtaccgtgggtagccgctgtattctcgccaacaacgcaacgctggcggggcacgtatcggtcgatgatttcgcaattattggcggcatgaccgcagtccatcagttctgcatcatcggtgcacacgtgatggtcggcgggtgctccggtgtggcgcaggacgtcccaccgtttgtgattgcgcagggcaaccatgccacgccgtttggcgtgaacattgaaggccttaagcgtcgtggctttagccgcgaagcgattaccgcgatccgcaacgcgtacaaattgctgtaccgtagcggtaaaacgctggaagaggcgaagccggaaattgccgagctggcgaataagcaccctgaagtgaaaacgttcatggaattctttgaacgttcaacccgtggtctgattcgttaa

SEQ ID NO: 525555 - DNA, 456 bp, Stenotrophomonas maltophilia
ttgactactgacactcatactctgcatattgaagagattttagaacttctgccgcaccgctacccgtttttactggtagaccgtgtgctggattttgaagaaggtcgttttctgcgcgcagtgaaaaatgtctccgttaacgagccattcttccaggggcacttccctggtaaacctatcttcccgggtgtgttgatcctggaagcgatggcacaggctaccggtattctggcgtttaaaagcgtaggtaaactggagccgggtgaactctattacttcgcgggtatcgatgaggcgcgcttcaagcgtccggtcgtgcctggtgatcaaatgatcatggaagtcacttttgaaaaaacgcgtcgcggcctgactcgcttcaaaggcgtagctatggttgacggcaaagttgtttgcgaagcgacaatgatgtgtgcgcgtagccgggaggcctga

SEQ ID NO: 525556 - DNA, 1026 bp, Stenotrophomonas maltophilia
atgccttcaattcgactggctgatttagctcagcagttggatgcagaattacacggtgatggcgatatcgtcatcaccgctgttgcgtccatgcaatctgctaaaccaggcactattaccttcatggtaagccctaagtaccgtgaacacctggctcagtgccaggcgtctgccgttgttctgacgcaggacgatcttccgtttgccactaacgctgcactggtagtgaaaaatccctacctgacctatgcacgcatggcccaaattcttgataccacgccgcagccggcgcagaacattgcagccagcgctgcgattgatccaacggctcagctgggtaacaacgtggcagtcggcgcaaacgccgttatcgaatccggcgttgtgctgggtgataacgtggtgattgggccaggctgctttgttggaaaaaatacgaaaattggcgcagggactcgtctgtgggccaatgtttctgtctaccatgaggttgagattggcgagaattgcctcgtacagtccagcacggtgattggttctgacggattcggttacgccaacgatcggggtaactgggttaagatcccgcagctgggtcgcgtgattatcggcgatcgcgttgagatcggcgcttgcacaaccattgaccgtggtgcacttgacgacaccattattggtaacggtgttatcatagacaaccagtgccagattgcacataacgttgtgattggcgacaataccgcagttgcgggtggtgttatcatggcaggcagcctgaaaataggccgttactgcatgataggcggtgccagcgtgatcaatggccatatggaaatatgcgacaaagtcacggtgacggggatgggtatggtgatgcgtcccatcactgagcccggcgtttattcctccggtatcccgctgcaaccgaacaaggtatggcgtaaaacagctgcactggtgatgaatattgatgatatgagcaagcgactcaaagcgattgagcgcaaaatcgatcaacaagactaa

SEQ ID NO: 525557 - DNA, 495 bp, Stenotrophomonas maltophilia
gtgaaaaagtggttattagctgcaggtctcggtttagcgatggcaacttctgctcaggcagcggacaaaattgcaatcgtcaacatgggtaatttgttccagcaggttgcacagaaaacgggcgtttctgcaacgctggaaaacgaattcaaaggccgtgcgagcgaactgcaacgtatggaaggtgatcttcagtccaagatgcagcgtttacagcgtgatggttctaccatgaaagcgagcgagcgcagcaaactggaaaaagatgtcatgtctcagcgccagaccttctctcagaaagcgcaggctttcgagcaggatcgtcagcgtcgttctaacgaagagcgtggcaagctggtgacgcgtattcagtctgccgttaaagcagtagcagccgatcagagcatcgatctggttgttgatgcgaacgccgttgcattcaacagcagcgatgttaaagacatcaccgctgatgttctgaaacaggttaaataa

SEQ ID NO: 525558 - DNA, 180 bp, Stenotrophomonas maltophilia
atgcgtgcagcgggcgttccggactacagcgatccgggcaacattcgcatgtccgcaggtatcgcattacaatggatgtcaccgctggggccgttggtcttctcctacgcccagccgttcaagaaatacgatggagacaaagcggagcagttccagtttaacattggtaaaacctggtaa

SEQ ID NO: 525559 - DNA, 690 bp, Stenotrophomonas maltophilia
atgcacacaacccacagcacattttctctcgccggccacacccttcaccgcatcactttcgaccccaccaccttcatcgacgccgatctcctctggctcccccatcacgcacagctggctgacgccggacgcaagcgcaaatccgaccacctggcaggccgcatcgccgcggcgcatgcgctaaacgagcgcgtaatccccggcatcggacccagcggcgaaccgctctggccgcaaggtatttccggcagcatcacccacagcggcacgcaggcgatggccgtcgtcacgcaataccctgcgcttatcggcatcgattgtgaaacgatcctttccgaaaacgaagcctgggaaatcaaagacggcattattgatacgcaggaagaacctgtgctttcccgctcgggatacccgttcgccctcgccctgacgctggcgttcagcgccaaagagagcctgttcaaggccctctttccgcaggtgcaggcctggatgggttttgacagcgcccgcattaccctgctcgacgacaggacgcttacgctggcattgacccgtcaacttgcaggctttgaggaaggcactgccttcacccttcactggcagcagcacggcgaacaggtcatcaccctgctgtcacacgctcctgccgacgtgccttcacgctggtcaacacaaacgtcacgataa

SEQ ID NO: 525560 - DNA, 840 bp, Stenotrophomonas maltophilia
atgatgacgcagctcctcgaaccgttccagtttgcgtttatgaacaacgccctgatgatttcactcctggtggccgtgccctgcgcgctgctgtcggtttttctggtgctgaaaggctgggcgctgatgggcgacgccatgagccacgcggtgtttcccggcgtcgtgctggcctggatgatgggcctgccgctggcgctgggcgcattcgtggccggtctgttctgcgcggtcgccaccggatacctgaaggataacagccgaatcaagcaagatacggttatggggatcgtcttttccggcatgttcggcgccgggctgatcctctatatcgccgtcaaacctgaggtgcatctcgaccacattctgttcggcgatatgctgggcattaacgggatggacattttgcaaagcggtctcgtcgcggggttgattgcgctggtgattggcctgaagtggcgcgattttctgctgttctgctttgactatcagcaggcgcaggcgagcggcctgcgcacccgctggctgcactacggcttactatgcatggtttcgctgaccatcgtggcgacgctgaaagcggtgggtataattctgtcgatttcgctgctgattgcccccggcgcggtggcggtgctgatcacccgacgctttcacatggcgctgctggtggcggtcgccgtttcagcgctggtgtcggtaagcggcgtttatgcctcgttttatctcgacagcgcgcccgcgccgaccattgtggtcctgttcgcgatggtgtttatcgtgacgtttgtgttgaccagcgtgaaggcacgtcggcaggagcgtgtgacagcagggtga

SEQ ID NO: 525561 - DNA, 849 bp, Stenotrophomonas maltophilia
atgaacgcgcttctcgaaccctttggctacgagtacatgctcaacgcgatgtgggtctcggcgatggtgggcgggctgtgcgcgtttctctcctgctatctgatgctcaaaggctggtcgctgatcggcgatgcgctgtcgcactccatcgtgccgggcgtagcgggcgcttacatgctcggactgccgttctcgctgggggcgtttttatcgggcgggctggcggcgggcagcatgctgtttctcaaccagcgcagccgcctgaaggaggacgccattatcgggctgatcttctcctcgtttttcgggctggggctgtttatggtctcactcaacccgacctcggtgaacattcagaccatcgtcctcggcaatattctcgccatcgccccggaagatatcgtccagctggcgattatcggcgtggtgtcgatagttatcctgctgttcaaatggaaagatctgatggtgaccttttttgatgagaaccacgcccgcgccatcggtctgcgcccggaacgtctgaaaattctcttctttacgctactggcggtctctaccgtggcggcgctgcaaaccgtcggcgcatttctggtgatctgtctggtggttacgcccggtgcgaccgcctggctgctgaccgatcgcttcccgcgcctgttgatgattgccgtcgccattggcagcatcaccagcttcctcggtgcgtgggccagctattacctggacggcgccaccggcggcattatcgtggtcgcccagacgctgctgttcctgctggcgttcgtctttgcgccgaagcacgggctgcttgccagccgccgtcgggcgcgggaggcacatccatga

SEQ ID NO: 525562 - DNA, 807 bp, Stenotrophomonas maltophilia
atgcagaaggggattgttgtaaccgacgtgaccgtgacctaccgcaacggccacacggcgctgcgcgacgcgtcgttcagcgtgccgggcggatcgattgccgccctggtgggggtgaacggttccggcaagtccacgctgtttaaggcggtgatgggctttgtgcgggcggcgagcggcactatctccattctcgggcttccgcctcaccgggcgctgcgcctgaacctggtcgcctacgtgccgcagtcggaagaggtcgactggtcatttccggtgctggtcgaggacgtggtgatgatgggccgctacgggcatatggggtttctgcgtcggcctaaagagcgcgacaggcagattgtaaccgacgccctgaagcgcgtggacatgcttgagctgcgtcatcggcagattggcgagctctccggcggccaaaagaagcgcgtgtttctggcgagggcgattgcccagcagggcgaggtgatcctgctcgacgagccgtttaccggcgtggacgtcaaaaccgaagccaggatcatcagcctgctgcgggagctgcgcgacgagggtaaaacgatgctggtttcgacccacaatctgggctcggtcacggaattctgcgattacacggtgatggtcaaaggcaccgtgctggcgagcggcccgacggatatcacctttaccgccgagaatcttgagcgcgccttcagcggtgtgctgcgccacgtggtgctcagcggctcggaagatcgcattattaccgacgacgaacgccccttcgtcacgcaccgacaggaggccaaatga

SEQ ID NO: 525563 - DNA, 912 bp, Stenotrophomonas maltophilia
atgcatccacggcaaggattgaagcgtctgttgctcggcgcgctgcttatgaccgcgaccacaaccggcgcgctggcggctgaaaagttccaggtcatcaccacttttaccgttatcgctgatatggcgaaaaacgtagcgggggatgccgcagaggtcacctccatcaccaaaccgggcgcggaaattcacgaataccagcccaccccgggcgatatcaaacgcgcgcagaaggcgcagctgatcctggcgaacggcatgaatctggagctgtggttccagcgcttttatcagcatctgaacggcgtgccggaggtgattgttaccaaaggcatcaccccgatgggcatcagcgaagggccctataacggcaagcccaacccgcacgcgtggatgtcgccggacaacgccctgatttacgtcgataacatccgcgacgcgctggtgaagtacgatccggccaacgcgcagacctatcagcgtaacgccgacgcctacaagcagaagatcaccgccactctcgaaccgctgcgcaagcaggtcacggcgatcccggtagacaaacgctggatggtgaccagcgaaggggcgttttcctatctggcgcgggatttgggcctgaaagagctgtacctgtggccgatcaacgccgatcagcagggcacgccgcagcaggtgcgcaaggttatcgatctggtgaaaaaacatcacattccggcggtgttcagcgaaagcaccgtctcggataagcccgcccgtcaggtggcgcgggaaaccggcgcccattacggcggcgtgctgtacgtcgactctctgagcgcagaaaacggcccggtgccgacctatatcgatctactgaacgtcaccacccgcacgctggtgcagggcatccgcgacgggatgaaggagtaa

SEQ ID NO: 525564 - DNA, 285 bp, Stenotrophomonas maltophilia; identical to SEQ ID NO: 118730

SEQ ID NO: 525565 - DNA, 318 bp, Stenotrophomonas maltophilia
atgcagcaagagcctgatgctgaagcattcgggcttttgctgcgtttagggaaggaactatggatgagtcatgcgatagagtttatcgaaacatcactctttacccgacagattaaaagcattgctacggatgatgaattaaaggatctgcaagaggtgatctatttcattatggcctatccaaaatgcataaaggacagcctgacagagacagagaaagcagaacttaaaaagctgacttccattctgaaagatactgcttccagtgacgtaaatttgaggtgtactatgtaccctaatcaggcaggtggaggctga

SEQ ID NO: 525566 - DNA, 2034 bp, Stenotrophomonas maltophilia
atgacagacctttcacaagacagagaaaaagacaaaatcaacccggtcgttttttatacgtccgccgggctgattttgttgttttccctgacgaccatcttctttcgtgatttttctgccgagtggattgggcgcaccctgaactgggtgtcgaagaccttcggctggtactaccttctggcggcgacgctctatatcgtcttcgtcgtctgcattgcctgctcgcgcttcggttcggtgaagcttgggccggagcagtccaagcccgagttcagcctgctgagttgggccgcgatgctgtttgccgcgggcattggcatcgacctgatgttcttctccgtggcggaaccggtcacgcaatatatgcagccgccggaaggggcagggcagacgatggaggccgcgcgtcaggcgatggtctggacgctgttccactacggcctgacgggctggtcaatgtatgccctgatgggcatggcgctcggatactttagctatcgttataatttgccccttaccatccgctccgcgctgtacccgattttcgggaaaaagatcaacggcccgattggccacagcgtcgatatcgcggcggtgatcggcaccatctttggtatcgccaccacgctcgggattggcgtggtgcagcttaactacgggctgagcgtgctgtttgacatcccggattcgatggcggcgaaggcggcgctgattgcgctgtcggtgatcatcgctaccatctcggtgacctccggcgtggataaaggtattcgcgtgctctccgagctgaacgtcgcgctggcgctggggctgatcctgttcgtgctgtttatgggcgacacctcgttcctgctcaacgccttagtgctcaacgtaggtgattacgtgaaccgctttatgggcatgacgctgaacagcttcgcctttgaccgcccggtggagtggatgaacaactggacgctcttcttctgggcgtggtgggtggcctggtcgccgtttgtcggcctgttcctggcgcgcatttcgcgtgggcgcaccatccgtcagttcgtgatgggcacgctgatcatcccgttcaccttcaccctgctgtggctgtcgattttcggcaacagcgcgctgcacgaaattatccacggcaatgcgaccttcgcgcaggaagcgatggtgcacccggagcgcggcttctacagcctgctggcgcagtacccggcgtttacttttagcgcgtccgtagcaaccattaccggcctgttgttctacgtcacctcggcggactccggcgcgctggtgctggggaacttcacttcgaagcttaaagacatcaacagcgatgcgccgaactggctgcgcatcttctggtccgtcgccatcggcctgctgacgctcgggatgctgatgaccaacggtatctctgcgttgcagaacaccacggtgatcatgggcctgccgttcagcttcgtgatcttcttcgtgatggccgggctgtataaatcgcttaaggtggaagactaccgccgcgtcagcgccagccgcgacaccgcgccgcggccgatgggcgcgcaggacaggttgagctggaagaaacgcctgtcgcgcctgatgaactacccgggcacgcgctacaccagccagatgatggagacggtctgcttcccggcgatggaagaggtggcgcaggagctgaagctgcgtggcgcctacgtggaactgaaaaacctgccgccggaagagggcgaaaccctggggcacctggatctgctggtgcacatgggcgacgagcagaactttgtttatcagatctggccgcagcagtattcggttcccggctttacctaccgggcgcgcagcgggaaatcgacctactaccggctggagaccttcctgctggaagggagccaagggaatgatttgatggattacagcaaggagcaggtaattacggatattctggaccagtatgaacggcacctgaactttatccatctccacagggaagcgccggggaatagcgtgatgttcccggatgtctaa

SEQ ID NO: 525567 - DNA, 588 bp, Stenotrophomonas maltophilia
atgcccaaagtggggatgcagccgatccggcgcaggcagctcatcgatgccacgctggaagcaattaatgaagtgggaatgcatgacgcaaccatcgcgcaaatcgcccgtcgggcgggcgtgtccacggggatcatcagccactatttcaaagataaaaacggtctgctggaagcaaccatgcgcgacatcaccggtcagttacgcgatgcggtattaagccgtttacgcgccctgccggaaggcagtgcagagcagcgtttgcaggcgattgtcggcggcaattttgatgaaacccaggtcagcggcgcggcgatgaaggcctggctggccttctgggccagcagcatgcatcagccgatgctctatcgtttgcagcaggtcagcagccgccggttgctctcaaatctggtgtacgaattccgccgcgaactgccgcgtgaacaggctgaagaggcgggctacgggctcgccgcactgattgacgggctgtggctgcgcgccgcgctcagcggcaaaccgctggataaaaccctggcccagtcgcttaccagccactttatcagccagcatttaccgaccgaataa

SEQ ID NO: 525568 - DNA, 1473 bp, Stenotrophomonas maltophilia
atgtcccgaatggcagaacagcagctttatatcaatggtggttatacatccgccaccagcggtcgcaccttcgagaccatcaacccggccaacggtgaagttctggcgagcgtgcaggccgccgggcgtgaagacgtggaccgcgccgtggatagcgcaaagcgcgggcaaaaaatctgggcggcgatgaccgccatggagcgctcgcgcatcctgcgtcgcgccgtcgatatcctgcgcgagcgcaacgacgagctggcaaagctggaaaccctcgacaccggtaaagcgttttctgaaacctcgaccgtcgacatcgtcaccggcgcggacgtgctggagtactacgcggggctgatcccggcactggaaggcagccagatcccgctgcgcgagacctccttcgtctatacccgccgcgagccgctgggcgtggtggcgggcatcggcgcgtggaactatccgatccagatcgccctgtggaaatccgccccggcgctggcggcgggcaacgcgatgatcttcaagccgagcgaagtaacgccgcttaccgccctgaaactggcggaaatctacaccgaagcggacgtgccggacggcgtgtttaacgttctgccgggtgtgggcgcggaaaccggccagtacctgaccgagcatccgggcatcgccaaagtctcctttaccggcggcgtcgccagcggcaaaaaggtgatggcgaactcggcggcctcgtccctgaaagaggtaacgatggagctgggcggtaaatccccgctgatagtgtttgacgatgcggatctggatctcgcggcagatatcgccatgatggccaacttcttcagctccggtcaggtgtgcaccaacggcacccgagtgttcgtgcccgcgaagtttaaagccgcgtttgagcaaaaaatcgttgagcgcgtgggccgcatccgcgcgggcgacctgttcgatgaaaacactaacttcggcccgatggtcagcttcccgcaccgcgacagcgtgatgcgctacatcgccaaaggcaaagagggaggcgcgcgcgtgctgtgcggcggtgacgtgctgaagggtgacggctttgataacggcgcgtgggttgccccgaccgtgttcaccgactgcaccgacgaaatgaccatcgtgcgcgaagagatcttcggcccggtgatgtccattctttcctatgacactgacgaagaggccattcgtcgcgccaatgacaccgactacggtctggcggcgggcattgtcaccgccgatctgaaccgcgcccacggcgctattcatcagctcgaagcgggcatctgctggatcaacacctggggcgaatccgccgcggagatgccggtgggcggatacaaacactccggcattggccgcgagaacggcgtcatgacgcttcagagttacacccaggtgaagtccatccaggttgagatgggtaaattccagtccatattttaa

SEQ ID NO: 525569 - DNA, 1665 bp, Stenotrophomonas maltophilia
ttgcaatttgactacatcattatcggggccggctctgccggcaacgttctggcaacacgactgactgaagatccgaacaccaccgtcctgctgcttgaggcgggcgggccggactaccgctttgacttccgcacccagatgcctgccgcgctggccttcccgttgcagggcaagcgctacaactgggcgtatgaaaccgagccagagcctttcatgaacaaccgccgcatggagtgcggacgtggaaaagggctgggcggctcgtcgctgatcaacggcatgtgctacgtgcgcggcaacgcaatggatctggacaactgggcgaaagaaccgggtctggagcactggagctatctcaactgcctgccctactaccgcaaggcagagacccgcgacgtggggccgaacgactaccacggcggcgacggtccggtgagcgtcaccacctctaagccgggcgtgaacccgctgtttgaagcgatggtggaggcaggcgtgcaggcgggctacccgcgcaccgacgatctcaacggctatcagcaggaaggctttggcccgatggatcgcacggtcacgccgcagggccgacgcgccagcaccgcgcgcggctatctggatcaggccaaaccgcgcccgaatctgaccatccgcacccacgccatgaccgatcacattatctttgacggcaagcgcgcggtgggcgtcgagtggctggaaggcgaaagcaccattccttcaaaagcgacagcgaagaaagaggtactgctgtgcgcgggcgctattgcgtcaccgcagatcctccagcgctccggcgtgggcaacgctgaactgctgaagcagtttgatatcccgctggtacatgatttacccggcgtgggggaaaacttgcaggatcacctggagatgtaccttcagtatgaatgcaaagagcccgtttccctctaccctgccctgcagtggtggaaccagccgaagattggcgcggagtggctgtttggcggcacaggcgtgggcgcgagcaaccacttcgaagcgggcgggtttatccgcagccgcgaggagttcgagtggccgaatattcagtatcacttcctgccggtagcgattaactacaacggctcgaacgcggtgaaagaacacggtttccagtgccacgtcggctccatgcgctcgccgagccgcgggcacgtacggattaagtcccgcgacccgcatcagcatccggcgatcctgttcaactatatgtcccacgagcaggactggcaggagttccgcgacgcgatccgcatcacccgcgagatcatgcaccagcccgcgctggacaagtatcgcggtcgcgaaatcagcccgggcgtcgaatgccagaccgacgaacagctggacgagttcgtgcgtaaccacgccgaaaccgccttccatccgtgcggcacctgcaagatgggctacgacgaaatggcggtggtcgatggcgaaggccgcgttcacgggctggaagggttacgcgtggtagatgcgtcgattatgccgcaaattatcactggcaacctgaacgccaccaccatcatgattggtgagaagattgccgacggcattcgcgggcgcgagccgctggcgaagagcacggcggcgtattatgtggcggatggggcgccggttcgccgctga

SEQ ID NO: 525570 - DNA, 699 bp, Stenotrophomonas maltophilia
gtgcccgaaatcaatcaatatggtcaaaccgttaacgatatcgtcccggactggaagtgcgcccgggtcttaacccgcaccccgctcaccggtcagtattgtcgtctggagccgctggacgccgatcgtcactcggctgatttatatgaggcctacgcgctgggtgatgagagcgactggacgtggcttgccagcacccagcctgaaagcgtggaagccaccgcccactgggtgctcggcaaggtgatggatgacgatctggtgccctttgccgttatcgatctgcgcaccgaaaaggcggtagggctggtgagctacatggcgatagagcggttccagggctcggtggagatcggccatgtcacctggtcgcggaggatgaaaggcacccgcatcggcaccgaagcggtgtggctgctgctgaaaaatgcctttgagcataagtaccgtcggctggagtggaaatgcgattcgatgaacaccgcctcacgcagcgcggcggagcggctggggtttgtctgggaagggcgcctgcgccagaggctggtgcgtaaagggcgcaaccgcgacagcgacatgctctctattattgacggcgagtggcaggaaagggacgcggagttgcgcgcctggctggcggcggagaattttgacgcggaagggcggcaggttaagcggcttgaagcatttcggcaataa

SEQ ID NO: 525571 - DNA, 474 bp, Stenotrophomonas maltophilia
atgaacggtacaatcacaacgtggtttaaagataaaggcttcggatttatcaaagatgaaaacggcgacaaccgctattttcacgtgattaaggtcgccaaccctgatctgattaagaaagatgcggcggtgaccttcgaacccaccaccaacaccaaaggcctttccgcgtatgcggtgaaggtgatcccggagagcaagcatctttatatcgcgggcgagcgcgtgaagctcacctcgatcaaatccttcgtggtgttcagcgaagaagagcccgttgagaccaaaatcgacaaagagaacgcggtgctgtcggtggggctactgatgaacagcatcaagccgaaaagtgagaaaaagccgggcgagatgcgcacggtgaagaagctggcgatcaccaccttccagaacacgacgatgatcttcaccgaagatgaaatcgacatcgacgcgacggttaagctgctgaagtaa

SEQ ID NO: 525572 - DNA, 771 bp, Stenotrophomonas maltophilia
atgcaaaaagtggctctcgtaaccggctccggccaggggattggcaaagcgatcgcgcttcgcctggtgaaggacggctttgccgtcgctattgcggattacaacgaagagacggcgaaagcggtcgcggatgagatcacccgcaacggcgggaaagccgtcgccgtgaaggtggacgtctctgaccgcgaccaggtgtttgcggcggtggaaaaagcccgcaccgcgctgggcggcttcaacgtcatcgtcaataacgccggggtggcgccgtccacgccaatcgaatccatcacgccggaaattgtcgacaaggtctacaacatcaacgtgaaaggggtgatctggggcattcaggccgcgattgacgcgttccgcaaagaggggcacggcggcaaaatcatcaacgcctgctcccaggcgggccataccggcaacccggagctggccgtctacagttccagtaaatttgcggtgcgcggcttaacccagaccgccgcacgggatcttgctccgctggggatcaccgtcaacgcctactgcccgggcatcgttaaaacgccgatgtgggcggagatcgaccgtcaggtctccgaggcagcgggtaaaccgctcggctacgggaccgagacctttgccaaacgcattacgcttggccgtttgtccgaaccggaagatgtggccgcctgtgtctcttacctcgccggaccagactccgactacatgaccggtcagtcgctgctgattgatggtgggatggtgttcaactaa

SEQ ID NO: 525573 - DNA, 1680 bp, Stenotrophomonas maltophilia
gtgaacagtgagaaacagtcacgtcagtgggcgcacggcgccgatatggttgtcggccagctggaagcgcagggtgtgaagcaggtgttcgggatcccgggcgcaaaaatcgacaaggtctttgactctctgctggactcctccatcgagattatcccggtgcgtcacgaggcgaacgcggcgtttatggcggcagcggtagggcggttaaccggcaaggccggagtcgcgctggtcacctccgggccgggctgctccaatctgatcaccggcatcgccaccgccaacagcgaaggcgacccggtcgtcgcgctgggcggggcggtgaagcgggcggataaagccaagctggtgcaccagagcatggacactgtcgccatgttcagcccggtgaccaaatacgccgtcgaagtcaattcgcctgacgcgattgctgaggtggtatcgaacgcgtttcgcgctgccgagcagggcaggccgggcggggcgtttgtcagcctgccgcaggatattgtcgaccagcccaccacgggagcgattttacccgccagcggcccggcgctgatgggcccggcaccggagtccgccattaacgacgtggcgaagcttatcgagaacgccaaaaacccggtcattttactcggcctgatggccagccagcccgccaacagcgccgcgctgcgcacgctgctggagaaaagccgcattccggtcaccagcacttatcaggccgccggggcggtgaatcaggaacacttcacccgcttcgccgggcgcgtcggcctgttcaacaaccaggccggagatcggttgctgcatctggcggatctgattatctgcatcggctacagcccggtggaatacgagccgtccatgtggaacagcggcgatgccacgctggtgcacattgacgtgctgcccgcctatgaggagcgcaagtatgttcccgatctggaactggtcggggatattgccgccacgctgaatctgcttgccagccgaatcgagcacaaacttgaactcagccagcgcgcctcggaaattcttgtcgatcgccagcatcagcgtgacctcctcgaccgtcgcggcgcatcgctaaaccagtttgccctgcatccgctgcgcatcgtgcgcgccatgcaggacatcgtgaataacgacgtaacgctcaccgtcgatatgggcagcttccacatctggatcgcccgctacctctacagcttccgcgcgcgtcaggtgatgatctccaacggtcagcagaccatgggcgtggcgctgccgtgggcgattggcgcgtggctggtcaacccggggcgcaaggtggtgtcggtctccggggacggcggatttttgcagtcgagcatggagctggaaaccgctgtgcgcctcaatgccaacgtgctgcacatcatctgggtggataacgcctacaacatggtggcgatccaggaagagaaaaaataccagcgtctctccggcgtggagtttggcccggtcgattttaaagcctatgccgacgccttcggtgcgaaaggctttgccgtcgagagcgccgacgcgctcgaaccgacgctgcgtgccgcaatggatgtcgatggcccggccgtggtggccattcccgtcgactacagcgataacccgctgctgatgggccagctccatctcagccagattttgtga

SEQ ID NO: 525574 - DNA, 783 bp, Stenotrophomonas maltophilia
atgatgatgcattcatctgcatgcgactgtgaggcgagtttatgcgagaccctgcgtgggttctcggctcagcatcctgacagcgtgatctatcagacatcgctaatgagcgccctgctaagcggcgtctacgaaggggagacgacgatcgccgacctgctggcacacggtgattttggtctcggcacctttaacgagctggacggtgaaatgattgccttcagcagccaggtgtaccagctgcgcgccgacggcagcgcccgcgccgctaagccggagcaaaaaacgccgttcgcggtgatgacctggttccagccgcagtaccgcaaaacctttaacggtccggtcagccgtcagcagatccacgacgtgatcgaccagcagatcccctccgataacctgttctgcgcgctgcgcatcgatggcaacttccgccatgcgcatacccgcaccgttccgcgccagacgccgccgtaccgggcgatgaccgacgtgctggacgaccagccggtgttccgctttaaccagcgcgagggcgtgctggtcgggttccgcaccccgcagcatatgcagggcatcaacgtggcgggctatcacgagcactttatcaccgacgaccgtcagggcggcggccatctgctcgactatcagctggagagcggcgtgctcaccttcggcgaaatccacaagctgatgattgacctgcccgccgacagcgcgtttttacaggccaacctgcaccccagcaaccttgatgcggctatccgcgccgtcgaaaactaa

SEQ ID NO: 525575 - DNA, 897 bp, Stenotrophomonas maltophilia
atggaacttcgttatctgcgctattttgtcgcggttgcacgcgagcgacacttcaccagggcggccaaagcgctgggtatttcacagcctccactgagccagcagattaaacggcttgaggaggaagtgggcacaccgctgttcaggcgcctgacgcggggcgtggagctgaccgaggcgggagaagccttctatgaggacgcctgtaagatcctggcgctgagcgacgccgcgctggagaaagcccggggcatcgcgcgcggcctgaacggcagcctgtcgattggcatcaccagctccgacgcctttcatcccaaaattttcgcgctgattcgtcagtttcaggtgcagaacatggcggtgcaggttcaccaggtggaagccaatatgtcttcgctgacgacaatgctggcggagggtgaactggatatcgcctttgtgcgcctgccgtgcgaaagcagcaaggtgttcgagttgaaaatcctcgaccgggagccgatggtggtggcgttgcatcgcgatcatccgctggctgcgtgcgattcgctggcgttagagcagcttcgggatacaccggtggtgctgttcccccaggaggtcgcgccgggactgtatgaccgcgtttacggcagctgcgagcgggccggagtcgatatgcaacacacgctgcaatcttcacaactttcctcttctctgagcatggtctccgctggcggcgggttcgcgctggtgccgaaatcgatggccgctatttctccgccgaatgtcacctaccacgcgctgagctcaccggagctttataccgatatcgcgctctgctggcggcgctttgaacgctcacggacggtgaaacggtttctggcgatgatgagcgagggggaacgggagcagggatga

SEQ ID NO: 525576 - DNA, 213 bp, Stenotrophomonas maltophilia; identical to SEQ ID NO: 118754

SEQ ID NO: 525577 - DNA, 129 bp, Stenotrophomonas maltophilia
atgtactacaaaatgtctacgctttcactgtgccgggagtttggggtgttttgttcacaggcgggaaaatcctcccgcgcgacgcagacatcattagaagggatgctcaaaatgaaaaggtctgcgtaa

SEQ ID NO: 525578 - DNA, 456 bp, Stenotrophomonas maltophilia; identical to SEQ ID NO: 118756

SEQ ID NO: 525579 - DNA, 411 bp, Stenotrophomonas maltophilia; identical to SEQ ID NO: 109632

SEQ ID NO: 525580 - DNA, 219 bp, Stenotrophomonas maltophilia
atgagtgtgaacactgtaagaggtgactgtgaaagaaatgtccactttgtgccaggagcggacattgttattaatagcagcagacgccagccggactctctcgtcttacagcacttcaaccacttcaaattcttctgcgatcaactccatatctttagaaaaatgaccttcgcgggtaaaaaatcgctgatgctcatttcgccagtattgaaggcttaa

SEQ ID NO: 525581 - DNA, 399 bp, Stenotrophomonas maltophilia
atgaaaactgcaatccatgacaattcccacattctcaacccgccgaccaccaccttaaatgtttccaatctggaaacaaggggcaaaaatgcccgcagtctcaagagcgctttcgacgcggccaccagacattttcctattcaagaactcgctctggaagatctttactgggtactaaaaggagaccactacccatcaccagacgacatgcgaaagcgcttccccagccgggagaggatgaaataccggaaaaaatggtgggtcattgacgtaggtggcgggtatttaagagtaatgttatttactgattttgagcgcggaaagctcttcatcaaacacaccagcactcacgcagagtatgacaagctcacgtacctctaccggagaacgaaagaatga

SEQ ID NO: 525582 - DNA, 564 bp, Stenotrophomonas maltophilia
atgagagggattaaagaggcgttgaagcaactagccgttatttgtaatgaatactcggtatccggaaatttcaataccgttaatgacttggacaatgcatttccaaccaacctacctcgttccacagatgttgattacttatataaaaattacaatccggaaaaattaaacattgaaacaggcttcacgccaattaaaattcactctatcagtgagctctcgaaggctcaaagtggttatgaatacttaccggataattatcttgttattggtgatgatttaggtggaggtaaacctttaattgcggttatcgaagaagggaatacctctgtctatgctagttatgatgtaattgaaccatttaaaatagctagcagtctctctggatttatattttcattagctgagcttattgatttggtatatggtcaatacggtatctttgatatagcagatgataatgacgaagggaaaggtgactttattgatgagttgcggaaaagaattgcgcctcttatcggtaatgaaggttttaatgcattctatgattatttttatggctag

SEQ ID NO: 525583 - DNA, 339 bp, Stenotrophomonas maltophilia
atgaaagtaattactttatctattgactttaaagaaataaatgatgttacagaatttcatgatagggttaagcacttgtttggctttcctgatttctatggtaataatttccatgcattcatagattgcctgactagtttgcgattcccagaagaggggatgacatctttaaacttaaagcaagacgagtttttattacttaagataagtaatatcaacaatttgaatgagggattgaagcatgattttcttttgtcaattcaagaggtaaataatagaagtattttatttggtgaggagccaactatcttgttattgctttgtgcacaacataagtga

SEQ ID NO: 525584 - DNA, 285 bp, Stenotrophomonas maltophilia; identical to SEQ ID NO: 158996

SEQ ID NO: 525585 - DNA, 255 bp, Stenotrophomonas maltophilia; identical to SEQ ID NO: 158997

SEQ ID NO: 525586 - DNA, 894 bp, Stenotrophomonas maltophilia
atgaacaccagagtgaataagcctcaacccgtcaggcttcgccctgtcttccagaaactggaagagctggggttaacaggggaaattatttccattcgcacggacgggaaaactggaaccttaactccagacctgaagcctggtatcttcaaaacgggtccctgccaaacgaaacggattatcgctgactcaagggactactttgaacatgttgttctgtgtgttgagcgtccagacggagcctatgacatattcaccggctctttcataaaattatatccggttgaaaactgcaaaagcaaaatcgtcgaaatgagtaaccctgtcctggtgggcatgacttactccatccggaaggtttttaatggaggaaagttcagtcggcgaggaattgcctatctctcgatccccgcagtaacatcaacaaaagtaacttttccttcccgaacgtatcaggaggggcaggaacaaatcacaatgtcgagcccggaccaggcaccattttccgaagatgtccggaaaaactgcgccggtacgtgtgttcttaccggcgttcgagccagacaaagaactgaggcagcgcacattaaaccccgtcatgctggtggtgagccggatgtgacaaacgggattctactgcgaagtgacatccacaccctctttgacaattggcacttttcaatcgaccctgattcaatgaaagcccgtttcagcccggatgtgctctccgtcgataaagacttgctacaactggaaggcaagcaaattgatttttcccgcttgcaaatgcctatcaatattgaatacctgcgacatcactggaacgaattttttaaccgtcatggcaatccattcagaaagaaagagccaaataataaaaatcaacaattatga

SEQ ID NO: 525587 - DNA, 204 bp, Stenotrophomonas maltophilia; identical to SEQ ID NO: 158999

SEQ ID NO: 525588 - DNA, 408 bp, Stenotrophomonas maltophilia; identical to SEQ ID NO: 159000

SEQ ID NO: 525589 - DNA, 660 bp, Stenotrophomonas maltophilia; identical to SEQ ID NO: 159001

SEQ ID NO: 525590 - DNA, 1206 bp, Stenotrophomonas maltophilia; identical to SEQ ID NO: 159002

SEQ ID NO: 525591 - DNA, 231 bp, Stenotrophomonas maltophilia; identical to SEQ ID NO: 159003

SEQ ID NO: 525592 - DNA, 393 bp, Stenotrophomonas maltophilia; identical to SEQ ID NO: 144583

SEQ ID NO: 525593 - DNA, 1074 bp, Stenotrophomonas maltophilia; identical to SEQ ID NO: 144582

SEQ ID NO: 525594 - DNA, 642 bp, Stenotrophomonas maltophilia; identical to SEQ ID NO: 144581

SEQ ID NO: 525595 - DNA, 213 bp, Stenotrophomonas maltophilia; identical to SEQ ID NO: 144580

SEQ ID NO: 525596 - DNA, 963 bp, Stenotrophomonas maltophilia
  misc_feature (896)..(905): n is a, c, g, or t
gtgaggataatcactaacattcatgcgcgttatgggcgtgtcagcaaactggatgcaacagagccgaaactgaaatttgaacccggatttctgtatgctgaaataccttatattagcggcatccagaatcgaaaactgagccgatatgtacacttttatcttatggataaagctatcctgcaggccagggatttaaagcctttagcccgggcatttttacgctggataaggtggctggaggataacggacttgaccctttcaccccgggaacgttgaaataccaaagccctacatatggcttcagggagtatcttctgggggccgtaaggcaggggcgcatcgcctcatccaccgcggcggtgtacatcagcgttatccgacggttttacgtatttctgggcaagtgtggtgagctggctgccagctcattttttacgttggtcgaaaaagtcgttgacgggcgacgcaaggtgataagttcggatcttgccatcaggataaccagcacaacaaaaaggacaatcaacccactgaatgatgcagaggttcatatcctggatgaggcactgaaatctgagtccgggttgttcagtttaatgattgtgctgatgaaaaattgtgggttacggctggatgaaatgctgaccctgccgtcgtcactctttactgaagagtaccttgccagtgtccctgtatctgagttgaccatcagggggcttcatattggtccgagatgcggagttcatacgaagtttgggatgacgcgagaactcttcatcaccagacgattgtacgagcaggttctggattatctggcggatgaggagtatgaaaagaagatccaaaaatggcgtgcacgacagggtggggaagggcggcacgagcctttattttnnnnnnnnnngtggggaagggcggcacgagactttatttttaatggcaaacgggaaacggatgtctga

SEQ ID NO: 525597 - DNA, 636 bp, Stenotrophomonas maltophilia; identical to SEQ ID NO: 182412

SEQ ID NO: 525598 - DNA, 1056 bp, Stenotrophomonas maltophilia
atgtatatcgaaataaaagaaacattccttgaattaccctcagaaattcaattttctgaggcggctaacgctgccattctgacgcaggataaatggggcgatgtctggcaaacactgaagaccgatgcggatctgaattataccgatgccggtgagccggtcagtctcgcatcgcgcgtgacgacggcaaccagtgccatttatcatgcgattaccgaaggctggaccatgtgcgtcggctacagcggcgggaaagactcccactcgctactgcacctgttcctcatggccctgatccgtgccgtacggaacgggtcgaacgtcagccagcaccacttcattcagatctccaacaccctgattgaaaaccctgagatgcatcatcagtccacgcaggttctcagccagctccgagcctttattgccgaacagcaactgcccgtgaccgtcctggtggcccacccgtccatgacccagagctgggtcggacgcattctgaccgggcgcggacttccgacctggacaaattccaatacgcgtcaatgctctacagatctcaaacgctctccactgcgccaggccaaagcccgttatttaaaaaatgcaccagcttccgtccgcaacaaagtgtgcctgatgctgggttcccgcgatgatgagagcgcccgtcgggcaggcaacatcctcagaatgggcgggcagtcggacagcgtctcgctcacggagctcggcggcgaactgtacccggtgaaagagtggcggacacaggatatctggtcatttctgatggcctgtggttcgctggcgcgatttccgctgccaagctttttgccggacaacttcagcctcgccacgctttacaaagacgcgaccggggaatgtatctggacgccggagaaatacacggcccggtcttctgcctgcggcgctcgctatggatgctcgcttactcttgtttttatgtatttagagttaaactctacttttctatttttagaattcaagctattcatcgtaattgagagatatccttttaatgttcagcaagcctgttaa

SEQ ID NO: 525599 - DNA, 447 bp, Stenotrophomonas maltophilia; identical to SEQ ID NO: 144550

SEQ ID NO: 525600 - DNA, 807 bp, Stenotrophomonas maltophilia; identical to SEQ ID NO: 144549

SEQ ID NO: 525601 - DNA, 261 bp, Stenotrophomonas maltophilia; identical to SEQ ID NO: 144548

SEQ ID NO: 525602 - DNA, 333 bp, Stenotrophomonas maltophilia; identical to SEQ ID NO: 144547

SEQ ID NO: 525603 - DNA, 231 bp, Stenotrophomonas maltophilia; identical to SEQ ID NO: 144546

SEQ ID NO: 525604 - DNA, 459 bp, Stenotrophomonas maltophilia; identical to SEQ ID NO: 144545

SEQ ID NO: 525605 - DNA, 447 bp, Stenotrophomonas maltophilia; identical to SEQ ID NO: 144544

SEQ ID NO: 525606 - DNA, 309 bp, Stenotrophomonas maltophilia; identical to SEQ ID NO: 144543

SEQ ID NO: 525607 - DNA, 1269 bp, Stenotrophomonas maltophilia; identical to SEQ ID NO: 144542

SEQ ID NO: 525608 - DNA, 612 bp, Stenotrophomonas maltophilia; identical to SEQ ID NO: 144541

SEQ ID NO: 525609 - DNA, 636 bp, Stenotrophomonas maltophilia; identical to SEQ ID NO: 144540

SEQ ID NO: 525610 - DNA, 258 bp, Stenotrophomonas maltophilia; identical to SEQ ID NO: 144539

SEQ ID NO: 525611 - DNA, 435 bp, Stenotrophomonas maltophilia; identical to SEQ ID NO: 144538

SEQ ID NO: 525612 - DNA, 378 bp, Stenotrophomonas maltophilia; identical to SEQ ID NO: 144537

SEQ ID NO: 525613 - DNA, 1182 bp, Stenotrophomonas maltophilia; identical to SEQ ID NO: 144536

SEQ ID NO: 525614 - DNA, 297 bp, Stenotrophomonas maltophilia; identical to SEQ ID NO: 144535

SEQ ID NO: 525615 - DNA, 468 bp, Stenotrophomonas maltophilia; identical to SEQ ID NO: 144534

SEQ ID NO: 525616 - DNA, 747 bp, Stenotrophomonas maltophilia
atgccaaaatgtctattacctgccgagcttgcggaaattgtctgtggattactggtgcaacccacattaatgaatgaattaaaaacaccggagtcgcataaagcatttatgcaggatatcgctgagctggtggcgaaacattgcggaggagagattgacggtgtgatcatgccggtggatcgcgatgaatcaagccaggccgattatctgacctctccggatgtaaccccttatctcgtcgtatctcccggcgcggacatgcactccctcaccgataatgtctggcgtcaccatgcccgagatggctggcttgaccatatcaaaggcagcgacgaagagtgctcagttcgccgctacgccctccagcggatgctccttcagacacaaaccaaccatgctaatcttccctcgcaggtggtacgaatgcgtgattactgcaacctcgacgacgaacagcccgggtcttcagcagagtttatcgttactatggcgctcggcggtcatgcccagctggcagtacaggatgtggaatcacgcctggtaatggccctgacgttgttaattgaaaatggtgttccctcggtccatgtaaacgcgggtgacactgatccttcagttctgcacgtccaggctgctcacggcggcatggtcctttcaactgactccctgaatcatgaattcggtatttcgccgcctgacaggtataccaacggtcgccctggcttattagttaaagcagcctcctga

SEQ ID NO: 525617 - DNA, 777 bp, Stenotrophomonas maltophilia; identical to SEQ ID NO: 144532

SEQ ID NO: 525618 - DNA, 141 bp, Stenotrophomonas maltophilia; identical to SEQ ID NO: 144531

SEQ ID NO: 525619 - DNA, 264 bp, Stenotrophomonas maltophilia; identical to SEQ ID NO: 144530

SEQ ID NO: 525620 - DNA, 255 bp, Stenotrophomonas maltophilia; identical to SEQ ID NO: 144529

SEQ ID NO: 525621 - DNA, 300 bp, Stenotrophomonas maltophilia; identical to SEQ ID NO: 384335

SEQ ID NO: 525622 - DNA, 699 bp, Stenotrophomonas maltophilia; identical to SEQ ID NO: 144527

SEQ ID NO: 525623 - DNA, 387 bp, Stenotrophomonas maltophilia; identical to SEQ ID NO: 144526

SEQ ID NO: 525624 - DNA, 468 bp, Stenotrophomonas maltophilia; identical to SEQ ID NO: 144525

SEQ ID NO: 525625 - DNA, 1014 bp, Stenotrophomonas maltophilia
  misc_feature (250)..(250): n is a, c, g, or t
  misc_feature (253)..(259): n is a, c, g, or t
atgggaacgctcggggcgggcatggtgctcggtcgggaaggaccaacggtacagctgggcggtaacgtcgggcgcatggtcggcgatctgttccgtatgcgcagcgccgaagcgcgccatacgctgctggcaacgggggcggcggccgggctgtctgccgcgtttaacgcgccgctggcaggtatcctgtttatcattgaagagatgcgcgcccagttccgctacaacctgatctccattaaagcggtgnttnnnnnnnaagcggtgtttaccggcgtgattatgtcgagcattgtctttcgcgtctttaacggcgaaggggcggtgattgaagttggcaagctaactaatgcgccggtcaatactttgtggctgtatctgattcttgggatgatttttggcgtcgttggcccgctttttaacaccctgattttacgggcgcaggatatgtttcagcgcatccatggcggaaataccacgaaatgggtgctggtggggggcctgcttggtggcgtgtgcgggatcctcggttttatcgaaccgaatgcggcgggcggcggtttcggtctgattcccattgccgcggcggggaatttcagcgtaggcctgctgctgtttatgtttatttcacgcgtcatcaccacggtattgtgcttctcctctggtgccccgggcggcattttcgccccgatgctggcgctggggacgctgctgggtacggcgttcgggatggcggcggcggcaggcttcccggcctaccatctggatgcggggacgtttgcggttgcgggaatgggggcgctgctggcggcctccctgcgtgcgccgctgaccgggatcgtgctggtgctggaaatgaccgacaattaccagctcattttgccaatgatcattacctgcctcggcgcgacactattagcccaattcctgggtggaaaaccgctatactccaccattcttgcccgtaccctggcgaaacaggaagctgaacaggccctgaagcagaatacttga

SEQ ID NO: 525626 - DNA, 345 bp, Stenotrophomonas maltophilia
atgagtgatgacgtagcgttgccgctggaatttaccgaagcagcagcgaaaaaagtgaaaaccctgattgccgacgaggacaatccggatctgaaactgcgtgtttatattaccggcggcggctgtagtggcttccagtatggttttacctttgacgaccaggttaacgatggtgatatgactatcgagaaacagggcgtcgcgctggtggttgatccgatgagcctgcaatatctggtgggcggttcagtggactacactgaaggtctggaaggttcgcgctttgtggtgactaacccgaatgcgaccagcacctgcgggtgtggttcttcattcagtatttaa

SEQ ID NO: 525627 - DNA, 624 bp, Stenotrophomonas maltophilia
atgctcgtgtattggctggatattcttggcacagccgtttttgctatctccggcgttttgcttgccggaaaactacgcatggatccttttggcgtactggtgctcggcgtcgttacggcggtaggcggcggaacgattcgcgatatggcgctggcaaacggcccggtattctgggtaaaagatccaacggatctggtggtggcgatggtcacctgcctgttaaccatcgtgctggttcgtcagcctcgcagactaccaaaatggatattgccagtgctggatgccgtcggtctggcggtctttgtgggaataggcgtgaataaagcctttattgccgggactggcccgctggtggcgatctgtatgggcgtgttgaccggcgtgggcggagggattattcgcgacattctggcgcgagaagtcccgatgatcctgcgaacggaaatctacgcgacggcctgtatcatcggggggattgttcacgccacggcgtattacacctttgctgtcccgctggaaaacgcggcgatgctggggatggtggtaacgctggtgatccgtttagcggcgatacgctggcacctgaagctgccgacgtttgcactggatgaaaattcaagatag

SEQ ID NO: 525628 - DNA, 810 bp, Stenotrophomonas maltophilia
gtgggtaaggtttcattcagggcgctggtcgccctgcttctgctcgccccggcctggctcatcgccgcgccgcgggtgatcacactctcccctgccaatacggaactggcgtttgccgccgggattacgcccgttgcggtgagcagcttttccgattatccaccgcaggccgcccatctcgaacaggttgccacctggcagggaatgaacctggaacgcatcgtggcgctgaagcccgatctggttcttgcctggcgcggcggtaatgccgaacgacaggtggaccagctctcttcgctgggaataacggtaaaatgggtagatgcggtgagcatcgaacaggtggcgcaaaccctccgtgacctcgcgcccttcagccctaccccccaacgcgccgagcacgctgcacagcagatgctcaacgactatgctgcgctaaaaacccgatacggcacgcaaccgaaacaacgcgtttttctgcaatttggcagccagccgctgttcactaccgggaaaggctcgatccagaaccaggtgcttgagatctgtggaggtgaaaatatctttgctgaaagccgggtcccctggccgcaggtcagtcgtgagcaggttctggcgcgacaaccgcaggccattgtggtggtcggaaatgcgagcgagattcctaaaatagaacaattctggcatcggcagcttaaaattccggtcatcgcactcaacagcgactggtttgaacgcgccagcccgcgtattatcctcgccgcaaaacaactctgcgccgaactggcagagagtcactcaaacagataa

SEQ ID NO: 525629 - DNA, 573 bp, Stenotrophomonas maltophilia
gtggctctgctgaaatcaggcatcggtaaagttgcagcggcactgggcgcgaccctgctgcttgagcgctgcaagcctgacgttatcattaatacaggttcggcgggcggtctggcgccgacgctgaaagtgggcgatatcgtggtttccgacgaagcgcgttaccacgatgcagatgtcaccgcattcggctacgaatatggtcagcttccgggctgcccggccgggtttaaagcggatgataagctgattgccgccgctgaaagctgcattaacgagctgaacctcaatgcggtgcgtggcctgatcgtcagcggcgatgcctttatcaacggctctgttggtctggcgaaaatccgtcataacttcccgcaggctgtggccgttgagatggaagccacggccattgcgcacgtgtgccataacttcagcgtgccgttcgtggtcgttcgcgcgatctctgacgtggcggaccagcagtcccacatcagcttcgacgagttcctggccgttgcggccaaacagtccaccgtgatggtggaaaccctggtgcagaaactggcgcgtgggtaa

SEQ ID NO: 525630 - DNA, 1515 bp, Stenotrophomonas maltophilia
atggcaccaatcgattttcgcaccaaaattaactggcaccgacgtttccgttcgccacagggcgataagagcgaacatgagatcctgcgcatttttgaaagcgatcgcggacgcatcatcaattcgcccgccatccgccggttacagcaaaaaacccaggtgttcccgctggagcgtaacgccgcggtgcgtacgcggttaacgcactccatggaagtgcagcaggtggggcgctacattgcaaaagagatcctcagccgtctcaaagagcaacgtctgctggaaacctacgggctggatgaactgaccgggccgttcgaaagcatcgttgagatggcctgcctgatgcacgatatcggcaatcctccctttggtcatttcggcgaggccgccatcaatgactggtttaaacagcggctttttccctctgacgccataagccagccgctcagcgatgaccgctgtgtggtacgcgatttacgcctgcgtgagggcgaagatagcctgaacgatctgcgccgcaaggtgcgtcaggatctgtgtcatttcgaaggtaacgcgcaggggatccgtctggtgcactccctgatgcgcatgaatctgacctgggcgcaggtgggctgtattcttaaatacacgcgtcccgcgtggtggatgggggaaacgcctgccacccatagctacctgatgaaaaaaccgggctattacctgtcggaagaagcgtacattgaacggttgcgtaaagaactttcgctaacgccgaatggccgttttccattgacgtggattatggaagcggctgatgacatttcttattgcgtggccgatctggaagacgcagtggaaaaaagaatattcagcgtcgaggagctgtatcagcatcttcacgatgcctggggagagcatgaaaaaggttctctgtttgcacaggtcgtcgagaatgcctgggataaatcgcgttcaaattcgctgagccgcagtaccgaagatcagttctttatgtatttgcgggtcaatacgctgaataaactggtgccgtatgcggccgcccgtttcattgataatttgccgatgatatttagcggggaatttaatcacgccctgctggaagatgagagcagttttagtcagctgcttgaattatataaaaacgtggctgttcgccatgttttcagccacccggatgtcgaacagctggagctgcaaggataccgggttatcagcgggttgctggaaatttatggcccgctgctccagctgacggtcgatgagttttgcgagctggtcgaaaatgaacgtgttcgccgcctgccgattgaatctcgtctctatcagaagctttcaacccgtcaccggctggcatacattgaggccgtcagtaaaatagatcgtcattcttcccaatggccagtcatggaatattattatcgctgtcgtcttatccaggactatatcagcgggatgacagatttgtatgcctgggatgaataccgcaagcttatggccgttgaataa

SEQ ID NO: 525631 - DNA, 1434 bp, Stenotrophomonas maltophilia
atgaaaaaaaccacattagcaatgagtgcactggctctgagtttaggtttagcgttgtcccctctggcgacggcggccgagacagcttcctcggcagcgactgcgcagcagatgccaagcctggccccgatgctcgaaaaagtgatgccatcggtggtgagtattaacgttgagggcagcacaaccgtcaatacgccgcgtatgccgcgtaatttccagcagttcttcggcgacaattcgccattctgccaggacggttcgccattccagagctccccgttctgtcagggcggcggcgcaggggatgacggtcagggcggcggccagcagcagaaattcatggcactcggctcgggcgttattattgatgcagcgaaaggctacgtggtgaccaataaccacgtggtagataatgctaacaccattaaggttcagatgagcgatggccgtaaattcgatgccaaagtggtcggtaaagacccgcgctccgatatcgcactgattcaaattcaggatccgaagaacctgacggcgattaagcttgccgactctgacgcgctgcgcgtgggtgactacactgtcgccatcggtaacccgtttggtctgggcgaaaccgtgacctcgggtatcgtctccgcgctgggacgtagcggcctgaatgcggaaaactatgaaaacttcatccagacggatgcggccattaaccgcggtaactccggcggtgcgctggttaacctgaacggtgaactgatcggtatcaacaccgctatcctggcaccggacggtggcaacatcggtatcggctttgctatcccgagcaacatggtgaaaaacctgactgcgcagatggtgcaatatggacaggtgaaacgcggtgagctgggtatcatggggaccgagctgaactctgagctggcgaaagcgatgaaagtggacgctcagcgcggcgcattcgtgagccaggtcatgccgaactcttcagcggcgaaagccggcattaaagcgggtgacgtgatcacctctctgaacggtaaaccgatcagcagctttgccgccctgcgtgcggaagtgggttctatgccaatcggcagtaaagtgaccctcggcctgctgcgtgaaggtaagccagttaacgtgagcctggaactgcaacagagcagtcagaatcaggtggattccagcaccatcttcagcggtattgaaggtgctgagatgagcaacaaaggggcagataaaggcgtggtggtgaacaacgtgaaagcgaactcacctgctgcccgtatcggcctgaaaaaaggtgatgtgatcatgggcgctaaccagcagccggtgaaaaacatcgctgaactgcgcaaaattctcgacagcaagccgtccgtgctggcactgaatattcagcgtggtgatacctctatttatctcctgatgcagtaa

SEQ ID NO: 525632 - DNA, 1158 bp, Stenotrophomonas maltophilia
atggctggctggcatcttgataccaaaatggcgcaggatatcgtggcgcgcaccatgcgaatcatcgataccaatatcaacgtaatggacgcccgagggcgcattatcggcagcggcgatcgtgagcgtattggtgaattgcacgaaggggcgttgctggtgctctctcaggggcgcgtggtcgacattgatgacgccgtggcgaaacatctgcacggggtccgtcaggggatcaacctgccgctgcgtctggaaggagagattgttggcgttatcggtctgaccggcgatcctgaatcgctgcgtaaatacggcgagctggtctgcatgacggcggagatgatgctggagcagtcgcgtctgatgcacctgctcgcccaggacagccgcctgcgtgaagagctggtgatgaatttgatccaggcggaggagcacacgcctgccctgagcgagtgggcgcagcgtctgggtatcgacctgaatcagccgcgcgtggtcgccgttattgaggtggatagcggccagcttggcgtggatagcgccatggtggagctacagcagctgcaaaatatgctggcgacgccggagcgtaacaacctggtggcaatcgtctctttgacggaaatggtggtgctcaagcctgcgcttaatcagtttggtcgctgggacgcggaagatcatcgtcgccgcgttgagctgctcatcgagcgcatgaaggagaacggacagctccgttttcgcgtcgcgctgggaaattactttaccgggccgggaagtatcgcccgttcatggcgaacggcgcgcactaccatgatggtgggtaaacagcgcatgccggagagccgcagttatttctatcaggatctgatgctgccggtcctgctcgacagcctgcgcggtggctggcaggccaacgagctggcgcgcccgctggtgcgtctgaaagcgatggacaacaacgggctgctgcgccgtacgttgcaggcgtggttccggcataacgtgcagccgctggcaacgtcaaaagcgctgtttattcaccgtaatacgctggagtataggctaaaccggatctcggaactgacggggctggatttagggaattttgacgaccggctactgctgtatgtggcgttgcagctggatgaacaaagatga

SEQ ID NO: 525633 - DNA, 390 bp, Stenotrophomonas maltophilia
atgtacgataatctgaaaagtctgggcattaccaatcctgatgaaattgatcgttatagtctccgccaggaagccaataacgatattttgaaaatctattttcacaaggacaaaggagagttcttcgccaaaagcgtgaaatttaaatacccacgccagcgtaagaccgttgtcgctgacggtatcggtcagggatataaagaagtacaggaaatcagccctaacctgcgctacgttatcgacgaactcgatcaaatctgccagcgcgatcgcagcgaagtcgatctgaaacgtaagatccttgacgacctgcgtcacctggaaagtgttgttacccataagatcagcgaaattgaagctgatcttgagaaattgacgcgtaacaaatga

SEQ ID NO: 525634 - DNA, 825 bp, Stenotrophomonas maltophilia
atgcagcagttacagaacgttattgagtccgcttttgagcgtcgcgccgacatcactccggcaaatgtggataccgtgacccgtgaagcggtaaaccaggttatttccctgctggattccggcgcgctgcgcgtggcagaaaaaatcgacggtcagtgggttactcatcaatggctgaagaaagctgtgctgctctctttccgtatcaacgataaccaggttatcgacggagcagaaagccgctacttcgataaagtgccaatgaaatttgcggattacgacgaagcgcgcttccagaaagagggcttccgcgtagtaccacccgcagccgttcgtcagggtgcatacatcgcacgcaacaccgtgctgatgccatcctacgtgaacatcggcgcctacgttgacgaaggcaccatggtggacacctgggctaccgtcggctcctgcgcgcagatcggtaaaaatgttcacctgtccggcggcgtcggcattggtggcgttctggagccacttcaggctaacccaaccatcatcgaagacaactgcttcatcggcgcacgttccgaagtggttgaaggcgtgatcgtcgaagaaggttctgtgatctcaatgggcgtgtacattggccagagcacccgtatttacgatcgcgaaaccggtgaaattcactacggccgcgttccagccggttccgttgtggtttccggcaacctgccgtctaaagatggcaaatacagcctgtactgcgcggtcatcgtgaaaaaagtggatgcgaaaacgcgcggtaaagtgggcatcaatgaactgctgcgcaccatcgattaa

SEQ ID NO: 525635 - DNA, 2676 bp, Stenotrophomonas maltophilia
atgagtaatctcttacccgaacagtatgctaacacagcacttcccaccctccccgaccagcctgataacccgggcgtctggccaccgcatgagctgacctgcgcacatatcaaatcccatatggcggttttccatcgctggctgggtagcgcatttgatgcaggcgtctcagccgaacagctcattgaagcgcgcaccgaatttatcgaccagctcctgcaacgtctgtggatcgactacggtttcgggcaggtgagcgacgtcgcgctggttgctgtcggcggatatggccggggtgaactgcatccgctctctgatatcgacctgctaatcttaagccgtaaaaaactgccggacgatcgggcgcagaaaatcggtgagctgttgaccctgctctgggacgtgaagctggaagtgggtcacagcgtgcgcacgctggaagagtgtctgctggaagggttatctgacctgaccgtcgccaccaatttaattgaaacccgcctgctgattggcgacgtggcgctgttcctcgaactgcaaaagcacatctttagcgacggcttctggccttcagaaaaattcttcgccgcgaaagtcgaagaacaaaaccagcgccaccagcgctatcacggcaccagctataatctcgaaccggatattaaaagcagccccggtggcctgcgcgatatccacacgctgcaatgggtcgcccgtcgccattttggggccacctcgctggacgaaatggtcggttttggttttctgaccgaagccgaacgtaacgaactcaacgagtgcctgcatctgctctggcgcatccgttttgcgctgcacctggaggtcacccgctacgataaccgcctgctgtttgaccggcagcttagcgtggcgcagcgcctgaattaccagggcgagggcaacgagccggtcgagcaaatgatgaaggatttcttccgcgtcactcgccgcgtctctgagctgaaccagatgctgttacagctgttcgatgaggcgatcctcgcgctgacggcagacgaaaaaccgcgtccgattgatgacgaatttcagctgcgcggcacgctgatcgatcttcgcgacgaaacgctgttcatccgcgaaccggaagcgatcctgcgaatgttctataccatggtgcgcaacagcacgatcaccgggatctactccaccacccttcgccatttacgccacgcgcggcgtcatctgaagcagccgctgtgttacatcccggaggcgcgctcgctattcctgagcatgcttcgtcatccgggcgccgtcagccgcggtctgctgccgatgcaccgacacagtgtattgtgggcctatatgccacagtggtcgcatattgtcgggcagatgcagttcgacctgtttcacgcctatacggtggatgagcacacgatccgcgtcatgctgaagctggaaagttttgccagagaagagacgcgatcccgccatccgctgtgcgttgatttgtggccgcgcctctctcaccccgaactgatcctgatcgccgccctgttccatgatatcgccaaaggtcgcggcggcgaccactccgtactcggtgcccaggacgtgctgaaatttgccgagctgcacggcctgaactcacgtgagacgcagcttattgcctggctggttcgccatcatctgctgatgtcggttaccgctcagcgtcgtgatattcaggatccggaagtgatcaaacagttcgccgaggaagtgcaaacggagaaccgcctgcgctacctggtctgcctgacggtagccgatatctgcgctaccaacgaaaccctgtggaacagctggaagcagagcctgctgcgcgaactgtacttcgccaccgaaaaacagctgcgtcgcgggatgcagaacaccccggatatgcgcgagcgcgtgcgccaccaccagttgcaggcgcttgccctgttgcgcatggataacattaacgaagaggcactacatcagatttgggcgcgctgtcgcgccaactactttgtgcgccacagcccaaaccagcttgcctggcacgcccggcatctgctgaagcacgacctgacgaaaccaatgattctgctcagcccgcaggccacgcgtggcgggacggagatctttatctggagcccggaccggccttatttgtttgcggcggtctgcgccgaactggactggcgtaacctgagcgttcacgacgcgcagatttttaccacccgcgacggcatggcgatggacacctttattgtactggagccggatggcagcccgctgtcgtcggacaggcatgaggggatacgctttggcctcgagcaggcgattacgcagcgcagctggcaacctccgcagccgcgacgtcagccagcaaaactgcgccactttaccgtcgataccgaggtcaatttcctgccgacccataccgaccgtaaatcgttccttgagctgattgcgctcgaccagccagggctgctcgcccgcgtcggccaggtttttgccgatctgggaatttcgcttcacggcgcccgaattacaaccattggcgaacgagtagaagatttatttataatcgcgacggccgaccggcgtgcccttaataatgacctgcaacttgaagtgcaacaacggttgacagcagccctcaatccaaacgataaagggtga

SEQ ID NO: 525636 - DNA, 795 bp, Stenotrophomonas maltophilia
atggctatctctattaagacacctgaagaaattgaaaagatgcgcgtcgccggtcgtctggccgctgacgtgctggaaatgatcgaaccgtttgtgaaaccgggcgtcagcactggcgaactggatcgcatctgtaacgactatatcgtcaacgagcagcacgcggtctccgcctgccttggctatcacggttttccaaaatccgtctgcatctctattaatgaagtggtttgccacggcattccggatgacgagaagctgctgaaagatggcgatatcgtcaacatcgacgtgaccgtcattaaagacgactaccacggtgacacctctaagatgttcatcgttggcaagccaacgattctgggcgagcgcctgtgtaaagtcacccaggacagcctctacctggcgctgaaaatggtgaagccaggcatccgcctgcgcaccatcggcgccgcaatccagaagtttgtggaagcggaaggtttctccgtggtgcgtgaatattgcggtcacggtattggtcgtgtgttccatgaagaaccgcaagttctgcactatgatgcagacgacggtggcgtagtgctgcaaaagggcatgaccttcactattgagccaatggtcaacgcgggcgattaccgcatccgtaccatgaaagatggctggacggtaaaaaccaaagacagaagcttgtctgcccagtacgagcatactattgtggttacagacaacggctgcgaaattatgacgttgcgcaaggatgacaccatcccggcgatactgacgaacattgagtga

SEQ ID NO: 525637 - DNA, 726 bp, Stenotrophomonas maltophilia
atggcaactgtttccatgcgcgacatgctcaaggctggtgttcacttcggtcaccagacccgttactggaacccgaaaatgaagcctttcatcttcggcgcacgtaacaaagttcacatcatcaaccttgagaagactgtaccaatgttcaacgaagccctggctgagctgagcaagatctcttcccgtaaaggtaagattctgttcgttggtactaagcgcgctgcaagcgaagctgtgaaagatgctgctaacagctgcgaccagttcttcgtgaaccatcgctggttgggcggcatgctgaccaactggaaaactgttcgtcagtccatcaagcgcctgaaagatctggaaacccagtctcaggacggtactttcgataagctgactaaaaaagaagcgctgatgcgcactcgtgaactggacaagctggaaaacagcctgggcggtatcaaagatatgggcggcctgccagacgcgctgttcgtaatcgatgcagaccacgagcacatcgcaatcaaagaagctaacaacctgggtatcccggtattcgctatcgttgataccaactccgatccggacggtgttgacttcgttatcccgggtaacgacgacgcaatccgtgctgttagcctgtacctgagcgctgtagctgctaccgttcgtgaaggccgttcccaggatctggcttctcaggcggaagaaagcttcgtagaagctgaataa

SEQ ID NO: 525638 - DNA, 852 bp, Stenotrophomonas maltophilia
atggctgaaattaccgcatccctggtaaaagagctgcgtgagcgtactggcgcaggcatgatggattgcaaaaaagcgctgaccgaagcgaacggcgacatcgagctggcaatcgaaaacatgcgtaaatccggtgcgatcaaagcagctaagaaagcaggcaacgttgctgctgacggcgtgatcatcaccaaaatcgacggcaactacggcatcattctggaagttaactgccagactgacttcgttgctaaagatgctggtttccaggcatttgctaacaaagttctggacgcagcggttgcaggcaaaatcactgacgttgaagtgctgaaagcacagttcgaagaagagcgtgttgcgctggttgctaaaatcggtgagaacatcaacatccgtcgcgtttcttccctggaaggcgatgttctgggctcttaccagcacggcgcgcgtatcggtgttctggttgcggctaaaggcgctgacgaagagctggttaaacagctggcaatgcacatcgctgcaagcaaaccagaattcgttaagccagaagacgtgtctgctgaagtggtagagaaagagtaccaggttcagctggacatcgcgatgcagtctggtaagccaaaagaaatcgcagagaaaatggttgaaggccgcatgaagaaattcaccggcgaagtttctctgactggccagcctttcgtaatggatccaagcaagtctgttgctcagctgctgaaagagcacaacgctgacgtgactggcttcatccgcttcgaagtgggcgaaggcatcgagaaagttgagactgacttcgcagcagaagttgctgccatgtccaagcagtcttaa

SEQ ID NO: 525639 - DNA, 726 bp, Stenotrophomonas maltophilia
atggctaccaatgcaaaacccgtgtacaaacgcattctgcttaagctgagtggcgaagcgctgcaaggatcggaaggcttcggtattgacgcaagcatccttgatcgcatggcacaggaaatcaaagaactggtcgaactgggtattcaggttggcgtggtcattggcggtggcaaccttttccgtggtgctggtctggcgaaagcggggatgaaccgcgtagtgggcgaccacatggggatgctggcaaccgtgatgaatggcctggcgatgcgtgatgcgcttcatcgcgcctatgtgaacgctcgcctgatgtccgctattcctttgaatggcgtatgcgataactacagctgggcagaggctatcagcctgctgcgcaacaaccgcgtggtgatcctctccgccggtacgggtaacccgttctttaccaccgattccgcagcctgcctgcgcggtatcgaaatcgaagccgatgtggtgctgaaagcgaccaaagtagatggcgtgtttactgccgacccggcaaaagatccttcagcgaccatgtacgatcagctgagctacagcgaagtgctggataaagagctgaaagtgatggatcttgccgccttcacgctggctcgcgaccataaactgccgatccgtgttttcaacatgaacaagcctggcgcgctgcgtcgcgtcgtgatgggcgaaaaagaaggcactttgatcacggaataa

SEQ ID NO: 525640 - DNA, 558 bp, Stenotrophomonas maltophilia
gtgattaacgacatcagaaaagatgctgaagtacgcatggacaaatgcgtagaagcgttcaaaaaccaaatcagcaaaatccgtactggccgtgcttccccaagcctgctggatggcatcatcgtagaatactacggtacgcctacgccactgcgtcagctggcgagcgtgacggtagaagatacccgtaccctgaaaatcaacgtgttcgatcgctcaatgagcccggccgttgaaaaagcgatcatggcatctgacctgggtctgaacccaagctcagcgggcgcggatattcgcgttccactgcctccgctgacggaagagcgtcgtaaagatctgatcaaagtcgttcgcggtgaagcagagcagggtcgcgtttccgtgcgtaacgtgcgtcgcgatgcgaacgataaagtgaaagccctgctgaaagaaaaagagatcagcgaagatgacgatcgtcgttctcaggacgacattcagaaaatgaccgacgcggcgatcaaaaaaattgatgcggcgctggcagaaaaagaagcggaactgatgcagttctga

SEQ ID NO: 525641 - DNA, 1200 bp, Stenotrophomonas maltophilia
atgaagcatctcactctcctcggctcgaccggctctatcggttgcagcactctcgacgtcgtacgtcataatcccgacagctacaccgtgaccgcacttgtggccggaaaaaacgtgcagcgaatggtcgaacagtgcatggagtttacccctcgttttgcggtgatggatgatgaagagagcgcccgccaggtgaaagcgctgttgcaggagaagggctgtcgtaccgaagtgctcagcgggcaacaggcggcttgcgatatggcctcgcttgatgaagttgatcaggtaatggcggcaatcgtcggggcggcgggtcttctgccgacgcttgccgctattgatgcgggaaaagatgttctgcttgcaaataaagagtcgctggtcacctgcggacgcctctttatggaggcggtaaaacagcgtggggcgcgtcttttgccggtcgatagcgagcacaacgcgatttttcagagtttaccccaaccttttcaacaaaacctggggtacgctgaccttgagcagaatggcgttgtgtcgattctgcttaccgggtctggtggcccgttccgtgaaacgccactgtctgaattgagcgcaatgacgccggatcaggcgtgtcgtcatccgaattggtcaatggggcgtaagatctccgtcgattcggccaccatgatgaataaaggtctggaatacattgaagctcgctggctgttcaatgcgtcggcgaaacagatggaagtgctgatccacccgcagtcggtgattcactcgatggtgcgctatcaggacggcagcgtgctggcccagttgggcgagccggatatgcgtacgcctattgctcatacgatggcgtggccaaaccgcgtaaaatcgggcgttaagcctctcgatttttgcaagctgagttcactgacgtttagcgagcctgattacgaccgttatccctgcctgaaactggcgatgacggccttcgatcaggggcaggcggcgacaacggcgcttaatgcagccaatgaagtgaccgttgaagcattcctgaatcagcagatccgctttactgatatcgccgcgttgaatttatccgtgctggagatgatggatttgcgtgagccgcagagtgtggaagaggtgctgtccgtggatgaacaggcacgtattgttgcgcgtaaacaggtgacacgtctcgcaagctggtga

SEQ ID NO: 525642 - DNA, 690 bp, Stenotrophomonas maltophilia
atggatggcaatggccgctgggcgaaaagacaagggaagatacgagcctttgggcataaagccggggcgaaatctgttcgccgcgccgtttcttttgccgccaataacggcattgatgcgttaacgctctatgcttttagcagtgaaaactggaatcgacctgcgcaagaagtgactgcgttgatggaactgttcgtgtgggcgctcgatagtgaagtaaaaagcctgcaccgccacaacgtccgcttgcgtattattggcgaaaccagtcgttttaactcacgtttgcaggaacggattcgcaaagctgaagcgctgacggaaaataataccggcctgacgctcaatatcgcggcgaattacggtggacgctgggatattatccagggggttcggcatttggctgagcaggttcaggaagggctgttaagacccgaccagattgatgaagaggcgctgagtcagcaaatctgcatgaatgaactggctcccgtggatttggttataaggacagggggggagcatcgcataagtaactttttgctgtggcaaattgcctacgctgaactttactttacggatgttctttggccagattttgatgaacaagactttgaaggtgcgctgcatgcctttgccaatcgagagcgtcgtttcggcggcaccgagcctggtggcgataacgcctga

SEQ ID NO: 525643 - DNA, 750 bp, Stenotrophomonas maltophilia
atgctcgccgcgtgggaatgggggcagcttagcggctttacctcgcgcactcagcgggtatggctggcggtactctgtggttttttactggccctgatgctgtataccttgcctgaatatcatcacgatgttcaccagccgctggttgccggatccttatggatatcgctggcctggtggattgctgcgcttgttttagtgcttttctacccgggctctgcggcgatctggcgtaactctaaagtgttgcgccttatttttggtctgctcacgattgttccgttcttctggggtatggttgcgctgcgcgcctggcactatgacgaaaaccactacagcggcgcaatatggctgctttatgtgatgattctcgtctggggggctgactccggagcctatatgtttggtaaactgtttggcaaacataaactggcgccaaaggtttctccgggcaaaacctggcaaggcttcatcggcggcctgtttacggcagcgattatctcctggggctatggcgtctgggcgaatcttgaggttgccccctccacgctgctggtatgttcgattttcgcggcgctggcatcggtactgggtgatttaaccgagagcatgtttaagcgtgaagcagggattaaggacagtggtcacctgattccaggacatggcggaatactggatcgcattgacagccttaccgcggctgttcccgtatttgcttgcctgcttttactggtgtttgggacgatataa

SEQ ID NO: 525644 - DNA, 1353 bp, Stenotrophomonas maltophilia
atgctgagcattctctggaatctggcggcgttcattgttgcattgggtgtactgattaccgtgcatgaatttggccatttctgggttgcccggcgctgtggtgtgcgggtagagcgattctcgattggctttggcaaatcgctctggaagcgcaccgataagcatggcaccgagtttgtcattgctctgatccccctgggcggctatgtcaaaatgctcgacgaacgcgttgagcctgtcgccccggaacttcgacatagcgcgttcaacaataaaactgttggccaacgtgctgccatcatcgctgccggaccggtagccaatttcatcttcgctatcttcgcctactggctggtgtttattatcggcgtgcctggcgtacgcccagttgtgggtgaaatcaccacgggttccattgcggcaacggcgcaaattacaccgggaatggaacttaaagcgattgatggtatcgaaacccctgattgggatgccgtgaggttacaactggttgcgaaaatcggtgatgagcagacaaccgtcagcgtatcgccttttggttccgaccagcggcaggaaaaagtgctggatttacgccactggcgctttgagccagacaaagaggatccagtcgctacactggggattcgcccgcgcagcgcgcagatcgagccggtgttagccgaagtacagtctaattcggcagcgagtaaagcaggtttacaagcgggtgacaggatcgttaaagtcgatggtcagccattaacacaatggatgacctttgttactctggtgcgcgataatccaggcaagccgctcgcgctggaagtggaaaggcaggggagttcgctctcactgaccctcaccccggataccaaatcgggcggcggtaaggcagaagggtttgccggcgttgtgccgaaagtgatcccactgccagatgagtacaagacaatacgccagtatgggccgtttagcgccatcgttgaggccacggataaaacatggcagctgatgaagcttacggtcaacatgttggggaaattgataaccggtgatgtgaaactgaacaacctcagtgggccaatttcgattgctcagggggctgggatgtcagcggagttcggggtgatttactatctcatgttccttgcgctgattagcgtgaacctggggataatcaacctgttcccgcttcccgtattagatgggggccatctgctgtttttagcgattgaaaagctaaaaggcggaccggtatccgagcgagttcaagactttagttatcgcattggctcgattttgctggtgctgttaatggggcttgcacttttcaatgatttctctcggttgtaa

SEQ ID NO: 525645 - DNA, 612 bp, Stenotrophomonas maltophilia
gtggttacccacgatgttgatctgctggatcttcgcagaaacaccttcctggaagaccagtttcaggtcaacacggttacgtggcagcggtgtaacaaccgctttaacgctcgcgctgtatttaccgacgctgtaatagaaatcttccagacctttttcaatgtctgcaagggttgtgcggtccagagattcccccacacgaacacccgatgcctcaaggttctgcttgagcatgtcatctttcaccgacttgttgccggagaaagtgatgctggcaatcgttggacgttcttttacctgaaccaccagcgtatcaccatcgcgcaggacgcggacatcctcaaagttgccagtggcaaacagagcacggatggtgttactgatatcttcatcattaaccgtatcgccggggcgcacaggcatactgaggagggccgcaccaacggcgacacgctgaaggccttcgaaatgaatatctttcactacgaacccgtcagcaccgtatacggtcgcgctgctaaacagcagcgacgctatgagcaactttttcatcgccatcgttattatgcgttcttcctaactaactctcttacaaccgagagaaatcattga

SEQ ID NO: 525646 - DNA, 1491 bp, Stenotrophomonas maltophilia
atgcagggcacaaaaattcgactcttaaccggcggtttgctgatgatggcagcagccagttatgtgcaggcagatgcgctccagccagacccggcctggcaacagggaacactggcgaacggattccagtggcaggtgttatccactccgcaacgtccgagcgatcgcattgaaattcgtctggctgtgaataccggctccctcactgaaagcacccagcagaccggcttaagccattttattcctcgactggcgctcacccagagcggcagtttgcaggcggttcaggtgcgttctttatggcaacaggccatcgatcctaaacgcccgctgcccccggctgtggtctcctatgactacaccatgtttaatctgagcctgcccaacaaccgtaacgatctgcttaaagaagcgctgacctatctttccgatgccaccggcaaactggcgattacgcctgagaccgtaaactatgcgttgagcaacagcgacatggtggcgacctggccgacggataccaaagaaggctggtggcgctaccgcctgaaagggtccacgctgcttggccacgacccggcagaaccgctgaaacagccggtggatccagagcaggtgaaatctttctaccagcagtggtacaccccggatgccatgaccctcattgtagtgggcaacgtggacagccgtgcggtgatagagcagatcaacaaagcctttggcgatctaaaagggaagcgtgaaacgcccgcccctgttcctacattgtccccgctgcgtcctgagacggtcagtatcatgacggataccgtgcgtcaggatcgtctttcgatgatgtgggataccgcctggcagccgatccgcgagtcctcggcgctgttgcgatactggcgtgcggacctggcgcgtgaagcgctgttctggcatgttcagcagacgctcagcaagaacaacgtgaaagacattggtctgggctttgactgccgcgtgctgttccagcgcgcccagtgcgccattaacgtcgaatcgccgggtgataagctgaatgccaatctcggcgtggtggcgaaagagctggctaaagtgcgtaaagagggcctgtctgaagaggaatttaacgccctggtggcgcagaaatccctcgaattgcagaaactgtttgccacctatgcccgcgccgataccgatatcttaatcagccagcgcattcgttccttacagaatcaggtcgtggatatcgcgccggagcagtatcagaaattgcgtcaggatttcctgaacggtctgaccgtggagatgctgaatcaggatctgcggcagcagctgtctcaggatatggcgttgattctgttgcagccgaaaggtgagccggaatatgacatgaaagagttaaaggccacctggaacgccatcatggcgacgccgtcgcagccagtacaggcggcggccgatgatttgcaccaggatgcgagcgatattccgcagggccagtaa

SEQ ID NO: 525647 - DNA, 1287 bp, Stenotrophomonas maltophilia
atgaaaacctcactcttcaaaagtctttacttccaggtcctgacagccatcgccatcggtattttgctcggtcactactacccggagctgggcgcgcaaatgaaaccgcttggcgacgcgttcgttaagctcatcaaaatgatcatcgcgccggtcatcttctgtaccgtggtgaccggtatcgctggcatggaaagcatgaaggcggtcgggcgtacgggggcggttgccctgctgtacttcgagattgtcagtaccatcgcgctgattatcggcctgattattgtcaacgtggtacaacctggcgcgggcatgaacgttgacccggccacgctggatgcgaaagcggtggcggtttacgctgaacaggcgaaagatcaggggattgttgccttcctgctggacgtgatcccgagcagcgtgattggcgcgttcgccagcggaaatatcctccaggtactgctgtttgccgtactgtttggctttgccctgcaccgtcttggcagcaaaggtcagctgatttttaacgtcattgaaagcttctcgcaggttatcttcggcatcatcaacatgattatgcgtctggccccgattggtgcctttggcgcgatggccttcaccatcgggaaatacggcgtcggcacgctggtacagcttggccagctgattatctgcttctatatcacctgtattctgtttgtggtggtggtgctcggctccatcgctcgtgcgaccggcttcagcatcttcaaatttatccgttacattcgtgaagagctgctgattgtcctcggcacatcctcttctgagtccgcgctgccgcgtatgctcgataaaatggaaaagctgggctgccgtaagtcagtggtggggctggttattcctacgggctactcctttaacctggacggcacctcgatttacctgacgatggcggcggtctttattgctcaggccaccaacagccacatggatatcttccatcagattacgctgctggtcgtcctcctgctctcctcgaaaggggcggcgggcgtaacgggtagcggatttatcgtgctggcggccactatctcagcggttggccatctgccggtggcgggtttggccctgatcctcggtatcgaccgctttatgtctgaagcccgcgcgttaaccaacctgattggtaatggtgtggcgacggttgtggtggcgaagtgggtaaaagagctggatcacaagaaacttaacgatacgctgaataatcgcacatctgaggacaaaacccccggtttatcctcttaa

SEQ ID NO: 525648 - DNA, 2007 bp, Stenotrophomonas maltophilia
ttgcgtgtcagccgttccttaacgatcaaacagatggcgatggtgtctgccgtcacaatgctgtttgtcttcatcttctgcgtcattttgctgtttcattccgtacagcagaatcgctataacacggcttcgcaactggaaagtattgcccgctcggtgcgggaacccctgtcggcctcgatcctgaaaggggatatccccgaggcggaatctatcctgaagcgcattcagcccgccggtatcgtgagccgcgccgacgtcgtgctgccgaaccagttccaggcgctgcggatgagctttatcccggagcgtcccgtcccgatgatggtgatgcgcctgtttgaactgccggtgcagatttccctgcctctctattccctggaaagaccggctaacccgcagccgctggcctatctggtactacaggcggactcgtaccgcatgtataaattcgtcatgagttgggttgctacgttagtgactacttacttacttttgaccttaatgttgagcgtggcgctgacgtggtgcatcaaccggttaattgtgcatccgttgcgccgcatagcccgggagctgaatgacctctctccgcaggagcatatggggcatcagcttcccttgccgcgtctgcatcacgacgatgaaatcggcatgctggtccgcagttacaatatcaaccagcagcgtgtcctgcgtcagcaggaagaggtcagtaataacgccacccgtttcccggtttccgacctgccaaacaaagcgtttttaatggccctgctggagcagaccgtcgctcgccagcagaccaccgcgctgatggtgattgcctgcgagaccttgcaggacacgacgggcgtgctgaaagagagccagcgcgagatgctattactgacgctggtggaaaaaatcaaatctgtgctggcgccgcgcatggtacttacccaggtcagcggctatgacctggtggtgattgcgcacggtgtaaaagagccgtggcacgctattacgttaggtcagcaagtactcactgtcataaatgagcggctacccattcagggtatccagcttcgcccaagtgccagcattggtatcgcaatgtactacggtggtctgaccgccgagcagttataccgtcgggctttctcagcagcgtttaccgcgcgccgaaaaggcaaaaaccagatccagttctttgatccggagcaaatggaaaaagcccagcagcgcctgacggaagagagcgacattctgacggcgatggacaatcgccagtttgcgctctggctacagccgcaggtggatttgcgcacgggtgaagtgaccagcgccgaagcgttgctgcgcatgcagcagccggacggcacgtgggagctgcctgaggggatgatcgaacgtatcgagtcctgcggcctgatggtcaccgtcggatactgggtgctggaagagtcgtgccgccagcttgcggcctggcaacaacggggcatcacgctgccgctgtcggtgaatctttctgcgctacagctgatgcacccgactatggtgccggatatgctcgagttgatccatcgctaccgcatccagccccacacgttgatcctggaagtcaccgagagccgttgtattgacaatcctgacgacgctgtcgccattctgaaaccgctgcgtaatgccgggatccgcattgcgcttgacgattttggtatggggtattccggcctgcgtcagctccagcacatgaaaaccctgccggtggacgtcctgaaaatcgacaaaacctttgtgaaagggctgccggaggattgcagcctggtgcaggccattatccagatggcgcacagcctgaacctgcacgtgactgccgaaggtattgaggccgaagcccagcgcgagtggctggctgcggcgggcgtggagagcggtcagggcttcctgtttggccgcgccgtgccgacggatacctttgagcgacgctatcttgccgacgctggcaataacgcaaaagtgtaa

SEQ ID NO: 525649 - DNA, 3483 bp, Stenotrophomonas maltophilia
atgcgcacgttcacactaaatctactcgccttatcgcttggcctggtgctcatgcccctggcccaggccgccaactccccgcagcagagacagctgctggaacaggttcgtctgggggaatccacccagcgtgaggatttggtgcgccagtcgctctatcgccttgagctgatcgaccccaacaacccggacgtgattgccgctcgcttccgctacctgttacgacagggggatacggcgggcgcgcaaaaagagctggatcgcctgaaaggaatggcacccgattccagtgcataccagtcctcccgtacgaccatgctgctctccacgccggatggtcgccaggccctccagcaggctcgcctgctcgccaccaccgggcacacgcaggaagctattgccgcgtatgacaaactgtttgacggtaatccgcccagcggcgacatcgcgacggagtactggaacgtggtggcgaaagagcctgcccgccgcaatctggccattaatcagctgaagaaaatcaacgccagcagtccgggcaacgccccgctacaggcttcgctggcgcagcttctgttccagagtggacggcgtgatgaagggtttgcggttttacaggagatggccaaatcgaacaatggccgcagtcaggcgtcggacatgtggtaccagcagatcaaagatcagccagccagcagcgccagcgttaccgcgctgcaacaatacctgagcgtgttcagcgatggcgataacgtgacggcggcgcgcgcccagcttgaagcgcagcaaaaacagctcgccgatccggcgtttcgcgccaaagccgaagggttagccgcagtggatgccgggcagggcagtaaagcggtaacggagttgcagaaagcagtcagcgccaaccacgccgacagtgaagccgtaggcgcgctggggcaggcctattcgcagaaaggcgatcgcgcccgcgcggttgcgcagtttgaaaaggcgatcgccctcgatccgcagagcgacaaccggggcaaatgggacagcctgctgaaggttaaccgatactggctgctgatccagcagggtgataacgccctgaaagccaacaagacagcccaggcggaacgctattatcagcaggcgcgcaacattgacaatacggacagctacgcggtcctggggctgggtgacgcggcggcggcgcggaaagataacgacgcggctgaacgctattatcgccaggcattgcggatggacagcggcaacagcaacgcggtacgcggtcttgccaatatttatcgcgagcagtctccggagaaggcgacgcagtttattcagtcgctctctgccagccagcgccgcagcattgatgatattgaacgtagcctgacgaacgagcagctctcggctcaggctgcacagctggaaagccagggaaactatgcgcaggccgcagaaattcagcgccgacgccttgcgctttccccgggcgacgtgtggatcacctaccggctatcacgcgatctgtatagcgcgggtcagcgcagccaggcggataacctgatgcgccagctggcaagccagaaaccgggcgatccggatcaggtttacgccagcgggctgtacctgtccggtaacgatcgggaccgggccgcgctggcgcatctgaacacgctgccgcgcgacaagtggaacggcaacatccaggcgctggcggaccgcctgcaaagtaatcaggtgctggaaaccgccaaccgcctgcgcgacagtggaaaagagcaggaagcggaagcgctgcttcgccagcagcccccgtccacccgtattgacttaacgctggcggactgggctgaacagcgtggcgatcacgaggccgcgaaaaccgcctacaacaccgtcctgcaacgggaaccgcagaacgaagacgcaattctcggcctgaccgaagtcaatcttgctcagggcaacagggacgccgctcgcgctgagctggcgaaactgcccgcggcacaaaacggcgaaccgctctccctcaatatgcagcgccggatcgccatggcgcaggccggtctgggtgatcctgccgcggcagaaaagaccttcaacgccattgttcctcaggcaaaatcgcagccgccttctatggaaagcgcgctggtgatgcgtgatgccgcccgtttccaggcgcaaaacggccagcctcagcaggcgctggaaacctggaaagatgcgatggtctcatcgggcatcacgacgacccgtccgaccgataacgacagctttacgcgtcttacgcgtaacgatgagaaagatgactggctgaagcgcggcgtgcgcagcgatgcaggcgatctttatcgtcagcaggatctgaacgtcacgctgcaacacgactactggggatccagcggcacggggggctattccgacctgaaagcgcacaccactatgctccaggtggatgcgccgctatcggatggccgcatgttcttccgtagcgatctggtcaatatgaacgccggttcctttgacaccaataacggaacctacgatccgacatggggtacctgcgccgaaacgccatgtcacggcagcacgaaccagtcggccaacggcgccagcgtggccgtcggctggcagaacaacacctgggcgtgggacatcggtacaacgccgatgggcttcgacgtggtcgatgtggtgggcagcctgagctacagcaacgacttggggccgattggctacaccctgaacgcccatcgtcgtccgatttccagctctgtgctggccttcgccgggcaaaaagatcctaataccgacaccacctggggcggcgtgcgtgctaccggtggcggcgtgagcatgagctacgacaaaggcgaagctaacgggatctggtcaagcctgagtgccgacagcctcaccgggaagaatgtcgaagataactggcgggtccgctggatgaccggctattactacaagcttatcaatcagaacaacgagcgtctgacggtcggtgtgtccaacatgctctggcattacgataaggatttaagtggctattcgctgggccagggcggttactacagtccccaggagtatgtgtcgttcgccttaccggtgaactggcgtaaacgcacagagaactggtcatgggagctgggcggttccgtctcatggtcccattcaaaaacaaaggatgtgatgcgttatccgttgcaggggctgatcccggacaatgagccaggccgttataccgataaaggtgtgatgggaactggaagtagctcgtcagggacgggttataccgcaagggcgattgttgaacgccgtgtgacgtccaactggtttgtcggtctgggcgtcgatattcaggaagcgaaagactataccccgagccatgcgttgctctatgttcggtattctgccgcaggctggcagggtgatatggacttaccgccggaaccgctggtgccttatgcagactggtga

SEQ ID NO: 525650 - DNA, 1107 bp, Stenotrophomonas maltophilia
atgaaaatctttcgcgggtgtgtagtcgcagcgttgatgctggcggcggcgaatcttcacgccgcctgtcgctggcctgcctgggagacgttcaaacaggattatatgagcgaaagtgggcgcgtcattgatcccagtgaggcgcgcaaaattaccacctccgaagggcaaagctacggactgttctttgccctggcagcaaacgatcgcaaggcgttcgatctgctgctgacatggacgcgcgataaccttgccgagggggatttagcccaacatctcccggcgtggctatggggaaaaaaggacgacaacacctgggcggttatcgaccctaactccgcgtccgatgccgatatctggatagcctggtcgctgctggaagccgggcggctgtggaaaaatcccgattacacgcgcacgggtaaggcgctgttgacgcgcattgccagtgaggaagtggtgaaggtgccggggctgggttctatgctgctgccgggtaaagtcggttttgccgaagagagtgtctggcgcttcaaccccagctacctgccgccgcagcttgcgagctatttcacccgtttcggcgcaccgtggacaacgctccgtgaaaccaacctgcgtctgctgctggagaccgcgccaaaaggattttcctcgaactgggtgaaataccagaaaaagggcggctggcagttgaagcaggatacgaccctgatcggcagttacgatgcgattcgcgtctatctgtgggtagggatgatgaacgataacgatccacaaaaagcccggctactggcgcgtttcaagcccatggcgaccaccacaatcaaacaaggcttaccgccggaaaaagtggacgtagcgaccgggaaacgtaccggagatgggccggtagggttttctgcctccctgcttccatttttacaagaacgggacgcgcaggcggtgcaacgccagcgtgtcgccgatcgttttcccgataacaatgcttattacagctacgttctgaccctctttggacaagggtgggatcagcatcgttttcgtttcaccgcgcaaggtgaattactaccggattggggccaggaatgcgcacgttcacactaa

SEQ ID NO: 525651 - DNA, 2388 bp, Stenotrophomonas maltophilia
atggggatgagtgcgctccctgcaacagtggctaacgcggcgcctgataacgcagcgaccacacccgcgccaacggtgcctgtcgtcgcgcaagcgaccgatccggtagtgacggcggcgccggggcagacggaaaacgtcgtcccgaatcagccgacgacggggaatacgctgcccgccgacaacccggtggttgggcaggttatgcctggcgtgccgggagccagtgcaccggtggttgcggaaaatacgccgtcgcgtgacgttaagctgacgttcgcccagatcgcgcctcctccgggcagcatggttctgcgcggcatcaacccaaatggcggtgtcgaattcggtatgcgtagcgatgaagtcgtgtcgaaagcgatgctcaacctggaatacacgccatcgccgtcgctgctgccggtgcaatcccagcttaaggtctatctgaatgatgagctgatggacgtcctgcccgtcaccaaagagcaactgggtaagaaaaccctggctcaggtgccgattaacccgctgtttatcagcgactttaaccgcgtgcgtctggaatttgtcggccattaccgcgatgtctgtgaaaacccggccagcagcaccctgtggctggatgttggtcgtaactcttcgcttcagatgacctatcagccgctggcgttgaaaaacgatctctccgccttcccggtgccgttcttcgacccgcgtgataaccgtccactgaacctgccaatggtgtttgcgggctctcctgatgtgaccgaacagctggcggcctctatcgtggcatcctggtttggttcccgctccggctggcgtggccagagtttcccggttatgtacgacaaaatgccggacaaaaacgcgattgtgtttgccaccaacgccaaacgcccggcattcctgcgggaccatccagaggtgaaagcgcccaccatcgagatgatcagccatccggacaatccgtacgtgaagctgctggtgatcttcgggcgtgatgataaagatctggtgcaggcggcaaaaggcattgctcagggcaatatcctgttccgcggtaatagcgtcgtggtggatgaggtgaaaccgctgctggcacgtaagccttatgatgcgccgaactgggtccgcaccgaccgcgcgattaccttcggcgagctgaaaacctatgaagagcaattgcagtcaaccgggcttgaaccttctcctgtcagcctgtcgctgaacctgccgccggatctctatctgctgcgcaccaacggtattgatatcaacctgaactaccgttacaccgcgccggtaaccaaagacagctcgcgcatggatatcagcctcaacaaccagttcctgcaatccttcagcctgaccagcagccaggagacaaaccggttgatgcttcgtctgcctgtattgcaggggctgctggatggtaaaaccgatgtgtcgatcccggcgctgaagctcggtgcggtgaaccagctgcggtttaacttccagtacatgaacccgatgccgggtggatcggtggaaaactgtattaccttccagccggtgcaaaaccacgtggtgattggtgatgattccacaatcgacttctcgaagtattaccactttatcgcgatgccggatctgcgtgcgtttgctaacgccagtttcccgttcagccgcatggctgatctctctgaatcgattgtcgtgatgccaaaagcggccaacgaaggccaggttgccacgctgctggacaccatgggcaccgtcggggcgcaaaccggcttaccggctatcaacgtgacggtgacggatgacggtagccagatccagaacaaagatgccgatatcatggtcatcggcaacattccggacaagctgaaagacgagaagcgcgtcgatctgctggtgcaggcggctcagtcatgggtcaacacgccgctgcgtcagaccgagttcccgagcatcatgccggacagcggcgatcgtcaggccaatatcaggacgaccgtaagctcaacgggtccgatggctgcgattgtcggcttccagtctccgtataacgaccagcgcagcgtgatcgccctgctggcggacagcccgcgcggctatgagctgctcaacacggccatgaacgacagcggtaaacgggcggcaatgttcggttccgtctcggtgatccgtgagtcgggggtaaacagcctgcgcgtgggggatgtctactacgtcggtcatctgccgtggttcgaacgcctgtggtacgccctctctaaccacccggtgctgctggccgtgttggctgcgctcagcgttgtattgctggcgtgggtactgtggcgtctgctgcgaatcatcagccgtcgtcgtcttaacccggaccatgagtaa

SEQ ID NO: 525652 - DNA, 2616 bp, Stenotrophomonas maltophilia
atgagccgcctgaccaactggttgctcatcccgccggtcagttcgcgcttaagtgaacgctaccgccattaccgtcatcatggcgcctcatcgctgagcgctgcgctgggctgcttctggatgattctggcgtggatgttcatccccctcgaacatccacgctggcaacgtattcgtgcgcgccacggtgaactctatccgcatatcaaccctgacaagccgcgtccgctcgatcccgcgcgctacgctatacagtccatctggcttctggcgacctcaacgggtgcggagaaaaaaacgtcccgctggcgcagcttcgatcgcgtgcagaacttacgtgaacactatcaccagtggcttaaccggctacccgaccgggttggcgatagaacaggtcatttagataatcacaaagagctcgggcaccttcacccgggcttacggcgttttattctcggcgtggtggtggtgttctcactcatactggcgctggtctgtattacccagcccttcaacccgctggcacagtttaccttcctgatcctgctgtggggcgtggctctgctggtgcggcgcattccggggcgtttttctgccctgatgctgatcgtgctgtcgctgaccgtttcctgccgctacatctggtggcgatatacctcaacgctgaactgggacgatccggtcagcctggtgtgtgggttagtgctgctgtttgctgagacctacgcctggatcgtgctggtgctgggttacttccaggttatctggccgctgaatcgacagccggtgccgctgccaaaagacacgacccagtggccaacggtggacctcttcgtgccgacctacaacgaagacctgtcggtggtgaaaaacaccatttacgccgcgctgggtatcgactggccgaaggataaaatcaaaatctggatcctcgatgacggtggccgcgccgagttccgccagttcgcggacgaagtaggggttgagtacatcgcccgtaccacgcatgaacacgctaaggccggtaacatcaacaatgcgctgaaatatgccaaaggggagttcgtctctattttcgactgcgaccacgtgccaacgcgctcgttcctgcaaatgaccatgggctggttcctgaaggagaaagagctggcgatgatgcagacgccgcaccacttcttctcaccggacccgtttgaacgtaacctcggtcgttttcgtaaaaccccgaacgagggcacactgttctatggtctggtgcaggacgggaacgacatgtgggacgcaacgttcttctgcggctcctgtgcggtgatccgccgtaaaccgctggatgaaattggcgggatcgccgtcgagacggtcacggaagatgcgcacacttcgctgcgtctgcaccgtcttggctatacctccgcctacatgcgcattcctcaggcggcggggctggccacggaatccctgtcggcgcatatcggccagcgtattcgctgggcgcgcggcatggtgcaaattttccgcctcgataacccgctgatgggtaaaggactgaaactggcgcaacggctgtgctacgtcaacgccatgttccacttcctgtcgggtattccacggcttatcttcctcactgcgccgctggcgttcctgcttcttcacgcttacatcatctatgcgcctgcgctgatgattgccctgttcgttctgccgcacatgatccacgccagcctgacgaactcgaagattcaggggaaatatcgccattcgttctggagtgaaatctacgaaacggtgctggcctggtatatcgcgccgccaaccatggtggcgctgattaacccgcataaagggaaattcaacgtcaccgcgaagggcgggctggtggaagaggagtatgtcgactgggtgatctcccggccctatatcttcctggtgctgctgaatattgtgggcgtgattgttggggtctggcgctacttctacggcccggaaaacgaaattctgacggtcttcgtgagtatggcgtgggtgttttataacctgattatcctcggtggcgcggtggcggtatcagtggagagtaaacaggttcgccgcgcgcatcgcgtcgaaatcagcatgccagcggccattgcccgcgacgatggacatctcttctcctgtaccgtacatgacttttcggatggcggtctgggtatcaagattaacggtcaggcgaaggtgcttgaggggcagaaggtcaacctattgcttaagcgcggccagcaggagtatgtcttcccgacgcaggtggtgcgtgtgagaggaaatgaagtgggtctgcaactgatgccgctgactaaaaagcaacacattgattttgtgcagtgtacgtttgcccgcgcggatacgtgggctctctggcaggacagcttccctgaggataagcctctggaaagcctgctggatattcttaagctggggttccgtggctatcgtcaccttgcagaatttgccccgtcgtcggtgaaattaattttccggtcacttacttcactggtttcctgggtcgtgtcgttcattccgcgtcgacctgagcgagatgaagcgaagcaggcggacccggttatggctcaacaatga

SEQ ID NO: 525653 - DNA, 537 bp, Stenotrophomonas maltophilia
ttgcgctatacctcccagctcgatttgcttccctttggtcagatgacggaaaccgaacgcgggaatgaagctgcgtttcagcgtctgttctctcgcttcaccaccgctttgcagagtctgaaagagagcggacactatcagtggatcctgctggacctgccgcacggcgccgcgtcgctgacccgccagcttctggcgcagtgcgaccatgtgctctccattgcgaacgtagatgcgaattgtcatatccgtctgcatcaacaggcaatgcctgccaatgcccatattctgattaacgatctgcgcattggcagccagatccaggacgatctgtaccaggtctggctccagagtcagcgccgcctgttgccaatggttatccatcgtgacgaagcgatggcggagtgcctcgcttccaaacaaccgcttggggagtaccgtagtgattcactggcggcagaagagatcctgacgctggccaactggtgtctgctgcactttgctaaacggccggagcctgccgggagttcagtatga

SEQ ID NO: 525654 - DNA, 273 bp, Stenotrophomonas maltophilia
  misc_feature (202)..(211): n is a, c, g, or t
atggccgtactaggattacagggcgtccgtggtggagtgggtacaacttccgtaaccgcggcgctggcgtggtcattacaggttttaggtgaatcagtactggttattgatgcctgctccgataatttgctgcgcatgtcattcaatgtcgactttacacatgaaaacggctgggggcgcgcgcttctggacgataaagacnnnnnnnnnnctggcgggatgcgggtttgcgctatacctcccagctcgatttgcttccctttggtcagatga

SEQ ID NO: 525655 - DNA, 984 bp, Stenotrophomonas maltophilia; identical to SEQ ID NO: 166408

SEQ ID NO: 525656 - DNA, 507 bp, Stenotrophomonas maltophilia
atgacgcagccgatgaaactgcgcggctaccagaaatgggacaccttctgcgatgcggtgggcaacatgatgagcaatacgcttttaccggcagacggaaaaggggtgatggttgccctgcgtcctgtgccgggcattcgcgttgagcaggcgctcaccttgtgccgccctaatcgtatcggggatatcatgaccattggcgataatcgcctggtgctgttcctctccttctgtcgggtgaacgatctggataccgccctgaaccatatcttcccgctgcctaccggggatattttctcgaaccgcatggtctggtttgaagataatttgatcagcgctgagcttgtccagatgcgagccctggcacctgaaaaatgggccaaaccgttgcctgtaacaagtggtgccaaaccggttctgaacgcgaaacatgatgggcacgtatggcgtcgggttcctgagccgctacgcttaatggatgagaacaaggagagcgttccattatga

SEQ ID NO: 525657 - DNA, 195 bp, Stenotrophomonas maltophilia
atgaatatcagcgatatcatccaactggttgttctgtgcgcgctgatttttttgccgcttggctactatgcacgccattccctgcgccgtattcgcgatacgatcagattactgttcgtcaaacctcgctatattaaacccgccggaacactgactcgcgcttcaaacgtcaaggcaaaccgaaaacatgactaa

SEQ ID NO: 525658 - DNA, 1680 bp, Stenotrophomonas maltophilia
atgactaattctacctatacctcttcagcgccatcgccactctggcaatactggcgcggtctgtccggctggaatttctactttctggtgaagtttggtctgctgtgggcaggctatcttaatttccacccgctgcttaatctggtgtttatggcattcctgctgatgccaatcccgaatctcaggctgcaccgtatacgtcactggattgctatccctatcggtttcgccctgttctggcatgatacctggctacccggccccgaaagcattatgagccagggttcccaggtcgcaggtttcagtgcggactatatgctcgatctggttgagcgctttattaactggcagatgattggcgcggtatttgtcctgctggttgcctggctgttcctgtctcagtggatccgggtgacggtgtttgtcgtcgcgattatgatctggctaaacgtactgacgctgacgggcccgagcttctcgctgtggccagccggtcagccgacgacaaccgtaaccaccacgggcggttccgccgccgctaccgtcgcgacagcaggggatacgcctgtggttggggatattccagcgcagacggcgccgccgacatccacgaacctgaacgcgtggctctccagtttttacgctgcggaagataagcgtcagacgaaattcccggacgcgctgcctgctgatgctcagccgtttgagttgctggtcattaacatctgttctctgtcctgggctgacgttgacgcggctggtttgatgtcgcatccgctgtggtcgcatttcgatatacagtttaaagacttcaactccgccacctcctacagcggcccggcggctatccgtctgctgcgcgcaagctgtgggcagccttcgcataagaatctctaccagcccgcagctaaccagtgctatctgttcgataacctggcaaaactgggctttacccaacacctgatgatgggccataacggtcagttcggtaacttcctgaaagaagtgcgtgaacagggtggcatgcaggccccactgatggaccagaaagggctgccagtgacgttactgggcttcgatggctcgccggtctatgacgataccgccgtacttcagcgctggttcgacaccgtcggtaaagaggaagggacgcgtagcgcgacgttctataatacgctgccgcttcacgacgggaaccattatccgggcgtaagcaaaacggccgattacaaggcccgtgcgcagaagttctttgacgagctgaatgcgttcttcaacgagctggaaaaatcaggtcgtaaagtgatggtggtggtggtcccggaacatggtggagcgctgaaaggcgacaggatgcaggtgtctggtctgcgcgatatcccaagcccgtccatcacaaacgttccggccgggattaagttctttggcatgaaggcaccgcatcagggcgcgccagttgagatcacccagccaagcagctatctggccatctcggaactggttgctcgcgctgtagacggtaagctgtttgtggaagatagcgtgaactgggatcagctcaccagcgggctgccgcagacggcggaggtatcggaaaacgccaatgcggtggtgatccagtatcagaataagccttatgtccgactgaatgccggggattgggtgccgtatccgcagtga

SEQ ID NO: 525659 - DNA, 963 bp, Stenotrophomonas maltophilia
gtgaaggacaatactattccgttaactctcatcggtattcttgctgatggcgagtttcattctggcgagcagctgggcgaacagctgggcatgagccgcgctgccatcaataaacatattcaaacgctccgcgactggggcgtggatgtgtttacggtaccgggaaaaggctacagcctgccggaaccaatccagttactgaatgaagagatcatccgcagccagattggacacggtaacgtcgcggtattgccggtcattgattcgacgaaccagtatctgctggatcgcctgagcgagctgaaatccggtgatgcctgcgttgccgagtaccaacaggcaggacgtggccgccgggggcgtaagtggttttcgccatttggcgccaacctctacctttccatgtactggcggcttgaacaggggccagctgcggccatcgggctgagcctggtcatcggcattgtgatggcagaggtgctgcatgatttgggtgccgatcaggtgcgggtaaaatggcccaacgatctgtatctcaacgatcgaaagctggcggggatcctggtcgaactgacgggaaaaacaggcgatgccgcacagatcgtcattggggcggggctgaacatggtgatgcgaaacgtgcagaacgatgtcgtgaaccaggcctggaccaacctacaggaagcggggatcaccatcgatcgcaatacgcttgccgtccgcatgatcaatgagttgcgtagttcgctgacgctctttgaacaagaggggttagcgccattcctttcccgctgggaaaagctggataactttattaaccgaccggtgaagctgctgattggggataaagagatttacggcacatcacgcggcattgacgcgcagggcgcgttgctgcttgaacaggatggcgtgattaagccctgggtgggcggtgaaatttcgttacgaagtgcagagtaa

SEQ ID NO: 525660 - DNA, 1035 bp, Stenotrophomonas maltophilia
  misc_feature (752)..(761): n is a, c, g, or t
atgaatcactcccttaagccctggaatacctttggtattcaacggaatgctaatcaaattgtacgtgccgacagtgctcagcagttgctgaatgcctggcaaaacgcaacagaaaacggtgaacccgtacttattctgggcgaaggaagtaatgtcctgtttctcgatgattttgcggggacggtaatcgttaatcgcatcatggggattgagcgtaaagagagcgctgacagctggcatttacacgtgggtgctggcgaaaactggcaccatctggtgcaatatacccttgaaaaagggatgcccggactggaaaacctggccctcatcccgggctgtgcaggatcatctcctattcaaaacatcggtgcctacggcattgaactgaaacacgtctgcgaatatgtcgactgcatcgaactcgcgaccggaacggcgaagcgtttgaccgcagagcagtgccgctttggctatcgcgacagcattttcaagcacgactatcaggatcgttttgtcattgtggccgttggcctgcgtctggcgaaagcatggaaacccgttctgacttacggcgatctggcccgtctcgatccggctaccgtcacaccgcgtgaggtttttgattccgtttgccacatgcgaatgaccaagctaccggacccgaaagttaacggaaatgcgggcagtttcttcaaaaatccggtgatcggcagcgaaaatgcgaaagcgtttctcgcaggctggccaacggnnnnnnnnnngcattatcctcaggcggatggcagcgtaaagctggccgcaggctggcttatcgatcaatgtgaattaaaaggtactacgcttggtggcgctgctgttcatcgtcagcaggcgctggtactgatcaaccagtccaacgcgacaagtgaggatgtcgtcaacctggcgcaccatgttcgccagcgtgtgggcgaaaaatttaacgtctggctggagcctgaagttcgctttattggccgaacgggcgaagtgaatgccgtggagaccattgcgtga

SEQ ID NO: 525661 - DNA, 210 bp, Stenotrophomonas maltophilia; identical to SEQ ID NO: 491571

SEQ ID NO: 525662 - DNA, 585 bp, Stenotrophomonas maltophilia
atgaaagcacgccttacttgccattctctgctggcattaagcattgccgccctgctgccagcgggctcagcactggccgccaccaccagcggcggcacggttaactttagcggtaaagtggtgacctccgcctgtgccatcagcgccggtagcgcgaatatcgacgtcgacatgggtgaagtgcgtaccgccacgctggctgccgcaggcagtgaagccagtaccgcaaaagccttctccatcacgctggaggattgcgaaatcgccgatacctccgcgtccacggaagataaccccattgccgcaacgaccgtggctatcaccttcaccggtacgccggacagtaccgatgtgaatagcctggccgcgggagtaaacggcggcgcgggctcggcgcagcatgtcgctatccgtctttatgatgaacagggcaacgtcgtcaggctgggtgagccggcagcagcgatccccctgcgtgcgggggcgaacaccctgaacttcagcgcgaaatattactccccactgggcaacgccacggcgggtgatgccagcgcggtcgcaacctacaccgtgacctattcgtaa

SEQ ID NO: 525663 - DNA, 678 bp, Stenotrophomonas maltophilia
atgcgcgtaaacacatggatttgtctggctggcacgttatgttcatccgccgtgtatgcaggcggcgtggggttgggtgcaacgcggctggtctacgcaggcgcgacgacgcagacgatgatgcaggtaagaaatacccaccctgatgccacgttcctgatccagtcatggatggaagacgagaaagggagccgtaccaacgacttcgtcatcacgccgccgctgtacgtcatgaagcccgccagcgaaagcgcggtgaaaatcatgttcagcggcaacgcactgccagccgatcgcgaaacgctgtactggatgacggtcaaagctatcccacagcaggttaaaaacggttccggcaattcgctgcaattcgcctctgccaaccgcatcaaggtcttttatcgccctgagtcgcttcgggaaggcgcaggagaggcatggaaaaaccttgcaggcgcctaccgcgcgggcaaggtcacgctgaccaacccaacgccgtattacctcaccaccattaacctgaaaattgatggcaggccggtgtcgcccgtcatggtgccgccgaaagccagcgtgacgctggcagacaccttcagccatgcgagcagcatgagctaccagacgattaacgattatggggcctggacgcccgtcacccgcacgtcattgtcccaataa

SEQ ID NO: 525664 - DNA, 2526 bp, Stenotrophomonas maltophilia
atgaaaattaaaatcctgtgcgccacggcgatcgccctggtgattcggcaagccgtggctgccgaaagcgagctgcactttaatcctgcgtttcttaacggcgaacaggcaaacagcgccgacctcgcctgggtcaacgccgggagcgcgttgccgccgggcgagtacaatcttaacgtgtatatcaacacccagttcgcgttcacaggtaacgtcacgtttcgcgtcgctgaaaacaccgccggtgaagccctgccgtgccttacacctgcgcaattcgccgcacttggcatcgacagccgtcaggcgaaagggggtgagctgccgcctgcgcagcgctgcatttttttaacccggtcgttcgccgatatccggtttgattttgaccagaggacgcttaccctcaacttcaccgtaccgcaaaacgcgatgcgcgctctgccgcgcgggtacgtcagcccggagagctgggaatccggcatccctgccgcgtggctgaactatgtggtcaatggcgcgaataatgactaccggggcgagacgcgcacgcgggaacaacagctgtttgtgagcctgaacagcggcgccaacctgggcgcatggcggctgcgtgatttcaccacgtggaccaaagagagtaacgagctcacccacgtccagacctggctacagcgggatatccgcgccctgcgtgcccaggtttatgccggtgaaacgttcacctcatcgcaggtgtttgacgccgttggcctgcgtgggattgccctgaagaccgatgacaatatgttgcccgccagcctgagcggttacgcgcctgaagtgcgcggcattgcgcgcagcaatgccacggtgacggttcgccagaacggtaacgttatctatcaaacctcggttccgccgggggcgtttgtgctgaaagatctctatccgacctcttccggcggcgatctcgcggtcaccattcaggagagcgacggtagccagacgcaatacaccctgccctttgccagcgtgccgaatctggtgcgtaacggtcaggtcaaatatgctctgggggccgggaaataccgtcctgcgggcaatcagatctcgccctccttcgcgcagggcgagctgttcctgggctggcgatacggcctcacgttttatggcggggcgcagttttccgatcgctacaacggcctggccttcggtatcgggcagaatctcggccgctttggcgcctactccctcgacctcacccatgcccgcagccagctggctgataatcagcactacaccggggattcggtgcgcctgcggtacagcaagctgctgaacgatatcggtacgcgggtcaatttcttctcgctgcgttactcaacggcagggttttataccctcagcgataccacttacaaaggcatggcgggcggagcgccagaacagaccgtagaagacgatggcaccgtcaccacccgctacgacacggtttacaacctgcatatgtcgcgtaaggcaaaaaatcagctgctgttgtcgcagccgatgggcgaatacggcgcgctgtctctgtcctgggatcaacaaacctactggaatacgtcaaaaaccacgcaaagtttgcagttcgcgtggaacgcaacgtttcgtaatctgtcgcttggcatcagcgcccagcgtagctctagcctgtacgacaacaagaaagacaatatccttgcgttgtccctgtcggtgccgctgggtaacccggcgctgtcgacccgtctccgttttaccgctacccatgcggatcccgctggcaccaccgccagtaccggtgtcagtggttatctgccgggacaggagaatcttttctatagcgtcaaccagcgctacagcgcacagcagcactacggcggcgatgccgcgctgcaatacgagggcgcgtggggagactataacctgggctacagctacgccggtaactcccgcaacctcagctacgggatgagcggcggtgcggtgctgcatgaggatggcctgacgctgagccagccactcgggaacaccaatatcctggtgaaagccccgggcgccagccatgtcgccgtgctcaaccacaggggcatcaaaaccgacagccggggctatgcggtgatcccgtacgccacgccgtatcgcgttaatcaggttgcgctggatgtcaccaccgtgggcagtgacgtggagcttgagaacgccatcgccaataaaatccccaccgacggggcactggttcgcgccaccctcaccacgcgtcagggggcaaaagcgatgtttatcgtgcgtcacgctaaagacgtgctccccttcggcacgctggtctcgtcagaggatgacaacgccagcggtatcgtcggcgatggcggcagcgtgtatctgaccggcctgtcagcgaagggaacattgcatgccgtatggggacgcgacagcgcccagcgctgcacgatccgctatgcgttgaacccgaaaaattatcaggcccgcaccgggctgtattcccaggaggtcatatgtcagtaa

SEQ ID NO: 525665 - DNA, 519 bp, Stenotrophomonas maltophilia
atgtcagtaaccgtccggtttctccccctgatcctgctgatgttcatcaccgtccccgtacacggctatgacgtgctggtttccgtgaccggcaacgtgatcggcaatacctgtattgtctcggaagattcgaaggagcaaaacgtgccgctgggcaccctcggcgtgaagcaatttagcgaggcgggggcagtcagcaatatcaaaacgcccttcacgctcacccttgaagcgtgcggccctacctttgctggcgtgaaaatccgcttcagcggtacgccggatgacgagaacccgcagcttctgaaagtcgctgacggcggcgcgaccggcgtggcggtgcagattctggataaagacagcgtacttatcccgctggacacccaaaccactgcttacggcgcggcgggggatgacagcgtaaaaatgaccttctatgcgcgactggcctccacgggtgcgccggtcaatgccggagacgtttcggcagtggcgacctggacgacggagtatcaataa

SEQ ID NO: 525666 - DNA, 1008 bp, Stenotrophomonas maltophilia
atgcgtttactgtatttatgcctgtttttcatgacgtctcaggcgcttgccctctcctggacatcggatatcaccctttcgccaacacccatgtcatggtccggcccggcagactccatcgtgcctggaaagacgatcggctctgaatggagcgccactgcgagcgtctcggaagtgttctggtgcggcctggtatttacctgctccaaagggacgctggagccgagcagcagcgtaacggccaccggcatcacggttattcttgatggcgccagttacatggtatttgaaacgggcgtgcccggcatcggcttcattcttgggcttaaagattataacggcaccacctatgtcccgatgcagacgggcattacgcagagttatccggccgacgggactaacggttacgcctccacactgggctggtcggcaaaagtgacgtttatcaagaccggcgttccgctgaaatccggcgtataccagacccccaccattaatgcggcgatcctgacggcctataacaacgaagtgaaaaccgcgcaggtgatcatcaacccgaccaccatcacggtgacggcaagcggctgcacggtaggcacgaaaagcgccaacgtcgacctgggcaccattgatgttcacacgctacccagcgtaggcagtacctcgccatcggaggcgtttaacgtcagcctgacctgcgatgagaacgtggcggttaacgcagtaatgaccgatcagaccacgccgtcaaatacctcgtcggtcgtgacgctgaccggggactccacggcctccggcattggcgtacagtttttctataacggtaccgggccgctgatgatggggccagacagctcggccgcaggcacgacgggacagtttttcatccagaccaccagcgcagcacaaacgctgtcgctgccgttccaggcgcagtacatccgaaccggagagctggtccccggctcggctaacgccctggcaagcatcaccttttcgtatcagtag

SEQ ID NO: 525667 - DNA, 525 bp, Stenotrophomonas maltophilia
atgaggctatggcctgtcgttaccggtgtcgccattgcgctgacgctggttgcctgtaaatctcccacgccgccgaaaggcgtgcagcccattaccggctttgatgccagccgctatctcggcaaatggtatgaagtcgcccgactggaaaatcgcttcgagcgcggtctggaacaggtgaccgcgacgtacggcaagcgcagcgatggcggtatcagcgtactgaatcgtggctatgatccggtgaagaacaagtggaatgagagcgaaggaaaggcgtactttaccggcgaaccgactacggctgcgctgaaggtatcgttcttcggcccgttctacggcggctataacgtgatcaagctggacgataagtaccagtacgcgctggtcagcggcccgaaccgcgactacctgtggattttatcgcgcaccccgaccattccggatgcggtaaaacaggactacctgaataccgcacgcgatctgggcttccgggtcgatcagctggtgtgggtaaagcactga

SEQ ID NO: 525668 - DNA, 726 bp, Stenotrophomonas maltophilia
atggcttactccatcggcgaattcgccagactcagcggcatcaccgccaccacgctgcgggcgtggcagcgacgctatggattactcaaacccgagcgtacggacggcggtcaccgcctgtacagcgatgaggacgttcagcaggcgctgaaaatcctcgactgggttaaaaaaggcgtacccatcggccaggtaaaatcactgctggaacgccctgtgccgcgccgcgccaataactggcaaaccctgcaacaggccatgctgcaaaagttgcaggaggggaaaattgaatccctgcgtcagatgatttacgacgccggacgcgaatacccaaggccagagctggtcactaacgtgctgcgtccgttgcgcagccagatatcggccaacgtcgccgccgccatgacgctgcgtgagatcctcgacggcatcctcatcgcctatacctcgttttgccttgagggcgataaaaaagcgccgggcgataacatcctcatcagcggctggcatctgaacgacccgtgtgagatctggcttgaagccctgacgcgcaccggccagggccaccgcatcgacatactgccggttccccctgccgcgctggccccggaaatttttccggatcgcaaatggctgctggttaccagcggtaaacttaccgccgcgcgaaaaaagcaggttgcgcagtggcagcagcaagtttcccttgaggtaattatcctctga

SEQ ID NO: 525669 - DNA, 411 bp, Stenotrophomonas maltophilia
atgaaaaagacactccctctgatgatgctggctacaatggctttcgcccctgccgcattcagcgccccggcaggcaccctgagcgtccacgttctggaccagcaaaccggtatgccgccagcggatgtggccgtcacgctggaaaagcaggagcaggacaagtggaccccgattgccagcggtaaaaccgaccacgacgggcgtattaaatcgctctatccgcaggatcaggatatggcgccaggcgtctataaagtgaccttcaaaaccgcagattacttccacggcaaaaagctggactccttcttcccggaagtgccggtgctgttcaccgtcacccgcaccaatgaaaaactgcacatcccgcttctgctcagccagtacggttactcaacctacaagggcagctga

SEQ ID NO: 525670 - DNA, 960 bp, Stenotrophomonas maltophilia
atgacaacaaaacctgtgctgggtattagcggatgtttgaccggttccgccgttcgctttgacggcggacataagcgtatgggctttgtgatggatgagctggcgcagtgggtcgctttccgcccggtatgccctgaaatggctatcggcctgcccacgcctcgtccggcgctgcgcctggtgatgaccactggcggcgagacagaaatgcgattcagcaaagcgccgcacgatgacgtcacgcagaagatggccgcatttacggcagattatctgccgaaaatcggcgatctgtcagggtttatcgtctgtgcaaaatcccctagctgcggcatggagcgcgtgcggctgtacgacgaaaacggcaaccggggccgcaaggagggagtcgggctgttcaccgccgccctccttgaaactttcccctggctgcccgtcgaagaagacggtcgcctgcacgatccggtactgcgggaaaactttgttgagcgcgtttttgctctccacgaactgaacgtaatgcgtaaaaatggcctgacgcgccgtgccctgctggactttcacagccgctataagcttcagcttctggcgcaccatcaggcaggctaccgtgaaattggtccgttcgtggcatcactgcatgagtgggacgatctggacgcgtttttcgtggcctatcgcgacaaactgatgaatatccttaaaaaacccgcttcgcggaagaatcacactaacgtgctgatgcacattcagggctatttccgtaaccagctgaacagccgccagcgcggagaactgcgtgatgtgatcctgcattaccgggacggactgctgccgatcctcgcgccgctgacgttgcttaagcattatctggctgaataccctgaccgctatctgatgacgcaaaactactttgatccctatcctgatgatttgggtctgcgtctggccgttacctga

SEQ ID NO: 525671 - DNA, 1089 bp, Stenotrophomonas maltophilia
atgatcaaaaatctgcatattcaaaactaccgctcaattcgcgatatgtcgcttgagctggaacagctcaacatcgtgttcggccccaacggcaccggaaaatccaatatttataaagcgatttacctgatgcacagcgcggctcaggggcaattctcccaagcgctggcaaacgagggggggattttgaaagtgttctgggcgggcaaaacccgcagcgatcagctgcggcgcatgaacctggcggtggaaacggaaacctatgaatatgagcttcaggtcgggttcgtggaaaagctgccctatccctcacagtttcagctcgatccggtgatcaaagaggaagctatctggctgagcggccagcaccgtcgtccgtcgtcacagctgatgaagcgtaagaatcaggcggttttcctgaacaacgtgcatcacgaaaaagtgacccacagcggtacgctgtatgagaacgagtcggtgttcgggcagctaggcgaaccgcacctctatcccgaagtgtcgcagatgcgcgagtccctgcgtaactggcgattttatcatgagttttccgtctcatccggctcggcgatccgtgcgccgcaggtgggttttcgttccccggtgctggccagcgacggcgcgaacctggccgccgcgtttcagaccattgtcgaaattggcgacgagctgctgctgatgcgcattctcgaccaggccttccccggctgcgtgttttacagcgacaacaccggcgggcgcttccgcatgatgatgcagcgcgaggggctgagcaggccgctggaaccggcagagttctccgacgggacgctgcgttttctgtgccttgcggtggcgctgctaagcccgcgccctcccgcattcatcgccctcaacgaaccggaaaacagcctgcatccgcagatgctgcccgctctggcaagcctcattgccgaggccagccgctactcgcagatctggctcaccagccactcgccggagctggcgcagttgattgagaagcaccgatcgttttcgctgtatcagctgtcgatgatggagggggagacgcggatggagcggctggggtaa

SEQ ID NO: 525672 - DNA, 954 bp, Stenotrophomonas maltophilia
atgccgcttgttaacgttgctattgtcgcggtggacgggtttagcccgttccactactccgtcccctgcattctgtttggcgatacggtatccgggaaaaagcgctttaacgtcacgatctgcgctgaaaaaccgggatttctgacctcgaaagacggttttgccctgcatgcgacgcaggatttttccgcgatcgcatcggctgaaattgtggttgtaccctactggcagcacgtactggagcgcccgcctcagacgctgctcgacagcctggttaaggccagagacaacggggcggaaattgttgggctgtgtctgggatcgtttgtgctgggctatgccggcatactcagcggcaaacgggccgccacccactgggagtttgaacaccagtttcagacgctgtttccggacgttcgactggacatcaacgcgctctacgtggacgacggcaatgtgatcacctcggcaggtaccgccgccgcgctcgactgctgtttgtatatcatccgccagcgctttggcagcgtcgtcgccaatcagattgcccgccggatgatcgttccgccgcaccgcgagggcgggcaggcgcagtttattgcgcagcctgtgccgaaagatacccgcgacgggcggattaactgtctcatagactaccttcagcagcacatttccgagccgcataacctggattcgctggcggacgtggtgtcgatgagccgacgcacgctgacccgccattttatcaaggcgacgggcatgagcgttgccgactggcttaccgccgagcgactgcggcgcagccagatcctgctggagtccggcagtctgccaatcgaaagcgtcgctgagcaggtggggtttttatcagcggtgacgtatcggcagcaatttaaggcgcgctttggcgtcagtccggcggagtggcgtaagacgtttcgttctcgcctgtag

SEQ ID NO: 525673 - DNA, 780 bp, Stenotrophomonas maltophilia
atgaacattacgcaaattcgcaatgccacccagctgatcacttacgcaggaaaacgctttttaatcgacccaatgctggcgccaaaaggcgcttatccgggttttcccggcaccgcgcgggccgatattcgcaacccgatggtcgagcttcccgttgacgttcaaacgctgctggacaccgatgcggtgatcgtcacccatacccatgacgatcactgggatcagtatgccgttgagctgatcgccaaacacaagccgatctacgtgcaaaatgatagcgatgccgcgctgctgcgcggacagggctttcacaacctgacggtcatgaccgacgaaacgacgttcggcgatatccggattgcgaaaacttatggcggccagcacggcactgaccgcgcttacgccgtgccggagctggcagagcgtctgggtgaagcctgcggcgtggtcttccgtcatcccgatgagaagacgctttatatcgcaggggataccatctggcgcgacgcggttgcggccgatctacaaaagcatcagccggacgttgtcgtgctcaacgctggttacgcccacgtcatcgggtttgggccaattatcatgggggaagaagatctgcttaacgtgcatttcctgttgccgcaggcgaaaatcgtggcgacccatatggaagctatcaaccactgcctgctgacccgccgcgcgctgcgcgagtttgttgacgccaacgagataagtgacgcggtgagcattcctcaggacggcgaaaccgttatattctga

SEQ ID NO: 525674 - DNA, 1251 bp, Stenotrophomonas maltophilia
gtgaaattaaaaaaccgaagccgacagcgtcgggcgctaatcccgcaccacttctcaaaaagctatcaaatcaacgcgccgcggctgaaaaccgtgctgacgctgttcatcgccttttttctctgcctgctggtctttgcgattgctttcaacttttcggaaaccacgctggcacgcggggtgctgatcccggcgcagggcgatgtggaggtgcgcgccagagagtccggaacccttgttgattttgccgtccggcccggccagtacgtgaaggaaaacgatccgctgttcaccgtgtcgcaggactatggcggcaagcagggctcggtggtgcagtttgaccgccagcagatggaagcggagaaaaagcgcagcgagcagcgcattcaggccattgaggactcgattgcgtcgtatcgcaaaaatctggcgcagcagctggctctcactgacaagcagatcgccgtttcccgcgataaggtgaagaagctgcgcgcgctgttaaaaaacagcaccgacacctacgaggcgtggaaatccgtctccgggaagggctatgtctccaaagtggatctcgataaaagccataacgatgtgctcaacgcccagctcaacctgacgctggaggagagcactattcttgagcttgaggcgcgcaaaaccagcctgaccgacagcacccagtcgcaaattgactcgctgagcgaagagcagctgtacgtgaaaaaccgcatcagcgaaattgatcgcaacctgtccagccgggggagttccaccatggcgatgctggccccttcagatggctacgtggtggcgattaacttcccgccaggccgggccattacgcaaaacagcgaggtggtggtggtgatccgtaaaaataccgcggcgacgatggaggggtacctgtatgttccggcaacgggggtggggcgcgtggcgaaaggcgataaggtcaagctgcgcttcgactcctggcccgtggacaaatacggttccgtggaggcgacgctatccgatttctatgaggtaaacattgatgcccattcggcgctgatcccgctccaggaagggcagaactactacctggctaaagtgcgcgtcccctcctggtttaccgacccggacaagaaaaagcgcatgctgatgggcgggatgacggtgaacgccgatatcgttatcgatcgtaagccgcttatcaatctgctgattgcgccgctggaaagggtacgcaagcggtttatcgattga

SEQ ID NO: 525675 - DNA, 750 bp, Stenotrophomonas maltophilia
atgatgtttctgccgcgtctctatgccctactctgcgcgcgccaggccggacgcaccttaatggcaaaccggattgcgcaaaactacagccagtttatgccctgcccggaggccgatgtgccggctgattttctgcatcagaacgcccatgagctgagcgggtttaacttcgtggaacagattttcccgcccgcgctgtgggcgcgcaacgttcgcttcgatctgcatgcgtacgtggcgcagtggacgcaggagcaggcattttacagttcatctcgcaccctgctactgggcatgcgctgggcgggctttggcctgattatggatgcgctgctcgccaccgcgccagatgatgtgcgctttcagtttattacccgtcaccctgcgctgcacaagctgatggccgcacacgacggacggcgcgccggctcgtttttcgcccctcagcgcctggtgacggtgctgctgatggatgaacgcctgccggatgcgccactgttcccaattcaggcaggcgatcgcaaggcgtggttaacggacgtctccacgcggtttttatcgcgttatggctacagcgtccgaacgctgctgccggtctgttcgctgcacgcggcagagtttgggctggagagccaggcgtatgcgccagaggattaccgtctggccgccgccgacacgctgaacgcgctgcgcaaaacccccacgctctggagtggatgggacgatctttcagtgatttatcatggatga

SEQ ID NO: 525676 - DNA, 2097 bp, Stenotrophomonas maltophilia
atgttttcgctctttcagtataaaaaacagggtaagacccctgttattcgccagcatgaatttaccgaatgtggactggcctgcctggcgatggtgttggggcactatgaccaccatgtctccgtcagccagctgcgccgggagatttccgtttccgccgatgcgggaacctcaatggcggaattgttgacccttgccagcgataaaaatatgtctggccgggtgcttaaaggcgaaatcactgaaatagaaacgtctgagctgccgctcatcgccttctggcgcggcaaccatttcgtggtcatcgtgaagatcgacagccgcagcgtgaccgttcacgacccggccagcggcgtgcgtcgttaccgcctgaaagaggcggaaaaactgttttccggctatgtgcttgagcttaagcccacgccgtgtttcgaaaagaaatccccggatgaaaagctcacgcttggccggttagccaataaatctccgagcctgttccagcgccagctgctgctgtttgtgctctgtatttttactctcatcaccatgctggcgagccccacctacgtgcagctgattatggatgaggccatttcccgcagcgacagcgatctggtgatcctgctcaccgcgatcttcgctatcgtctttatctttgaagtcatcggtaaattcctcaagcagctgcttgagatcctgatgcgtaatattgcctatgacgatttaagccagtccgtgcgccactacatgctgcgcacccagaccagctggttccgctcgcgcccgccgggcatcgtgctggctattgaaaaatcgctccacgcctgcgcggagttcatcagcaatggttacgtgcaaattctcttttccagcctgatcgccgtcaccagcctgctgtttatgctgctgtataacgtcaaaattgcgctgctgacgatgctgctgatgggcgtgtttttcctgatccgcttttcgctgatcggcccctatcaacgcgcggtggatgactccatcgagcgtaccgcccagtatgaatctctgctggtagagacacagaaagggatcattacgctcaaggcgaacaatatggagcaggcccgggatgcggtgatggacaaatcccagcgcgaacacatcgccgggctgatgcgtaaagagcggctgctggcccgctttgacgtggcttcgctgctggtgatcaatgccgagcagctgctggtggtctgctttggcgcgtggctgatcctggaagggcagatgagtatcgggatgctgtacgcctatatcagctataagcgctatttttccgatgccatggtgcaggtggcgcagaagctgctggacaaaaatgcccttaaggggccgctggatcgcgtgggcgacctgctgtttgccccctctgaaaccagccagtttgggaagcggattgtcacctcgccggtctgtctgcaatttgaggatgtctcatttgcttatccaggccgggaggccacgctacagcatatcaacatgaccctgaagcagggcgaagaggcggtgattgtgggccagagcgggtcgggaaaaaccacgctgctgcgtctgatctccggcatgttgctgtcatcgtctggcacgctgcggatcaataagatccccattgaagagtgcgatctttcctcgctgcgccagcacatccgcattgttcatgcagacgatattctcttcaccggctcgattctggacaacatcgcctgctttgacagcgcgccggataaagagcaggtcatcgccgcgtgtcggctggcggaagtggaccacgtcgtcgcccgtctgccgcacggttacgaaacggagatgctgccggggaacacctttttctcggccggggagatgcagcgtctggtcctggcgcgcgccctgtacagccagcctaagctactgctctgcgacgaagtgacggcgaacctggataagaccaccgcgcaaaaggtgctggcgaacctgcgtagcctggggattggcctggtatttgtcacccactcgccggacgtggtgggctgtcaggggcgtctctataccatggaaaacggaagcctgcgggagagtgcgccatga

SEQ ID NO: 525677 - DNA, 186 bp, Stenotrophomonas maltophilia
atgcaagttatcgatttcaaaaaagcacaggccatcatcggtggttgggatccgtttgctgccgctattcagggcgcaagcgcgggctataacgcgggcagccagatgttaggcgcgctgggcggcaccatcggtggcgtattcggcctggtgggcggcttcatcggcggtttcttcagcgcttaa

SEQ ID NO: 525678 - DNA, 195 bp, Stenotrophomonas maltophilia
atgaaagcgatttcattcgtagaagcgaaagacattattggcggcgcgttaaacccgttcgctggtctggttaaaggtgcacagctgggttacgacactggcgccagcatcatgggcatggttggcggtgtggttggcggagttctgggtggcgcaatgggcttcctgggcgcgctggttggtagctacaactaa

SEQ ID NO: 525679 - DNA, 654 bp, Stenotrophomonas maltophilia
atgactggaaaattcctggctatttttgcaataaattgcttcatttccacaggggcaaatgctttaattatcgaaagtctgaatattgattttcttcccgaaagagaagttgtttttcagccgataaaaaacgataccagcgaacgtcagaattataccgtttcgcttattcaggtagacgttcctaaagagaagggaaaagaaaccgaaataaaagacggcgaagtcatgtattcgcctaagcaattaacgctggggagcggtgagcgcgcgggttttaaattttactataccggcccgcatgacaacaaagagcgatactatcgcgtaaaattcaccgagacgccgctccaggcaaaggtcatcacgcgcaaaggccagcgcatccagtcggatgtggtggtctcgcttgaggctattttgattgtccgtccatggacacgacattttgattatgcgtttagcaacggggtggtgagtaataccgggaatacctattttaaatatgtttcctcggtcgggtgcagtacgcaatacaataattcaaaatatattcctccggggcaacggctggaaatagataatgccgggcaggctgcaaggcgaatgattatttatggcaataaaatcattccgctgaccacctgcccgtag

SEQ ID NO: 525680 - DNA, 1599 bp, Stenotrophomonas maltophilia
atgaaaaagatattcgctcttaatttgctgctgatgagcgcggtggcccatgcgcaggagctgccctatttcgccattaataatccggacaataacggtacgggaaacagcgcggggctgtttagtctgaacagcacctcgaccgcgtttttacacggttcgcgtgagtggccgacgctgagcgcgaaaacgaataacggtatcgccacttacatcccggacaacagctacagcggtccggcaggcagcgcgctgaccatcgacttttcggtgaccggttccagcgcctctccgttctttaaagggacggcgtgttcctcgtcctgcggcaacacggggtacaccccgacgacccgctataccgatacgtcgatggtggtcaagccgccggtgatggagcccggcacgtcatacgggcgctgggtcctgggcgatccgttctttaactatctgctcaacgccgcgccaggggatgaagtgaccatcacctccacgccgcaaatcagctccatcaacaaagtgaccaccaccaatacgcttcacaaggtgggcacgctgaccatgaccaacgccagggcgctcaacctggggattgacccgatcagcggcgaggtgacgattgtcgatggatcaacaggggccacctgcaccaaatacacccgcaacacggtctctggcgtgctgtgcgacctgcttgaatacacgtttgttggggaagatatctccggttacaacggggggctggcgctcacctcttcccgcgtcaacagcgtgctgcaatcgcacatgaacggcggcaccgggcttgccgccgagctgaccttcgatgaaaacacctggtacagcatctccggcggtatcctgagtgatacgcgtgtcctggcaaacaccttcctcgcggcgccgcagaaaaacggcggcaaagcgtaccttaaaatatttttgccgaaagcgttaattctgagcgtggcgcaggcgggggacggcagcagcattggcaatatcgtcagcctgtgcctgacgcccggcaacagctcgctggcggcggatttctgcttccagccggggggcggcctggtgattaaccctattcagccggggctggagattacgcccgacaacccggattacgccctcgatcctgacggtctgggcggctccgggaaaggcgccatcggcgaaacgcccattgagatcccctacaccatcacctacagcggggcgcaaaaagatgcggcgattgcggtcacggtaaaagtcaccgggcctactcaaagcctgaatggggtggactactgcgccttcagcggcaacggctttacggttcccattcctggcaacgtgctggtggggaaaagccagacgcgcatggcgcataactgtaaaggcgaggtattgtcgatcccggcgccggccacccatgcggaagagtgggacaaaatgagttccggcgtgaccgatatgtggctctggaaaacaccgctgatcctccagttcgttatggataatccggtatcgaagaccacctatgacggaaatagctggtttggcgaagtgaccgcgcagggaagaatagatgttagcgcatcctggaattaa

SEQ ID NO: 525681 - DNA, 2592 bp, Stenotrophomonas maltophilia
gtgaaaaataaattagtgttgccggtgatgatggcttgcgcatccggcacgctgcccgcgcttgcgcatgcagcctcaagctccgtggttatcgctaattaccgttttcccgactcgctttatgcactgctggagcaggggatcaaaattcccgtctatctggtgaatacgcgtccacactcagcacaacaagggaaccacgaaggcacggcgagcgaatatgttcgtatcggtgacgtgacgctctttgcaaaagatctgaagctggggctgagggacgttcaggtccaggagtctgataacggcattcgtctgtcaaaagagatgagaacgttattgcagagcattaacgacaagcagtttgatgaccagatgcgcattccggtaagtacggggtccgcgttcgagctggatcagaaaaaaatgcgcctgttgctgaatctgtcgcagagcgactacggggtgaatattcgcccgcgtgaggtggacattgatgcgccggagtctgacgacctgagcggcacgttctcctacaacctcggggcgtatcacaccgagagcggctacggtgacagctggtcgtcgggctatctgaacgcaagaaactggatctcaatgggcgttgatcatgtgctgatcgacggctctggctacgtcaacgagagcagcagcgatacccagatgaacgcggttatgtgggagcgcgactatcaggggatgcgctacgccgcgggcatgctgaacggctgggcgatgcagtctctggcgagcgtcagcgggatttccggcggtgaagtctacggcgtttccatgggcaaccaggccaactcccgtaagcgcgataacacgctctctctgacgcctgtggtggtctatttccccacggcgggcgaggcccgtattcgtcgtgacgggcagcttatcgggattcagcgctttgacgtcggcaaccatgaaattgacaccagcagcctgccctacgggatctacagcatcgaagttgaggtggtgagcggaagccgcaccgtgtcgcgtagcatgtacaccgtgaataagccgttctccagcaacgtgtcggaaacgctgcgctggcagatgtggggcgggatgtatagccgcgataaatccgtcgtcaattataaaaaatacgcgaaacacaaaaacgagcaggacaacacctactactacgattacgacaccaaacataaagacaccatgtcgctggtgggggcctcgttcagcaagcgcagcgggatggtcgactggaacgcctccacctacatgatgcgggaacacatcgtcagcgagctgtgggcctccctgaacctgacgggctatttctcggtgaatacccagaccatggccgcctccgacggaacgtaccgcgccaactacggcgcgaatctcagcctgccgtggcagatcggttcggtctggtactcccatgaacagctctccagcggcaagttcctcgatatctatgagagcaagggcaacacctggggcgcctcctttagcctgccgtcgttcggcctgccctcagcgggcaacctgagcctgatgcgtcaggaggacgacctctatcgctataaacgctatcagctggactactcccaggggttatacgccggtcgctacggtacggcgcgcctgcgggtggggatgtcgcgcaacaaatacgacgggtattacgaagagaaagatcgttacgtgatgctcgatttcgccataccgctcggcaataccgtgtcggttggcgtttcccacaatcgcgataccggcacggcgctgaacgtcagcgccagccgccagtttgaaggcgattacctgaaatcggccacagccaacgtctcgaaagcctttaacagccgccaggatcgcagcgtaagcggcggcggcagcgtgaacttcgacacgccgtggaacagcaacatcctcagcgtccagagcggcatgagtaaaggctggaactccacgctgaccagtgacggcagcgtgggctggtccaaagaggccatcgccgccgggaaaggcaccgaaagcgcaggggtgattgtcagtaccggtctcaaatctgatgaagcgctgaccctgaagcttaacggccgggcagaacgcattaaaggggataaaacctggctgtcgctgccggcataccaggcttatgacctggaagtgatgaacagtgaaaccggtacggaaagctatgagattggcgcgaatgcgcgtcgccatatcacggtttatccgggcaataccgtggtgatgaagccgcaggtgaagaaaatcgtcaccctgtttggccgccttgtggatgcaaacggcaatccgattggcgccacgcagatcaaaaaccacgttgggctgacccggacggagaacgacggacgcttcgtgatcgacgttgataagaacaaccctgtcctgagtatcgccacgccggacgacagcgtctgcgaagtgcgcctggacattgagtctaaccgcggtgcgctgtggctcggggacatctcctgcgacaaaggcgatttcgtctggcaggaagcaaaaggaacgcaggaacgtgacgatgaaaaagatattcgctcttaa

SEQ ID NO: 525682 - DNA, 330 bp, Stenotrophomonas maltophilia
gtgagcgaagaggtggacagcggttcaccaaaaaacggtaccgggatgacgcgcgcggtggtgagcaccattctggtggttcagccccgtgataagaagatcgacttcgtctatgtggcgggaaaaataacgaataagggcaacaccgcttttcgcgtcaatgcgaccggaacctgcctgaagccgaatccggaatcaccgactacgccgtgtaccaaaaacttctacctgatgccggatacctcgcgcgctatcgaggatatcaacgttacggataaccattttcatctcggaatatgggacctgaaacagttcatacctgttaagtaa

SEQ ID NO: 525683 - DNA, 210 bp, Stenotrophomonas maltophilia; identical to SEQ ID NO: 491571

SEQ ID NO: 525684 - DNA, 2982 bp, Stenotrophomonas maltophilia
atgctggttaatctttgcgactataaacagagcgtgacgctgattgctaacagcggcgtacagtttctcgattttggcctgactccgcaggacaccgccagcaacgggcgtttcgtgcgtaaaacggcaaatggcccgctgctgcgcctggattttgacctggtcaacggccggtacacgctgcctgccaccgatggcgggaagccggaagtggtcaagcctgaaagcaccattccactgcatgactccctgaccgtgctggacggtgtctggctgccgcttcctttcctgcgctttaacccgccgcggacgtttgttgatggcccggataactgggcgcgcgtccaggtacggaagctttccacgcccgacgcggctggcaatacgcaccgggtcaccgtcgcgctcgacagccagattgcggagcatgcgacgtctgccctgtcgccggttgaaaacgacattcttaacggcacgcgtttcgccctcgcctggcgcgacagtgaggttgagagtttcctcgaccagacctggattgacggctggctgcgtgaagccttcacacaatatgctgacggggttgaaaaacgcgccgagcgcgagctgcatcaggccatgcgcagctttgaatatcaggcgcactggctcaacctgctctccatgctcggtgaacaactcaccgtgccggaagtgaagtttgtcacccataccctgagcacccctgccattcctgtcgatctgatccttgacgtaggcaacacccacacctgcggcgtgattattgaagatcatggtgatgccaacgacggcctgcgccagacggctgaactccaggtgcgttccctgagtgagccgcagtttctgaatgagccgctgtttaccagccgtcttgaattttccgaagcgcgttttggcaagcagcacttctcggtggaaagcggccgggaggatgcgttcgtctggccatccattgtccgcgtgggtgatgaagcgcgtaagctggcgatgcagcgtctgggcacggaaggcaacagcggtatctccagcccgcgtcgctatctgtgggacgagacgccggtggtgcaggactggcgctttagccagatgaacagcaaaactcagcgcgaaccgctggcaaccgcgtttccgctgatgaacctgatgaacgacgacggggaaccgctctttacgctgccgcaggatgagcgcctgccggtgttctcgccgcagtacagccgcagcaccctgatgacgcacatgctctgcgagctgctggctcaggcgcttggccagattaacagcgtagccacccgattgcggctcggcttcccggcctctccccgccagctgcgaacgctgatcctcaccctgccttcggcgatgccgaaacaggagcgcgagattttccggcgccgcatgttcgaagccatcgccatcgtctggaaagcgatgggctggcatccgcaggatgaagattttgccagccgtaaacagcaggaaaaaagcgtggtgccggtccctgagatccagatggagtgggacgaggccagctgcggccagctggtgtggctgtataacgaagccatttcccacttcggtggccagaccgaggcctttttcgcctcccttgcccgtccggatcgcgcgcctgagcctggcgtccagccggggcgcgctctgcgcgtggcctcgattgatatcggcggcggcacgacggatatggccatcacgcactatcagctagacgatggtaccggtaataatgtcaaaatcaccccgcaactgctgtttcgcgaagggttcaaggtcgctggcgacgacacgctgctggacgtgatccagcgctacgttctgcccgcactgcaaacccagcttcagaaatccggcatagccgatgcttcccagctgatggcatccctgttcggcgactccgggcggatcgatacccaggcggtcctgcgccagcagacggcacttcagctttttatgccgatcggccacgcgatcctggcggcgtgggaatcgagcgatgttgacgatccgctggccgggctgcatgccacctttggcgatctgcttgcgcaaaaaccgacccgcaacgtgatgaactatctccggcaggcgatcgaccatgcgttgcctgccagctcagaacactttgatctgttcagcgtcccgctgcacgtcagtttccgcgagatgcaggacgcgatgctggcgggtcagttcacgcttgccgccccgctgcatgcagtatgtgaggcgatctctcactacagctgcgatattctgctgatcacgggacggccaggctgtctgcccggcgttcaggccttaattcgccacctgcaaccggtgcccgtcaaccgcatcgtctggctggataaataccaggttcatgaatggtatcctttcagccagcagggacgaatcggcaacccgaaatccaccgccgccgtgggagcgatgctctgtagcctggcgctggatcttcgtctgccgcgctttaactttaaagcagcagatattggcgcgcactctacggtgcgctatctgggcgtgctggataacactatcaataccctgcgggacgagaacgtctggtatcacgatatcgacctcgataagcccggcgcgaaactggacgcccgtctgcacttcccgctgcgcggcaacgttacgctgggcttccggcaactggccaatgcccgctggcccgcgacgccgctctataccctgagcatcaactctgccgagctggcgaaagccattgcgggcgacggcgtactgaacgtgcgcctgaagctgcgtggcggcaataagcaggagggcccggaatctttcgagctgagtgatgcctggctacaggacggcacgccagtgccgccggacgccctgacctttaaactgaatactctggccgatcgccgacacagcggcagccactactggatcgacagcgggagcgtataccttaaatga

SEQ ID NO: 525685 - DNA, 1338 bp, Stenotrophomonas maltophilia
gtggcaaaaacacttttacgcagcggtaatctggatgattttcaggccgttggcggcggcggacaggccgtttttgaatcagcgctgcaaatccgcgaagcgcttcggttgcgcaaacagcaggctatcgtcgattgcctggccattccccaggtcaatgacggcggcgatcgcgttgactggtactccccggttgagggaaccgtctccagctggaaggcggcggatgaagacgagcgttttcgcgccctgcgctatctggaaaacacgctcgccagcatggagtcgctgagtaaaaaatgccttcagtcaccgaaaacggcgcagcaactgtttggatctctgctctctaaagctttccagtttcccggtgaaaactttgttttcctggtggatggcaaaccggtgatctgcttctggggtttcgtcagtcttaacgaaaacgcgcgcgacgacgtgctggactgcctgcgcgaatcgttggtccctgaacctgaacccgtgatgattaacgaacctgaacctgaacctgagccagaaccggccccggtggtgaccttcgagcaggccgacgcgccgcttatcacgcctgtggctaccgtccgtatcaccgaagatgagctgtataagccagagccggtgcgcatgaacaccgtgccgtcagagcccgcaccagcggtggtgcagaaaaaacgtcgttcccccctgtggttgctgccggttgccgccgtcattattgcagccattgccacgccgctgctctggccaaaacaggccccgaccgcagcgccagttacctcaccagcgccagcacctgtcgccattgctccggcccccgtgaagacggttgagccgcttgagctgaaactcccactgcatcaggcagaagtggtagagcctaaggtgaagacgcctgccccggcagccgaaccggtggtcattaccgcgataccgaaagatgcgatggtgatggaggcaaaccaggtcaaagcggggttaacgcgcttcctgaacggcacctggcgcgcgtttctcgatgtgcaggatccgctcaccggcaaaccgccgtctctgcgctaccagatccagaacaataaaggtttcgcccgggtcgtgcatggcgacaacattgtctgccgggtagacgtcttttccggattacacagcaacggcgagctgttgatcaaaacgcgcggaaacgctcgttgcaccgacggttcacgctatccgatgccggaagtgacctgtaaggcaggtgccagcgacgtggcggaatgcaccgcacgttacgatgccaacaccgtcgttcctctgacgttcaagaaagcaggtgtctga

SEQ ID NO: 525686 - DNA, 1599 bp, Stenotrophomonas maltophilia
atgtttacagggaaaaccgtgctcgccctcgcgctgagcgcgctgctaccggcaagcgccgcatgggcggcaaacaaagacaccattatctactgctccgaggcgtcgccggagtcgtttaacccgcagatcgccagctctggcccctcgtttgttgccagctcgcaaacgctgtataaccgtctgattaacttcgacccggtaaaaaacacgccggtgccttctcttgcggagtcgtggaccatttcgccagacggcaaaacatacacgtttaccctgcgtaaaggggtgaaattcaacagcaataaatacttcaaaccgacccgtgattttaacgctgatgacgttattttctccgttatgcgtcagaaagaccctaagcatccctatcacaatgtttcccagggtaattacgaatactttaatgacgtgggcctcgacaagctcattcaggatgtgaaaaagatcgacgattatcacgttcagttcacgctgagcgaacccaacgcggctttcctggccgactggggaatggacttcgcctcgatcctctctgccgagtacgcggacgcgatgctgaaaaagggcacgcctgaaaatgtggacacctggccaatcggcaccgggccgtatgtgcttcagcagtacaaggtggattcgcttatccgctacgtcgccaacccgaactactgggagggagaggtgccgaccaaacacctgatcttctccatcacgccaaacgttgagacgcgtctggcgaagctgcaaacgaacgagtgtcagatcattcctgcgccgtcgccggtgcagtttgaagcgatcaagaaaaacaaagacctgacgctgcactcggtggatgcgctgaatgtggggtacctggcgttcaacacggagaaaaaaccgtttgataacgtgctggtgcgccaggctctgaattacgcgacggacaaaaaggccattgtgaacgcggtctttatggggtctggtacggtcgctaaatcgccgatcccgccaaacatgctcggctttaataaagacctgaaggattacggctacgatccggaaaaagcaaaagcgctgctgaagcaggcgggtctggagaaaggcgcggaagtgaccctctggtccatgccggttcagcgtccgtacaacccgaactcccgacgcattgcagagatgatccaggctgactgggcgaaagtgggcgtgaaggcgaaaatcgtctcatatgagtggggggaatatctctccggcatgcgcaaaggcgagcatgattccgcgctgttcggctggatgtctgataacggcgatccggacaacttcgccgatgtgctgctgggttgtaacagcatcaaaaccggatctaacgccgcgcgctggtgtgataaggggtatgatgagctggtgcaaaaggccaaactgaccagcaacccggacgaacgtgcgaagctgtatggccaggcacaggagattttctaccagcaggcaccgtggattgcgttagctaacggtaaaacgttctacgcgacccgcagcaatgtgaccgggtacagcgtaagcctgatgggcagcgatttctcgaaagcgaagctgaactga

SEQ ID NO: 525687 - DNA, 234 bp, Stenotrophomonas maltophilia
atgtcacatttaaatgatgttatcgcccgcgtcgatgccaccatcgaagagagcgtaattactcacatgaacgaactgctgatcgaattaagcgatgatgcagagctcagccgtgaagatcgctatacccagcagcagcgcctgcgcaccgcgattgcgcatcatggtaagcagcataaagaagaggcggaggcacgccatgcccacctcacccaaggcgggactatcctgtaa

SEQ ID NO: 525688 - DNA, 450 bp, Stenotrophomonas maltophilia
atgaatcaatcgttgacgttagcgtttctggtagccgccgggattgggctggtggtgcaaaacaccctgatggtgcgtattacgcaatcttcctccaccattcttatcgccatgctgctgaactcgctggtggggattgtgctgtttgtcagcattttgctggtgaaaaatggcctggcggggtttaacgaactggcgtcaacggtgcgctggtggacgttgatccccggcctgctggggtctttttttgtctttgccagtattagcggctatcagaatgtgggcgcggcaacgaccattgccgtcctggtggcaagccagctgattggcggcctggtgatggacatcctcaagagcaacggcgttcccctgcgcgcgctggttggcccggtctgcggcgcagtgatgctggtggtcggtgcctggctggtggcgcggcgccagttttaa

SEQ ID NO: 525689 - DNA, 519 bp, Stenotrophomonas maltophilia
atgattgttcgtcatgcctgcaaagaagattgtgccgctatcggtgaaatttataaccatgcggtgctgcacaccgccgccatctggaatgataaaactgtcgacaccgataaccgtatcgcatggtttgaggcgcgtactctgtcgggttatccagttctggtcagtgaagaagacggagtggtgacgggatacgcctcatttggcgactggagagcgttcgacggatttcgccacacggtggagcactcggtgtacgttcatcccgaacatcagggcaaaggcattggccggctgctgatgacggagttaatcaaggaagcccgccagatcggtaagcacgtgatggttgccggtattgaggcgcagaaccaggcgtcaattcatctgcacgaaaccctgggctttattaccaccggcaatatgccgcaggtgggaaccaaattcggtcgctggctggatttaacctttatgcagctccagcttgatgagcgcagcgatccggatgctctgccatga

SEQ ID NO: 525690 - DNA, 576 bp, Stenotrophomonas maltophilia
atgaatacaatgacagacaatatgaatcaacgcattagcgcccgcatacgccttgaacgcgagtcgcggggctggtcattaagcgaactggccgaacgggcaggtatctcacgcgccatgatccacaagattgaacggggagacagtagcccaacggcgacgctgcttgcgcggttatccggtgccttcggtattagcatgtctacgcttattgcgcgcgcggaaatgcaggagggcaaactgttacgtctggcgaaccagcccgtctggcgcgatccgcaaacccactatttgcgtcgccatgtgtcgccgcgcagcgatatgcctatcgacctcgtccaggtggagctacccgcaggtagcgatgtgccgatgcccgcctcctcttatgcgctggcacgacagctgatttggttgcaggcaggtgaactggtctttctggagggggatactcgccatgaaatgaaggccggagattgtctggaactcgggccgccgaacgactgccggtttatcaacgaaacggatgaatcgtgcctttatctggtcgtgcggcttaatcagtccggctcataa

SEQ ID NO: 525691 - DNA, 1035 bp, Stenotrophomonas maltophilia
atgagtcaatctactacgcaaaaccgacgctgggtactggcttcccgtccacacggcgcgccggttgccgataatttccgcctggaagagcagccgatccccgcgcccgcagaggggcaggtgttattacgcaccgtatggctctcgcttgatccgtacatgcgaggccgtatgagcgatgcgccatcctattcacctccggtcgagattggcgcggtgatggtgggcggcacggtaagccgcgtcgagacctcccgtcatccggattataaagagggtgaatgggttctgggttacagcggctggcaggagtatgaactatccgacgggcaggggctggtgaagttgggtgaaaacccgtcgcatccttcatgggcactcggcgtgctagggatgccgggcttcaccgcgtatatggggctgctcgatatcggccagcctcaggcaggggaaacccttgtcgtggcggcggccacggggccggtcggcgcaacggtggggcagatcggtaaaatcaaaggatgccgggtcatcggcgtggctggcggggaggagaaatgccgtcatgcggtcgacgtgctcggtttcgatgcctgtctggatcaccatgcggatgattttgacgaacaactggctaaagcctgcccgcagggcattgatgtgtattacgaaaacgtcggcggtaaagtctttgacgccgtgctgccgctcttgaatacctccgcgcgcgtgccggtttgcggactggtcagcggctacaatgcgaccaacctgccggagggtccggaccgcttaccgctactgatggggaccatcctgaaaaaacgcatccgtatgcagggttttattatcgcgcaggactatggtcatcgtattgacgagttccagcaggaaatgggccgctgggtgcaggaaggcaaaattcactatcgcgagcaggttacggaagggctggacgcggcgccggacgccctgattggcctgcttgaggggaaaaacttcggcaaggttgtgatccgcgtggcggccgactaa

SEQ ID NO: 525692 - DNA, 669 bp, Stenotrophomonas maltophilia
atgcttgatttggaacatatggaaaaagcacaaagaatcagtctgactttgcaagtagagaacagtttaaagggagcattaattacgggctcattaaaacctggggctcgactcgttacaaaagagattgcggataaattgggcaccagtatcacaccggtgcgcgaagccctgctgcgcctggtgtcggcgggggcattacaggccacgccagcgcaggcgtttttggtgccagaagtgacgctggaacgctataacgaaattaacgccatcagaaagcagcttgaaccgatggccgttgcggcggcgtgccagaatatgaccgagaccaaactggatgcgttacgcgcgctgtcagataacttcagtgccgccatgcatcagggcgatgtacagaaagcgatccatgccaaccgcgtgttccggttcacgctctatcagtatgccgagatgccgacccttcactcgctgattgagcagctctgggtacggattggtccgtgcattcactatctgcatgaagagttaagcgaggttcccgcagcgacctatcattatgacgatctgctttctgcgcttgagcaaagggatgtgacggccagccgggaagcgatcgacaaagccattgatgaagccaatattcttctgcaacggcaatactacagttaa

SEQ ID NO: 525693 - DNA, 2118 bp, Stenotrophomonas maltophilia
atgaaaattattactgcccataaggcctcactacccctgttgttcgttcccgtcatttttggcccgctgagtgcgatggccgcggatgaacagaccctgatcgtcagcgccacgccgcaaaccgtctcagaactggacaccccggccgcagtcagcgtggtgagcggcgaggatatgcgacatgccacaccgcgcatcaacctttctgaatcccttgggagcgtacctggcctgcaaatccagaaccgccagaactatgctcaggatctgcaactttccgttcgcggattcggcgcgcgctcaaccttcggcgtacgcgggatccgtatgtacgtggacggcattccggcaaccatgcccgacggccaggggcagacatcaaacattgacctcaacagcatagagagcgtcgacgtgctgcgcggccccttctctgccctgtacggtaatgcctccggcggcgtgatcaacatcaacacccagaccggacaacagccagccaccattgaagccagcagctattacggcagctacggcacctggcgttacggcatgaaggccaccggggcggtgggtgatggtactcaggcgggcgatgtggattacgccgtatccactacccgttttaccacacatggctatcgcgaccacagcggcgcgcgcaaaaacctcgccaacgcgaaactgggcgtgcgcattaatgatgtcagcaagctgacgctgatttttaacagcgtggacatgaaagccaacgatccgggcggactgagctatcaggagtggcagaataacccgcgccagtcaccacgtggcgatcagtacaacacgcgtaagaccattaagcagacccaggccgggatccgctacgaccgtcaactgagcgaacaggacgacctcagcgtgatgatgtatgccggtgagcgtgaaatgactcagtaccagtccattccggcgtccactcagcgcgagaatcctgcgcattcgggcggtgtgattgatatgcagcgtcactatcagggtattgatacgcgctggacccaccgcggtgagctgctggttccggtgacatttaccaccgggttgaactacgaaaacatgagcgaaaatcgtcgcgggtatgagaacttcgtgatggacaacggcgtgccagattatggcgtgaagggtaataaacgccgtgacgaacgcaatctgatgtggaacctggatccctacctgcaaacccagtggcagctaacgcaaaaactgtccttagaggcgggcgtacgttatagctccgtctggtttgactccaacgatcgttacattaccccgcaaaacggtgatgacagcggcgacgccagctaccacaaatggctcccggcaggtgcggtgaaatacgccgtgaccgacgcatggaacctgtatgtcgcggcaggacggggatttgagacgccgaccatcaacgaactttcctaccgttctgatggcaaaggtggcctcaatatgaacctgcaaccgtccaccaacaacacctatgagattggcagcaaaacccgcatcggcaatggcatcctgacggcggcgctgttccgcacggataccgacaacgagatcgtggtggacgaaagcaaggatggtcgcacgacttataaaaacgcgggaaaaacgcgccgtcagggtgtggaaattgcgctcgaccagcagtttgccgagaactggaagctgaagatggcgtggacctatcttgatgccacctaccgcaccaacgtctgtagcaatgcagactgtagcggcaaccggatgccggggatcgcccgtaacatgggttatgcgtcgtttggctgggagcctgaggaaggctggtacgcgggggcagatgcccgctacatgagcgatgtcatggccaacgataccaacaccgctaaagcgccctcttataccgttgtgggcctgaataccggctataaactcaactacggcaaatggggaatggacgtctttggtcgcgtcgataacctgttcgataaagagtacgccggttcagagattgttaacgctggctacaaccgctattacgaacctgcccctggtcgtaactatggcgtgggcctgtcggtctcttatcgttttgagtaa

SEQ ID NO: 525694 - DNA, 1062 bp, Stenotrophomonas maltophilia
atgtctttacgtcatctgtgctcgccgcgcctgcgtgggtctctgctgttgggctctttactgtttgccggtacgttccaggttcatgccgctgaagagatgctgcgcaaagcggtcggcaagggcgcgtatgaaatggccgtcagccagcaggaaaacgcgctgtgggttgcgacgtcacaaagccgcaaaaccgataagggcggcgtggtctatcgtctggatccggtcacgctggaagtgacgcaggcgattcataacgatctcaagccgtttggcgccacgatcgataacgccacccagacgctgtggttcggtaacaccgtcaacagtgccgtgacggcgattgacgccaaaacgagcgaggtgaaagggcgccttgtgctggacgatcgcaaacgtagcgacacggtgaagccgtttcagccgcgccagctggtggccgatgacacgaccaatacggtatacattaccggcatcggcaaggagagcgtgatctgggttgttgatggcgcaacgctgaagctgaaggacaccatcacgaacaccggcacgttcagcaccggactggcgctggatgcgaaggcaaaacgcctgtataccaccaatgcggacggtgagctggtgaccattgataccgcgaccaacaaaatcctcagccgtaagaaagtacaggaagacggaaaagagcacttctacctgaacctgagcctggacactgccggccagcgtgcgtttgtgacggattcaaaacagcctgaagtgctggtggtgaatttgaaagatggcagcgtaatgcagaaaatcgccgcgccagaatcgctggccgtactgtttaacccggcgcgtaacgaagcctatgtgacgcaccgcgaggcgggcaaggtgagcgtgattgacgccaaaacttacaaagtgaccaaaaccttcgatacgccggtttacccgaacagcctggcgctgtctgcggacggtaaaacgctgtacgtgacggtgaaacagaagtctacccgtcagcaggaagccactcagcctgacgatgtgattcgtatcgcgctttaa

SEQ ID NO: 525695 - DNA, 1497 bp, Stenotrophomonas maltophilia
atgaaaacaagcaataaaagcgcagccgatcatcatgctgctaaacgtcgctggttgaactctcatgaagagggctatcacaaggcgatgggcaaccgtcaggttcagatgatcgccatcggcggcgctatcggtacaggtctttttttaggtgcaggcgcacgtctgcaaatggctggacccgctctcgccctggtctatctggtgtgcggtatcttctctttcttcattcttcgcgccctcggcgagctggtgctccaccgcccttccagcggcagctttgtctcttacgcccgtgaatttctcggtgaaaaggccgcgtatgtcgcgggctggatgtacttcgttaactgggcaatgaccggtatcgtcgatatcaccgccgttgcgctgtacatgcactactggggcgcgtttggcgatgtgccgcagtgggtgttcgccctcggggcgctggcaatcgtcgggaccatgaacatgatcggcgtgaaatggttcgccgagatggagttctggttcgcgctggtgaaggtgctggccattgtgatcttcctggtggtcgggaccgtattcctcggcaccggtaaaccgctggacggcaacgccaccggcttccacctgattaccgataacggtggtttcttcccgcacggcctgctgccagcgctggttctggtccagggcgtggtattcgcctttgcctccatcgaactggtcggtacggcggcaggtgaatgtaaagatccgcagacgatggtgccaaaagccatcaacagcgtgatctggcgtatcggtctgatctatgtgggctccgtggtattgctggtactgctgctgccgtggaatgcataccaggcggggcaaagtccgtttgtgaccttcttctctaagctgggcgtgccgtacgtgggcagcatcatgaacatcgtggtactgactgccgcgctctccagcctgaactccgggctctattcgacgggccgtatcctgcgctccatgtcgatggggggctctgcgccgaagtttatgtcgaagatgagcaagcagcaggtgccttacgcgggtattctggctacgctggtggtgtatatctttggcgtgttcctgaactatctcgtgccgtctcaggtgtttgagatcgtgctgaacgtcgctgcgctgggcatcatcgcctcctgggcctttatcgtggtgtgtcagatgcgtctgcgcaaagcaattaaagaagggaaagcggctgacgtcagcttcaagctgccgggcgcgccggtgacctcttggcttaccctgctgttcttgttgagtgtgctggtgctgatggccttcgactacccgaacggtacttacaccatcgccacaatcccgctgctggcggtgctgttgattgctggctggtttggcgtgcgtaaacgcgtgaatgaaatccacagtaccgccccggttcatcctggagatgataaacaggatggtccgctggtggaaaagacgtcgcgttaa

SEQ ID NO: 525696 - DNA, 891 bp, Stenotrophomonas maltophilia
atgttaaaagacaacttcaacgatctgctctcctttatggttgtcgcccgggagcgcagctttacccgcgcagcggcgcagcttggggtatctcagtcggcgctcagtcacgcgatgcgcaatctggaagcgaggctggaagtccgtctgttaacccgcaccacccgcagcgtggcccctaccgaggccggcgagcaactcttcatgcgcttaagcccccatctgctggagatcgagcaggaacttaccgcgctgcgtgatacccgcgacagacctgccgggaatattcgcctaaccgccggggagcacgccatgtctgccgtgctgtggcctgtgcttaaaccctttatggcgcagtatcctgacatcaacgttgaagtcacggtggacgatgggctgacagatattgtcgatggccgctttgacgcgggggtgcgtctgggtgagcaggtggcgaaagatatgattgcgatacgtattgccccggacatgctcatggcggtcgtcgggtcggcagactatttgcatcgtttcggggtaccggaaacgccggagcagcttgatcagcaccgctgcattaatatgcgcctgcccacacgcggcggattatatgcctgggaatttgaacgggacggacgtgagctgcgtgtgcgggttgagggccaactgatcctcaacagcctgccgcaacgcattgatgccgccgaaaacggtctggggctggcgtacgtcccggaagatgcggttcaggacgcccttgctgagggccggttagtgcgtgtgcttgaagcctggtgtccggcttttgccggttatcatctctattatccgagccgccgccagcacacttccgcgttttcattacttatcgcagctctgcggcatccataa

SEQ ID NO: 525697 - DNA, 399 bp, Stenotrophomonas maltophilia
atgaaaattatccgtagcggttcgctaccttccgttcatggggcagaggcctggtttaccggcagcgtgcgcattgacgcacctttccaggcgactgaaccggcaaaagtcggcggcgcgaccgtcacctttgaacccggcgcacgtaccgcctggcatacgcatcctcttggacaaacgctgatcgtgacgcaggggcgcggctggttacaggagtgggggaaagaggcggaaccgctgaatcagggtgatatcgcctggatcccacccggcgtgaagcactggcacggtgcaagcgtgcagacggccatgacccatatcgccatcgcagaagcggtcgacgggagtccggtggcatggctggagaaggtcagcgacgagcagtatccgaacgagtag

SEQ ID NO: 525698 - DNA, 1002 bp, Stenotrophomonas maltophilia
atgtcatggcgaatcagcattctggataaaagccccgtcgcagaacacgaaacagccgccgatgcgctggcgcgaaccttagcactggcgcaacaggcagaaacgctgggttatcaccgcttctggattgccgaacaccacaataccccgcagcttgccagcccctcgccggagctgctgattgcctggatcctcgggcaaacaaaacgtattcgcgtgggctcaggcggcgtcatgctgcaacattacagcccctataaagtcgccgaaaattttaacgtactggccgccattgcgccgggccgggttgatctgggcgttggcaaagcgcccggcggtctgccgctttctacccgcgccttgcagtacggcctaaatccgcaggaaaaaggcagctttactgaacaactgacgcagcttgatcgctggatccgccctgaaaatcagtcagcggaggaggacgttcgcgccacgccgctgccgccggtgcctgcccggggatttctgctgggcgccagtaccgaaagcgcgctactggcggcctccctcgactggcattttgtctttgccgcccatctgaacggtgatcctgagctgctgcgcgaggtcgtcacagcgtggcgtcaacacagcgtccgggaggtgattgtggccgtgcaggtcattgttgccccaacccaggctgaggccgatgcgctggcgcagaaggttgaagtgtggggcgtggagctggtaaacggacagcgcgtcaccgtggccagcgaagaacaggcctacgcctttgcgcggcaggcggggagtgacccggtgcgcatcgcgcgtcgggcgcagtctctgctggccggaacggcggattcggtgcttgaacagctcaacgcgctgcatcagcagtggggaattgacgaatttatcatcgacacgccggtcgctgatggcgcaacgcgcgtgcagtcactgcgactgctggccgaggcgcgatttaacagggaggtgaccgtatga

SEQ ID NO: 525699 - DNA, 1122 bp, Stenotrophomonas maltophilia
atgagctttagcgaacaactgattgcctggcgccgtgagctgcaccagaaccctgaactctccggtcaggaggtcgaaacaacggcgcgtctgcgcgagtggctgacggcggccgggattgcaccgctgccttacgatctccagaccgggctggttgcggagatcggcacgggcaacgcactggttgcgctgcgcgccgatatcgacgcgttacccatcgacgagcgcagtggggtgccgtttagctcccggcgtgcgggggtgatgcatgcctgtggccatgacatccacaccagcgtgatcctcggcgctgcgttaaagctaaaggagcgggaagcctcgctcaacggtcgcgtgcggatcctgttccagcctgcggaagagaatttcggcggagcaaaaagtatggtgcgggccggggcgttacgtgacgtacgcgcgattttcggaatgcataacgagccttcactgccggtcggcgagtttgccacgcgcggcggcccattctatgcgaacgtcgatcgcttcgttattcatgtaaccggcaaaggcgcgcatgccgcacgtccccatgaaggcaacgacgccatcgtgctggcaagccagctggtgaccgcgctgcaaagcgtagccagccgtaacgtcaatacgctggattcggtcgttctgagcgtgacgcgcatcgccggggggaatacctggaacgtgctgccggaaagcgttgagctggagggcacgctgcgcacgcaccgcacggaagtgcagcagaacgtgaaagcgcgcgtcggtgaaatcgccgccggatttgccagcgcctttagcgcgcagatcaacatcacctggtacgccgggcccaccgcgctggtgaacgatgaacactgggccgggtttgccacctcggtcgcgcgcgaagcgggatatgaaacccggcatgcggaactgcacatgggcggggaggatttcgcggtctatctgcaaaacatacccggcgcgtttgtcagcattggcagcaacagtccgtttgggttacatcacccggcatttaacccggacgaagcattaatcgaacccgctgcccgctattttgctcagctcgcggaaaaagccctgcaacacgtttaa

SEQ ID NO: 525700 - DNA, 1317 bp, Stenotrophomonas maltophilia
atgtctgcacatcgtcaattgcggctggggaccattttgcatggtgcatccggaaatatgtctgcctggcgccatcctgcggcggtcgcggatgccagcattaattttgatttcgtcaaagaaacggctttaaaagcagaagagggcaagctcgactttatatttgtggccgacggtctttatattaacgagaaatccattccgcattttttaaaccgctttgagcctctgacggtgttgtccgcgctggcgagtatcacctcgcgcctggggctggtcggcacgttatccacctcgtacagcgagcctttcaccgctgcacgccagttcgccagcctcgatcacctgagcaacggacgcgcgggctggaacgtggtgacgtcgccgctggaagggtcagcgaagaacttctcccgcgaaaaacacccggagcatgcgctgcgctaccgcattgccgatgagtatctcgacgtggtgaaagggctgtgggactcctgggaaggggatgcctttatccgcaataaagagagcggacagttctttgatgcgtcgaaactgcatactctggatcaccacggtgatttcttccaggtttccggcccgctgaatattggccgcacgccgcagggacgtccgattgtctttcaggctggtgcgtccgacgacggtaaaaagctggcggcaaaacacgctgacgccatctttacccaccatgacacgcgggaagaagcccaggctttttaccgcgatgttaaacagcagctggaaagtcacggccgtcgcgcagaggatttacatatattccagggcgtcaacgtgattgttggaaacgacgccgatgacgtagaaaaccagtatcaaactacggcggcactggtctccattaatgatgcgctgaattacctcggacgttatttcgagcatcacgacttcagccagtatcccctcgacgcgccgttcccggatattggcgatttgggcaaaaacagcttccgcagcaccaccgatgaaatcaagcgtaacgcccgtgagcgcaacttaactctgcgtcaggtcgcgctggaagccgcatcgccgcgcccgcgtttttccggcacaccggagcaggtggccgatggtttacaggcctggttcgaagagaaggcggcggatggcttcatcattcagggcggtacgccggacaccttcccgcgctttgtcgaccaggtggtcccccttttacaggcgcgcggcctgttccgcaccgactatcccggcaccacgctgcgcgaaagtctgggcttagacgagcccaaaaatcagttcacacaacaataa

SEQ ID NO: 525701 - DNA, 309 bp, Stenotrophomonas maltophilia
atgcgtaacgcagcgcgcctgggcagccgtggtttcgctaacaagtctcaggacttctctgttgtcgctcagtaccagttcgatttcggcctgcgtccatccatcgcttactacaaatctaaagcgaaagacgtagaaggtatcggtgacgaagactacatcaactacgttgatatcggtgcgacctactacttcaacaaaaacatgtctacctatgttgactatcagatcaaccagctgaaagacgacaacaagctgggcatcaacaacgatgacatcgtggctctgggtctggtttaccagttctaa

SEQ ID NO: 525702 - DNA, 1191 bp, Stenotrophomonas maltophilia
atgtttgagaacattactgccgctcctgccgacccaattctgggcctggccgatctgtttcgtgccgacgaccgccctggcaaaatcaacctgggtattggtgtatataaagatgaaaccggcaaaactccggtactgaccagcgtcaaaaaagctgagcagtatctgctggaaaacgaaaccaccaaaaactacctcggtattgatggtatccctgaatttggtcgctgcacccaggagctgctgttcggcaaaggcagcaccattgtgagcgaaaaacgcgcccgcacggcgcagaccccaggcggtaccggcgcactgcgcgtggcggcagatttcctggcgaaaaacacctctgtgaagcgtgtctgggtaagcaatccaagctggccgaaccacaagagcgtgtttaattctgcgggtctggaagtccgtgaatacgcctactatgacgcggcaaaccacgcgctggacttcgatggtttgctggccagcctgagcgaagcccaggcgggcgatgtggtgctgttccatggctgctgccataacccaactggtatcgatcctacgcttgaacagtgggaacagctggctaagctgtccgttgaaaaaggctggctgccgctgttcgacttcgcttaccagggctttgcccgtggtctggaagaagatgctgaaggtctgcgcgcattcgccgccgtccatcaggagctgattgtcgcaagctcctattccaagaactttggtctgtataacgagcgtgtcggcgcctgtacgctggtggccgctgacgatcaaactgtcgatcgcgcattcagccagatgaagtccgtgatccgcgctaactactccaacccaccggcacacggtgcgtctgtagttgcgacgatcctgagcaacgatgcgctgcgcgcaatctgggaacaagagctgaacgatatgcgtcagcgcattcaacgcatgcgtctgctgtttgtgaacacgctggctgagaaaggcgccgaccgtgacttcagcttcatcatcaagcagaacggcatgttctccttcagcggtctgaccaaagagcaggtgctgcgcctgcgtgaagagtttggcgtctatgccgttgcctctggccgcgtgaacgttgcaggtatgacgcctgacaacatggcgccactgtgcgaagccattgtcgcggtgctgtaa

SEQ ID NO: 525703 - DNA, 648 bp, Stenotrophomonas maltophilia
atgaactatcgtattattccggttaccgcattctcacagaactgttcattgatctggtgtgaacaaactaaactggccgcgcttgttgatcccggtggcgacgctgagacaatcaagcaggaagtcgctgccagcggtgtaacgctgatgcagattttactgacccatggccatcttgaccatgtgggtgcagcggctgaactggctgaacactacggtgtgccgattatcggcccggaaaaagaagatgagttctggcttcaggggctgcctgcccaaagccgcatgtttggtctggatgactgtcagccactgacaccggaccgctggctgaacgaaggcgatcgcgttaacgtagggaatgtaactttacaggtgttgcattgccccgggcatacgcctggccatattgtcttctttgatgacgcgtcgcgtctgctgatttccggtgacgtgattttcaaagggggcgtaggacgcagcgatttcccacgcggcgatcatggtcagctgattcagtcgattaagcagaagttattaccgttaggtgatgatgtgacgtttatccctggacacggaccaatgtcaacgctgggcgatgagcggttgcataacccgttccttcaggatgaaatgcctgtctggtaa

SEQ ID NO: 525704 - DNA, 552 bp, Stenotrophomonas maltophilia
atggacaaatttgacgctaatcgccgcaaattgctggcgttaggtggcgttgcgctgggcgcagcagccatccttccgacgccagcatttgccaccctctcgacacctcgtccgcgtattttaacgctcaacaatctgcatactggtgagacgcttaaagcggaatttttcgatggcagaggctatattcaggatgaattagcacgactcaaccattttttccgtgatttccgcgcgaacaaaatcaaagccatcgaccctggattattcgatcagctttaccgcttgcagggactgctggggaccaaaaggccggtgcaactcatttctggctatcgctctctggataccaacaatgaactgcgcgcccacagccgtggggtagcgaaaaaaagctatcacaccaaagggcaggcgatggatttccatattgaaggcgtttcgttagccaatattcgcaaagcggcgttatctatgcgcgcaggtggtgtaggatactacccacgtagcaactttgtgcatattgataccgggccggttcggcactggtaa

SEQ ID NO: 525705 - DNA, 1824 bp, Stenotrophomonas maltophilia
atgttgcttaagaaagatcgtggtcgtcagctgtctgcgctgagtttgtgcctgacagtgatgtttgctccactgtttaccgctcaggccgatgagcctgaaattgtaccgactgacagctccgcgacgatgggcgcgcagccgacgtcgctgtcacaaccgctggatcagtctccggcgacggccatcatggccggcattaaaccgctgccggaaggcatcgatactgaatcattacgccagcagcttatgaccgggctgccctcgggctatactcccgcttatattaaccagctcacgctgctttacgctgcgcgcgatatgaaaccgatgtgggaaaatcgcgaggcggtacgtgccttccagcagcagctggctgaagtggcgattgcaggttttcagccacagttcacgacctgggttgaactcctgaccgaccctgccgttatcggacaggcgcgtgacgtggtgctgtctgatgccatgatgggctacttgcagtttgtggcggggatttcggtgaacggcaaccgctggttatacagcagtaaaccgtacaagctggcgacgcccgcgctgtccgtcattaatcagtggcagctgtcgctggacaacggtgaactgccgcgctttatcgcaagccttgcgcccgcccacccgcagtatgccacgatgcatcagtcgcttcttgagctggtcgcggattcccgcccgtggcctcagttgcgtggaacagcaacgctgcgtccgggacaatggagcagcgatgtgcctgcgattcgcgaaattatgaaacggtccggcatgcttgacagcggccctaaaattgcgctgcccggcgacgagacgcaaaacgcagtcgtcagcccgtcggcgccggtaaaagagaaaactgccgttgcgctgagcaataagcccgccgcttacgatcgcgagctggtcgcggcagtgaagcagttccaggccgcgcaggggctgggcgccgacggcgtgattggtccatcgactcgcgactggctgaacgtctctccggcccagcgggcaggggtgctggcgttgaatatccagcgcttgcgcttgctgccgggcacgttatccaccggcattatggtcaacattccggcgtactctctggtctactatcaggacggtagcgaagtgctggcgtcccgcgtgattgtgggtcgacctgaccgcaaaacgccgatgatgagcagcgcgctgaataacgtggtggttaacccgccgtggaacgtgccgccgacgctggcgcgcaaagatatcctgcctaaggtctggaatgacccgggctatctggagcgacataactatacggtgatgcgtggctggaacagcaaagaagcgattgacccctggatggtcgactggtcaacgattacgccttcgaacctgccgttccgtttccagcaggcaccgggtgcgcataactcgctcggacgttacaaattcaatatgccaagttcggacgcaatctatctgcatgataccccgaaccataatctgttccagaaagacgcacgcgcgcttagttctggctgcgttcgcgtgaataaggcctccgaactggcgaatatgctgttgcaggatgcaggctggaacgatacgcggatatcagatgccctgaagcagggggatacgcgttacgtcaatatccgccacaatattccggtcaatctttactatctgacggcgtttgtgggcgcggacggacgtacccagtatcgtacagatatttacaattatgatctgacagcgcgatccggcgcacaaatcttgccaaaagcggaacaattaatcaggtaa

SEQ ID NO: 525706 - DNA, 4449 bp, Stenotrophomonas maltophilia
  misc_feature (2100)..(2100): n is a, c, g, or t
atgattgaacgcggtaaatttcgctcactaacgctgattaactggaacggcttctttgcccgaaccttcgatctggatgagctggtgacaacgctctccggcggtaacggggcaggtaaatccaccaccatggcggccttcgtgacggcgctgatccctgacctgaccctgctgcacttccgtaacaccactgaagcgggtgcaacgagcggctcccgagataaagggctgcacggtaagctgaaagcgggcgtctgttattcggtgctggacgtgatcaactcccgtcatcagcgcgtggttgtaggcgtgcgcctgcagcaggttgccggccgcgaccgtaaagtagatatcaaaccgtttgcgatccaggggctgccaacctccgtgcagccgaccgcgctgctgacggaaaccctgaatgaacgtcaggcgcgcgttctgacgctccaggagctgaaggacaagctggaagccatcgaaggcgtgcagtttaagcagtttaactccattaccgactaccactctctgatgttcgatctcggcgtggtggcccgtcgtctgcgcagcgcgtcagatcgtagtaaatactaccgtctgattgaagcctccctgtacggcggtatctcaagcgccattacccgctccctgcgcgactacctgctgccggaaaacagcggcgtgcgtaaggccttccaggatatggaagccgcgctgcgtgaaaaccgcatgacgctggaagcgattcgcgttacgcaatctgaccgcgatctgtttaagcacctgatcagcgaagccaccaactacgtggcggcagactatatgcgtcacgccaacgagcgccgtattcatctcgatcaggcgctggaataccgccgcgagctgtttacctcccgcaaacagctggtggccgagcagtataagcatgtcgaaatggcgcgcgaactgggcgagcacaacggtgccgaaggggatctggaagccgattaccaggcggccagcgatcatctgaacctggtgcaaaccgcgctgcgtcagcaggaaaaaatcgagcgctatgaagccgatctcgatgagctgcaaattcgtcttgaagagcaaaatgaagtggtggcagaagccgccgatttgcaggaagagaacgaagcccgcgcggaagccgccgagctggaagtggatgagctgaaaagccagctcgcagactaccagcaggcgctggacgtgcagcagacccgcgcgatccaatacaaccaggcgctgcaggcgttacagcgtgccaaagagctgtgccacctgccggacctgacccctgaaagcgctgacgaatggctggataccttccaggccaaagagcaggaagccactgagaaactgctttctctcgatcagaaaatgagcgtggcgcaaacggcacacagccagtttgagcaggcgtaccagctggtggtggcgattaacggtccgctggcgcgtaacgaagcatgggacgttgcccgtgagctactgcgcgacggcgtcaatcagcgccatctggccgaacaggtgcagccgctgcgcatgcgcctgaacgagctggaacagcgtctgcgtgaacagcaggaagctgagcgtctgctggcggaattctgcaaacgtcagggtaaaaattacgatttcgacgagcttgaggctctgcatcaggagctggaagcgcgtattgcggccctgtccgataccgtatcgaacgccagcgaacagcgcatgacgctgcgtcaggagctggaacagcttcagtcccgttcgaagacgctcttacagcgtgcgccgatctggctggccgcacaaagcagcctgaaccagctcagcgagcagtgtggtcaggagtttgcctccagccaggacgtcaccgaatacatgcaacagctgctggagcgcgaacgcgaagcgattgttgagcgtgacgaagtgggcgcgcgcaagcgtgacgtcgatgaagaaatcgagcgtttaagccagccaggcggctcagaagatccgcgcctgaatgcgttagccgagcgtttcggcggcgtgctgctgtctgaaatttacgacgacgtcggcctggacgatgcgccgtanttctccgcgctgtacggtccgtcccgtaacgcgattgtagtgccggatctgtcgctgatttctgaccagcttgcagggctggaagactgcccggaagatctctacctcatcgaaggggatccgcagtcgtttgatgacagcgtattcagcgtcgacgagctggaaaaagcggtggtggtgaaaatcgccgatcgccagtggcgctattcgcgcttcccggaactgccgctgtttggccgcgccgcgcgtgaaaaccgtattgaaagcctgcacgccgagcgtgaaacgctttcagagcgttttgcgaccctgtcgtttgacgtgcagaaaacccagcgtctgcatcaggcgttcagccgctttatcggcagccatctgggcgttgcctttcagcccgatccggaagccgaaattcgtaagctcaacacccgccgcggtgagctggagcgtgcgcttgccagccatgaaaatgacaaccagcaaagccgcgtgcagtttgagcaggcgaaagaaggcgttgcggcccttaaccgcatcctgccgcgcctgaacctgctggcggacgatacgctcgccgaccgcgtggatgagattcaggaacgtctggacgaagcgcaggaagcggcgcgctttgtgcagcaacacggcaatcagctggcaaaactggagccgatggtttccgttctccagagcgacccggaacagtttgagcagttaaaagaagattacgcctggtcacagcaggtgcagcgcgaagcgcgtcagcaggcgtttgccctcacggaagtggtgcaacgtcgcgcacacttcggctactccgattcagcagaaatgctgagcgggaacagcgatctgaatgaaaagctgcgccagcgtcttgagcaggccgaagcggaacgaacgcgcgcccgtgaagcgatgcgtactcacgctgcacagctgagccagtacagccaggtcatggcatcgctgaaaagctccttcgacaccaagaaagagctgttaaatgacctgcataaagagttgcaggacattggcgtgcgcgccgacagcggcgcggaagagcgggcgcgtattcgccgtgatgagctgcatgctcagctcagcaacaaccgtgcgcgtcgtaatcagctcgaaaaagcgctgaccttctgtgaagcggagatggacaacctgacgcgtcgtctgcgcaagctggagcgcgactattttgagatgcgtgaacaggttgtgaccgcgaaggcgggctggtgcgcggtgatgcgcatggtgaaggacaacaacgtggagcgtcgtctgcaccgtcgcgagctggcgtacctgtcagccgatgaactgcgctctatgtcggataaggcgctgggtgcgctgcgtctggccgtggcggacaatgaacacctgcgcgacgtgctgcgcatgtccgaagatccgaagcgtcctgagcgcaaaattcagttcttcgtggcggtttatcagcacttacgcgagcgtattcgtcaggacatcatccgtaccgacgatccggttgaagcgatcgaacagatggagatcgagctgggccgtctgacggaggagctgacctcccgcgagcagaagctggcaatcagctcccgcagcgtggcgaatattattcgtaaaaccattcagcgcgagcagaaccgtatccgtcagctgaaccagggcctgcaaagcgtgtcgtttggccaggtcaacagcgtgcggctgaacgtgaacgtgcgtgaggcgcactccacgctgcttgacgtgttgtctgaacagcatgagcagcatcaggatctgttcaacagtaaccgcctgaccttctccgaagcgctggcgaagctgtatcagcgtctgaatccgcagattgacatgggccagcgtacgccgcaaaccatcggcgaggagttgctggactaccgcaactatctggaaatggaagttgaggttaaccgtggctcagacggctggctgcgcgcggaatccggtgcgctctctaccggtgaagccatcggtaccggtatgtcgattctggtgatggtggtgcagagctgggaagatgaagcgcgtcgtctgcgcggcaaggacatctctccatgccgtctgctgttcctcgatgaagccgcgcgtctcgacgcccgctccatcgccacgctgtttgagctttgcgagcgactcgatatgcagctcatcatcgcggcgccggaaaacatcagtccggaaaaagggacaacctataagctggtgcgtaaagtgttccagaacagtgaacatgttcacgtcgtaggtctgcgtggctttgcgccgcagcctccggagtctttaccgggcacggctgacgcctcttaa

SEQ ID NO: 525707 - DNA, 705 bp, Stenotrophomonas maltophilia
atgtcattgacaaatattgaacaagtgatgccagttaagctggcacaggcgctggcgaatccgttgtttccggcgctggacagccagctgcgtgccggtcgtcacattggccttgacgagctggataatcacgcctttttgatggactttcaggagtatctggaagagttttacgctcgctataacgttgagctgatccgcgcgccggaagggtttttctatctgcgtccgcgctctactacgcttattccgcgctcggtgctttccgaactggatatgatggtcggcaaaattctctgctacctctacctcagcccggaacgtctggcgaatgaagggatcttcacccagcaggagctttacgatgagctgctgtcgctggcggatgaaagcaagctgctcaagctggtaaataaccgctcgacggggtccgatctggaccgtcagaaattacaggaaaaagttcgctcttccctgaaccgtctgcgccgtctgggaatggtctggttcatgggtcacgacagcagcaagttccgcattaccgaatcggtcttccgctttggtgccgacgtgcgtgcgggtgacgatgcgcgtgaagcacagctgcgcatgatccgtgacggtgaagcgatgccggtggaaaaccatttgcagctcaatgacgagcacgaagagaatcagccggatagcggggaggaagagtaa

SEQ ID NO: 525708 - DNA, 1323 bp, Stenotrophomonas maltophilia
atgagtgaattttcccagacagtccccgaactggttgcctgggccaggaaaaacgatttctccatctcgctgccggtagacagactctcattcctgctggcggttgcgacgctaaacggcgaacgcctggatggcgaaatgagtgaaggcgaactggtggatgcgttccgccacgtcagtgatgcgtttgagcaaaccagcgaaaccattagcgtgcgtgccaacaacgcaatcaatgatatggtgcgtcaacgtctgctgaaccgctttaccagcgagcaggcggaaggaaacgccatctatcgtcttacgccactgggcattggcattaccgactattacatccgccagcgcgaattttccacgctgcgtctctccatgcagctctccattgttgcaggcgagctgaagcgtgccgccgacgcggctgatgaaaacggtgacgagttccactggcatcgcaacgtttacgcgccgctaaaatactcggtcgccgagattttcgacagtatcgatctgactcaacgtctgatggacgaacagcagcagcaggtcaaagacgatatcgctcaactgctgaataaagactggcgtgcggccatctccagctgtgaacttttgctgtcagaaacgtccggtacgctacgtgagttgcaggatacgctggaggcggctggggataagctacaggccaacctgctgcgcatccaggacgcgacgatggcgcacgacgatctgcattttatcgaccgtctggtgtttgatttgcagagtaagcttgaccgcattatcagctggggccagcagtcgatcgacctgtggatcggttacgaccgccacgtgcataaatttatccgtaccgccatcgatatggataagaaccgcgtctttgctcagcgtctgcgccagtcggtacagacctactttgatgcgccgtgggcgctgacctacgccaacgccgatcgtcttctggatatgcgcgacgaagagatggcgctgcgtgatgaagaggtcaccggtgaactgccgccggatctggaatacgaagaatttaacgaaattcgcgagcagcttgcggcgatgatcgaagaacagctcgctgtctataaagccagacaagcaccgctggatcttggcctcgtggtacgcgactatctggcgcagtatccgcgcgcgcgccacttcgatgttgcccgcattgttgtagaccaggcggtgcgcctgggcatcgcacaagccgatttcaccggactgccgccgaagtggcagccgattaacgattacggagccaaggtacaggcgcatgtcattgacaaatattga

SEQ ID NO: 525709 - DNA, 780 bp, Stenotrophomonas maltophilia
atgcgggatcgcaattttgatgacatcgcggaaaagttttcgcgcaacatttatggcaccaccaaaggtcagcttcgtcagacgatcctctggcaggatctggataagctgctggctgaatttggtgaccgaccgttgcgcgtactggatgccggcggtggggaagggcagactgcaattctgatggcgcagcggggacatcacgtcacgctttgcgatctttctgccgagatggttgcgcgcgccgggcgagcggcagaagagaaaggtgtgagcgacaacatgcattttatacattgcgccgctcaggacattccgcagcatttggaaacgcaggttgatctgatattgtttcatgctgtgctcgaatgggtcgccgaaccacaagcgatgttaaaaacgctgtggtcgatgttgcgcccgggcggtgcgttatcgctgatgttttacaatgccaacggcctgctgatgcgaaacgtgctggtcggcaattttggctatgtacagcagggcatgtataaaaagaaacgacgcacgctttcaccggatttcccccgtgaaccgcagcaggtctatggctggctggaggagatcggttgggaaattaccggcaaaaccggcgtgagggtgtttcatgattatctgcgtgataaacaaaaacaggatgactgtttagacgccttaacagaaatagagacgcggtactgccgccaggagccttatctgagccttggccgctatatccacgtcaccgcgcgcaagccgcagatgcaaggataa

SEQ ID NO: 525710 - DNA, 780 bp, Stenotrophomonas maltophilia
atgctttttaccctaaaaaaatatatcggaggcatgatgcttccccttcccctgctgttgcttctcatcgcgctggggctggcattgatatggtttagccgctttcagaaaagcggtaaatccctcgtcaccgtgggctggctgacgctgctgttactcagcctgcaaccggtcgctgacggtttgttacgcccgattgaaaacacctaccctacatggcagggaaaacagaaggtgggctatatcgtggtgctgggcggcgggtatacctgggatccgaactgggcgcccagctcgaacctgatcaacaacagtctgccgcgtctgaacgaggggatccgcctgtggctggccaatccgggatcgaagatgatcttcacgggcgctgcggcaaaaaccaacccggtaagtaccgctgaagcaggggcaagagtggctgaatcgcttggcgtaccacgttccgccatcatcacgctggatagcccaaaagataccgaagaagaagctgctgcggtgaaacaagccatcggtgatgtgccgttcctgctggtgacctctgcttcacacctgccgcgcgcaatgattttctttgagaatcagggcctgcatccgcttcctgctccggcaaaccagctggccattgacgccccgctcaacccgtgggaacggataatcccgtccccggtatggctgatgcacagcgaccgcgtcggttacgagacgcttggccgcctgtggcagtggcttaagggttcgtcaggcaagccagggcaggagtga

SEQ ID NO: 525711 - DNA, 894 bp, Stenotrophomonas maltophilia
atggaacagctgcgtgctgaactcagccatctccttggcgaaaagctaagccgggtggaatgcgtgaatgaaaaggccgataccgcactctggtcgttgtacgacagtcagggaaaccccatgccgctgatggccagaagttttacctcgccgggcgtcgccagacagctggcctggaaaatgtcgatgctggcgcgggaagggactgtccgtatgccgatggtctacggcgtgatgacccatgaggagcatcccggcccggatgttctgcttattgaacgtttacgcggggtttctgttgaagctccgacgcgtacaccggagcgctgggaacagctgaaagatcagattgtcgaggctctgcttgcctggcatcggcaggacagccggggtcttgttggcgcggtagacagcacccaggaaaacctgtggccgctatggtatcgccagcgtgtcgaagtgctctggggcacgctgaaccagttcaacaacaccggtttaacgatgcaggacaaacgtattctgttccgcacccgggaatgtctgccgacgctgtttgagggttttaacgacaactgcgtgctggttcacggcaacttcacgctgcgcagtatgcttaaagactcgcgcagcgatcagcttctggcaatggtcgggccggggatcatgctctgggcgccgcgcgagtacgaactgttcaggctgagcgagggcggggcggcggaagatttgctctggcactatcttcagcgcgcccccgttgcggaggcctttctctggcgacgctggctctatcttctctgggatgaggtggcgcaactggtcaacaccgggcgctttaatcgggccagtttcgatctggccgcaaaatcactcctgccctggcttgcctga

SEQ ID NO: 525712 - DNA, 747 bp, Stenotrophomonas maltophilia
atgagttttgttgtcattatccctgcgcgttatgcttcaacgcgcctgccaggtaaaccgctggtggatatcaacggtaaaccgatgattgtgcatgtccttgaacgggcacgcgaatcgggcgccggacgcgtcatcgtcgccaccgatcacccggatgtcgcgcgagcggttgaggccgcgggtggggaagtgtgcatgacccgtgccgaccaccagtcaggcaccgagcgcctggcggaagtcgtcgaaaaatgcggtttcagtgacgagacggtgattgtgaacgtgcagggcgatgagccgatgatcccggcggctattatccgtcaggtggccgacaacctggcccagcgtaaggttggcatggcgacccttgcggtgccgattcaccacgctgaagaggcgttcaatccgaatgcggtgaaagtggtcatggacgcagagggctacgcgctctatttctcccgcgccaccattccgtgggatcgcgatcgtttcgcgcaatcgaaagagacgatcggcgaaaccttcctgcgccacatcggtatttacggctaccgcgccggctttattcgtcgctatgtcgcctgggcaccaagcccgcttgagcatatcgaaatgctcgaacagcttcgcgtgctgtggtacggcgagaaaattcacgttgcggttgcccaggaagtccctggcaccggcgtggatacgcctgaagatctcgatcgcgtacgcgtcgaattgcgttaa

SEQ ID NO: 525713 - DNA, 183 bp, Stenotrophomonas maltophilia; identical to SEQ ID NO: 115009

SEQ ID NO: 525714 - DNA, 1140 bp, Stenotrophomonas maltophilia
atgtctctaccgcaactctcacttgcagccgcacgaaacctgcatcttgccgcccaggggcttctgaaaaagccccgccgccgcgcgcagccagcggatatcctctctaccgtgcaacgcatgtcgttgctgcaaatcgacaccattaacatcgtggcgcgtagcccgtatctggtcctgtttagccgcctgggaaactatcctccgcagtggctggataatgcgctaagtcagggcgaactgatggaatactgggcgcatgaagcctgttttctcccgcgcagcgattttgcactggtgcgtcaccgcatgctcgccccggacaaaatgggctggaaataccgccaggagtggatggcggaacacgcggatgaaatagaacaactgattgcccatattcaggaaaacggtccggtacgctctgcggattttgaacacccgcgaaaaggcgcaagcggatggtgggagtggaaaccgcacaaacgccatcttgaagggctgtttacgtcgggcaaagtgatggtggtcgagcgccgcaactttcagcgcgtttatgacctcacgcaccgcgttatgcctcactgggacgatacgcgtgacctgctgtctcaggacgcagccgaagccatcatgctcgggaacagcgcccgcagcctgggcatattccgcccacagtggctggcggattattatcgcctgctgcatgcggatttgttccctctgctggcacaggcgcaagagggcaaactccaggcgacccacagtgccgtgctctcgccattcgaccccgtagtctgggacagaaagcgggccgaacagctgtttgatttcagctaccgtctggaacgctacaccccggcgcaaaagcgtcagtacggttattttgttttgccgttgcttcataaagggcagcttgtcgggcgcatggacgctaaaatgcaccgtaaaaccggcatgcttgaagttatcgcgctctggctggaagagggcataaaagtcacggctggcctggaaaaagggctaacgtctgcgctcagtgaatttgcgcgctggcagggggcgcatgaaattgtactcggtcgcgtgcctgcggggctgtttacgacctgtcgaggtggctgggaaacaggcactccctga

SEQ ID NO: 525715 - DNA, 978 bp, Stenotrophomonas maltophilia
atgattgcacgcatctggtcgggtgaatcccctctgtgggtgctgcttctcccgctctcctggctgtatggcctggtgagcggtgctattcgtctgctttatcgcatcgggatcaagcgcgcctggcgcgcaccggtaccggtagtggtggtcggcaacctgacggcggggggaaacggcaaaacgccggtggtgatctggctggtagaacagctccagaagcgcggtatccgcccgggagttgtctcacgcggttacggtggtaaagcggcgcagtatccactggtgctgagcctagctacgacaaccgctgaagccggtgatgagccggtactgatttaccaacgtactggcgcgccggttgcggtatcgccggtgcgcagtgatgccgtaaaggcactgcttgcagagcatgacgtacaaatcataattaccgatgatggtttgcagcattacgcgctggcgcgtgacaaagagatcgtggttattgacggcgtgcggcgttttggcaacggctggtggctgccagccggtccaatgcgtgagcgtgcgtcgcgcctgaagagcgtcgatgccgtgattgtaaacggtggtgaagccagagcgggtgagatcccgatgcatcttcgtcccggaaaggcagtgaatatgctgaccggcgagcgtaaagacgtcgcgttactggatcatctgatagcgatggccgggattggtcatccgccgcgtttcttcgcgacgctggagcagtgcggcgcgcggctggagaaacgggtaccgctggccgatcaccaggcgctggttgccgaagagattgagaggctggccgcaccgggccagacgctgatcatgacggaaaaagacgcggtaaaatgccgggcctttgcgaaagaaaactggtggtatctgccggttgatgctgaactcagcggcgaacagccggaacatttgctcaaggaactgctcgcgttagtgcagtaa

SEQ ID NO: 525716 - DNA, 924 bp, Stenotrophomonas maltophilia
atggaaaccctgactgcgggtaccattaccgtggtgttctcatccatgattgcgctgatgcgtccgctgaaatcgctcacaaacgtcaacgcccagttccagcgcgggatggcagcctgtcagacgctgttcagcatcctcgattccgaacaggaaaaagatgaaggtacacgcgtgatcgagcgcgctaaaggtgacctggaattccgcaacgtgacctttacctatccaggccgtgaagtgccggcgctgcgtgatatcagcctgtccattccggcgggtaaaaccgttgcactggtcggtcgttccggttcgggcaagtcgactattgccagcctgattacccgtttctacgatatcgaccagggcgaaatcctgcttgatggtcacgacctgcgggaatataccctacagtcgttgcgtaaccaggtcgcgctggtttcgcagaacgtgcatctgttcaacgatacggtggcgaacaacattgcgtatgcccgtaccgaagagtacagccgtgaagagatcgagaatgcggcgcgtatggcctatgcgatggacttcattaacaaaatggataacggtctggatacgatcattggcgaaaacggggtgctgctctccggtggtcagcgtcaacgtatcgcgattgcccgagcgctgctgcgcaacagcccgattctgatcctcgatgaagcaacgtccgcactggatacggaatctgaacgcgctatccagtcggctctggatgaattacagaaaaaccgtacctcgctggttatcgcgcaccgtctgtcgaccatcgaacaggctgacgaaatcgtggtggtggaagacggcgttatcgttgaacgcggcagccatgcggacctgctggaacaacgtggtgtatacgcgcagcttcataaaatgcagttcggtcaatga

SEQ ID NO: 525717 - DNA, 843 bp, Stenotrophomonas maltophilia
  misc_feature (784)..(793): n is a, c, g, or t
atgcataacgacaaagatctctccacgtggcaaacgttccgccggctctggccgatgattgcacctttcaaagcaggcttgatcgtggcgggcgtagcgttaatcctcaacgcagccagcgatacgtttatgttatcgcttctcaaaccgttactggatgacggttttggtaaaacggatcgttcagtgctgctatggatgccgctggtggttattgggctgatgatcttacgcggaatctccagctatgtatccagctactgcatctcctgggtatccggtaaagtggtgatgaccatgcgccgtcggttattcagccatatgatggggatgccagtctcattctttgacaaacagtcaaccggtaccctgctgtcgcgtattacctacgattcagagcaggtggcgtcgtcctcttccagcgcactgattaccgttgtgcgtgaaggcgcatccatcatcggtctttttgcgatgatgttctattacagctggcaactgtcgctgatccttattgtgctggcgccgattgtctccatcgcgatccgcgtggtatcaaagcgttttcgcaacatcagtaaaaatatgcagaatacgatggggcaggtgactaccagcgccgagcagatgctgaaaggccataaggaagtgttgatcttcggcggtcaggaagtcgaaaccaaacgctttgacaaggtcagcaacagaatgcgcctgcaagggatgaaaatggtatcggcctcgtcgatttccgatccgatcattcagctgattgcctctttgnnnnnnnnnnggccttcgtcctgtatgcagcaagcttcccgagcgtcatggaaaccctga

SEQ ID NO: 525718 - DNA, 1662 bp, Stenotrophomonas maltophilia
atgggggagcggttgtgggtctcgcgggagataaaaaacctgatgcgtgagaccggaacgatgcatctgatggcaatctcgggattgcatattgcgctggccgcttctgctgtctggctactggctcggggcatccaatttttcctgccgggccgctggattatctggcaagtgcccttactggcaggtctgctttttgccgcgttttacgcatggctaacgggattgcagccgcccgcgctgcgtacggttatggcgcttgtggtactggctgcattaaaaatgagtggtcgtcagtggtcgccctggcaggtatggcttacctgcgtggcggcgatcctgtttttcgatccgctggcggtactgtcacaaagcctggcgttatccgcgtttgcggtcgccgcgcttattttttggtatcagtggttgcctctcccgcactggcaacgtggccggtgcctgcggccgctggttacgctgttgtatttgcaggttggaatgctgctgcttctgttgccgcttcaggtactgattttccatggtttcagtctctcctcgctggtggcgaatctgtttgctgttcctctggtaacgtttatctcagttccactgatcctgctcggcatgtttctgcatctgtttccggtggcgacgctggaaagtatcgtctggctggcagccgataaatctctggcaggacttttctggctattgatgcgtttaccgaatggctggcaggacgtggatgaacgctggcaatgcctgacgttactgccgtggctgctgatcattggctggcgattcagggccttcagcgcagtacccgcagtctgtctggcaggcagcgtggtgatggcatttcccctctggcacaggattaaaactgacagctggtccctgcatatgctggatgtagggcaagggttggcgatggtcattgagcgtcacgggaaggccattctgtatgacaccgggctggcatggcccggtggggacagcgcgcagcagctgattatcccctggctacgctggcatcatctgaggccggaaggggtgatcctgagccatgaacatctcgaccacgcggggggactggcatcgctaaaagctgcctggcctgcaatgtggatcagaagccccttagcctggaccggacatcttccatgctttcgtggacagcgatggcagtggcatgggttaacgttctccgtgcattggccacccgaaaacaccccggcgaaaggtaacaaccgctcctgcgtggtaaaaatcgatgacggcgaacagagcgttttactgaccggagatattgaagcgcaggcagaactggcaatgttgagccaccgctggcgtcaacttgcggctacactgattcaggtgccgcatcatgggagtaacacgtcatcttcaacaccgctgctacagcgcgtggaggggcaggtttcgctggcctcgatggcccgctataacgcgtggcgtttcccttccatcaaagtagtcaggcgctatcgaactgagggatatctctggcttgataccccgcagtccggacagataactgtgacgttttcgcaccaaagtcggcaaattcgccgcttacgtgaacactatttaccgcgttggtatcatcagtggtttggcgcgcccgtagataacgggtag

SEQ ID NO: 525719 - DNA, 339 bp, Stenotrophomonas maltophilia
atgatcgtgatgaacgacctggtggcgggttacgatcgccagcccgttacgcgcgcactgtccggcgtgattgaacgcgggagcatgaccgccatcgtcggggccaacggctgcggcaaatccacgctgctgaaaacgctcgctggctttcttccgcccgtcagcggtacgtttcgctggcaggggagacgtccggtggtgggctggctggcgcagcgtcacgcgctggaggcgcaatttcctctgaccgtgcaggacgtggtgagcatgggctgctggccagaaatctcgctatttgccggttttcgtcggggtgatgctgccaacttactgatttag

SEQ ID NO: 525720 - DNA, 849 bp, Stenotrophomonas maltophilia
gtgaacattccggcgcagtttaactgggataaccactacgccgacggcgcgcacgatacttcacgccgtatgctctacaccggtctgaagagcgacacctggggtacgctgaccttcggccagcagaacagcgtgtactatgacgtggtgggcgcaaaaaccgatatctgggactacgacatgattggtcaggcgtcgggtaacgggatcaacggcgactacgacggctcttaccgttcacgccagatgctgaagtacaagaaaaccgtgggcgatgctgacatctacgcatcctatctgtttgaagacagcgaatacctgccgggcaacggcctgcgctacaagcgtaaaggcggcggttcactgggtatcgattaccacctgaccaccgatctgacctggggcgcagcgtggaactacacccgcgcggacatgcgtaatccggacaacggcgacagcaaatcctacgaccagaacattctcggcaccgcactgagctggacgccggataactggaccttctccgcaggcggcggctggtatcagaacttcatgaccaccaaaaaagtgtccgttaacgactacttcgccggtgatgcatggggtattgaatacttcgcaggatacaaattcccggtcggtcagtatgcggtgaaatccattcagccgtacttcatgggcgaccgcattgagtacgtgaacggccgtaactaccagcgcatcgacaacggcgtaggtatcagcgtccagctggactacggtttccgcgtggattacgaacacgtgttcacctccagcaccgacaacctgggcgacatgaacctggtgcgtctgcgttacgacttctaa

SEQ ID NO: 525721 - DNA, 300 bp, Stenotrophomonas maltophilia
atgactataagaaaaacagcgctggcgacaacgatcggcgcagcagtggcattggcttctttcgcatctcaggcggaaatcacccttctgaaacaggatccgcaggcgggaaacccgctgagccgtctgaacttcaccgttggcggcagcatccgtcctcagttccagaacatgaccggtgatgacggcaaaacggctacaagcgtaacggttttgacggcggtacccgtttccgtttcgcggcagactactacctgttcgatgacatcagctggatcacctactacgagctgggtgtga

SEQ ID NO: 525722 - DNA, 2292 bp, Stenotrophomonas maltophilia
atgattgcccgctggttttggcgcgaatggcgctcgccctcgctgctgattgtctggctggcgttgagcctggcggtggcctgcgtgctggcgctcggcagcgtcagcgatcgtatggagaaagggcttagccagcagagccgggaatttatggcgggggaccgggctctgcaaagttctcgccccgtgccgccgggctggattgaggaagcgcgcaaagaggggctgaaggtgggagagcaaatcaccttccagaccatgacctttgcgggcgacacgccacagcttgccagcgtaaaagccgtggatgacatctacccgatgtatggtgatttacaaaccagtccgccggggctaaaaccgacggccggtacggtactgctggcatcgcgtctgatggcgctgctgaacctgaaacccggcgacagtatcgacgtcggcgacgcgaccctcaaaattgccggggaagtggtgcaggaacccgactccggatttaatccgttccagctcgcgccgcgcctgctgatgaacaccgctgatgtggcgaaaaccaacgccgtccagccgggtagccgcgtcacatggcgctataagtttggcgggacgcctgctcaactggaggcgtatgaaaaatggatcctgccgcagctcaagccggaacatcgctggtacgggctggagcaggatgacggggcgctcggcaaatccctcgagcgttctcagcagtttctgttgctgtcggcgctgttaaccctgctgctggccattgcggccgttgccgtggcaatggggcactactgccgcagccgttacgatctggtggcgatcctcaaaactctcggcgcgggccgggcacagctgcgcaagctgattgtcggccagtggctgatggtgctggcgctgtcggctctgaccggcggggcgatagggctgctgtttgaaaagctgctgatggtgctgctcaaaccggtcctgcccgctgcgctgccgcctgccagcctctggccgtggctgtgggccatcggcgcgatgacgacgatctccctgctggtggggttacgcccctaccggctgctgctcgccacccagccgctgcgcgtgctgcgccgggatgtggtggccagcgtctggccgctgaagttctatctgccggtgattattgcggtggcagtcgggctgttggcctggctgatgggcggcagtacgctgctgtgggcggtgctggcgggcgcggtggtgctggcgctgctgtgcggcgtggtgggctggctattgctcaatcttctcaaaaagctgacggtgagatcgctgccggtgcggctggcggttaaccgactgctgcaccagccgtggtctaccctcagccagctctcggcattttcgctgtcgtttatgctgctggcgcttctgctggtgctgcgcggggatctgctggatcgctggcagcagcagcttccgccggaaagcccgaactatttcctgatcaacattgctcccgaacaggtgacgccgctgaaggggttcctgtctgagcatcacattattccggaatcgttctatccgatcgtgcgcgcccgcctgacgcagatcaacggccagtccacggagggaaataaggatgaatcgctcaaccgcgagctcaacctgacctggcaggcgaaacgtccggaccataacccgatcgttgccggcacctggccgccgaaagcgggggaagtgtcgatggaggaggggctggcgacacgcctgaacgtgaagctcggcgatagcgtgacctttaccggtgatacccaggatttcaccgccaaagtcaccagcctgcgcaaagtggactgggaaagcctgcggccaaatttcttcttcatcttcccgccgggcgcgctggacggacagccccagggctggctgaccagcttccgctgggaaaacggcaacggcatgctgacgcaactgaaccgggaatttccgacggtgagcctgctggatatcggcgcgatcctcaaacatgtcgggcaggtgctggaacaggtgagccgcgccctggaggtgatggtgacgctgtggagcgaatttgccctgctcgggctggtggcgggcctggtggcggccatcggggcggaaaccgcactggcggtgcttcagacgaaagtctttgattttccatgggagcctgactggcggctgtggttaacgttgcccgtctgcggcgcggtgctgctgtccctgtgcggtggctggctcgggacgcggctgttgaaaggtaaagcgctgttccgccagtttgtcagctag

SEQ ID NO: 525723 - DNA, 687 bp, Stenotrophomonas maltophilia
atgccagcggaaaacattattgaagttcattgtcttaagaagtccgtcggtcagggagaacacgagctttccatcctcaccggagttgaactcgttgtcaaacgtgccgaaaccatcgccctgattggcgaatccggttccggtaagtccacgctgctggccattctcgccgggctggacgatggcagcagcggggaagtgaacctggtcggccagcccctccacgcgcttgatgaagaggcgcgcgccgcgctgcgtgctcggcatatcgggtttgtctttcagtcattcatgctgattccaaccctcaacgcgctggaaaacgttgagctgcccggcctgctgcgcggtgaaaatacccgcgaaagccgcgatcacgccaaagcgttgctggaacagctggggctgggaaaacgtctcgaccaccttccggcgcagctttccggcggtgagcagcagcgcgtggcgctggcccgggcgtttaacgggcgcccggaagtgctgtttgccgatgagcccacgggcaatctcgaccgtaaaaccggggacaaaattgccgatctgctgttttccctcaaccgcgagcatggcaccacgctgattctggttacccacgacccgcagttggccgcccgctgcgaccgccgcctgcggctggtgaacggtgttcttcaggaggaagcatga

SEQ ID NO: 525724 - DNA, 585 bp, Stenotrophomonas maltophilia
atgctgatgaccttccgcgcggcggctgcggacacgttattgattctgggcgatagcctgagcgcgggctatcgtatggcggccagtgcggcctggcccgccctgctcaatgataaatggcagtcccgggcgtctgtcgttaacggcagcatcagcggcgatacgtcgcagcaaggcttaccgcgcctgcctgccctgcttaagcagcatcaaccgcgttgggtgctggtcgaactgggcggtaatgatggtttgcgcggcttccagccacagcaaacggagcaaacgctgcggactattttgcagaccattaaggccgctaacgcccagccgctgctgatgcaaattcgcctgcccgctaactacggccgtcggtataatgaggcgtttagcgcgatctatcctaagcttgccaaagagtttgatattccgctgctgccatttttcatggaagaggtctatctgaaaccccagtggatgcaggatgatggcattcaccccaatcgcgatgcccagccgttcattgccgactggatggcaacccggctggctcctttagtaaaacatgactcgtcaaacagctga

SEQ ID NO: 525725 - DNA, 771 bp, Stenotrophomonas maltophilia
atgcaaaaatcggtcttaataacaggatgttccagcggaattggccttgaaagcgcccttgaactgaaacgtcaggggttttgggtgctggcagcctgccgcaaacccgaggatgtcgaacgcatgcgagggctgggatttaccggcattctgctggatctcgattcgccagagagcgtggagcaggccgccgacgaggttatcgccctgaccaacaaccggctttacggcctgttcaacaatgcgggctatggcgtgtacggcccgctacagaccctctcgcgggaacagctggagcagcagttctccgcaaacttttttggggcgcatcagctcaccatgcgccttctccccgccatgctgccgcacggcgaagggcggattgtcatgacctcctcggtgatgggcctgatctccacgccgggacgcggggcttacgctgccagtaaatatgcgcttgaagcctggtccgatgcgttgcgcatggagctgcgccacagcggcattaaggtcagcctgattgaaccgggccccatccgcacccgctttacggaaaacgttaaccagacgcaggcggaccaaccggtcgaaaatcccggtatcgcggcgcgttttacgcttgggccagaagccgtggttgccaaagtgcgccacgcatttgagagcgatacccctaaaatgcgctatccggtgacgctggtgacccatgccgtcggctggttgaaacgcctgctgccggggcggatgatggacaaaattttgcagggttga

SEQ ID NO: 525726 - DNA, 855 bp, Stenotrophomonas maltophilia
atgtccgtacagaatatcgtcaacataactgaagctaacctgcaacagacactcgaacagtcaatgactacaccggtgctgttctacttctggtctgaacgcagccaacactgcctgcagctgacgccggtcctggaaagccttgccgcgcagtacaacggtcaatttattctggcgaagctggattgtgacgccgaaccgatggtggcttcccagtttggcctgcgtgcgatcccaaccgtctacctgttccagaacggtcagccggtggatggcttccaggggccgcagccggaagaggcgatccgcgccctgctggataaagtcctgccgcgcgaagaagagctgaaagcgcaggaagccatggcgctgatgcaggaaggcaagtacgacgaggcgctgccgctgttaaaagacgcgtggcagctgtcgaaccagaacagccagattggtctgctgctggcagagacccagattgcgctgcaccgccccgaagacgcggaagccgtgctgaaaacggtgccgatgcaggatcaggacacccgctatcagggcctggtggcgcagattgacctgctgaaacaggcggcggatacccctgaaattcagcaacttcagcagcaggttgcggacaacccggcggatgccgcgctggcaagccagctggcgcttcagcttcatcaggtggggcgtaatgaagaggcgctggagctgctgtttagccaccttcagaaggacctgggcgccgcagacggtcaggcgcgaaagatgttccaggagatcctggccgcgctcggcaccggtgacgcgctggcgtctaagtatcgtcgtcagctgtacgcattgctttactaa

SEQ ID NO: 525727 - DNA, 783 bp, Stenotrophomonas maltophilia
gtgggtgaacataacataaccaacgaatcgctggcgctgtcgatggtgctggtgctggtggcgattgtggtcagctaccgggagaagctggggctggaaaaagatattctgtggagtatcgttcgcgcggtcattcagctcatcatcgtcggctatgtgctgaaatacatcttcaacgtcaatcatgccgtgctgaccctgttgatggtgctgtttatctgctttaacgcggcatggaacgcgcagaaacgcagtaaatacatcgataaagcgttcctctcgtcgtttattgccatcaccaccgggaccgcgttaacgctggcggtactggtgctctccggctcgatagaatttacgccgatgcaggtgatccccatttccgggatgattgcgggcaatgcgatggtggcggtcgggttatgctacaacaatctggggcaacgcttcagcagtgaacagcaacagcttcaggagaagctaagcctgggcgcgacaccgaaggtggcctcggcgcggttgatccgcgacagcattcgttcttcgctgatcccaacggtggattccgccaaaaccgtgggtctggtgagcctgccgggcatgatgtcggggctaatttttgccggtatcgatccggtaaaagcgattaaataccagattatggtgacgtttatgctgctctctacggcgagcctgtcgacgattattgcctgctatctgacctatcggaagttttacaacgcgcgccaccagctggtggtgacgcagttgaaaaagacggggtaa

SEQ ID NO: 525728 - DNA, 672 bp, Stenotrophomonas maltophilia
atgaataataaaaaaaatcttctggatatcagggatgttggctttcgtgtgggtgataacaccatccttcagcacgtcgatttttgtctctctccgggcgaatttaaactcataaccggcccctccggctgcggcaaaagcaccctcctgaaaatcgtggcttcgctactgagtccaacggagggaaccatcctgtttgaagggaaagatatcgccacgcttacaccggaaagctatcgccagcaggtgtcatactgcgtgcaaacgccgtccctgtttggcgacacggtgtacgacaatctggttttcccctggcacatccgcaaccaaacgcccgatccgaaaaagtttgcggacgatctgacccgttttgggcttccgccggagacgctgaccaaatcgactgccgaactgtcaggcggggaaaagcagcgcgtctcgctgatccgtaacctgcaattcctgccgaaggtgcttttgctggatgaaatcaccagcgcgctggatgacgctaacaagcgcaacgtcaatgagattattcatcgctacgtccgtgaacaggatattgccgtgctgtgggtgacgcacgattcaaatgaaattagccatgcggatgatgtcatcacgctcaggccgcagggcgggaaaatggaggaggctcaccgtgggtga

SEQ ID NO: 525729 - DNA, 855 bp, Stenotrophomonas maltophilia
atgacacatatcttttatgagttctcttccctgaagcctggtgttccagatgtggaaacattaatggaagtcatcaattcttctgaactcacgcgttttgtcatgggtgcagaggtggtcgattttgttaagaaggcgctcatcgttaacaccacgatcggaagctttaaaaactgctattttgctttcgatgatggggcttactttctcgagtttgacggcaagggtaaatccagacgctttactgaggtgccggactggttcgtttcccccgcggaatttgcccgctcgcaatggctgattaaccatgacctggccgatgtgaaggcgacggcgtttattgacgtgctaatgtcctacccgcttaaagagcgccgggcgcactgcaatctgctgtttggtctggatctgcataaggtcaatgtggttccggcgcctacagcccctgccggaaaaatgggcaataaaaacggaaaaaccaccaagcctcgcgtcacggatctcggctcttttgagctttttaccgcgttctttgcacgcatgaaaaccgccgtcaatgcaaatgagttccccaccttacaggtgctgacaggccagaaggatcttgcaaaagcgccgcacagcttaaagcaagggatcagaacctggtttaaggggattaccggcgatctgccgccgaacaacaaacgtgtcggagcgggcaatgcagtactgttctgcgcgcccgttcgcgagcagatccagcagatagaggccatcggcctggaaaaatactatcagggcttatcgaaagccatcgctgacgccggggatgggtttatcaccgacttcagctatacctggtctgtagagtaa

SEQ ID NO: 525730 - DNA, 915 bp, Stenotrophomonas maltophilia
atgctcatcgttgttcctgtccttattttcgttgcgctggttatcgtgggcgcaggcgtcaaaattgtcccgcagggttaccagtggaccgtcgaacgtttcggtcgctacaccaatacccttcagccgggtttaagcctgatcgtccccttcatggacagaattgggcgtaaaatcaacatgatggagcaggtgctggatattccttcccaggaagtcatctctaaggataacgccaacgtcaccatcgatgcggtgtgctttattcaggtgattgatgcgccgaaagcggcctatgaggtgagcaacctggagctggcgatcgtcaacctgacgatgaccaacatccgtactgtgcttggctcgatggagctggacgaaatgctctcccagcgcgacagcattaatacccgcctgctgcacattgttgatgaagccaccaatccgtgggggatcaaagtgacccgcattgagatccgcgacgtgcgcccaccggcagagctgattgcttccatgaatgcgcagatgaaggccgagcgtaccaaacgcgcctatattcttgaagccgaaggggtgcgtcaggccgagatcctgaaagcggaaggggaaaaacagtcgcagatcctgaaagccgagggcgaccgtcagtctgccttcctccaggcagaagcgcgtgaacgttcggcagaagcggaagcccgcgcgacgcaaatggtttccgaggcgattgccgccggggatatccaggctgtgaactacttcgtcgcgcaaaaatataccgatgcgctgaaggagatcggctctgcgaacaacagcaaagtggtgatgatgccgctggatgccagcagtctgatgggatctatcgccggaattgccgagttgatcaaagacggcggaaacgagcgtaaaaaatga

SEQ ID NO: 525731 - DNA, 453 bp, Stenotrophomonas maltophilia
atgattgagctcatcgttgcacatcctcatgcgttctggctaagccttggcggcttgctgctggccgccgagatgcttggcggcaacggttatctgctgtggagcggtgttgccgctgtgattaccgggctggtcgtctggctgctgcctgtcggctgggagtggcagggcgcgctgtttgccgtgctgacgctgctggccgcctggctgtggtggcgctggctgaacaaacgggtgaaggcgcagaagccggtcgacgcgcatctcaatcagcgtgggcagcagatcgtgggtaaacgttttacgcttgataacgcgctgatcaacggacgcggtcatatgcgcgtgggggacagttcatggccggtagtggccgatgatgacctcagcgccggcacgcgggttgaggtcattgcggtagaaggcattaccctgcgggttaaagcctgttag

SEQ ID NO: 525732 - DNA, 411 bp, Stenotrophomonas maltophilia
gtgaatatcagcgatgttgcgaaaaaaaccggcttaaccagcaaagcgattcgcttttatgaggaaaaagggctggtgacgccaccgttgcgcagtgagaacggctaccgcagctatacgcaactgcatcttgatgaactgacgttactgcgccaggcaagacaggtaggatttaaccttgaagagtgcggcgagctggttaacctgtttaacgatccgaaacgccacagtgccgacgtgaaaaaacgtacgctggaaaaagtggcggagatcgaacgccatatcatcgaattacaggcgatgcgtgagcaactgttacagctggcagaatcctgcccgggagatgacagcgccgagtgcccgattatcgacaatctttccggttgctgccaccgtaaaacccacgcctaa

SEQ ID NO: 525733 - DNA, 2499 bp, Stenotrophomonas maltophilia
atgtctcacactattgacctgacactggacggcctctcctgcggccactgtgtcaaacgtgttaaagaaagcctggagcagcgtcctgatgtggaaagcgctgaggtgactatcgatcatgccgccgtgaccggcagcgccagcgccgacgagctgattgataccattaaacaggccggttacggggcggagttaagccacccaaaggctaaaccgctggcagagtcatcatccccgtcggaagcactgacagcggccactcctgagcttccggtagctgatgatattgatgacagccaacagctgctgatcaacggcatgagctgcgccagctgtgtctcccgggtacaaaacgccttacaggcggtaccgggcgtcgcacaggcacgggtaaacctggcggagcgtactgcgctggtgatgggcagtgcctccgccgcagatttagtgcaggccgtggagaaagcgggctacggggcggaggccatcgaagatgatgccgagcgccgcgagcgccagcaggaaacggctgtcgccaccatgaagcgcttccgctggcaggcgatcgtcgccctgctggtcggtattccggtgatggtgtggggcatgatgggtgacaacatgatggtcaccgcagacaaccgcaccctgtggctggtgattggtctgattaccctagcggtgatggtgtttgcaggcggacatttctataccagcgcctggaagagcctgaaaaaccgcaccgcgacgatggacacgctggtcgcgctcgggacgggcgctgcgtggctgtattcgatgagcgttaacgtctggccgcagtggttcccgatggaggcgcgccatctctattatgaagcgagcgcgatgattataggtctgattaacttaggccatatgctcgaagcccgcgcgcgtcagcgctcgtcgaaagcgctggagagattactcgatttaaccccgccgacggcccgcgtggtcaccgacgatggggaaaaaaacgttcctctctcagaggtgcaacccggtatgacgctgcgtctcaccaccggcgaccgcgtacccgtcgacggtgaaatcacccagggcgatgcctggcttgatgaagccatgctaaccggtgagccgatcccccagcagaaatctcagggcgatgcggtgcatgcgggtacggtggtacaggatggcagcgtgctgttccgcgccagcgccgttggcagccataccacactgtcacgcatcattcggatggtccgccaggcgcagagcagtaagccggaaattggtcagcttgccgataaaatctccgccatttttgtgccagtggtggtcggtattgccctgctgagcgcggcaatctggtatttcttcggcccggcgccgcagattgtctacaccctggtgatcgccaccacggtactgatcatcgcctgcccttgtgcccttggtctggccacgccgatgtcgattatctctggcgtcggacgcgccgccgaatttggcgtactggtccgtgatgctgacgccctgcaacgggcaagcacgctggacaccctcgtctttgacaaaaccggcacgctcaccgagggcaaaccgcaggtagtggccgttaataccattggctgtacggagacggatgccctgcgcctggccgccgcgctggaacaaggctccagtcacccgctggcgcgcgccatccttgagaaagccggtgatgcccgcctgccgcaggtaagcaacttccgcactctgcgcggtttaggggtcagcggtgaagcagaaggccatacgctgctgctgggtaaccaggcactgctaactgaacacggtgttgatacgtccgtgctggacgctgagctgaacgcgcaggcctctcagggcgcgacgccggttctgctggcgagggatggtcaggtggcggcgctgctggccgtacgcgatccgttacgccaggacagcgtggatgccttgcaacgcctgcaccatgcgggctatcgcctggtgatgttaaccggtgataacccgactaccgctaacgccatcgccagagaagccgggattgatgaggtgatagccggcgtgctgccggatggcaaagcggacgccatcaggaaattgcaacgtgatggtcgtcaggtggcgatggtgggcgacggcattaacgacgccccggcgctggcgcaggctgacgtaggtattgcgatgggcggcgggagcgatgtcgccattgaaaccgcggcgatcaccctgatgcgccacagcctgatgggcgtggcggatgcgctggcgatttcgaaagccacgttgcgcaacatgaagcagaacctgctgggggcgttcgtctataactcgctcggcattccgattgccgccgggattttgtggccgctgaccggcaccctgctgaacccggttgttgcgggtgcggcgatggcgctctcgtcaattaccgtggtgagcaacgctaaccgtctgctgcggtttaaaccgaaggattga

SEQ ID NO: 525734 - DNA, 795 bp, Stenotrophomonas maltophilia
atgggtctgtttaatcgtataaaaacatcgtttcgcgccctttttccccgccgttatgcctggcccggtatggatatttcgcttccgggtgggcagcaactgcacctggtgggaagcattcatatgggcacgcaggatatgtcccccctgccctccggcctgattaaactactgaagcgcgccgacgcgctgatcgtcgaagccgacatctccggccatgaatcgccgtttgccgggctggaaagcgaccgccccctggctgaacgtcttaacgagacgcagctggctgagcttacccgtcttgcggatgagtccggcgtctcgctctcaatgctcgacaccctgcccctgtggcaaattgccatggtgctacaggcaacccaggcgcagcgcctggggctgcgcggcgattacggtatcgattatcaactgctgaatgcggcaaaggcgtgcaacctgtccgtcattgaactggaaggcacggacagccagattgcgcttcttcgccagcttcctgatgacggcaagatgctactggatgataccctgacccactggcacaccaacgcgcgtctgctgcaaacgatgattggctggtggctggatgcgccgcccgcagacggtaagctggcgttaccgtcgacgttcagtgaatcgttgtatgatgtgctgatgaacgcgcgcaaccaggcgtggcgggagacgctgtatgccctgcctgccggtcgttatgttgtcgcggttggcgcgttgcatttgtacggagaagggaatttgccgtcgctgctgaaataa

SEQ ID NO: 525735 - DNA, 489 bp, Stenotrophomonas maltophilia
  misc_feature (416)..(425): n is a, c, g, or t
atgactcccgccgttaaattactcgaaaaaaacaaaatttctttccggatccacacctacgatcacgatccgaacgaaaccaactttggtgatgaagtggtgcgcaagctggggctgaacgcggaccaggtctacaaaacgctgctggtcgcggtgaatggcgatatgaagcacctcgccgtggcagtgacgcccgtcgccggacagcttgatctgaagaaagtggccaaagcgctgggagcgaaaaaggtcgatatggcagacccgatggttgcgcaacgcactacgggttatctggtcggcgggatcagcccgctcggccagaaaaagcgtctgccgaccctgatcgatgcgccttcgcaggaatttgagacgatctatatttctggcggcaaacgcgggctggatatcgaacnnnnnnnnnnggccgcaggcgatctggcgaaaatgctggacgcgaaatttgcggatattgcgcgcagggattga

SEQ ID NO: 525736 - DNA, 1653 bp, Stenotrophomonas maltophilia
atgaagttaataaagcgtggcgtcgcgctggcgctcatcgccgcatgggggctgacaagcctgcccgcgcaggcgtatgaaaaagataaaacctataaaattaccattctgcatactaacgatcatcacggccatttctggcgcagcgaatacggtgaatatggcctggcggcgcaaaaaacgctggtggacggcattcgtaaagaggtctcggctcagggcggcagcgtgctgttgctgtcgggcggggatattaataccggcgtaccggaatctgatttgcaggatgccgagcctgatttccgcggcatgaatttaattggttacgacgcgatggcggtcggaaaccacgagtttgataacccgctgagcgtattgcgccagcaggaaaagtggtccaaatttccgttcctttccgccaatatttatcagaaaagcaccggcgagcgcctgtttaaaccgtgggcgctgtttaagcgtcaggatcttaagatcgcggtcatcggcttaaccaccgacgatacggccaaaattggcaaccctgaatttttcaccgacatcgaattccgtaaaccggcggacgaagcgaagctggtgatccaggagttgcagcagaatgaaaaaccggatgtgattatcgctaccacccacatggggcattacgacaacggtcagcacggctctaacgcgccgggcgacgtggagatggcgcgcagccttcctgcgggctcgctggcgatgattgtgggcggtcactcacaggatccggtctgcatggcttctgagaataaaaagcaggtagattatgtgcccggcacgccgtgcgcgccggatcgtcagaacgggatctggattgtacaggcccacgagtggggtaaatacgtaggccgtgcggatttcgaattccgtaacggcgagatgaagctggtgcactatcagctcatcccggtcaacctgaagaagaaagtaacctacccggacggcaaaagcgagcgggtactctacacgccagagatcgctgaaaaccagcagatgctctccctgctgacgccgttccagagcaaagggaaagcgcagctggacgtgaagattggcacgcttaacggacgactggaaggggaccgcagcaaagtccgcttcgtacaaaccaacatggggcgtctggtgctggccgcgcagatggcgcgcacgaatgcggatttcggcgtgatgagcggcggcggtattcgtgattccatcgaaggcggaaacatcacctataaagacgtgctcaaagtgcagccgtttggcaacgtggtggtgtatgcggacatgagcgggaaagaggtaattgactacctgaccgccgtggcgcagatgaagccggactccggagcgtatccgcagtttgctaacgtcagcttcgtcgcgaaggacggtaagctcaacgatctcaaaatcaaaggcgaacctgttgatccggcgaaaacctaccgcctggcaacgttaagctttaacgccaccggcggcgacggctatccgcatatcgataacaaaccgggctatgtaaataccgggtttattgatgcggaagtgttaaagcagtttatccagcaaaattcaccgattgacgtgaacgcgtatgagccgaagggcgaggtgagctggcagtag

SEQ ID NO: 525737 - DNA, 1221 bp, Stenotrophomonas maltophilia
atggcaatcagtgaatcaacccagcctgttcagggcgttccggcgtcgccgccgaaatcgcgcacttccttcaaagtattaggcgcaatcagtctctctcatctgctcaacgacatgatccagtcgctgattctggcgatctacccgctgttgcagtctgagttctcattaaccttcgtgcagatcgggatgattaccctgaccttccagctggcctcttcgctgctacagccggtggtgggctactggacggacaaatacccgatgccatggtcgctgcccattgggatgtgcttcaccctgagcgggctggtgctgctggccatggcgggcagctttgaggcggtactggttgcagcggcgctggtaggaaccggttcatcggtgttccatccggaatcgtcccgcgtggcgcgtatggcctccggcggacgccacgggctggcgcagtctctgttccaggtgggggggaactttggtagctccctcggtcctctgctggcggcggtaattatcgcgccttacggcaaaggcaacgtggcgtggtttgtgctggccgcgctgctggcgattgtcgtcctggcgcaaatcagccgctggtatgccgcgcagcaccgcgtaaataagggaaaacctgtcgcgaagataaccaatccccttccgcgtaataaggtgatccttgccgtcagcgtgttgctggtgctgattttctcgaaatatttctatatggcgagcattagcagctattacaccttctatctgatgcaaaaattcggattatcggtacaaaacgcccagttccatctctttgccttcctgtttgcggtggcggcaggcacggtgattggcggccctgtgggagataaaatcggacgtaaatatgtgatttggggctctatcctcggcgttgcgccgtttacgcttgttttaccgtacgcaacgctggaatggaccggaatattgacagtgattattggttttattctcgcgtcggcgttttcagccattctggtctatgcgcaggagctgctgccgggacgtatcggtatggtttccggtctctttttcggttttgcctttggcatgggcggccttggcgccgccgtgttagggatggttgcagaccacaccagcatcttcctggtctataaaatctgcgctttcctgccacttctggggatgttgaccatattcctgcctgacaaccgtcataaagcgtaa

SEQ ID NO: 525738 - DNA, 1677 bp, Stenotrophomonas maltophilia
atgcaccacgccacaccgcttatcaccaccattgttggtggacttgtgctcgcttttatcctcggtatgattgccaacaaactgcgtatttcgcccctggtaggctatttgttagcgggcgtgctggcaggaccctttacgccgggttttgtcgcagataccaaacttgcaccggagctggcggaactgggcgttatcctgctgatgtttggcgtcggactgcatttttccctaaaggatctgatggcggtaaagtcgatcgccataccgggagcgatcgcccagataggggtggcgacgctgctgggcatggcgctttcggcggtgctgggctggtcaatcatgaccggtatcgtatttgggctgtgtctttcaaccgccagtaccgtggtgctgctgcgcgcgcttgaagagaggcagctgatagacagccagcgcgggcaaatcgcgattggctggctgatagttgaagatctggtgatggtgttgacgctggtactgctgcccgccgtcgccgggatgatggaaaaagagaatatcggcttcgcttcgctggcgctggatatgagcattaccatcggtaaggttgtggcgtttattgccatcatgatgctggtgggccgccgtctggtgccgtggatcatgtcccgcagcgccgccaccggctcgcgtgaactgttcacgctttcggtccttgcgctggcgctgggcattgcctttggcgctgtcgagctgtttgacgtctcctttgcgctgggcgcgttcttcgccgggatggtgctgaacgagtccgagctgagccaccgtgccgcgcacgatactctgccactacgtgatgcgttcgcggtgctgttctttgtctccgtcgggatgctgttcgacccgatgatcctcatccagcagccgctggccgtgctgggtacgctggcaatcatcatctttggtaagtccgttgccgccttcttcctggtgcggatgttcggtcactcgccgcgcacggcgctgaccatcgctgccagcctggcgcagattggcgagttcgcctttattctggctggtctggggatggccctgaacctgctgccacaggctgggcaaaatctggtgctggcgggggcgatcctctccatcatgttgaacccggtattgtttgccctgctggagaaatatctcgagaagaccgaaaccctcgaagagctgacgctggaagaggcgacagaagaagagaaacagatcccggtggatatctgcaaccacgcactgctggtcggttttggccgcgtcggcagcctgctgggtgaaaaactgatggctcagggcattccacttgtagtgattgaaacgtcacgcactcgcgtcgacgagcttcgcgagcgcggcatccgcgcggtgctgggcaacgcggctaacgaagagattatgaatctggcgcatctggactgcgctcgctggctgctgctcactatcccgaacggttacgaggctggcgagattgtcgccacagcccgtgaaaaatgcccgcatatcgaaatcatagcccgcgcccattatgatgacgaagtggagtacattaccgagcgcggcgcgaatcaggtggtgatgggtgagcgtgagattgcgaatacgatgctgacaatgctgacgaagccgccggttgaagaggcggtgacggggtaa

SEQ ID NO: 525739 - DNA, 336 bp, Stenotrophomonas maltophilia
atggaaactaccaagccttcgttccaggatgttctggagttcgtccgcctgttccgccgcaaaaacaagctacagcgcgaaatccaggacgtagagaagaagatccgtgacaaccagaaacgtgtcctgctgctggacaacctgagcgactacatcaagccaggtatgagcgttgaagccattcagggcatcatcgccagcatgaagagcgattatgaagatcgcgttgatgactacatcatcaaaaacgctgagctgtccaaagagcgtcgcgacatctccaaaaagctgaaagtgatgggcgaaatcaaaaacgtcgacgctaaaggcgagtaa

SEQ ID NO: 525740 - DNA, 1059 bp, Stenotrophomonas maltophilia
gtgcgccccgacaagtcattaaccccttttgaaattcggttatacaaacattatcgcgtggtgcacggttgccgcattgcgctggcgtttgtgctgaccttcgtactggttcgtttgctggatatcccggaaggaacgtggccgctgatcacgctggtggtggtgatggggccgatctcattctgggggaacgtggtccctcgcgctttcgaacgcataggtggtaccgttttaggctcggcgcttgggcttatcgccctgaagctggagctaatttcatttccgttcatgttgctgtggtgcgcggtggcgatgtttctttgcggatggctggccctcggaaagaaaccgtatcaggcgctgctgattggcattacgctcgccgttgtggtcggcgcaccggcgggcgatatgaccaccgcattgtggcgaagcggggacgtgatcctcggctcgttgctcgccatgctgtttaccggcatctggccgcagcgcgccttcctgcactggcgcattcagatggcaaactacgtcacggcatttaaccgggtctaccaggccgggttttcgccgaatctgattgagcgtccgcggctggaaaagcacctgcaaaaaatccttaatgatgtggtcaaaatgcgcgggttaattaccccggcaagcaaagagacgcatatccagaaagctatttttgaagccattcaaacggtcagccgtaatctggtctgtatgcttgaactgcaaatcaatgcccactgggcctcacgccccagccatcttctgatgctcaacgcgcatacgctgaaagagacgcagcagatgacgcaacagaccctgctgaccatcgctcatgcactttacgaaggtaacccacagccgatacgggcgaacagcgagcggctgaatgacatcgtcatcgagctcaaacagctgatgaatgagcgtcagggcgacaatgtgtcggaaacgcccatccacggctatgtctggctgagtatggagctggcgcgacagctggagttgttatcgcagctgatttgccgggcactgcgcaaataa

SEQ ID NO: 525741 - DNA, 474 bp, Stenotrophomonas maltophilia
atggactacagcatcaggcagcaacagaaacgtacgatcgctggctttcatctcgtgggaccgtgggaaaagacggtcaagcagggatttgaacagctggtcatgtgggtagatggacgacatattcagccgcaggagtgggtggccgtttattatgacaatccggatgacgtgccggcagaaaagcttcgctgcgttaccgccgtaacggtagcggacgatttcactatccctgataacagcgaaggggtaatgctgaccgaaattgctgccggagagtatgctattgccgccgcgcgcgtcgaaaatcatgatttcgccaccccatggtatcagttcttcaactccctgctggaagacagcaaattccagattgcgccaaaaccctgcttcgaacgctatctgaacgatggcaatgctgacggctactgggatattgagatgtttgtaccggtagagcacaaagtgggataa

SEQ ID NO: 525742 - DNA, 1044 bp, Stenotrophomonas maltophilia
atggattacaccacgggtcaaatcttaacggcgggcaacgaacatcagcagcgtaatccggcgagcctgaccaaactgatgacggggtacgttgtcgatcgtgccattgatagccaccgcatcagccccgatgacattgtgacggtcggaggtgacgcctgggcaaaaggcaacccggtctttgacggttcgtctctgatgtttctgaagcagggcgatcgggtttctgtgcgcgatctcagccgcggcctgattgttgattccggcaatgacgcctgcgtggcgctggcggatcacgtggcgggcggtcagccgcagttcgtcaggatgatgaatgactacgttgaaaagctgaacctgcgcgatacccacttcgaaaccgtacacgggctggatgcaccgggtcagcacagctccgcttacgatctcgccgtactttcccgggccatcatccacggcgagcctgagttctaccacatgtacagcgagaagagtctgacctggaacggcatcactcagcagaaccgcaacggcctgctgtgggataagaccatgaacgtggatggtctgaaaacgggacacacctcgggcgcgggctttaacctgatcgcctccgcagtggatggtcagcgtcgactgattgcggtggtgatgggggcagacagcccgaaaggacgtgaagatcaggcgcgcaagctgctccactggggacagcaaaatttcgatacggtgcagatcctgcataacggcaaaaaagtgggaaccgaacgcatctggtatggcgataaagagcagatcgcgctgggcacggatcaggatttctggctggcattacccaaaacggaagtgccgaacatcaaggcgaaatatgtaatggataaaaaagagctggaagcgccgatcgccgcgcatcagcgggtaggggagatccagctgtacgatcgtgacaaggtggtagcgcactggccattggttacgctggagcgcgttgaaaagggcggccttttctcccgcctcggcgattatctgcatcataaactctaa

SEQ ID NO: 525743 - DNA, 1437 bp, Stenotrophomonas maltophilia
atgagattactggtgtctgactctgccgcgcgcccgacttttttgttccacgattacgaaacctttggtacccatccggcgctggaccgaccggcgcagtttgcggctatccgaaccgatgacgaatttaacgttatcggcgaacccgaggtgttttactgcaagcccgccgatgactatctgccgcagccaggcgcggtgatggtgacgggcatcacgcctcaggaagcgcgggataaaggcgttagcgaagcagaatttgcccgtcgcatccacgacctgttcacggtgcccaatacctgcgtggtgggttacaacaacatccgttttgacgatgaagtgacgcgcaatatcttctaccgcaacttctacgatccctatgcctggagctggcagaaccgcaattcgcgctgggatttgctggatatcatgcgcgcctgctatgcgctgcgcccggagggaattaactggccggagaacgacgacggcttgccgagcttcaggctcgagcacctgacgcgggccaacggcatcgagcacagcaacgcccacgacgcgatggcagacgtctacgcgaccatcgctatggcgaagctcgtaaaaaccgcgcagcctcgcctgtttgagtatctgctgagccatcgcagcaagcaaaagctgatgacgctgattgacgtgccgcagatgaaaccgctggtgcatatttcagggatgttcggtgcgtggcgcgggaacacaagctgggtggcgccgcttgcctggcatccggacaaccgtaacgccgtcatcatggtggatcttgccggggatatctcgccgctgcttgagctcgacagcgacaccttacgtgaacggctctatacgccgaaagaggcgctgggtggcctgccagccgtaccggtaaaactggtgcacatcaataaatgcccggtgcttgcgcaggccaacacgctgcgcccggaagacgccgaccggctggggattaaccgtcagcactgcctcgataacctgaaagtgctgcgcgacaacccgcaggtgcgcgagaaagtcgtcgcaatttttgccgaagcagagccgttcgtgccgtctgataatgtggatgcgcagctttataacggcttcttcagcgatgccgatcgcgcagcgatgaacatcgtgctgcaaaccgacccgcgtaacctgcccgcgctggatatcaccttcgcagataagcgcattgagaagctgatgttcaattatcgcgcgcgtaactatcccggctcgctggatgaagcagagcaggagcgctggttacagcatcggcgcaacgtgtttacgccggagtttcttaatagctacgcccaggagctggagatgctttacggccagtatgaaggggatgctgagaaacaggcgctgctgaaagcgctgttccagtacgcgcaagaaattgtctga

SEQ ID NO: 525744 - DNA, 1359 bp, Stenotrophomonas maltophilia
atgtcgcataacgcaactccaaacacctctcgcgtggaattacgtaaaacgcttacgttgattccggttgttatgatgggccttgcctatatgcaaccgatgacgctgttcgatacattcggtatcgtatcaggccttactgacggtcacgttgcaacggcgtacgcctttgcactggtcgccattctctttacagcgctgagctacggtaaactggttcgccgtttcccgtccgcaggctctgcgtacacctatgctcagaaatccattagcccggctgttggctttatggtgggctggtcatcactgctggactacctgttcatgccgatgatcaacattctgctggcaaaaatttacttcgaagcgctggtaccttccgtaccgtcgtggatcttcgttgtggcgctggtggcctttatgaccatctctaacctgcgcagcatcaagaccgtggctaacttcaacaccctgatcgtgatccttcagatggggattgttgcggttatcgttgggctgatcatctacggcgtttcccacggtgaaggcgcaggtacgctgaccagcacccgtccgttctggtctgaaggtgcgcacgttgtgccgatgatcaccggggcgactatcctgtgcttctcgttcctgggcttcgacggtatctcttctctgtctgaagagaccaaagacgttgagcgcgtgatcccgaaagcgattttcctgaccgcgctgattggcggcctgatcttcatcggtgcgtcttatttcttacagctgtacttcccggatatctctcgctttaaagatccggatgcatcgcagcctgaaatcatgctgtacgtggcgggtaaaaccttccagtggggcgtgctgatcttctccagcgtcaccgtactggcatccggtatggcagcgcacgcgggcgtttctcgtctgatgtacgtgatgggccgtgacggtgtgttcccaactcgcttctttggttacgtgcatccgaaatggcgtaccccggcgtggaacgtgctgctggtgggcgcaattgccctgctggcaatcaagttcgacctggtaacggccactgcgctgattaactttggtgcgctggtggcgttcaccttcgttaacctctccgtgatttcgcagttctggatccgtgagaagcgcaacaagacgctgaaggaccacatcaactatctggtgctgccagtgtgtggtgccctgacggtgggcgccctgtggatcaacctggaagagagctcaatggttctgggtctgatctggggtgcaatcggtctgatttacctggcttgcgtaacgaagagcttccgcaacccggttcctcagtacgaagacgtcgcgtaa

SEQ ID NO: 525745 - DNA, 930 bp, Stenotrophomonas maltophilia
atgaaaccgctgctggatgttcttgttattctggatgcgctggaaaaagaggggagctttgccgccgcctcggcgaagctctataaaaccccttcggctctgagctacaccgtgcaaaagctcgagagcgatcttaatattcaaattcttgaccgcactggccatcgcgcgcgtttcacccgtactgggcagatgctgctggaaaaagggcgtgacgtgctgcatacggttcgcgagctggaaaaacaggccgtcaaacttcatcagggctgggaaaatgagctggtgattggggttgatgatactttccctttttcgctgcttaccccgcttattgaggcgttctatcagcgccatagcgtcacgcggctggtttttatcaacggcgtgctgggcggctcgtgggacgccttaacgcagggcagggcggatatcatcgttggagcgctgcatgagcctcctcaactgagtgaatttggtttcgcccggctgggcgttctggagcagatctttgccgttgcgcctcaccacccgctggcgaatgaaccggagcctgtttcaagacgcgtcattaaaaaccatcgcgccattgtggtgggagacagctcccgccccgagtgcggcatttcatcgcagcttctggatgagcaggaggccatcaccgtttttgattttaaaaccaagctggaactgcaaataagcggcctggggtgcggctaccttccccgttatttagcacagcgctttattgaaagcggcgcgctggtggaaaaacaggttttagcgcagagcagtaacgaatcggtatgggtgggctggaatgaacagaccgccgggcttgccagcgcctggtggcgagacgaaattttagcaaatagtgctatcgcgacagtttacactcaggcagatgatgggaaatcaaccagttag

SEQ ID NO: 525746 - DNA, 825 bp, Stenotrophomonas maltophilia
atgaaaaaggtcgcgattgtcggattagggtggttaggaatgccactggcgatgtcattagccgcgaaaggctggcaggtgacagggagtaagaccacgcgggacggggttgaggcggcgcgcatgtgcggcattgatggtgtcgagctgcgtctcgaacccgagcttatctgcgataccgacgagctggatgaactgatgaatgtggacgcgctggtcattaccttaccagcgcggcgcagcgggccgggcgagacgttttacctgcaggcggtgcaggagattgtcgacagcgccctggcgcaccatattccgcgtatcattttcaccagctcgacctccgtctatggcgatatcgacggtacggcgaaagaaaacaccgagcgccgtccggtaaccgccagcggacaggtactgaaagagctggaagactggctgcacaatctgcctggcacgcaggtggatattttacgcctcgccgggctggtggggccggggcgtcatccgggacgcttctttgccggtaaatccgcgccggatggtcagcacggcgttaaccttgtacaccttgaagatgttatcggtgcgatagagctgcttttacaggctccgaaaggggggcacatctataatatatgtgcgccttcgcatccgccacgcagcaccttttatccgctgatggcgcgccagctgggtctggcgccgccggtgttcagtgaggcgcagggggagcgcaaaggcaaaattattgatggcaatcgtatttgccatgaactgggatttgaatatcagtatcccgatccgctggttatgcccatggaataa

SEQ ID NO: 525747 - DNA, 900 bp, Stenotrophomonas maltophilia
atgttagataactcacgtttacgcatagctattcaaaaatcaggccgtttaagcgatgattcacgcgaactgctggcccgctgcgggattaaaatcaacctgcacacccagcgcctgatcgccctggctgaaaatatgccgatcgacattctgcgcgtacgtgatgacgatattccgggcctggtcatggatggcgtcgttgacctcggcatcatcggcgaaaacgtactggaagaagagttattaacccgccgcgcgcagggcgaagatccgcgctactttaccctgcgtcgtctggacttcggcggctgccgcctgtcgctggccacgccggttgatgaagcctgggatggcccggccgcgctgaacggcaaacgtatcgccacctcttaccctcacctgctgaagcgttacctcgatcaaaaaggcgtgcagtttaaatcttgtctgctgaatggctctgttgaagtggcgccacgcgcgggcctggccgatgccatctgtgacctcgtctccaccggcgccacgctggaagccaacggcctgcgcgaagtggaggtgatctaccgctccaaagcgtgccttatccagcgcgacggcgagatggccgatgccaaacagcagctcatcgacaagctgctgacccgtattcagggcgtgattcaggcgcgtgaatccaaatacatcatgatgcacgcgcctaccgagcgcctggacgaagtgattgccctgctgccaggtgctgagcgcccaaccattctgccgctggcgggcgaccagcagcgcgtggcgatgcacatggtcagcagcgaaaccctgttctgggaaacgatggaaaaactgaaggcgctgggcgcgagttctattctggtgctgccaattgagaagatgatggagtaa

SEQ ID NO: 525748 - DNA, 1305 bp, Stenotrophomonas maltophilia
atgagctttaacacaatcatcgactggaatacctatagcgacgcgcaacagcgtgagctgctgatgcgcccggcaatttccgcctcggagagcatcacccgcaccgtggcggagatcctcgataacgtcaaagcccgcggagacgacgcgctgcgtgagtacagcgcgaagtttgataaaactgaggtcgacgcgttacaggtcaccgcacaggagatcgccggggcggaaagccgccttggggatgagatcaaacaggcgatggccgtcgcggtgaaaaatattgataccttccacaccgcgcagaaattgcaggcggtggatgtggaaaccctgcccggcgtgcgctgccagcaggtgacgcgcccggtggcgtccgttggcctctatattcctggcggctctgccccgctgttttcgaccgtcctgatgctggccactccggcacgtattgccggttgtcagaaggtggtgctctgctctccgcctccgatcgccgatgagatcctgtatgcggcgaagctgtgcggcgtgcaggcgatctataaagtgggcggcgcgcaggcgatttccgccctggcgttcgggacggagtctgttcccaaagtcgacaaaatctttggcccgggtaacgcatacgttaccgaagcgaagcgccaggtcagtcagcgtctggacggcgcggcgattgatatgcctgccggtccgtctgaagtgctggtgattgccgacagcggcgctacaccggatttcgtggcctctgacctgctctcgcaggccgagcacggccctgactcgcaggtgattttactgacgccagatgccgacatggcaaaacgcgtgggcgatgccgttgagcgtcagctggccgacctgccgcgtgcggaaacggcgcgtcaggcgctatcggccagccgactgattgtggctcgcgatatcgaccagtgcatcgccatctccaaccagtacggtcctgagcacctgatcattcagacccgcaacgcgcgcgatctggtcgacagcataaccagcgcaggctcggtgttcctcggggactggtcaccggaatccgccggggattacgcctccggcaccaaccacgtgctgcccacgtatggctatacctcaacctgctccagcctggggctggcagatttccagaagcgcatgaccgtgcaggaactctcccgcgagggatttgcctcgctggcgtcgaccatcgaaaccctggccgccgccgagcgcctgactgcccacaaaaatgccgtgacgctgcgcgttgccgccctgaaggagcaagcatga

SEQ ID NO: 525749 - DNA, 1062 bp, Stenotrophomonas maltophilia
atgaacatcgaagaattagcccgcgaaaatgtccgtcgcctgacgccctatcagtctgcgcgtcgtctcggcgggaacggcgacgtctggctgaatgccaacgaataccccacggcggtggcctttgagctctcgcagcagacgctgaaccgctacccggagtgtcagccgaaagcggtgatcgagaactatgcgcagtatgcaggcgtgaagcctgagcaggtgctggtcagccgtggggctgatgaagggattgagctgctgatccgcgccttctgcgaaccgggtaaagacgcggtgatgtactgccagcccacctacgggatgtacagcgtcagcgccgaaacctttggcgtggcctgccgcaacgtacaggcgctcgacaactggcagctggatttgcagggcatcgccgataaccttgacggcgtgaaggtagtgtttgtctgtagcccgaacaaccccaccgggcagattatcaatccgcaggatatccgttccctgctggaaatgacgcgaggcaaagcgctggttgtggccgacgaagcctacattgagttctgcccgcaggcgacactggcaggctggcttgaagagtatccgcatctcgttgtgctgcgcactctgtccaaagcgttcgctctcgccggtcttcgctgcggttttacgctggcaaataaagcggttatcgacctgctgctgaaagtgatcgccccgtatccgctctcaacgccggttgccgatattgcggcacaggcgctggccccgcagggcatcagcgcgatgcgcgagcgtgtggcgcagatcctggaggagcgtcagtatctagtcgatgccctgaaaacgattccgtgcgtggagcaggtgttcgactcggagaccaactacatcctggtgcgcttcaccgcctcaagcgcgatatttaaatcgttgtgggatcagggcattatcttacgagaccagaataaacaacctaccctgagcggctgcctgcgtattaccgtcggcacccgcgcggagagccagcgcgtgattgacgccctgaaagcggagaaagtatga

SEQ ID NO: 525750 - DNA, 1068 bp, Stenotrophomonas maltophilia
atgagtcagaagtatctctttatcgatcgtgacggcaccatcatctcggagccacccagcgattttcaggtcgatcgtttcgacaagctggcgtttgaacccgacgtgatcccggtgctactgaagcttcagaaagcaggctataagctggtgatgatcaccaaccaggacggtctgggcacagacagcttcccgcaggtggactttgacggcccgcacaacctgatgatgcaggtgctgacctcgcagggcatcgccttcgacgaggtgctgatctgcccgcacatgcctgccgacgagtgcgactgccgcaagccaaaagtgaagcttgttgaacgttatctggcggaagaggcgctggataaagcgaacagctatgtgattggcgatcgcgtcacggatatcacgctggccgaaaatatgggcattgcaggcctgcgctataaccgcgacacgctaaactgggcgatgattagcgagcagctcaccagacgcgaccgctattcccacgttgaacgcaacaccaaagagacgcagatcgacgtgaaggtctggctcgaccgcgaaggcggcagcaagatccacaccggcgtcggtttctttgaccacatgctggatcaaatcgccacgcacggcggcttccgtatggagatcacggttaagggcgacctgtatatcgacgatcaccacaccgtggaagataccggcctggcgttgggcgaagccctgaagctggcgcttggcgacaagcgcggcatcaaccgcttcggctttgttctgccgatggacgagtgcctggcgcgctgcgcgatggatatctccgggcgtccgcacctggaatataaagccgacttcacctaccagcgcgtgggcgatctcagcaccgagatggtggagcacttcttccgctcgctttcttacactatgggcctgacgctgcacctgaaaaccaaaggcaaaaacgatcaccaccgcgtcgagagcctgttcaaagcctttggccgtaccctgcgccaggcgatccgcgtggaaggtgacgcccttccctcgtcgaaaggagtgctgtaa

SEQ ID NO: 525751 - DNA, 591 bp, Stenotrophomonas maltophilia
atgaacgtggtgattctggacaccggatgcgccaacctgaactccgtacagtcggcgattatgcgccacggctacgagccggtggtaagccgcgacccggacgtggtgctgcgcgcggataaactctttctgccgggtgtaggcaccgcccaggcggcgatggatcagatccacgagcgcgagctggtggatctcatcaaagcctgtactcaaccggtgctgggcatttgcctcggcatgcagctgcttggccgccgcagcgaagagagcaacggcgtcgatctgctgggcattatagaagaagacgtgccgaaaatgaccgaccacggcctgccgctgccgcacatgggctggaatcgcgtttatccgaaagcgggcaacaggctgttccagggaatcgaagacggcgcgtacttctacttcgtccacagctacgccatgcccgtgaatacctacaccatcgcccagtgcaattacggcgaggcgttcaccgccgccgtgcagaaagataacttttacggcgtgcagtttcacccggaacgctccggtgccgccggtgcgcaactgctgaaaaatttcctggagatgtga

SEQ ID NO: 525752 - DNA, 738 bp, Stenotrophomonas maltophilia
atgataattcccgctttagatttaattgacggcacggttgttcgtctccaccagggcgattacgggcagcagcgcgactacggcaacgacccgctgccgcggttacaggcttacgccgccgagggcgctgaggtgctgcatctggtcgatctgaccggcgcgaaagatccggcgaagcgccagatcccgctgcttaaaacactggtggctggcgtggacgtcccggtgcaggtgggcggcggcgtgcgtacggaagccgatgttgccgccttactggacgcgggcgtggcgcgcgtggtggtcggttcgaccgctgtgaaagatcctgaaagtgtcaagggctggttccgccgcttcggcgcggatgcgctggtgctggcgctggatgtgcgcattgacgagcagggtaataagcaggtcgcggtcagcggctggcaggaaaactccggcgtaacgctggaagagctggtcgggatgtatctcccggtagggctgaagcatgtgctgtgcacggatatttcacgcgatggtacgctcgcaggatctaacgtctcgctgtatgaagaggtttgcgcacgttatccgcaggtggcgtttcagtcctctggcggtatcggcgacctggcggatatcgccgctctgcgcggaaccggtgtacgcggcgtgatcgtgggtcgcgcgctgctggaaggcaaatttacggtgaaggaggcgattcaatgctggcaaaacggataa

SEQ ID NO: 525753 - DNA, 777 bp, Stenotrophomonas maltophilia
atgctggcaaaacggataattccctgcctggacgtgcgtgatggtcaggttgtaaaaggcgtgcagttccgcaaccatgagatcattggtgacatcgttccgctggcaaaacgctatgccgaagaaggcgcagacgaactggtattttacgatatcaccgcctccagcgatggccgcgtggtggacaaaagctgggtggcgcgcgtggcggaagtgattgatatacccttctgcgtggcgggcgggattaaatctgctgacgatgcggcgaaaattctctctttcggagcggataaaatttccattaactcccctgccctggccgacccggagctgattacgcgtctggcggatcgctttggcgtgcagtgcattgtcgtggggatcgacacctggtttgatgccgcaacgggcaaatatcacgttaaccagtacaccggcgacgaaagccgcacgcgcgtcacccaatgggagacgctggactgggtgcaggaagtgcaaaaacgcggtgcgggtgaaatcgttctgaacatgatgaaccaggacggcgttcgtaacggttacgacctcgagcagctgaaaaaagtgcgcgcggtgtgccaggttccgctgattgcctccggcggcgcgggcaccatggaacactttcttgaagccttccgcgatgcgaacgtggacggcgcgctggccgcttccgtctttcacacacagattatcaatattggtgagttaaaaacgtacctggccgaccagggcgtggagatcagggtatgttaa

SEQ ID NO: 525754 - DNA, 612 bp, Stenotrophomonas maltophilia
atgttaacagagcaacaacaggcgcagctggactgggaaaaaactgacggattactgccggtggttgtacagcatgccgtttcaggcgaagtgctgatgctgggatacatgaaccaggaggcactggcaaaaacgctcgacagcggcaaggtgacgtttttctcgcgcaccaagcagcgtctgtggacgaaaggggaaacctcgggtcacttcctgaatgtggtcagcattacgcctgactgcgacaacgacaccctgctggtgctggtcaacccgattgggccgacctgccacaaaggcaccagtagctgcttcggcgaggcgagccatcagtggctgttcctctatcagctggaacagctgctggcagagcgtaaatcagcggatcccgagagctcgtacacggcgaagctgtacgccagcggcaccaagcgtattgcgcagaaagtgggtgaagaaggcgttgaaacggcgctggcggctaccgtgcatgatcgggaggagctgacgaacgaagcgtcggatttgatgtatcacctgctggtgctgcttcaggatcaggagctggatttaacgacggtgattgagaatttgcggaaacggcataaataa

SEQ ID NO: 525755 - DNA, 1332 bp, Stenotrophomonas maltophilia
atggaactgtcccaggccctcggcattattaatcttaccgcccccgaagaggtccagagccttgccgaccttcttccccacgacctcattcagcaggctttttccctgactgatacagtgactctgcgtaaacgtaaactcccgctcgaatccatggtctggctggttatcggcatggcgattttcaacaacaaacctctctctcatatcgtcaacctgatggatatcgttgaccgcaccggaaggtcatttactgcccccagctccgttatcgcccgccgtaaaacactgggcgaggatgctatccgggagttgtttaaccttacgcaacagcactggcacaaggaagcccggcatccgctctggcatggactgacgctgaatgccgttgatggtgtggtctggcgaacgccggacacaccggaaaacgctgctgccttcgcaaaagcggaaaaccagcatggcgaaaagggcttcccgcaggttcgtatggtgtgtctgatggaactgagcagccatctgctgcgtgccagtgtaatgggccggtatgacgttaatgaaatgcgcctggcagcagggctgactgaacaggtaccggataacagcgtgacgctgttcgaccgggggttctggtcagccggtctgctggataactggcaccgggccggagaaaaccgtcactggctgctgccgctgaaaaaaggcacgcagtatgaagtggttcgcaggctgggtaaacaggatgcgctgataaccctgaatacttccccgcaggccagaaagcagtgggaaggactgccggatacgctcacagtccggctggtgagccgtaaggtaaacggcgtggagcgacaggttgtcacgtcaatgacagatgccatgcgttacccggcggcagacatagcggaactgtataaacaccggtgggaaatagagctggggtaccgtgaagcaaaacagtatctgtgcggcaaccgctggacactgagaagtaagttaccggagatggtaaggcaggagttgtggggaatactgctgacctacaatctggtgcggtatcagatggtaaaaatggcgttcagcctgaaaggtgactatctgccgtatcagctgagcttcagcggctcactggcagagataatgcggttgttaatcgggctgccatggtcatcaccgggcgcagtaccggggcatctgaagcacttctacagtaatgcggcaatgctgaaactgccactgaggagggagcgggaatatgaaagggaaatcaggcagaaaaatcaaaatatccctttaaaaacaatgctggtcaccttaagtgaccagcattag

SEQ ID NO: 525756 - DNA, 981 bp, Stenotrophomonas maltophilia
atgacgcagaacaacgatagcctggtcaatcgcagcaatgacccggagcaaattgatttacttgatgtaatgctacagctgtggcgtggtaagtgggtaataggggcttttattgctgcttttatcgttcttgctggcgtttacatcactgtagccaaagagaaatggacgtcatcagccatcatagcccagcctgatgcggcacaaatcgccacctattccaatgcattgaatatcctctatggcggggcagctccctccatgttagacattcagaatcgtgctattggacgtttcaattcctccttctcggcattagctcaggcgctggagaatcaggaagatccggaaaaactgactattgagcctacggttaaaggacaaagtttgcctttaaccgtaagctatcagggcgaatccgctgaagcagctcaaaagcaattagctcagtacattcagcaggttgacgagcagacggcaaaagaactgacgcttgatctcagagataacctcaagcagcagatcacaaccctgaacgactccctccagaatcaggagaaagttgctcaggagcagaaagatctacgcatcaagcagattactgaggcgctgaagaacgcagaagccgctaagatcaccactccgcagcttcaacagactcaggatgttactcaggaaaccatgttcctgttgggtaccgtagcgctcaaatcaatggttgataacgaagcgtctcgcccgctggtcttctcaggcgcttactaccaaaccaaacaaaatttactggatattcagaacctcaacgttaacccagacactattcacgtctatcgttacgtcatgaagccgaacctgcctatccgacgcgacagcccgaaaagtgctattacccttatccttgccgtactgctcggcggaattatcggttctggtgtcgtcctcggccgtaacgcgctgagaaactacaagccacgagcctga

SEQ ID NO: 525757 - DNA, 930 bp, Stenotrophomonas maltophilia
atgaaatttctggtaacgggcgcggcgggctttatcggttctcatgtcagcaagcgcctgcttgatgcagggcatgaagttgttgggattgataatctgaatgattactatgaccctaacctcaagctcgctcgcctcgaactgctcaaatccgggagtttcaccttccacaagctggacttagcggaccgcgagagcatggctgcgctcttcgccaatgaaaaatttgaccgcgtgatccatcttgccgcacaggcgggctgtcgccacaacaaggttcagcatctcctttatgcgtcatccagctctgtctacggcctcaaccgtaagatgccgttttctactgacgactccgtggaccacccggtatccctgtatgcggcaaccaaaaaagccaatgagctgatgtcgcatacctattcgcatctgtataacctgccgaccactggcctgcgcttttttaccgtctatggcccgtggggccgaccggacatggcgctgttcaaattcaccaaggccatgattgaaggcaacagcatcgacgtatacaactacggcaagatgaagcgcgacttcacctatatcgatgatattgcggaggcgattattcgcctacaggacgttattcctcaggccgatgccgactggacggtcgaaaccggttcgccagcaaccagctctgccccgtatcgcgtgtataacatcggtaacagttcacctgtcgaactgatggattacatcaccgcgcttgaagaggcgctgggcaaagaagcggtaaaaaatatgatgccgatccagccgggggacgtgctggagaccagtgcggacaccaaagcgctgtatgacgttattgggtttaaaccacaaacctcagtcaaagaaggcgtgaaaaacttcgtcgactggtaccgcaacttctataacgtttaa

SEQ ID NO: 525758 - DNA, 1170 bp, Stenotrophomonas maltophilia
atgctggagttgttgtttctgcttttgcctgtcgccgcagcctatggctggtatatgggccgcagaagcgcgcaacaaacaaaacaggatgaagcaaaccgactctcccgtgactacgttgcgggggtgaacttcctgctgagcaatcagcaggataaagcggtcgatctgttcctcgacatgctcaaagaggataccggcaccgtagaggcgcatctcaccctgggaaacttgttccgctcgcgcggagaggttgaccgtgccattcgtatccaccagaccctgatggaaagcgcttcgttgacctatgagcaacggttgctggccgttcagcagcttggacgggattacatggccgcggggctttacgatcgcgccgaggatatgttctctcagctggtggatgagaccgatttccgtatcggtgcgcttcagcaacttctgcaaatctaccaggcaaccagcgactggcaaaaagcgattgataccgccgaacggctggtcaaactcggcaaagacaaacagcgcgtcgaaattgcccatttttactgcgagcttgcccttcagcaaatgggtagcgatgacatggataaggccatggcattgctaaaaaaaggcgccgcggccgatcgcaacagcgcccgcatctcgataatgatggggcgggtctttatggctaatggtgattacgccaaagccgtggaaagcctgcttcgcgttatcgatcaggacaaagagctggtcagcgaaacgctggaaatgctgcaaacctgctatcagcagttaggtaagcaggatgagtgggttgcattcctgcgccgctgtgttgaagaaaacaccggtgccacagccgagctgatgctgtcggatgtcgtcgaagagcacgaagggagtgataccgcccaggtatacattacccgtcagttgcagcgccatccgacgatgcgcgtcttccacaagctgatggattatcatcttaacgatgcagaagaagggcgcgctaaagagagcctgatggtgctgcgagacatggtcggtgaacaggtgcggagcaagccgcgctatcgctgccagaaatgcggcttcaccgcctattcgctctactggcattgcccttcctgccgggcctggtccaccatcaagccaattcgtggtctggacgggcagtga

SEQ ID NO: 525759 - DNA, 738 bp, Stenotrophomonas maltophilia
atgacgtctgttacttcctccacttcccgcgtagttaccgattctcctgtagttgttgctctggattacaataaccgtgacgccgcactggcctttgttgatggtattgatccccgggattgccgtcttaaagtaggcaaagagatgtttacgctgttcggtccgcaaatcgtccgcgatctgcaccagcgtggtttcgacgttttcctcgacctgaaattccacgatattccgaataccactgcccacgccgttgctgcggcggctgaactgggtgtgtggatggttaacgttcatgcctccggtggggcacgtatgatgacggctgcgcgcgaagcgctggtgccgtttggcaatgacgctccgcttcttatcgccgtcaccgtgctgaccagtatggatgaatctgaccttcgtgacctgggtgtgacgttgtcacctgccgaacatgcggagcgtctggcgcgcctcacgcaacagtgtgggcttgatggcgtggtctgttcagctcaggaggcggttcgcttcaaatctgagttaggccgcgaatttaaactggtgacgccaggtatccgtccggcaggcagcgagtcaggggatcagcgacgcatcatgacgccagagcaggcgctgagcgcgggggtagactatatggtaattggtcgcccggtgacgaaatccgcttatccggcagagactctgaaagcgattaatgcatcactgaaaaagggggcataa

SEQ ID NO: 525760 - DNA, 327 bp, Stenotrophomonas maltophilia
atgcgtgatgccaacactcgtctggtctattcaacagataccgggcgcattgaagagccaaaagagaaagttgaacgtccgaaaggcgatggaatcgtgcgtattcagcgccagaccagtggcagaaaagggaaaggcgtttgccttgtcaccggcattgatctggatgatgcagagctggtaaagctcgccgctgagcttaaaaagaagtgcggatgcggtggggcagtaaaagacggcataattgagattcagggcgataagcgggatttaattaaaacgctgctggaagccaaaggtatgaaagtcaaactggcgggcggttaa

SEQ ID NO: 525761 - DNA, 219 bp, Stenotrophomonas maltophilia
atgacctttaccagcaaaaaattagccgccgctgttctggcaatcactgtagcaatgtctctgagcgcttgctctaactggtctaaacgtgaccgtaacaccgcgattggtgccggtgctggtgcgcttggtggtgcagtattaacggatggtagtacgctgggtacattaggtggtgctgccgtaggtggtattatcggtcaccaggtgggcaaataa

SEQ ID NO: 525762 - DNA, 753 bp, Stenotrophomonas maltophilia
atgaattcccgacaacaaatcattttgcagatggtgatcgatcagggacgcgtaagcgtagtcgatctcgctaaagctaccggcgtttctgaagtcaccattcgtcaggatctgaatcttctggaaaaacagagctacctgcggcgtgcgcacggatatgccgttccactggacagcgaggacgttgaaacccgcatgatgaacaattttgcgctcaagcgggaactggcggagtttgctgcatccttagtgaataacggtgagaccgtctttattgaaaatggcagcagtaacgcccttctggcgcgcacgcttgccgatcaaaaagacgttaccatcattaccgtaagcagctatatcgcccatctgttgaaggaaactcgctgcgaggtcattctgctgggcggcatttaccagaagaaaagcgaaagcatggtggggccattaacgcgtcaatatgttcagcaggttcacttcagtaaggcattcattggcattgacggctggcagcccgacaccggctttaccggtcgcgacatgatgcgttcagacgtggtgaacgccgtactcgccaaagagtgtgaagcgattgtgctgaccgatagctctaagtttggcgccgtacacccttatacgatgggtccggcttcgcgcttcagccgtgtgatcacggatgagcgtttacgcgatgaatatcgccagcaattagaacaagacggcctgactgtcgatattgtgaaaaaaacggcctga

SEQ ID NO: 525763 - DNA, 183 bp, Stenotrophomonas maltophilia
atgtctaacattgatgcaacagccgtggcacagcgtattgatactgtgctggatattcttgtcgcgggcgattatcactctgctatccgtaatcttgagatcctcaagtctgaactgctggctgagaacggcactgataacgcatcagaatccactcaaccaaaagccccgtgggaagtgtaa

SEQ ID NO: 525764 - DNA, 870 bp, Stenotrophomonas maltophilia
atgacagttatcaaccagacaacctgcacattgtttactgatgctgaacgattcactcaacttgcggcttattatgaggccgaacggcgcacggtgtggatgatgttacgtgccacgccacggccttgcttcaatcatgcgctgatcgaggagatcatgaatctctcctggctggttcgccagtccggatatgtcgttgatttttgggtcaccggatcgctggtccctgacatctacaataccggcggtgatttacaattcttcgttgagtgcatcaaaaacaaccgacgcgaagcgttacgcgcctatgcccgggcctgtgtggactgcgttcatgccgcctcgcgagggtttgataccggtgctgtcacgctggcgatggttgaaggaagcgcgttagggggcgggtttgaagccgcgctggcgcatcatttcattttggcccagcgcgatgcccgattaggctttccggaaatcgcgttcaatctattcccgggcatgggcggttattcactggtggcgcgtcgtgccggcatgaaaatggcagaggcgctgatctataaaggtgagtcgcatacggcggaatggtatgaacagcatggtcttgtggatctcttattcgagccgttacagagctatgtttcggtacggacgtttatcgacacgctacagccgaagctgaacggcgtaagggccatgctgcgcgcgcgtacgcgtgtcctgccacttccgcgaagcgagttgatggacattacagaggattgggtggatgccgccttctgccttgaaccgaaggatatcgcctacatggagcggctggttatgctgcaaaatcgccatcaggcgacgggcttacgcaaagccagctaa

SEQ ID NO: 525765 - DNA, 1989 bp, Stenotrophomonas maltophilia
atggacgatctggagcagaatttgctgtttcgttacatgggtacgcatagcccctggtggcgactaacagcagacagcaatgctctgcatcttgctgccagtgaaagcgctgacatcgttcaggtggttgcgctggacgatgagcaggctgctctgattcgccagctcaccgttatcaccgccagcattgccatgacccttcccttgtatggtttggacgttcccgtccatcttgtcggtcgtaaaattaacaaaaatgagtgggcgggaacggcatcagcatggaacgacacgccttccgtggcgcgcgatctggcgcagggactctccttcgccgaacaggtggtgtccgaagctaactccgtaattgtcatcctcgaccagaacgggaatattcagcgcttcaaccgtttaagtgaagaatatacgggcctgaaggaacaggaagtcatcgggcaaaacgtgtttaaactgttcatgagccgcagcgaagccgcggcctcaaaacgcaacatcaccggtttttttcgtaacggcagctcctacgaagtcgaacgctggatcaagacccgcaaggggcaacgcctgtttctcttcagaaataaattcgttcacagcggcagcgggaaaaatgaaattttcctcatctgttcgggtaccgacatcacggaagagcgtcgggcccaggagcgcctgcgcgttctcgccaatacggatacgattaccggtttgcctaaccgaaatgccatccatgagctgatctccgacgccatcacctcccggggtgaaacgcaggtgggcgtggtttatctcgatctggataactttaaaaaagtgaacgatgcctatgggcatatgtttggcgaccagctgctacaggccgttgcgctggcgatcctgagttgcctggacgacggacaaaccctggcgcgcctgggtggggatgagtttatcgtgatggccaccgatacctcgcagggcgcgctggaagctatggcgtcgcgcattctgacccgactgcggcagcctttccgcatcgggctgattgaggtttacaccggctgctcgcttggtatcgcgcttgcgccccagcacggtaacgatcgggaaagcgtcattcgcaatgccgacaccgccatgtacaccgccaaggaaaatggccggggtaaattctgcgtcttctcgccagagatgaaccagcgcgtatttgaatatctgtggctggataccaacctgcgtaaagcgctggataacgatcagctgttaattcactaccagccaaaaatgacctggcgcggcgaagtcagaagtctggaggcgctggtgcgctggcagtcaccagagcgtggcctgatcccgccgatggaatttatctcctatgcggaagagtcagggctgatagtgccccttggccgctgggttatgctcgatgtggtgcgccaggtggcaaaatggcgcgacaaagggatcaacctgcgcgtcgcggtcaacgtttccgcccgtcagctggcggaccagaccatcttcagtgacctgaagcaggcgctgaaagacctgaattttgaatactgcccgattgacgtggaattgaccgaaagctgtctcatcgaaaatgaagagctggccctgtcagtgatccagcaatttagccgcctggggtcgcaaattcaccttgatgactttggtacggggtactcttccctgtcgcagctggcgcgcttccctatcgacgccatcaagcttgaccagtccttcgtccgggatatccataagcagtccatttcacagtcgctcgtgcgcgcgatagtcgccgtggcacaggcgttgaatctgcaggtcattgctgaaggggtagagagtgcaaaagaagacgcctttctgacgaagaatggcgtcaacgaacggcagggttatctttttgctaagcccatgcccgcagccgcattcgagcgatggctaaagcgctatcaggccaggaatgtccgttag

SEQ ID NO: 525766 - DNA, 1935 bp, Stenotrophomonas maltophilia
atgtttcaggacaacccgctgctagcgcagcttaaacagcaactgcattcccagacgccccgtgcagaaggggtcgtaaaagccacggaaaagggctttggctttcttgaagttgacggacagaagagctacttcattccgcctcctcagatgaagaaagtgatgcatggcgaccgcatttcggccgttattcataccgaaaaggaacgagagtctgccgagccggaagcactgatcgaacctttcctgacccgctttgtcgggaaagtgcataaaaaagacgatcgtctttctatcgtaccggatcatcctctcctgaaagatgccatcccttgccgcgccgcgcgtgacgttgagcatgactttgtcgagggtgactgggcggttgccgaaatgcgccgtcatcctttaaaaggcgatcgcggtttctacgccgagctgacccagttcatcacctttggcgacgaccatttcgtcccatggtgggtgacgctggcgcgccacaacctcgaaaaagaagcgccggatggcgtcgcgaccaaaatgcaggacgaaggtcttgagcgtcgcgatctgacagcgctggactttgtcaccatcgacagcgccagcaccgaggatatggacgatgcgctgtatgccgaagaggcagcggatggcaaaatgcatctgaccgtcgccatcgccgaccctaccgcatggattgtcgaaggcagcaagctggacgaaatggccaaagtgcgttcgttcaccaactacctgccgggcttcaacatcccgatgctgccgcgcgagctttccgacgatctctgctccctgcgtccccatgaagtgcgtccggtactggcctgccgcatgaccatcgcggctgacggtaccattgaagaagatatcgaattcttcgccgccaccatcgaatccaaagccaaactggcttatgacaacgtgtccgactggctggaaaataccggcagctggaagcctgaatccgataatatcgctgcgcaaattcgtctgctgcatcgcgtctgccagagccgcagtgagtggcgccagacccacgcgctggtatttaaggaccgcccggactaccgctttgtgctgggggaaaaaggcgaagtgctcaacatcgtcgccgagccacgccgtattgccaaccgtatcgttgaagaagcgatgatctccgccaacatttgcgccgcacgcgtgctgcgcgacaagttaggctttggcatttacaacgtgcacaccggctttgacccggctaacaccgaagcgctggccgccctgctcaagacccatgacgtccacgtcgatccggaagaggtgctgaccctgccaggcttctgcaagctgcgccgcgagctggacgcacagccgtcaggtttccttgacagccgcattcgccgcttccagtcctttgcggaaatcagcacggagccaggcccgcacttcggtctcggtcttgaggcttacgccacctggacctccccgatccgtaagtacggcgacatggttaaccatcgtctgctgaaagcgatcatcaaaggggaatctgttgcccggccacaggatgagactacgttgcagatggcagagcgtcgccgtctgaaccgtatggcggagcgtgatgtaggcgactggttgtacgcgcgtttcctgaatgataaggcagggactgacacccgtttcccggctgaaatcattgacatcagccgcggcggtatgcgcgtgcgtctggtggataatggcgccgttgcctttattcctgccccgttcctgcatgccgttcgcgacgaactggtttgtagccaggaaaacgggaccgtgcaaattaaaggcgaaacggtttacaaagtcactgacgtgattgatgtaaacatcgctgaagtccgcatggaaacccgcagcattatcgcgcgccctgtcgcctga

SEQ ID NO: 525767 - DNA, 987 bp, Stenotrophomonas maltophilia
atggaacaacgccgtttttccggcaaaggccactggtatcacgaaacccagtcgaatcattcgcagacggacgttctgccgctggtgcctgaagccgctaacgtcgacgatcgttttttgctcgatttagccctgcctgacgacattgccgcaagctgttgtgggtggcttacgccagcccgaaccttgtgccgcctcttattcccgctcgatactcccgtgaaccgtctgcacacgcttagcgcctacgacagactgagcacggcgttgacggtttcccaggcgtgtggcgtccagcggctctgtaaccactacgcggcgctcctcgccccccttccgggccccgactcttcccgggaaagcaatcgacgccttgcagaaatcactcagtatgcccgccagctggcgagctctccggacgtcattgacgataaagcgcaaactcagcttgatgaggtgggactgacaacgtatgacattgtgcttatcaaccagatcatcggctttactggttttcaggcgcgggcggttgcagtgtttcaggcgctgcttggccatccggtacgctggctaccgggacaccacattcagccccatacactaccgctgagctttacccgatggacagccacccagcccgtagtcgaactaaaatatgccagtgcggttcaacttgaggcgctctcacgctggcaggccgaacctgcgctttcagcgctcacgccggttctctgccatgagccgatgctgctgaatctgacgggcgagatactggttaaccacccacaaagcgaagcccagccatctgcatcgctctcagccgcccatgcgctgctgcttacgtctcccgatcgttttagcgccgcccagttaacgcctctcacggaggccggtatcccaccgggcaaggcaattaacctgttaacccacggcgcttttaatggctggctggaccgtcttcgcgtggcgcttggcaaagaggaataa

SEQ ID NO: 525768 - DNA, 789 bp, Stenotrophomonas maltophilia
atgggttttctttccggtaagcgcattctggtaactggcgttgccagcaaactgtccatcgcatacggcatcgcacaggctatgcatcgcgaaggcgctgagctggcgttcacctaccagaacgacaagctgaaaggccgtgttgaagaatttgccgcgcagctgggttccagcattgttctggaatgtgacgttgcacaagacgaaagcattgatggcatgtttgctgaactggctaaagcatggccgaaattcgacggtttcgttcactccatcggcttcgctccgggcgatcagctggacggcgactacgtgaacgcggttacccgtgatggcttcaaaatcgcccatgacatcagctcctacagcttcgttgcgatggcaaaatcctgccgcgcgatgctgaacccgggcgcagccctgctgaccctgtcctacctgggcgcagaacgcgctatccctaactacaacgttatgggtctggcgaaagcgtctctggaagccaacgtgcgctatatggcgaacgcaatgggtcctgaaggcgtgcgtgttaacgcaatttctgcgggtccaatccgtactctggccgcttccgggatcaaagatttccgtaaaatgctggcacattgcgaagcggttaccccgattcgtcgtaccgttaccatcgaagatgtgggtaactctgcggcattcctgtgctctgacctttccgcaggtatctccggcgaagtggttcacgtggacggcggcttcaacatcgctgccatgaacgagctggaaatcaaataa

SEQ ID NO: 525769 - DNA, 402 bp, Stenotrophomonas maltophilia
atgcatcaacgtaatcctgtcttccctgccaatcgacatgccctttatgatgagcatggctattcggctgccattcgctctggcgatctgttatttgtttccggtcaggtcggcagccgcagcgatggcacgcctgagcctgatttcgccgctcaggtgcagttggcattcgataatttacaggcgactttggccgccgcaggatgcacttttgacgatctgattgatgtcacgacgtttcataccgatccagaaaaccagttccccgtcatcatggaggtgaaaaaactggcgtttccgcagccaccttacccaaactggacggctatcggcgttaactggctggccggatttgattttgaaattaaggttattgcccgaatcccctcgccagcgaattaa

SEQ ID NO: 525770 - DNA, 591 bp, Stenotrophomonas maltophilia
atggctacaaaacgtcgtgctgaaacagctcaggaaaatcgcgaaaaattgattcatgcggcgcgaaaggcgtttgctgagaaaggctttgctgcagcgtcgatggatgaactgacggcaagcgtggggttaacgcgcggtgcgctgtatcataatttcagagataagaaagggttactggcgtcggtggtcgcgcagatagacagcgaaatggcgggcaacgcgaaagccgttgccgcggccacagacgatgattgggagagactgctggcggaaggcatcgcctacatcaacatggcgctcgttccggaagttcagcgtatcgtgcttcttgacggtccggccgttctgggcgatccggcgcaatggcccagccagaacagctgtcttgagtcgacccgccagaccatcgaaaaattaatcgaacgcaacgtgcttaaaaaaatggatgcgaaagtcgcagcccatctgttgaacggcgttgcgctgaatgctgccttgatgattgccgcgagtgatgagccgcagaagacgctgccgcatgccattgaggtgtttactctgctggcaagcgggttacgcaacggctaa

SEQ ID NO: 525771 - DNA, 807 bp, Stenotrophomonas maltophilia
atggtcgaaaccttactggaagtacgtaacctgagtaagacctttcgctatcgcaccggcctgtttcaccgtcagaccgtcgaggctgttaaacccctgagctttacgctgcgcgaaaagcagacgctggcgattatcggtgaaaacggctcgggcaaatcgaccctggcaaaaatgctcgcgggtatggtcgagccgagcggcggtgaaatactgattgacgatcatcctctggaatttggggactactcttttcgcagtcagcgcatccggatgatttttcaggatccgtcgacgtccctgaacccgcgccagcgtatttcccagatcctggatttcccgctgcggttgaataccgacctagagccggaagcgcgtcgcaaacggattgtcgaaaccctgcgtctggtaggcctcctgcccgaccatgtcagctattacccgcacatgctggccccgggccaaaaacagcgtctcggtctggcccgcgcgctgatcctgcgcccgaaggtcatcatcgccgacgaagcgctggcgtcgctggatatgtcgatgcgttcgcagctcattaacctgatgctggagttacaggaaaagcaggggatctcgtatatctacgtgactcagcacctgggcatgatgaagcacatcagcgatcaggtgctggtgatgcaccagggtgaagtcgttgagcgcggcagtaccgctgacgtgctggcctccccgctccacgacctgacaaaacgcctgattgccggacactttggtgaagcattgacggccgatgcgtggcggaaagatcgttag

SEQ ID NO: 525772 - DNA, 993 bp, Stenotrophomonas maltophilia
atgccgttacttgatatccgcaacctcacgatcgaaattaaaacgggcgaaggctgggttaaagcggtggatcgcatcagtattacgctcgcagagggcgaaatacgcgggctggtgggcgaatcgggttccggtaagagtctaatcgccaaagccatttgcggcgtggcgaaggacaactggcgggtgaccgccgaccgtatgcgtttcgacgacatcgatctgttgcgtctctccccgcgcgaacgccgtaaactggtgggccataacgtctcgatgatttttcaggagccgcaatcctgtctcgatccgtccgagcgcgttgggaaacagctgatgcagaatatccccggctggacctataaaggccgctggtggcagcgtttcggctggcgtaaacgccgtgccattgagctattgcaccgtgtggggatcaaagaccataaagacgcgatgcgcagtttcccctacgaactgaccgacggtgaatgccagaaagtgatgattgctatcgccctggccaatcagccgcgtctgctgattgcggacgaaccgacgaacgcgatggagccaacgactcaggcgcagattttccgcctgctcacgcgtctgaaccagaataacaacaccaccattttgctgatcagccatgacctacaaatgttgagcaagtgggcggataaaattgacgtgatgtattgcggacaaacggtagaaaccgcgccaagtgaagacctggtgacgacgccgcatcatccctacacgcaggcgctgatcagggcgatccctgatttcggcagcgcaatgccacacaagagccgtctgaatactctgcctggcgcgataccgctgctggaatcgctgcccattggctgccgtctgggtccgcgttgcccgtatgctcagcgtaaatgcattgaaacaccgcgcctgacagggccgaaaaatcatctgtttgcctgtcatttcccgctgaacatggagagagagtga

SEQ ID NO: 525773 - DNA, 891 bp, Stenotrophomonas maltophilia
atgccttacgataacgtctacagcgaaaagcgcacgcctggtgcgctacgcaccgtgtggcgtaatttctacggcgacaccacggcgatgatcggcttttacggctgcattggcctcgtgttgctgtgtgttttgggttcgtggtttgcgccgtatggcatcgatcagcagttccttggttatcagcttttaccgccatcgtggtcgcgttacggggaggtttcgttcttcctggggactgacgatctcggacgcgacgtgctaagtcgtttactgagcggcgccgcacctacggtaggcggcgcgttcgtggtcaccctggccgccgcgatatgcggccttgcgctgggcatttttgccggctctacccatgggctgcggtctgccgtgcttaatcatattcttgataccttgctctcgattccttcgctgctgctggcgattatcgtcgtggccttcgcggggccgcacctcacacatgcgatgttcgccgtctggctggccattctgccccgcatggtgcgatcggtttacagcctggttcacgacgaactggagaaagaatatgtcgtcgccgcccgtctggacggtgccaccacgtttaatattttgtggtttgccgtgctgcctaacattgccgccgggctggtgacggagatcacccgcgccctgtcgatggcgattcttgatatcgcagcgctgggcttcctggacctgggcgcacagctcccctccccggaatggggcgcaatgctcggcgatgcgctggagctgatttacgttgcgccgtggacggtcatgctgccgggcgcggccattatggtgagcgttctgctcgttaacctgcttagcgacgggatccgccgcgcaatcaatgcgggggtgcaataa

SEQ ID NO: 525774 - DNA, 966 bp, Stenotrophomonas maltophilia
atgattatatttaccttgcggcggctgctgttactgctggtcaccctgttcttcctgacctttgtcggctttagccttagctactttacgccgcacgccccgcttcagggctcatccctctgggacgcctggctgttctggtttaacggcctgttgcactgggattttggcgtgtccagcatcaacggacagctcatctctgagcagctgaagatggttttcccggccaccatggagctgtgtatactcgcctttggctttgccctcatggtggggatcccggtggggatgctggcgggaatttatcgcaataaatggcaggataaattcatcagcgcgcttgccttaattggcttttccatccctgttttctggctggcgctgctgcttaccctcttcttctcactgacgttaggctggcttccggtgtctggccgtttcgacctgctgtataacgtgcaaacggtgagcggcttcgccatcgttgacgcctggctttccgattcagtctggcgcgacgaaatgatcgtgagcgccatgcgccatatggtgctgccagtgctcacgctggccgtcgcaccgacgaccgaagtgatccgcctgatgcgcatcagcactatcgaagtcttcgatcaaaactatgtgaaagccgccgccacacgcggactgtctcgcctgacgattctacgtcgccatgtgctgcacaatgcgttgccgccggtaatcccacggcttgggctgcaattctcaaccatgctgacgctggcgatgatcaccgagatggttttcagctggccgggccttggacgctggatgatcaacgccattcgccagcaggattacgctgcgatctccgccggagtgatggtgattggctcgctggttattattgttaacgttgtttccgatattttgggtgccatggccaacccgttgaagcataaggaatggtatgccttacgataa

SEQ ID NO: 525775 - DNA, 1641 bp, Stenotrophomonas maltophilia
atgcgcctggttttatcatccctgtttgcactcggtctgttcagcaatctggcctttgctgcgcccgatcgtactgcgcctcctgatattcgtgatagtggtttcgtctattgcgtcagcgggcaagttgatacctttaacccgcaaaaagcggggagcggcgtgattgttgatacgctggccgcacagatttacgatcgcctgctcgacgtcgatccttatacctatcggctggttccggagcttgctgaaagttgggaagtgcttgataacggcgccacgtaccgcttccgtctacgcgatgatgtggcttttcagcacaccccgtggtttaccccaacccgcaagctcaacgcggatgacgtggttttcaccttccagcgcatctttaaccgcaaccatccgtggcataacgttaacggcggaaacttcccctacttcgacagtctgcaattcgcggacacggtcaaaagcgttcgtaagctggataaccgcacggttgagtttcgcctgacgcgcccggacgcctccttcctctggcacctggcgacgcactacgcgtccgtcatgtcagccgaatacgcggatcagctgacgaaaaaggatcgtcaggaacgtctcgatcgtgagcctgtgggcacaggacccttccagttagctgagtaccgcgccggacaatacattcgcctgcaacgacacgatcatttctggcgcggcaaaccgctgatgccgcaggttattgttgatctgggttcaggtggaacaggccgcctctccaaactgctgaccggtgagtgcgacgtccttgcgtggcctgcggccagccagttgactattttgcgcgacgacccccgcctgcgcctgaccctacgcccgggaatgaacatcgcctatctggcgtttaacaccgataagccaccgctgaataatccggccgtgcgccatgcgctggcgttagcgatcaacaatcagcgtctgatgcagtcgatttattacggcaccgcggaaactgccgcctctattctgccccgcgcctcctgggcctatgacggcgaggcgaagatcacggaatataatccggcgaaagcgcgcgaacagcttaaagcactgggggcagaaaacctgacgcttcagctgtgggtacccaccagctctcaggcgtggaaccctagcccgctgaaaaccgccgaactgttgcaggcagatatggcccaggtgggcgtgaaggtgatcatcgttcctgtcgaaggccgtttccaggaggcgcgtctgatggacatgaatcacgacttaacgctggctggctggtctaccgacagtaacgacccggacagcttcttccgtccgctgctgagctgtgcggcgatcaactcccagaccaactacgcgcactggtgtaaccgggaatttgatgctgtgctgaaaaaagccctctcatctcaacagcttgcttcacgcattgaggcctacgatgaagcgcaaaatattctggccagagagcttcccgtgttgccgcttgcctcttccctgcgccttcaggcctaccgttacgatataaaagggctggtactcagcccgtttggtaacgcctccttcgcgggcgtgactcgtgagaaagaacaagaggtgaaaaaaccatga

SEQ ID NO: 525776 - DNA, 978 bp, Stenotrophomonas maltophilia
atggctgaatataaagacaatttgcttggcgaggcaaacagcttcctggaagtgcttgagcaggtatcgcgcctggcgccgctgaataaaccggtgctcattatcggtgagcgcggaacgggtaaggaacttatcgctaaccgtctgcactttctgtctggccgctgggacgggccttttatttcgcttaactgcgcggcgctgaatgaaaatctgctcgacacggagcttttcggtcatgaagccggcgcgtttactggcgcacaaaaacggcaccccggtcgttttgaacgtgccgatggcggaacgctctttctcgacgagctggcgaccgcgccaatgctggtacaggaaaagctgctgcgcgtcattgagtatggcgaactggaacgcgttggcggaagtcagccgcttcaggttaacgttcgcctggtgtgcgccactaacgccgatctgcccgcgatggtggcagaagataaattccgcgccgacctgctggaccggctggctttcgatgtcgtccagttgccgccgctgcgtgagcggcgcagcgatatcatgctgctggccgatcaatttgccattcagatgtgccgggaactgggcctgccgctctttccgggcttcagcgaacaggccaccgagaccctgctcggttaccactggccggggaatatccgtgaactgaaaaacgtggtggaacggtctgtttaccgtcatggcagcagcgagaccgaactggacaacattattctcgatccgtttcggcgcgaggttaaacagccccttgctccggcggcgcgccagcatgatccggcgttgccgctcgatttacgccagttccagcatcagcaggagcagcaactgctggaacggagcctgaaagaggcgaaatataaccagaaacgggcagctgaactgctgggtctgacctaccatcagttaagggcattgctcaaaaaacatcaaatgcgctga

SEQ ID NO: 525777 - DNA, 669 bp, Stenotrophomonas maltophilia
atgggtattttttctcgttttgccgacatcgtgaacgccaacatcaactcgctgctggagaaagcagaagatccgcagaagctggtgcgcctgatgattcaggagatggaagacacgctggttgaagtacgctccacctccgcccgcgcgctggcagagaagaagcagttaacgcgtcgtatcgagcaggcgactgcccagcttaacgagtggcaggaaaaagctgaactggcgctgcgcaaagataaagaagatctggcccgcgctgcgctgattgagaagcagaagctgaccgacatggtggccacgctggaacatgaagtgacgctggtggatgatactctgacgcgtatgaagaaagagattggtgagcttgaaaataaactcagcgaaacccgtgcacgtcaacaggcgctggcgctgcgccaccaggctgcaagttcgtcccgcgacgtgcgtcgccagctggacagcggcaaactggatgaagcgatggcgcgtttcgaatcgttcgaacgtcgtatcgaccacatggaagcggaagccgaaagccacagcatcggtaagcagaaaaccctggatcagcagtttgctgacctgaaagccgatgatgaaattagcgagcagctggcggcgctgaaagccaaaatgaagcaagaccaccaataa

SEQ ID NO: 525778 - DNA, 225 bp, Stenotrophomonas maltophilia
atgagcgcgctttttctggcaatacccctgacaattttcgtgctgtttgttctgcccatctggttatggctgcactacagcaaccgctcttctcgcggggagctgtcgcaaagcgagcaacagcggctggcgcagctctcttctgaggcaaacaaaatgcgcgaacgtattcaggcgctggaagccatcctggatgcggaacacccgaactggagggagcgttaa

SEQ ID NO: 525779 - DNA, 360 bp, Stenotrophomonas maltophilia
atggctggactaaatctgaataaaaaactgtggcgcatcccgcagcagggcatggttcggggcgtttgcgccgggctggcacactatctggatgtcccggtaaaactggtacgtgtggtcaccgtattgtcgattttctttggcctggcctttattacactggtggcttacatcattctgtcgtttgtacttgatccgatgccggagggggagctggatgcggaaaacacgccaaccagcagcgatcttcttaacgcggtggatgaacagctgagcgcaggggagaagcgattgcgcgagatggaacgttatgtcacctccgatacctttacgctgagaagtcgtttccgtcagctttaa

SEQ ID NO: 525780 - DNA, 1104 bp, Stenotrophomonas maltophilia
atggaccgtatcattcaatcgccggggaagtacatccagggcgctgatgttcttactcgtctcggcgactacctgaagccgctggcggctcgctggctggtggtaggcgataaatttgtgctgggttttaccgaagaaaccctgcgtcagagttttaaaaaagccggactccatgccgaaattgcaccgtttggcggcgaatgttcgcaaaatgaaatcgatcgcctgaaaaaactggccgacagtaccgactgcctggcggtgctgggtatcgggggcggaaaaacgctggataccgccaaagcgctggcgcactttatggacgtgccggtggctattgccccgaccattgcctccaccgatgcgccgtgcagtgccctttccgtgatttataccgacagcggcgagttcgatcgctacctgatgctgccgcacaacccgaacatggtgattgtcgataccagggtggtggcgggcgcacctgcgcgcctgctggccgccgggattggcgatgccctggcaacctggtttgaagcgcgcgcctgttcgcgtagcggcgccacgaccatggcgggtggcaagtgcacgcaggcagcgttagcgctggctgagctgtgctacaacacgctggttgaagagggcgagaaagcgatgctggcggcggaacaacacgtggtgacgcctgctctggaacgcattattgaagccaacacctatctgagcggcgtgggctttgaaagtggcgggctggcggcggcacacgccattcacaatggcatgacggcggtgccggatgcgcaccatttctaccacggtgaaaaagtggcatttggtacgctgacgcaactggtactggagaacgcgccggtagaagaaatcgaaaccgttgcggcgctgtgccatagcgtcgggctgccaattacgctggcgcagctgaatatcaaagaggatattccggctaaaatgcggctgatcgcggaggcgtcctgtgccgaaggggaaaccattcacaacatgcctggcggcgtaacgccggatcaggtctatgcggcgctgctggtggcggaccagtatggacagcgattcttgcaggagtgggagtaa

SEQ ID NO: 525781 - DNA, 663 bp, Stenotrophomonas maltophilia
atggaactgtacctggataccgccaacgtggcagaagttgaacgcctggcgcgcatttttcccattgcgggcgtgaccaccaacccaagcatcgtagccgccagcggcgaatctgtctgggaggtgttgccgcgcctgcagcatgctatcggcccggagggcaggctgtttgcccaaaccatgagccgcgacgccgaaggaatggtggcggaagcaaaacggctgaacaatgccctgccggacatcgtggtaaaaattcccgtcactgcacaggggctcatcgcgattaaagtgctgaagaaagagggaattaccacgctgggaaccgccgtttacagcgccgctcaggggttactggccgcgctggcaggagcgaaatatgtcgcaccgtatgtaaaccgcgtcgatgcgcagggctgtgacggcattcgcacggtacaggaactgcaatccctgctggaacagcatgcgccagagagcatggtgctggctgccagctttaaaacgccgcgccaggcgctggattgcctgttggcaggatgtgaggcaattacgcttcccttagacgtagcgcaacaaatgctcggcacgccagcggtagagtcagccatagagaagttcgagcaggactggaaaaacgcgtttggtaacctcaacctctaa

SEQ ID NO: 525782 - DNA, 765 bp, Stenotrophomonas maltophilia
atgcaccacgatatcccccacatcctgaatgacctgatcaacggcaccttgccgctgcgtcaggtgcatttccccccttcggctaaaccgctcccccgaacgtcaccttgcctcgtgcttagctttgatacggcctgcgaagcgttatttttttcatccggtaatattccgcttcaacccgccttttcgctcaacatcagcttcggcaagcaacaactgactcttcagctcgagcgcgacaacacgcttttgcaacagcaacaggttgccagacgcgggccgcgagtgggcgcattccttttgcagacgctcgctgaattgcaaatgcagccagacgatcgggaaacggccagactggtggtattaagtttgctcagccactgtcgcgatctgctgggcagcgatatccataccgccagccgcagccgtgcattatttgaagcgattcgtcactacatcgaagaacatcacgcctctgcactgacccgtgaatcggtggcgcaggcgttttatatttcaccgaactacctttctcatctttttcaaaaaacaggcagcgtggggttcaacgaatatcttacgcaaacacgcctcgagcacgcgcgtcagcttcttaaaggctacgagttcaaaatcaaagatatcgctgcaagctgcggatttacggacagtaactacttttgccgtctctttcgcaagcacactgaacgttccccttccgaatatcgacgccagtatcacagccagctgatcgccaaaaagtag

SEQ ID NO: 525783 - DNA, 2652 bp, Stenotrophomonas maltophilia
atgaacgaacaatattccgcgttgcgtagtaatgtcagtatgctcggcaaagtgcttggagataccatcaaagatgcgttgggggagaacatcctcgaccgtgttgaaaccatccgcaagctgtccaaatcttcccgcgccggtaacgaggccaatcgtcaggagctgctcaccaccttgcagaacctctctaatgatgagctactgcccgttgcccgcgccttcagccagtttctgaacctggcaaacaccgctgagcaataccacagcatttcgccaaaaggcgaagcggccagcaacccggaagtcattgcccgcacccttcgtaaactcaaagaccagcccaacctcaacgaagcgaccatcaaaaaagcggtggaatccctttcgctggagctggtgctgaccgcacacccaaccgaaatcacacgtcgtacgctgatccacaaaatggtggaagtgaacaactgtctgaagcagttggataacaaagacattgccgactacgaacgtaaccagcttatgcgccgcctgcgccagctgattgctcagtcctggcacaccgatgaaattcgtaagcatcgcccaagcccggtcgacgaagccaaatggggctttgcggtggtggaaaacagcctgtgggaaggggtgccaaactacctgcgcgagctgaacgaacagctggaagaaaatctgggctatcgcctgccggtcgactttgtgccggttcgcttcacttcctggatgggcggcgaccgcgacggcaacccgaacgtgacggcggaaatcacccgtcacgtcctgttgttgagccgctggaaagcaaccgacctgttcctgaaagatattcaggtgctgatctccgagctgtcgatggtagaagcgacgccggaactgcgcgcgctggccggtgaagaaggtgccagtgagccgtaccgtttcctgatgaaaaaactgcgcggtcagctgatggccacgcaggcctggctggaagcgcgcctgaaaggccagcgcctgccgaagccggaaggtctgctgagccagaacgaacagctctgggaacctctgtacgcctgttataaatcgcttcaggcctgcgggatgggcatcattgccaatggcgagctgctcgacaccctgcgccgcgtgaagtgtttcggcgtgccgctggtgcgtatcgacgtccgtcaggaaagcacccgtcataccgaagcgctgggcgagctgacccgctatctcggcattggcgactatgaaagctggtccgaagccgacaaacaggcgttcctgatccgcgagctgaactccaagcgcccgctgctgccgcgcaattgggagccaagcaatgacacccgcgaagtgctcaacacctgtaaagcgatcgtggatgcgccgaaaggatcggtggccgcctatgtgatctccatggcgaagaccccgtccgacgtgctgggcgttcaccttctgctgaaagaagcgggcatcgactacgctctgccggtagcaccgctgtttgagactctcgacgacctgaacaacgccaacgacgtgatgacccagttgctgaacatcgactggtatcgcggctttattcagggcaagcagatggtgatgattggctattccgactccgcgaaagatgcgggcgtgatggcagcctcctgggcgcagtatcaggcgcaggatgcgctaattaaaacctgcgaaaaagccggtattgaactgaccctgttccacggacgcggcggttcaattggtcgtggcggtgcgcctgcacacgcggcgctgctctcccaaccaccaggaagcctgaaaggcggactgcgcgtgaccgagcagggcgagatgatccgcttcaagtacggcctgccggaagtgaccatcagcagcctgtcgctctataccagtgcgatcctggaagccaacctgctgccgccgccggagccaaaagaatcctggtgccggattatggacgagctgtctgacatctcctgcgatctgtatcgcggctacgtgcgtgaaaacaaagactttgtgccttacttccgctcagccacgcctgagcaggagctgggtaaactgccgctcggctcgcgcccggccaagcgtcgtcctactggcggcgttgaatccctgcgcgccattccgtggatctttgcctggacgcaaaaccgtctgatgctgccagcctggctgggtgccggtgcggcgctgcaaaaagtggtggaagacggtaagcagagcgaactggaaaccatgtgccgcgactggccattcttctctacccgtctgggcatgctggagatggtcttctcgaaagccgacctgtggctggcggaatactacgatcagcgtctggtgaaacccgagctgtgggcgctgggtaaagagctacgcgagctgctggaaggcgacatcaaagtggtgctggatatcgctaacgactcccacctgatggaagacctgccgtggattgccgagtctatccaactgcgtaacatctacaccgacccgctgaacgttttacaggctgaactgctgcaccgttcgcgtctggcggaagaggaaggtaaagagccggatccgcgcgttgaacaggcgctgatggtgacgattgcgggcgttgcggcggggatgcgtaacaccggttga

SEQ ID NO: 525784 - DNA, 1152 bp, Stenotrophomonas maltophilia
atgaaaatgaacttaccgccatttatcgagatttaccgcgccctgattgccacaccgtccatcagcgcaacggaagaagcgctggatcagagcaatgagtctttaatcaatctgctggcgggttggtttagcgatcttgggtttaacgttgaggttcagcccgtccccggaacacgtcacaaatttaacctgctcgccagcaccggacatggcgctggcggcctgctgctggctggtcacactgacaccgtgccgtttgacgatggccgctggacccgcgatccgttcaccctgacagagcacgacaacaagctctacggtctcggcacggcggacatgaaaggtttctttgcttttatcctcgacgcgctgcgtgacgtggacgtgacaacgctgaaaaagccgctctacattctggcgaccgccgatgaagagaccagcatggcgggcgcacggtatttctctgaaaacacgtcgattcgcccggactgcgcgatcatcggtgaacctacctctctgcaaccgattcgggcgcacaaaggccatatttctaccgcagtgcgcgtgctgggccagtctggtcactccagcgatccggcgcgcggcgtgaacgccattgagctgatgcatgacgcgattggccgcatcatgaccctgcgcgacgatctaaaagagcgttatcactacgaggcgttcaccgtgccgtatccgacgctgaacctcggcagcctgcacggcggtgatgcgtccaaccgtatctgcgcctgctgcgaactgcatatggatatccgtcctctgccgggcatgacgctgagcgatctggatggcttactgaacgaagcgctggcaccggtcagcgagcgctggccgggacgtctgacggtctccgaactgcatccgccgattccaggctacgaatgcccgcctgaccaccagctggttcaggtggtggaaaaactgctcggagagaaaaccgacgtggtgaactactgcaccgaagcgccgtttattcagaccctgtgcccgacgctggttctgggccctggctccatcaaccaggcccaccagccggacgaatatctcgaaacccgcttcatcaagcccacccgcgaactcattacccaggttgtgcatcacttctgctggcattaa

SEQ ID NO: 525785 - DNA, 1005 bp, Stenotrophomonas maltophilia
atgttgaatacgctgattgtaggcgctagcggttatgcgggcgcagagcttgtaagctacgtgaatcgccacccacatatgaccataaccgctttgaccgtgtcagcgcaaagcaatgatgccggaaagttaatttccgatttgcatccacaacttaagggcgtggttgatttgcctttgcaggccatgtctgacatcagcgagtttaccgacggcgttgacgtggtgtttttagccaccgcacacgaggtcagtcacgacctggcgccgcagtttctggcagccggttgcgtggtcttcgatctctccggcgcgtttcgcgttaacgacagcgcgttctacgaaaaatattacggcttcacccatcagcacccggatctgctcgaaaaagcggtgtacggcctggcggagtggagcgcagataaactgaaagaagcgaatctgattgccgtgcctggctgttacccgacggcggcgcagctctcccttaagccgctgatcgacgcgggtctgctggatcttgaccagtggccggtgatcaacgccaccagcggcgtgagcggcgccgggcgcaaggccgcgatctccaacagtttctgcgaagtgagccttcagccgtatggcgtgtttaatcaccgtcatcaccctgaaatcaccacccatctgggcgcggaggtgatcttcaccccgcacctcggtagcttcccgcgcgggatccttgaaaccattacctgtcgcctgaagccgggcgtgaccaaagaccaggtgagcgaagtcttcacgcaggcgtatgcggataaaccactggtgcgtctgtatgacaaaggcgtaccagcgctgaaaaacgtggtcggcctgccgttctgcgacatcggctttgccgtgcagggcgagcacctgattgtggtcgccgcagaagataacttactcaaaggcgctgccgcacaggcaatgcagtgtgcaaatattcgtttcggcttccctgaaacgcaggctcttatttaa

SEQ ID NO: 525786 - DNA, 774 bp, Stenotrophomonas maltophilia
atgaatccattaattatcaaactcggtggtgtactgctggacagcgaagaagcgctggagcgcctgtttaccgcgctggtgaactatcgtgaatcacatcaacgtccgctggtgattgtccacggcggcggctgtgtggtggacgagctgatgaaagggctcaacctgccggtgattaagaaaaatggcctgcgcgtcacgcctgccgaccagattgacattattactggtgcgctggcggggacggcgaacaaaacgctgctggcgtgggcgaagaagcaccacatcgcgtccgttggtctctgtctgggcgatggcgatagcgtgaaagtgacccagctcgacgaagcgcttggccatgttggactggcgcagccaggttcgcctaagctgattaacaccctgctggaaggtggtttcctgccggtggtgagctcaatcggcgtgaccgaagagggcgagctgatgaacgtcaatgcggaccaggcggcaaccgcgttggcggccacgctgggcgcagacctgatcctgctctccgacgtgagcggcattctggacggcaaaggccagcgcattgcggaaatgaccgccgcaaaagccgaacagctgatcgatcagggcattatcaccgacggcatgatcgttaaggtgaacgcggcgctggatgccgcgcgcacgctgggtcgtccggtggatatcgcctcctggcgtcacgcggagcaactcccggcgctgtttaacggtacgccgattggtacgcgtattctggcttaa

SEQ ID NO: 525787 - DNA, 1374 bp, Stenotrophomonas maltophilia
atggcactttggggtgggcgttttacacaggcagcggatcagcggttcaaacagttcaatgactctttgcgcttcgattaccgcctggccgaacaggatattgtcggctctgtggcctggtccaaagcgctggtgaccgtgggcgtgctgaccgcagaggaacagcagcagctggaagaggcgctgaataatctgctggaagaggtgcgtctggatccgcagcaaatcctccagagcgatgccgaagatattcacagttgggtggaaggcaaacttatcgacaaagtcggccagctgggtaaaaagctccataccgggcgtagccgtaatgaccaggtggcgaccgacctgaagctgtggtgtaaagagaccgtcggcgaactgctggcggcgaatcgtcagctgcagagcgcgctggtggacactgcgcagaacaatcaggatgcggtgatgccgggttatactcacctgcaacgcgcacagccggtgacctttgcgcactggtgtctggcctacgttgagatgctggcgcgtgatgagagccgtttacaggataccttaacgcgtctggacgtcagcccgctgggcagcggcgcgctggccggtacggcttatgaaatcgaccgtgagcagctggcaggctggctgggctttgcttccgccacccgcaacagcctggacagcgtctctgaccgtgaccacgtgctggagctgctgtcgaatgcctctatcgggatggtgcacctgtcgcgctttgccgaagacctgatcttctttaactctggcgaagcgggcttcgtcgagctgtccgaccgcgtgacgtccggctcctccctgatgccgcaaaagaaaaacccggatgcgctggagctgatccgcggcaaatgtggccgcgtgcagggcgcgctgaccggcatgatgatgaccctgaaagggctgccgctggcatacaacaaagatatgcaggaagacaaagaggggctgttcgacgcgctcgacacctggctggactgtctgcatatgggcgcgctggtgctggacggcattcaggtgaaacgtcctcgctgccaggaagcggcgcagcagggctatgctaactctaccgagctggcagactacctggtggcgaaaggcgtaccgttccgcgaggcgcaccatattgtgggtgaagcggtagtggaagcgattcgtcagggtaaagcccttgaagagctggcgcttgccgacctgcaaaaattcagtgcggttattggggaggatgtctacccgattctggccctgcaatcctgcctggataagcgtgcggcgaaaggtggagtctcgccgaagcaggtagcgcaggcgattgcggacgcgaaaaaccggttggtttga

SEQ ID NO: 525788 - DNA, 918 bp, Stenotrophomonas maltophilia
atgaatattcgtgatcttgaatacctggtagcgttagctgagcatcgccattttcgccgcgcggcagactcctgccacgtcagccagccaacgctgagcggtcagatccgcaagctggaagatgagctgggcgtgatgctgctggagcgcaccagtcgtaaggtactgttcacgcaggcaggtctgctgctggtggatcaggcgcgcaccgtactgcgcgaggtcaaagtgctcaaggaaatggcaagccagcagggggaggcgatgtccggcccgctgcatattggcctgatcccaaccgttggcccgtatctgttgccgcaaatcattccgctgctgcaccagacgttcccgaaactcgaaatgtacctgcatgaagcgcaaacccatcagctgctggcgcagttagacagcggcaagctcgactgcgcgatcctggcgctggtcaaagagagtgaagcgtttattgaagtaccgctgttcgatgagccgatgatgctggcgatctatgaagatcacccgtgggcgaaccgcgatcgcgtgccgatggccgatctggccggagaaaagctgctgatgctggaagacggccactgtctgcgcgatcaggcgatgggcttctgcttcgaagcgggtgcagatgaagatacccatttccgcgcaaccagccttgaaacgctgcgtaacatggtcgcggcgggaagtggcattacgctgctgcctgcgctggccgtgccgcgcgagcgtaagcgtgatggcgtggtctatctgccgtgtattaagccagagccgcgtcgcacgatcggcctggtttatcgtccgggttcaccgctgcgcagccgctatgagcagctggcagaggccatccgtggtgcaatggatggccatttcgacaacgcgttaaaacaggcggtttaa

SEQ ID NO: 525789 - DNA, 1401 bp, Stenotrophomonas maltophilia
atgccacattcctacgattacgacgcaatagttattggttccggccccggcggcgaaggtgctgctatgggtctggtaaaacagggagccagagtagcggttattgagcgctaccataatgtcggcggcggttgcacccactggggcaccatcccttcgaaagccctccgccacgccgttagccgcattatcgaatttaaccagaaccctctttacagcgaccactcccgacttcttcgttcttcctttgccgatatcctgaatcacgcagacacggtcattaaccagcagacgcgcatgcgtcagggtttctatgagcgcaaccactgtgaaattctgcagggtaacgcgcattttgtagatgaacacaccctggcgctggagtgccacgacggttcggttgagacgctcaccgctgaaaaatttgtgatcgcctgcggatcgcgcccatatcatccggcagacgtggacttctctcatccacgcatttacgacagcgactccatcctcagcctgcaccacgagccacgccatgtgatcatctatggcgcgggcgtgattggctgtgaatatgcgtcgatcttccgcggcatggaggtcaaagttgatttgatcaacacccgcgaccggctgctggcgttcctcgatcaggagatgtcagattccctctcctaccacttctggaacagtggcgtggtgattcgccacaacgaagagtacgagaaaatcgaaggctgcgacgacggtgtgatcatgcacctgaaatctggtaaaaagctgaaggcggactgcctgctgtacgccaacggccgtaccggcaacacggattcattgcagctggagaatatcgggcttgaaaccgacagccgcggtcagctcaaggtcaacagcatgtaccagactgcgctgccgcacgtttacgcggtcggcgacgttattggttacccaagtctggcctccgctgcttacgatcagggccgcatcgccgcacaggcgctggtgaaaggtgaagcgacggcgcatctgatcgaggacatcccgacgggcatctacaccatcccggaaatcagttctgtcggcaaaaccgagcagcagttgacggccatgaaggtgccttacgaggtgggtcgtgcccagtttaaacacctggcgcgcgcacaaattgtggggatgagcgtgggtacgctgaagatcctgttccatcgcgagacgaaagagatcctcggtattcactgctttggtgaacgtgccgcggaaatcattcatatcggccaggcgatcatggagcaaaaaggtggtggcaacaccatcgagtacttcgttaacaccacctttaactacccgaccatggcggaagcctatcgggtagctgcgctgaacggcttaaaccgcctgttttaa

SEQ ID NO: 525790 - DNA, 639 bp, Stenotrophomonas maltophilia
gtgatgggcgtaagagcacaacaaaaagagaaaacccggcgttcgctggtggaagccgcattcagtcaactgagtgctgagcggagttttgccagtttaagcctgcgcgaagtggcgcgcgaggccgggattgcgccaacgtccttctatcgtcatttccgtgatgtggatgaactgggcctgaccatggtcgacgagagcggtttgatgctgcgccagcttatgcgtcaggcgcgtcagcgtattgccaaaggcggcagcgtgatccgcacctccgtgtcgacatttatggaatttatcggcaataaccctaacgcgtttcgccttttgttgcgcgagcgctctggcacgtcggcggcgtttcgtgccgccgtcgcgcgtgaaattcagcatttcatcgcggaacttgccgactatcttgaactcgaaaaccatatgccgcgtgcgtttactgaagcacaggccgaggcgatggtgaccattgttttcagtgcgggtgccgaagcgctggatgtcagcattgaacaacgtaagcaactcgaagagcgactggtattgcagctgcgaatgatttctaaaggtgcgtactactggtatcgccgtgaacaagagaagttggcacatcaaaacgatgagtga

SEQ ID NO: 525791 - DNA, 360 bp, Stenotrophomonas maltophilia
atgaaacagtcaggtcaggataaaggaacgctgttgctggcattgatcgctggcttatccatcaatggtacgtttgcggcggttttcagctcaattgtaccgttctcgattttcccgattatcgcgctggtgctgacggtgtattgcctgcatcaacgttatctgaaccgcaccatgccggttgggttaccggggctggccgcagcctgttttattctgggtgtactgttgtacagcaccgtggtgcgtgcagagtatccggatatcggttctaacttcctgcctgcggtgctgtctgtggcgctggtgttctggattggctcgcgcatgcgtagccgcaagagccagttaccagagtaa

SEQ ID NO: 525792 - DNA, 1101 bp, Stenotrophomonas maltophilia
atgacccccgaacacctcccgacagaacagtacgacgcacagctggcagaaaaagttgtccgcctgcaaagtatgatgacgcctttcaacgcgcccgttcccgaggtgtttcgttctccggtcagccactaccgtatgcgcgctgagtttcgcatctggcacgatggcgatgacctgtaccacatcattttcgatcagcagacgaaatcccgtattcgcgtagacagtttcccggcggcgagtgagcttatcaaccagctaatgacgctgatgatcgacggtgtgcgcactaatccggtgctgcgcaacaagctgttccagattgactacctgaccacccaaagcaatcaggccattgtctctctgctctatcacaaagcgctgaccgacgagtggcgcgagcaggcagaagccctgcgcgatgcgctgcgcgcgcagaacatcaacgtgcacctgattggccgcgcgaccaaaaccaaaatcatgctggaccaggattacatcgacgagcgtttgccggtggcaggaaaagagatggtttaccgtcaggtggagaacagcttcacccagccgaatgcggcaatgaacgtgcagatgctggagtgggcgctgaatgcgacggaagggtcgacgggcgatctgctggagctctactgcggtaacggcaacttctcgctggcgctggcgcgtaacttcgaacgcgtgctggcgacggaaatcgccaaaccgtcggtggccgccgcgcagtacaacatcgccgctaaccatattgataatgtgcagatcattcgtatggcggcagaagagtttacccaggcgatgaacggcgtacgtgagtttaaccgcctgcaagggattgatttgaagagctaccagtgtgagacaatttttgtcgatccgccgcgcagcggcctggacagcgaaaccgagaagatggtgcaggcgtacccgcgtattttgtacatctcctgtaacccggagacgctgtgcaagaatctggaaacattaagccagacgcacaaggttgaacgtctggcgctgttcgatcagttcccgtatacgcaccatatggagtgcggcgtactgctcacggcgaagtaa

SEQ ID NO: 525793 - DNA, 1848 bp, Stenotrophomonas maltophilia
atgattaaaaaagtatcgctgttgacggcgttttccgtcacggcattttcgggctgggcgcaggaaagcgccgactcgttggtggtgacagcaaaccgtttcgaacaacctgaaaaatctgttctggctgcgacttctgtcgtgacgcgggccgatatcgaccgctggcaatccaccacggttctggatgtcatgcgtcgcctgcctggcgtagatacggcacaaaatggcgggatggggcagctctcttctctctttatacgcggtacgaactccagccatgtcctgattctcgtcgatgggatccgccttaaccaggcgggcgtcacggggtcgtccgatctcagccagtttccgatctccctggtgcagcgcatcgaatatcttcgtggaccgcgttcggcggtgtacggctcggatgcgatcggtggtgtagtcaacattatcactacgcgtgcgaaggatggcacaacgctgaatgctggcgttgggacacacggcttccagaattatggtggcagcacccagcaaacattgggtgaaagtacgcgcgttacgctggcgggggattacacctacacaaaaggctttgacgtcgttgctgacggtaataacggcggccttgcccagaccgatcgcgacggctttatgaataaaacgctctacggcgcactggagcatgctttctctgagcaatggagtggtttcattcgcggctatggttacagcaaccgtaccgcctatgacggctattacagttcattcacccctgatgtgctggttgatacccgccaactctatagccagacctgggatgccggattgcggtttaaccgggatgttttccattcacagttgctctccagctacagtcacagcaaagactacaattacgatccgcaccttggacgctatgactccacagcaaccctggatgaaatcaaacagtacaatgttcagtggaccaactcagttgacgtgggacatggcaacatcggcgcgggcgttgactggcagaaacagagcaccgagccgggtaccaactacgtaaccaacgcctatgacctgcgtaacactggcgtctacctgactgggttgcagcagtttggagatttcactctggaggcggcggcccgcagcgatgacaactctcagtttggtcgccatggtacctggcaaagtagcgcagcctgggagttcgttgacggttaccgcttcatagcctcttatggcacggcctataaagcgccgaatctgggtcagctctatggcttctacggcaatacccatcttgatcctgaagagagcaagcagtgggaaggggcgtttgaaggcctgacggcaggcgtaagctggcgcgtatccggctatcgtaatgacgttgataatctcatcgacttcaacaataacctgcagcaatattacaacgtcggcaaagcacgcattaaaggtgtagaagcgacagcgtcgtttgatacgggtccgttgacgcatactgtgggctacgactatgtggatgcccgcaatgcggcaaccaatcaacttctggaccgtcgtgctaaacagcaggtgaaatatcagcttgatacgcagatctatgatgttgactggagcctgacgtatcactatctcggcacgcgctacgacaccgactttggaacctatccgtcagagaaagttaaaatgggcggcgtcagcctgtgggacgtcgcggtttcatatcctgtcacctcacatctcacagttcgtggtaaaatagccaacctgttcgataaagattacgagacagtttatggctaccaaactgcaggacgggaatacaccttgtctggcagctacaccttctga

SEQ ID NO: 525794 - DNA, 852 bp, Stenotrophomonas maltophilia
atggctaccaaactgcaggacgggaatacaccttgtctggcagctacaccttctgatccgcgtcccaccgtgctggtgtttgattccggcgtcggtgggctttcggtctatgatgagattcggcagctcctgccggatctccattacatctacgccttcgataacgtcgcgttcccgtatggggaaaagagtgaagactttatcgttgagcgtgtgattgaaatcgtcactgcggtacaaaagcgctatcccctggcgctggcggttattgcctgtaatacggcaagcacggtctctcttcctgccctgcgcgaaaaattcccgttcccggttgtgggcgttgtcccggcaatcaaacctgcggcgcgtctgacggcgaacggtatcgtggggttgctggcgacacgcggtacggtaaaacgtccttatacgcgtgagcttattgagcgctttgccaatgaatgccagatcgccatgctcggctccgcggagctggtggaaatggcggaagcgaaactgcacggcgagacggtatcgcttgaagagctgcgtcgcattctgcgtccatggctgcggatgcaggaaccaccggatacggttgttctcggctgcacccatttcccgctattacaggaagagctgttaaaggttttgcctgaagggacccggctggtggattccggtgctgcgattgcgcgtcggacggcctggctactggagcacgaggcgccggatgcgaaatcagcggatgcgaacatcgctttctgtatggcgataacaaaagaaaccgaacaacttttgcccgttttacgtcgttatggcttcgaaacgctcgaaaaactggcgctgtag

SEQ ID NO: 525795 - DNA, 1347 bp, Stenotrophomonas maltophilia
atgaggcgaatgcgcttctcgccgcgaagttcgtttgcccgcacgctgttattgatcgtcaccctgctgtttgtcagcctggtgacgacctacctggtggtgctgaactttgcgatcctgccgagccttcagcagtttaataaggtgctggcatacgaagtgcgtatgctgatgaccgacaaactgcaactggaggacggcacgcagttggttgtccccccggcgttccgtcgggaaatctaccgtgagttgggcatttctctctactcgaacgaagcggcggaagatgccggcctgcgctgggcgcagcactatgaattccttagccagcagatggcgcagcagcttggcggcccgacggaagtgcgcgttgaggtcaataaaagctcgccggttgtctggctgaaaacctggctgtcacccaacatctgggtgcgtgttccgctcaccgagattcatcagggcgacttctcaccgctgttccgatacaccctggcgatcatgctgctggctatcggcggcgcatggctgtttattcgtatccagaaccgaccgctggtcgacctggagcatgcggcattgcaggttggtaaaggtattatcccaccgccgctgcgcgagtatggcgcatcggaagtgcgctcggtaacgcgtgcttttaaccacatggcggcaggcgttaaacagctggctgacgaccgtacgctgctgatggcgggggttagccatgaccttcgcaccccgctgacacgtatccgcctggcaacagagatgatgggcgagcaggatggttatcttgcagagtccatcaacaaggatatcgaagagtgtaacgccatcatcgagcagtttatcgactacctgcgtaccgggcaggagatgccgatggagatggcggatctgaacgcggttctgggcgaagttgttgccgccgaaagcggttatgaacgtgaaattgcgaccgaccttcaggcgggcgagattcaggtacgtatgcacccgctctccatcaaacgcgcggtggcgaatatggtggtcaacgcggcgcgttacggcaacggttggatcaaagtcagcagcggtacggaactcaaccgcgcctggttccaggtggaagacgatggcccgggcatcaagcctgagcagcgtaagcacttgttccagccgtttgtgcgcggcgacagcgcgcgcagcaccagcggaaccggcttaggcctggcgattgtgcagcgtattgttgataaccataacggactgctggaaattggcaccagcgaacggggtggtttgagcattcgcgcatggttaccggtgccggttttacgggggcaggtgaaagagagttaa

SEQ ID NO: 525796 - DNA, 720 bp, Stenotrophomonas maltophilia
atgcaagagaactacaaaattctggtcgtagatgacgacatgcgcctgcgtgcgctgctggaacgttatctgaccgagcagggcttccaggttcgtagcgtcgcgaacgcggaacagatggatcgtctgctgacgcgtgaatccttccacctgatggtgttggacctgatgctgcctggcgaagatgggctctctatttgccgtcgtctgcgtagccagagcaacccgatgccaatcatcatggtgacggcgaagggtgaagaagttgaccgtatcgtcggccttgagattggcgctgatgactacattcctaagccgttcaacccgcgtgaactgctggcgcgtattcgcgccgtgctgcgtcgtcaggcgaacgagctgccgggcgcgccgtctcaggaagaggccgtcattgcattcggtaagttcaagctgaacctcggcacccgtgaaatgttccgtgaagatgagccaatgccgctcaccagcggcgagtttgcggtactgaaagcgctggtcagccacccgcgtgaaccgctttcacgtgacaagctgatgaacctggcgcgcggccgtgaatactccgcaatggaacgttctatcgacgtgcagatctctcgtctgcgccgcatggtggaagaagatccggcgcatcctcgttatattcagaccgtgtggggtctgggctacgtgtttgtcccggacggctctaaagcatga

SEQ ID NO: 525797 - DNA, 474 bp, Stenotrophomonas maltophilia
atgaaaacgcctctgatcacccgcgaagggtacgagaaactcaaaaaagagatggattacctgtggcgcgaagagcgtccggaagtgaccaaaaaagtcacctgggccgcaagtctgggcgaccgcagcgagaatgcggactatcagtacaataaaaagcgactgcgcgaaatcgatcgccgggtacgctacctgacgaaatgcctcgagaatctcaaaattgtcgattactccccgcagcaggaaggtaaagtgtttttcggcgcgtgggtcgaaattgaaaacgacaacggcgacaccctgcgttttcgtatcgttggctatgatgaaattttcggtcgtaaggattacatttctatcgattcacccatggcccgcgccctgctgaaaaaagaggtgggcgatttagccgttgtccagacgcccgcgggtgaagcaagctggtacgtcaacgaaatcgagtatgttaaatag

SEQ ID NO: 525798 - DNA, 2331 bp, Stenotrophomonas maltophilia
atgatgaaagagtcgctctgccgcattattgcgggtgatattcaggccagagccgaacaggtagaagctgccgttcgtctgcttgatgaagggaacaccgtgccgtttattgcacgttatcgtaaggaagtcaccggcggtctggatgacacgcagctgcgtaaccttgagacccgtctgggctatctgcgcgagctggaagaccgacgtcaggcgatcctcaaatctatcggcgagcagggcaagctgaccagtgacctggaaaaagccattaacggtaccctgagcaaaaccgaacttgaagatctctatctgccgtacaaaccgaagcgccgcacgcgcgggcagattgcgatcgaagccggccttgagccgctggccgacctgctgtggaacgagccgtctcacgatccggaaaccgaagccgccaaatttatcgacgccgaaaaaggcgtagcggacaccaaagccgcgctggacggcgctcgctacattctgatggagcgcttcgccgaagacgcggcgctgctggccaaagtgcgtgattacctgtggaagaacgcccatatcgtctccaccgtggtgtccggcaaagaggacgaaggcgcgaaattccgcgactacttcgatcaccacgaacccatttctaccgcgccgtctcaccgcgcgctggcgatgttccgcggtcgtaacgaaggcgtgctgcaactctccctgaatgccgatccgcagtttgacgagccgcctaaagagagccactgtgagcagatcataatcgaccatctgggcctgcgcctgaacaacgccccggcggacagctggcgcaaaggcgtggtgagctggacctggcgcatcaaggtgctcatgcacctcgaaaccgagctgatgggcaccgtgcgcgagcgcgccgaagacgaagcgatcaacgtcttcgcccgtaacctgcacgacctgctgatggctgcgccggctggcctgcgcgccaccatgggtctcgatccgggtctgcgcaccggcgtgaaggtggccgtggttgacggcaccggcaagctggttgccaccgacaccatttacccgcacaccggtcaggcagcgaaagcggctgtcgtggtcgccgcgctgtgcgagaagtacaacgttgagctggttgccatcggtaacggtacggcgtcccgcgaaaccgaacgtttctatctcgacgtgcagaagcagttcccgaaagtgacggcgcagaaagtgatcgtcagcgaagcgggggcatctgtctattccgcctctgagctggcagcgcaggagttcccggaactggacgtttccttgcgcggtgcggtctctatcgcccgtcgtttgcaggatccgctggcggagctggtgaaaattgacccgaaatccatcggcgtgggccagtatcagcacgacgtgagccagacgcaactggcgcgcaagctggatgcggtggtggaagactgcgttaacgccgtcggcgtggacctgaacaccgcttccgttccgctgctgacccgcgtagcaggcctgacccgtatgatggcgcagaatatcgtcgcctggcgtgatgagaacggtcagttccagaaccgccagcagctgctgaaggtgagccgtctggggccgaaagcttttgagcagtgcgcgggcttcctgcgcatcaaccacggcgataacccgctggatgcctctaccgttcacccggaagcctatccggttgtcgagcgtatcctggccgccacccagcaggcgctgaaagacctgatgggcgacagcagcgcgctgcgtaacctgaaagcggtggattttaccgacgaacagttcggcgtgccgacggtcactgacatcatcaaagagctggaaaaaccgggccgcgatccgcgtcctgagtttaaaaccgcgacctttgctgacggcgtggaaaccatgaacgacctgctgccgggcatggtgctggaaggggcggtaaccaacgtcaccaactttggcgcgtttgtggatatcggcgtgcatcaggacggtctggtgcatatctcttccctcgccgacaagttcgttgaagatccgcacaccgtggtcaaagcgggcgacattgtgaaggtgaaagtgctggaagtggatcttcagcgtaagcgtatcgccctgaccatgcgtctggacgagcagccgggcgacactaacgcgcgccgtggcggtaatggcggtggccgtgaacagcagcgtccggcagcgaaagccgcgaagccacgcggacgtgacgcacagccagcaggcaacagcgcgatgatggatgctctggcagcggcgatgggtaagaaacgctaa

SEQ ID NO: 525799 - DNA, 228 bp, Stenotrophomonas maltophilia
atgcaattcactccagaaagtgcgtggaaaattatcggttttacccgtgagataagcccggcctatcggcagaagctactgtcactgggcatgctacccggctcatcattccaggtggtgcgcgtggcgccgttgggcgatcctgttcatatcgaaacccgacgcgttaatctggttctgcgtaaaaaagacctcgcattaattgaagttgaatctttatcccgttaa

SEQ ID NO: 525800 - DNA, 2319 bp, Stenotrophomonas maltophilia
atgaaaaaattaactattggcttaattggcaatcctaattccggcaagacaaccttatttaatcagttaaccggcgcacgccagcgtgtgggaaattgggcaggcgtaacggttgaacgcaaagaaggccagttcacaacgacagataatcaggtcacgctggttgatttaccggggacctattcactcaccacaatttcatctcagacctctctcgatgagcaaattgcctgccactatattctgagcggcgacgcggatctgctcatcaatgtggtggatgcctccaatctcgaacgaaatctgtacctcacgctacagctgctggagctggggatcccctgcatcgtagcgcttaatatgctcgacatcgccgagaagcaaaagctgcgcatcgacgtcgacgccctctccgcccgtctgggctgcccggtggttccgctggtttctacccgcgcgcgcggcattgacgccctgaagctggcaattgaccgccacacgggcaatgccgacgtcgaactggtgcactacgcccagcctctgctgcgcgaggccgggcagctggcgcaggagatggacaacgccatgcccgccagacagcgcctgtggcttggcttgcaaatgctggaaggcgatatctacagccgcgcctacgcaggcgatgcggcggataaactgagcgttgcacaggctcgcctgagcgacgagctggatgacccggccctgcatattgcggatgcgcgctatcaggccatcgccgctatctgtgacgtggtcagcaatgcattaaccgctgaacccagccgcttcaccgccgccgtggataagattgtgctcaaccgcttcctcggtttgccaatctttttactggtgatgtacgtaatgttcctgctcgctataaacatcggcggtgcattacaacccatctttgatggcggctctgtcgctatcttcgtgcacggtattcagtggctgggctacaccctccacttcccggaatggttgaccatcttccttgcgcaggggatcggcggcgggatcaacaccgtcctgccgctggtaccgcagatcggcatgatgtacctgttcctctccttccttgaagattccggttacatggcacgcgccgccttcgtgatggaccgcctgatgcaggcgctggggctgccggggaaatccttcgtgccgctgattgtcggttttggctgtaacgtgccgtcagtcatgggcgcacgtacgctggacgcaccgcgcgaacgcctgatgaccatcatgatggcgccgttcatgtcctgcggcgcacgtctggcgatcttcgcggtctttgccgcggcgttctttggtcaggaaggggcgctggccgtcttctccctgtatgtgctgggtatcgtgatggctattctcaccggcctgatgctgaagcacaccatcatgcgtggcgaagcgtcgccgttcgtgatggaactgccggtttatcacgttccgcacctgaaaagcctgattatccaaacctggcaacgcctgaagggctttgttctgcgcgccggtaaggtgattgtagtggtcagcattttcctgagcgccctgaacagcttcaccctgagcggccaggcagcggacaacattaatgactctgccctggcctccgtcagccggctcattacgccgatcttcaaaccgattggcgtacaggaagacaactggcaggcaaccgtgggcctgttcaccggcgcgatggcaaaagaggtggttgtcggcaccctgaacacgctctacaccgcggaaaacatccaggaagaggagttcaacccggctgagttcagcctcggtgacgaacttctgggtgcagtagaagagacctggcagagcctgaaagacaccttcagcctgagcgtgctggcgaacccgattgaagccagcaaaggcgacggcgtaatggcgaccggagcaatgggcgtgatgggccagaaatttggcagcgcgtcggcggcctacagctacctgatcttcgtcctgctctatattccgtgcatctcggtcatgggcgccattgcccgtgagtccagccgcggctggatgggcttctccattctgtgggggctgaacattgcctactcgctggcgaccgtgttttatcaaaccgtcaattacagccagcatccgcgctacagcctggtctgtatcctcgcggtgatcctgtttaacgtgatggtgattggcctgctgcgccgggcgcgtagccgcgttgacgttaacctgctggcaacgcgcaaaacccctacgacctgctgtagcagccctgcgggcgactgtcactga

SEQ ID NO: 525801 - DNA, 237 bp, Stenotrophomonas maltophilia
atggcatcgttgattcaggtccgtgacttactggcgttacagggacgaatggaggcgaagcagctcagcctcagcctgcatacgccgcagccgatgatcgatgccatgctggaaaggctggaggcgatggggaaagccgtgcgcattcaggaagagccggacagttgtctgtccggcagttgtaaaagttgtccggaaggtaaagcctgcctcagggagtggtggacgcttcgctga

SEQ ID NO: 525802 - DNA, 783 bp, Stenotrophomonas maltophilia
atgaagacgctgtggtggcagaccgttggaacgggaaattgtcatcttgtgctgctgcacggatggggactgaacgccgaagtgtggcgttgcataagtgaggaactggcctcgcaatttacggtacacctggtggatctgccggggtatggccgcagccacggctacggcgcgatgacgctcgaggacatggcggagcaggttctggaagcggcgccgcaaaaagccgtctggctcggctggagcctgggcgggctggtggcaagccagattacgctgcgccatcctgagcgggtgcaggcgctgatcaccgttgcctcatcaccctgtttcagcgcccgcgaggcgtggccgggcatcaaacctgaggtgctggccgggttccagcaccagttgagcgaagatttccagcggacggtggagcgtttcctggcgttgcagacgatgggaactgaaaccgcccgtcaggacgcgcggatgctgaagcagacggtgctttccctgccgatgccggaggttgaggtgctgaacggtggactggagatcctgaaaacggccgatctgcgtgagccgctggcgtcactgaccgtgccgcatctgcgtatttatggctatctggatgggctggttccgcgcaaggtggttccgctgctggatgcgctgtggccggagagtgaatcaatggtggttgccaaagcggcacatgcgccgttcatctctcatcctgctgagttttgttcggcgctgaccggttttatcagcgaagcgtccaccactccctga

SEQ ID NO: 525803 - DNA, 681 bp, Stenotrophomonas maltophilia
atgctaacagtgcccggcttgtgttggctatgccgaatgccacttgcgctgagcgcgtggggcgtctgttccgtttgcacgggagcgctgggttacctgaagggctgtccgcaatgcggcttgcctgccgtaagccagacgcttccctgtggtcgatgcctgaaaaaagcgccgccgtggagcgcgctggtggcggtggatgattacgttttgccgctgagtcgtctggttcatcagtttaagttttccagccagttcgcgctggcgcagccactggcacgcctgttattactggcggtattgcaggcgcgaagaacgcgtgggctaccgtcggtcgacacgctcgtgaacgtgccactctttcagcgtcggcactggcggcggggatacaatcagagcgacctgctgtgccgtccgctcgcccgctggctgggttgccggtaccccgcctctgcgctgaaacgtattcatgccactgccgttcagcaccggctcaacgcccggtcgcgcaaaagaaacctgaaaaacgcctttcgccttgaattgccggtcaacggtctccatatcgcgattgtggatgatgtcgtcaccacgggcagtaccgtggctgaactttcccgactgcttttgcaaagcggcgccgcgtcagttcaggtatggtgtctgtgccgtaccttgtag

SEQ ID NO: 525804 - DNA, 576 bp, Stenotrophomonas maltophilia
atgatccgtatttccgattctgcacaagcgcactttgccaaactgctggcaaatcaggaagaagggacgcagatccgcgtgtttgtgatcaatccaggcactccgaatgcagaatgtggtgtctcttattgtcctccggatgctgtggaagcaactgacactgcccttaaatttgaacagctcaccgcatacgttgatgagctgagcgcgccgtatcttgaagatgcggagattgatttcgtcaccgaccagctgggttctcagctgacgctgaaggcgccaaacgcgaagatgcgtaaagtctctgacgatgccccgctgatggagcgtgtggaatatctgctgcaatcgcagatcaacccgcagctggccggccacggtggacgtgtttccctgatggaaatcaccgaagatggtctggcgatcctgcaattcggcggcggctgtaacggctgctccatggtcgatgtaaccctgaaagaagggatcgagaagcagctgctgaacgaattcccggaactgaaaggcgtgcgcgatctgaccgaacaccagcgcggcgagcactcttactactaa

SEQ ID NO: 525805 - DNA, 1317 bp, Stenotrophomonas maltophilia
atgccattagtcatcgtcgctatcggtgttgtgttattactgctcttgatgatccgcttcaaaatgaacggatttatcgctctggttctggtggcacttgcagtcggtctgatgcagggaatgccgctggttaaagttatcagctccattaaagccggtgtcggcggtacgctcggcagcctggcgctgatcatgggcttcggcgccatgctcggtaaaatgctcgcggactgcggtggcgcgcagcgtattgccactacccttatcgataaatttggcaagcagcacatccagtgggcggtggtgttaaccggttttaccgtcggtttcgcactgttctatgaagtgggcttcgtcctgatgctgccgctggtgttcaccatcgccgctgccgccaacatcccgctgctgttcgtaggcgtaccgatggctgcggcgctgtccgtcacccacggcttcctgccgccgcatccgggtccaacggctatcgccaccatcttccacgccgacatgggtaaaaccctgctgttcggtacgattctggcgatcccaacggttatcctggccggtcctgtttatgcacgcttcctgaaaggcattgataagcccatcccggaaggcctgtacagcgccaaaaccttcacagatgcagagatgcctggctttggcgtcagcgtctggacctctctggtgccggtgatcctgatggcaatgcgtgccgtagcagagatggttctgccgaaaggtcacgcgttcctgtccgttgcggagttcctgggcgacccggtgatggcaacgctgattgcggtcctgatcgccatgttcaccttcggtcttaaccgtggtcgttccatggatcagatcaacgacacgctgacctcttccatcaaaatcattgccatgatgctgctgatcatcggcggtggcggcgcgtttaagcaggtgctggtcgacagcggcgtggataaatacattgctgccatgatgcatgaaaccaacgtatcgccgctcctgatggcatggtctattgccgcggtgctgcgtatcgcgctgggctctgcaaccgttgcggcgattaccgcgggtggtatcgttgcgccgctgattgcgaccacgggcgtaagccctgagctgatggttatcgcggtcggttcgggcagcgtgattttctcacacgtgaacgatccgggcttctggctgttcaaggagtacttcaacctgaccatcggtgaaaccatcaagtcctggtccgcgctggaaaccattatttcggtgtgcggtctggtcggggtgctgctgttgaatatggtgatttaa

SEQ ID NO: 525806 - DNA, 2079 bp, Stenotrophomonas maltophilia
atggagagtaaacgtctggacagtgccgcgcaggcggcgggaattagcctcagttacatcaatgcgcacggcaaaccgcagtctattggtgcggacaccaaaagacgtttgctggatgccatgcacaaaaccgacgcgaaagcgtcgggagcgccggtgccgaacgtgaaggtctttaccgcgggcaaaaagatgccgctggcggtggaaggacgcggcgagttcagctggctgctcaccaccgaagaggggcatcagcataaaggccatgccaccggcggcaaaaccctcacccttccggcgaagctgccggagggctatcacagcctgacgctcacccagaatgacagccgcttccactgtcgggtgatcgtcgcgccgaagcgctgctatgagccgcaggcgctactcgaaggcaaaaagctgtggggcgcctgtgtgcagctttacaccttgcgttcagacagcaactggggcattggcgattttggcgacctgaaaaagatgctggcatctgttggtgagcgcggcggggcatttatcggcctcaacccgatccacgccctttatccggcgaatccggaaagcgccagcccgtacagcccgtcttcccgccgctggctgaacgtgatctacatcgacgttaacgcattagacgatttcaaaaacagcaaagaggcgcaggcgtggtggaagcttgagaccacccaacagctgctgaaacaggcccgcgatgcggactgggtcgattatgcctccgtgaccgcgctgaaaatggcggcgctgcgtctggcctggaagggctttgcgaagcgtgacgacgagcagatggcagccttccgccagtttgtgatgcaggaaggcgagagcctttactggcaggcggcgtttgatgcgctgcatgcgtatcaggtccaggaggatgagatgcgctggggctggccggtgtggccggaagcgtatcagtccgtggataccccggaagtgaaggcgttctgtgagacgcatgccgacgaggtggatttctatctctggttgcagtggctggcgtacagccagtttgctgcctgctggcaggtgagccagggctataacatgccgatcggtctgtatcgcgatctggccgtcggcgtggcggaaggtggggcggagacctggtgtgaccgtgaactttactgtctgaaagcctccgtcggtgcgccgccggatattctgggcccgcttggtcagaactggggcttgccgccgatggatccacacgtgatggcggcgcgtgcctacgagccgtttatcgatctgctgcgcgctaacatgcagaactgcggcgcgttgcgtatcgaccatgtcatgtctgtgctgcgtctgtggtggatcccgtacggtgaaacggccgatcacggggcgtacgtgcagtatccggtggacgatctgctctcaatcctcgcgctggagagtaaacgtcatcagtgcatggtgattggcgaagatctcggtaccgtgccggttgagattgtcagcaagctccgcgacagcggggtttactcctacaaagtgctctattttgaaaacgaccatgagaaaaccttccgcgcgccgaaagcgtaccctgaacagtcaatggcagtcgcgacgacgcatgatcttcctacgctcagaggctactgggaaagcggcgacctgacgctcggcaaaacgctgggcctctacccggatgaagaggttctgcgtgggttgtatcaggatcgcgagctggcgaaacaggggctgctggatgcgctgcataagcatggctgtctgccgaagcgcgccgggcataaggcgtcgctgatgtcgatgacgccaacgcttaaccgtggcttacagcgctatattgccgacagcaacagcgcgttgctcggtctgcaaccggaagactggattgatatggcggagccggtaaacattcccggcaccagctatcagtacaaaaactggcgtcgcaagctgtccactacgcttgaagcgatgttcgccgatgacggagtgaacaggctgattaaggatttggataaacggcgaaaagcagccgcgaagaaataa

SEQ ID NO: 525807 - DNA, 2394 bp, Stenotrophomonas maltophilia
atgtcacagcctactttcaacaaagctcaattccaggctgccctgacgcgtcagtggcagcgttttggccttcatgctgcaaacgagatgacgcctcaccagtggtggcaggcggtgagcggggcgctcgcagagcagctggacgctcagcccgcgacgaagcctgtgaaaggccagcgtcacgtcaactacatttcgatggagttcctgattggccgtctgacgggtaacaatctgctgaaccttggctggtatcaggacgttggcgatgtgctgaaagaacacgacatcaacctgaccgatctgctggaagaagagattgatccggcgctgggtaacggcggtctgggacgtctggcagcctgcttcctggattccatggcaaccgtgggccagtcggccattggctatggtctgaactaccagtacggtctgttccgccagtcgttcgctgacggccaccagatggaagcgccggacgactggcatcgtaatacttacccgtggttccgccacaacgcacagctggatgtgcaggtcgggattggcgggaaagtcacgaagcaggggctctgggaaccagcgttcaccattaccggtgaagcctgggatctgccggtgctcggctaccgtaacggcgtggcgcagccgctgcgtctgtggcaggcgaagcacgcgcatccattcaacctgactaaattcaatgacggtggtttcctgcgcgccgagcagcagggtatcgacgccgagaagctgaccaaagtgctctacccgaacgacaaccatctggcgggtaaaaagctgcgcctgatgcagcaatacttccagtgcgcctgctccgtggcggacattctgcgccgccaccacctggcaggccgcaagctggcgcagctgccggacttcgaagttattcagctcaacgacacgcacccaaccattgccatcccggaactgctgcgcgtgctgatcgacgagcatcagctgagctgggacgacgcctgggccatcaccagccgcaccttcgcctacaccaaccacaccctgatgccggaagcgctggagtgctgggatgagaagctggtgaaaacgctgctgccgcgccatatgcagctcatcaataaaattaacgaccagtttaacgtgctggtggagaaaacctggccgggcgacaaagccgtctgggcgaagctggccgtggtacacaacaaacaggtgcgcatggcgaacatgtgcgtggtaagcggctttgcggtgaacggcgtggccgcgctgcactcggatctggtggtgaaagatctcttcccggaataccaccagctgtggccgaccaaattccacaacgtgaccaacggcattacgccgcgtcgctggatcaaacagtgcaacccgctgctggccggcctgctggacaagaccctgaagaaagagtgggccaacgatctggaccagctcatcaacctggaaaaatacgctgacgacgcgaagttccgcgagcagtaccgcgccattaagctggagaacaaggtacgtctggccgagttcgtgaaaatgcgtaccggaattgaaattaacccaaatgcgattttcgatatccagatcaaacgcctgcacgagtacaaacgtcagcacctgaacctgctgcacattctggcgctgtacaaagagatccgcgagaaccctcaggccgaccgcgtcccgcgcgtgttcctgttcggtgcgaaagcggcgccgggctactacctggcgaaaaacattatccttgccattaataaagtggcggcggcggtcaacaacgatccgaaagtgggcgacaagctgaaggtggtgttcctgccggactactgcgtctctgcggctgaaatgctgatcccggcggcggatatttccgagcagatctctaccgccggtaaagaagcgtccggcaccggcaacatgaagctggccctgaacggcgcgctgaccgtcggcacgctggacggtgcgaacgtcgaaattgccgagaaggtcggtgaagagaacatctttattttcggccatactgttgaagaagtgaaagccatcaaagccaaagggtacgacccggtgaaatggcgtaaaaaagacaaagtgctggatgcggtgttgaaagagctggaaagcggaaagtacagcgacggcgacaagcacgcgtttgaccagatgctgcacagcatggacaaacagggcggcgacccgtacctggtgatggcggacttcaccgcttacgttgaagcgcagaagcaggtcgacgtgctgtaccgtgaccaggatgcctggactcgcgcatgtatcctgaacaccgcgcgctgcggtatgttcagctctgaccgctcaatccgtgattatcaggctcgtatctggcaggcaaaacgctaa

SEQ ID NO: 525808 - DNA, 2706 bp, Stenotrophomonas maltophilia
atgttgattccgtccaaattaagtcgcccggttcgtcttgaccatactgtggtccgcgagcgcctgctggctaaactttccggtgcgcataatttccgactggcgctggttacgagtcctgcgggttatggaaaaacaacgctcatttcgcaatgggcggcaggtaaaagcgatcttggctggtactccctggatgaaggtgataaccagcaggagcgttttgccagctatttaattgccgcgattcagcaggcaaccaacggacactgcgtcaccagcgaggtgatggtgcaaaagcgccagtacgccagcctgtcctctctgttctcccagctgtttatcgaactggccgaatggcatcgcccgctgtatgtggtgattgatgattatcatctgatcaccaacccggttattcacgagtcgatgcggttcttcctgcgccatcagccggaaaacctgacgctggtcgtcctgtcgcgcaaccttccgcagctgggcattgccaacctgcgggtgcgcgatcagctactggaaattggcagtcagcagctggcctttacccatcaggaagcgaaacagttctttgactgccgtctgacttctccgattgaggcgtcggaaagcagccgcctgtgtgatgacgttgcaggctgggccacggcgcttcagctgattgccctttccgcgcggcaaaacaatagcccaacgcaccagtccgcgcgccgcctggcgggcatcaacgccagccacctgtcggattatctggtggatgaggtactcaacagcgtagacctcactacccgccatttcctgctgaaaagctccctgctacgttcgatgaacgatgcgctgattgtgcgcgtcaccggtattgaaaacgggcagcttcagctcgaagagattgaacgtcagggtttgttcctgacgcgaatggacgatcccggcgaatggtttagctaccatccgctgtttggcagcttcctgcgccagcgttgccagtgggagatggccgcagagctgccagaaattcaccgcgccgccgccgaaagctggatggcgcaaggtttcccgagcgaggctatccaccatgcgctggccgccggagatgccggtatgctgcgcgatattctgctcaaccacgcgtggggactgttcaaccacagcgaactgacgctgctggaagagtcgttaaaagcgctgccgtgggagagcctgctggagaatccgcgtctggtgctgctccaggcctggctgatgcagagccagcatcgctacagcgaagtgaacaccctgctggcgcgcgccgagcaggaaatggaaagcgagatggatgccaccctgcacggcgaatttaacgccctgcgtgcgcaggtggcgattaacgacggcgacccggaagaagccgaacggctggcgatggtcgcgctggatgagctgccgctggcgaatttctacagccgtattgtggccacctcggtacacggcgaagtgctgcattgtaagggcgacctcacgcgttcgctttcgctcatgcagcaaaccgaacagatggcccgccgccacgatgtctggcattacgccctctggagcctgatccagcaaagcgagattttatttgctcaggggttcctgcaggccgcctgggaaaaccaggagaaagcgttccagctgatccgtgaacagcatctggaacagctgccgatgcacgagttcctgttgcgtattcgcgctcagctgctctgggcatggtcgcgtctggatgaagcagaaagctgcgcccgccagggcctgaatgtgctttcgagcttccagccgcagcagcaactccagtgcctggccctgctggtgcagtgctcgctggcgcgcggcgacctggataatgcccgcaaccaccttaaccgcctggaaaacctgctcggcaacgggcagtaccatagcgactgggtctccaacgccgataaggtccgggtgatttactggcagatgaccggcgataaaaagtccgccgccaactggctgcgtcacacgcctaaaccagaatttgccaataaccacttcctgcaaagccagtggcgcaatattgcccgcgtgcagatcctgctgggtgacttcgagcctgccgaaatcgtgctggaagagttaaacgaaaacgcccgcagcctgcgcctgatgagcgatttaaaccgcaacctgctgctgttaaaccagctttactggcaggcgggacgtaaaaacgatgcccagcgcgtgctgctggaagcgttgcagctggcgaaccgcaccgggtttatcagccactttgtgattgagggtgaagtgatggcccagcagttgcgccagctgattcagctcaacacgctgccggaactcgatcagcatcgcgcccagcgcattctgcgcgagatcaaccagcaccatcgccacaagtttgcgcacttcgatgagaactttgttgaacgtctgctgaaccatccggaagtgccggagcttatccgcaccagcccgctcacacagcgtgaatggcaggtgctggggctgatctattcaggctacagcaacgagcagatagccggtgagctggcggtggcggcaaccaccatcaaaacgcacattcgcaatctgtatcagaagctgggcgtggcgcaccgtcaggacgcggtgcagcatgcgcagcagttgttgaagatgatggggtacggagtttag

SEQ ID NO: 525809 - DNA, 687 bp, Stenotrophomonas maltophilia
atggaaaagaccactgcaacaaaacatatcgccgtcatcgaaagctgctcaatgagcgctatggggctgaagcatctttttgcgatgcccgccctgagccattaccaggtgcacctgtttgccagatttgacaacttcaaagcggcgctctcggaaatctcattctttgccgtaatttattcattgtccgatgagcgtgaggagcgacgaaactgtctggcctgtttgcgggatctcaccttcacccacagcgacgtcaagcgtatcgtgctggcctctgatgaaatggaggcgagactggtcagccatctttcgccttctcgcttacatggaattatcagtaaatcggttccgctgaagcagttaatggaggggctggagacattactcagcgaaacgcatcacgtgaacgacaacgtgtacaatcactggtgtgtgagccagcatcgtatgctaagcccaactgaaagggcgattctgcgatatatgtcatcgggtttttcgatccctgaaattgcggcacagcttgaacgcaatatcaaaaccatccgggcgcataagtttaacgcaatggtaaaattgggcgtcaattctgatgtgggattactggatgcggcagatatcctggcgcatctcccggtcagggaaatacgccgttccgctctcaccgttccttctttctcgtag

SEQ ID NO: 525810 - DNA, 489 bp, Stenotrophomonas maltophilia
  misc_feature (269)..(278): n is a, c, g, or t
atgagtttgcagtctgtacagcagtttttcgccgaacacgctccggatatagaaatcatcgagcttaaccaaagcacagcgactgttgcccttgctgctgccgcgcacaacgttgaacccggccaaattgccaaaacgctgtcactgaaaattaaaaatgatgtgattctggtggttgcaaaaggcgatgcgcgtctggataacaaaaagctcaaagagacattcggcgcaaaagcccgcatgctcagctgcgatgaggtagtaacccnnnnnnnnnnctgcgatgaggttgtaaccctgacgggtcatcctgttggcgacgtctgcccttttggactggaaaatccgctctctgtttactgtgacatcactttaaaacagtacgccgaagtgttacccgcagcgggcgccatccacagtgcggtgcgtatatcgcccgacagaatggcggaactgaccgcagcaaaatgggttgatgtctgtatttga

SEQ ID NO: 525811 - DNA, 1347 bp, Stenotrophomonas maltophilia
atgtctgccaaccatgctgcatttaatctaattttccgcttcgttgaaaattatgtcagccctattgccgggcgcatctcttcccagcgtcacgttatggcgattcgtgacgggttcatctcggcaatgccgtttatgattgtcgggtcgtttttattagtgttcgcttacccacctttttcgccagataccacctggggctttgcccgcgcctggctggatatggcgaagcagtttgaaggtcaaattctgacgccgtttgatatgacgatgggggtgatgtccctctatatctgtgcggctatcgcctacaacctgggcaaacattacgttaaaacccatcagttggatccgttcatgtgcgcgatgctgtcgctgatggcgttcctgctggtcgccgcgcctaaaaccaaaggcgccttaccggttgatagccttggagggaccgggattttcaccgcgatcctggtggcgatttactgcgttgagatgatgcgtttcctgaaagcacacaatatcgggatccgtctgccagaccaggttccgccgatgatcaaaaactcgtttgacctgctgatcccggtgctggtggtggtgctgacgctttatccgctgagtctgttgatccagtcgcagttcggtatgctgatcccacaggccatcatgtcgatattcaaaccgctggtctctgcggcggactcgctgccagcgatcctgctggcggtgctgattggccacctgctgtggtttgccgggatccacggcgcagcgattgtctcgggtatgctgcaaatgttctggctgacgaacctgggggcgaaccagaccgcgctggcggcgagcctgcctttaccacacatctttatggaagccttctggacgttctttattgtgatcggtgggtctggagcgacgatggggctggtgttctgttacctgcgtagccgctccgcgcacctgcgctccattggacgtctgagcgtggtgccaagcattttcaatatcaatgaaccggtgatttttggtacgccgattgtgatgaacccggtgttctttattcctttcctgctggcgccgatggtcaatgccgtactggcatgggcagcgatgaagtttgatctgattggccgcgtgatttccgttgtgccgtggacggcaccggctccggttggtgccgcctgggcgctgggctgggatttccgtgcagccattctggtgctggttttggcctgcgtttccgccattatctatttcccgttcttcaaggtgtacgagaaacagttgcttcagcaggaagcggaagaagcacagcgtaatggggaagaggaaaatcagcaggtcgcttag

SEQ ID NO: 525812 - DNA, 789 bp, Stenotrophomonas maltophilia
atggcgactcgtaccgcacacatcgttgagccactgctctggcgagctccactctccgccggagaaacgacgcttgcggatgccattcgggaaaaaatcgccgtaacacgcgcccatctgctggatttcatcaaactggatgaagcaccgccgcatcatgctctgacgctgactcagtggcaacgacctgccgagctgcggtcactgctggcaacctattccgaccatatttatcgtaaccaaccgacgctggcgcgggaaaataaaccgctgctttccctctgggcacaatggtatatcgggctgatggtgccgcctgtcatgctggccctgttgacccaggaaacgatgctcgatctctcgtcggaacatttccacgtcgaattccatgagaccggacgcgccgcctgtttctggattgatgtacacgaagatccgagcacgagtcacctgtcagcgcaggcgcgtatggaacggttgattacaagagcgctggttccggtcattgatgcgctggaagcgacgggggagatcaacggcaaactgatctggagtaataccgggtatcttatccactggtatttaacggagatgaagccgctgctcggcgacgagaaagtggatgcgctgcgtcagagctgtttctttgccagacagctgtcggatgggcgggataaccctctttaccgcaccgtggttccgcgtgagggacttctggtgcgtcgtacctgctgtcagcgctaccgtctgccggatgtccagcagtgcggcgattgcacgcttaagtag

SEQ ID NO: 525813 - DNA, 762 bp, Stenotrophomonas maltophilia
atgatggcgctattaacagtgctttttatagggtctctggctttcgccagtaatattaaagcctttacgttacattcatttcccgcttttatatcctgcctgtggcttagcccgtccgaaaactggctgagaatggcctattttttcgcactgccggtggtcgccattggtatccatcatgttcttcagcggcgtaatgaccgtttcgcccaggagctgctttccgaactgctcgaagagcgtgaaaccctgaccgatctcagcatgatggacccgctcaccggcctatataaccgtcgcgggctgcaaagccggcttgagaacctccccaggcctgacgctggcgagcactttgtgctgctgatggatatcgaccatttcaaagcctacaacgatcattacggccatatgatgggcgatcaggccttgatcagggtctcggctgcgatccgcgacgccgtgcgctcacgcgatgttgtcgcccggtttggcggggaagaatttatggtgctgttaagtaacatcccactggagcaagcgcgccagacagctgaacgcatacgtcagaaggtttacgatctcaaaatcccccacatgtttaacgaaagcgtcgccactaacgtgaccatcagcattggcatagccatgttcgaaggtgaagacgttgatggcgcactggcgaaagccgataaagccctctatgaagccaagcatatgggacgcaacagcattctgctgagcgacgagcttcatatcgcctga

SEQ ID NO: 525814 - DNA, 231 bp, Stenotrophomonas maltophilia
atgttgagcaaagcgctgggaagtgggtggggaatattgctgcctggttccattatcggtgggctgatgtttgccgatcttcccattgatgtctggaaagcaatgattgtttcgggcttgctggtgacatccgcgatgatctggcacaaacagttacggcattacgtgctgttgccatcatgcgttgcgctaatcagtggactgctggtgattctgatgagtttgaaataa

SEQ ID NO: 525815 - DNA, 1029 bp, Stenotrophomonas maltophilia
atgtctgcatttaccccggcaagtgaagtcttgctgcgtcacagtgatgatttcgaagaaagccgtattctgtttgccggagatatgcaggatgacctgcccgcacgtttcgactgtgctgaaagccgtgcccacacccaatactaccaccactggcaggtgctgagccgccagatgggcgagcgcgcacgctttagcctggtggcggagcagagcgatattgctgactgcgatacgctcatttactactggccgaagaacaaaccggaagcccagttccagctgatgaacctgctttctctgctgccgatcggctgcgatatttttgtcgtcggtgagaaccgcagcggggtgcgaagcgcagagcagatgctcgaaggctacgcgccgttgacgaaaatcgacagcgcccgacgctgcggcctgtatcatggccgtctggaaaaacagaccacttttgatgccaacaccttctgggacgagtaccagcttgacggactgaccattaaaaccctgccgggtgtgtttagccgtgacgcgcttgatacgggcagcaagctgctgctgtccaccctgacgccgcacaccaagggcaaggtgctggatgtcggctgtggcgcgggcgtgctgtcaacggttctcgccagccactcaccaaaagtgcgtttaaccctgtgtgacgtgagcgccccggcggtagaagccagccgcgccacgcttgctgcgaatggcattgaaggcgaagtgattgccagcaacgtcttctccgacgtgaccggtcgctttgacatgatcatctctaacccgccgttccacgacgggatggaaaccagccttgaagcggcgcaaacgctgatccgtggcgcaacccgtcaccttaacagcggcggtgagctacgtattgtggcgaatgccttcctggcgtatccgaaagtgctggatgaaaccttcggcttccacgaagtgatcgcccagacaggccgctttaaggtgtatcgcaccgtgatgacgcgccaggcgaaaaagtaa

SEQ ID NO: 525816 - DNA, 414 bp, Stenotrophomonas maltophilia
atgacatcccgacgagactggcagttgcagcagctgggcatcacccagtgggctttgcgtcgcccgacggcgttgcggggcgaaatagccatctccatccctgcgcatgtccgcctggtgatggtggcagaagcgccgcctgccctgaacgaacccctgattgaggatgtccttcgcaccctgaaggtgacaaacgatcaggtattacagctggcgcccgaaagcgtcgcgatgcttccccctgacagccgctgtaacagctggcgaatcggggcggtggatgagctacctcttgaaggaagccagatcagctcgccagcgctggacgaactgaaagccaacccaaaagcgcgtagcgcgctatggcaacaaatttgcgaatatgaacacgatttcttccctcacgacggctga

SEQ ID NO: 525817 - DNA, 444 bp, Stenotrophomonas maltophilia
atgaacacgatttcttccctcacgacggctgacctggccaccgcgttcgcgattgaaacacgcgcccatgcctttccgtggagcgaaaagacgtttgccagcaatcagggcgaacgctatttaaatctccgcctggacgttgacggtgcgatggccgcgttcgccatcacgcaggtcgttctggacgaggcgacgctgtttaatatcgcggtcgatcccgcttaccagcgccgcgggctgggcagggatctgcttgagcacctcattcgtgagctggaaacccgtgacgttttcaccctgtggctggaggtgcgcgcgtccaatgtcgccgccatcgcgctctatgaaagcttaggcttcaacgaggcgactatccgccgtaactactaccccaccgcagagggacgtgaagacgccattatcatggctctgccgattggataa

SEQ ID NO: 525818 - DNA, 678 bp, Stenotrophomonas maltophilia
atgaaatgggactggattttctttgatgccgacgaaacgctgtttacgtttgactcgttcggcggcctacagcggatgtttctcgactatagcgtgacgttcaccgcggaagattttcaggactatcaggcggtgaacaagccgctgtgggtggattaccagaacggagccatcaccgcgttacagcttcagcatcagcgttttgacgtctgggctgaacggttaaacatcagtcctggggtgctgaacgaggccttcctgaatgcaatggcagatatctgcgcgccgttgcccggcgccgtttctctgctggattcgctgaaagggaaggtgaagcttgggatcatcaccaacggctttaccgcgcttcagcagatccgccttgaacgcactggcttgcgcgatcatttcaacgcgctggtgatctccgaagaggtaggcgtgccgaagccggatccgcgtattttcgattatgcgctggcgcaagcgggcaatcctgaccgcgatcgcgtgctgatggtgggggatacagcagaatctgatattctgggaggtatgagatcgggcctgtcgaccgtctggctgaatgcgcatggccgcacgctgccggaaggcatcgagccgacctggaccgttacgtcattgaacgaactggagcagctcctgtgtaaacaatga

SEQ ID NO: 525819 - DNA, 1590 bp, Stenotrophomonas maltophilia
atgacgttgtctccttatctgcaagaggtggccaaacgccgcacttttgccattatctcgcacccggatgccggtaaaacgaccatcaccgagaaggtgttgctgttcggacaggcgatccagaccgcgggtaccgttaaaggccgtggctccagccagcatgctaaatccgactggatggagatggaaaagcagcgtggtatttcgattaccacctccgtgatgcagttcccgtatcatgactgcctggtgaacctgctggacaccccggggcacgaagacttctccgaagatacctaccgtaccctgacggcggtggactgctgcctgatggtgatcgacgccgcgaaaggtgttgaagatcgtacccgcaagctgatggaagtcactcgtctgcgcgatacgccgatccttacctttatgaacaaactcgaccgtgacatccgtgatccgatggagctgatggatgaagtggaaaacgagctgaaaatcgcctgcgcgccaatcacctggccgattggctgcggcaagctgttcaaaggggtttaccacctctataaagacgaaacctacctgtatcagaccggtaagggccacactattcaggaagtccgcatcgtgaaagggctggacaacccggagctggacgccgctgtcggtgaagagctggccgcgcaactgcgcgatgagcttgagctggtcaaaggcgcttctcacgagttcgacagagaactgttcctgagcggtgacattaccccggtcttcttcggtaccgcactcggcaacttcggcgttgaccatatgctcgacggtctggttgagtgggccccgcagccgatgccgcgtaaaaccgacacccgcgaagtagaagcgaaggaagagaagttctccggcttcgtctttaaaattcaggccaacatggacccgaaacaccgcgaccgcgtcgcctttatgcgcgtggtttccggtaagtacgaaaagggcatgaagctgcgtcaggtgcgtattggtaaagacgtagtgatttccgacgcgctgaccttcatggcgggcgaccgttcccacgtggaagaagcctatccgggtgacatcattggtttacacaaccacggtaccattcagatcggcgataccttcacgcagggcgagatgatgaagttcaccggtatcccgaacttcgcgccggaactgttccgtcgcattcgcctgcgcgatccgcttaagcagaagcagctgctgaaaggcctggtccagctttcggaagagggggctgtacaggtgttccgccctatcgccaacaacgatctgatcgtgggcgcggtgggtgtgctccagtttgacgtggtagttgcccgtcttaagagcgagtacaacgtggaagcgatttacgaatcggtgaacgtggcgaccgcgcgctgggttgaatgttcagacgtgaagaaattcgaagagtttaagcgtaagaacgaagttcagctggcgctggacggtggcgataatctgacctatatcgccccgactatggttaacctgaacctgacgcaggaacgttatcccgacgttcaattccgcaaaacgcgcgagcattaa

SEQ ID NO: 525820 - DNA, 618 bp, Stenotrophomonas maltophilia
atgcatatgacaagactgaagatttctaaaactctgctggctgtaacgttgggtagtgtcctggtaagcggttctgctctggcggaatccagcaccatggataaagcgcaaaataccgctaataccgcaggggaaaaaatcgatagctctatgaataaagtcggtaatttcatggatgacagctctatcacagcaaaagtgaaagccgcactggtggatcatgaatccattaagagcaccgatatttctgttaaaaccgacaacaaggttgtcactctgagcggtttcgttgaaagccagacccaggctgaagaggccgttaaagtagcgaaaggcgttgagggcgtaagctctgtaagcgacaaactgcacgtacgtgacagcaaagaatcgtcggtgaagggctatgccggagatgcagcaactaccagcgaaatcaaagctaaactgttagctgacgacatcgtgccatcccgtatggtgaaagttgaaaccaccgatggtgtggtccagctgtccggtacggttgagaaccaggcacaaagcgatcgtgccgagtcaattgcgaaagctattgatggtgtgaaaagcgtcaaaaacgatctgaaaacgaagtaa

SEQ ID NO: 525821 - DNA, 162 bp, Stenotrophomonas maltophilia
atgtttcgttggggcattatatttctggttatcgcgttaattgccgccgcattgggctttggtggactggcgggtaccgcggcatgggcagcgaaaattgttttcgtcgtcggtattattctgttcctggtcagcctgtttacgggtcgacgtcgcccgtag

SEQ ID NO: 525822 - DNA, 1053 bp, Stenotrophomonas maltophilia
gtggggcaacgaattcccgtgacgctcggcaatattgcgccgctgacgttaaaaccgtttcatgcaggccagcttgcgctggtctgtgaagggggcgggcagcgcggtatttttaccgccggcgtgctcgacgaatttatgcgcgcgcaattcaacccgttcgatctctacttcggtacctctgccggggcgcagaacctctccgcctatgtctgcaaccagcccggctatgcgcgcaaagtgattatgcgctacaccacctccaaagaattcttcaatccggtacgcttcgtgcgcggcgggaacctgatcgatctcgactggttactggatgccacctccagccagatgccgctggccatggataccgcgtcacgactgttcgataccggcaaagcgttctggatgtgcgccagccgtggcgatgactattcgccgggttacttttcgccgcagaaagagaactggctggatatcattcgcgcttccagcgcgatcccgggtttctaccgtaccggcgcgctgctggaggggataaactatcttgacggcggtatcagcgacgcggtgccggtacaggaggccgcgcggcgcggggcgaaaaccattgtggtgatccgcacggtgccttcgcagatgtattacaccccacagtggtttaagcggatggaacgctggctgggcgacagcagcctgcaaccgctggtgaatatcgcgaagcagcatgaaaccacctacggcgcgatgcagcgttttattgaaaaaccaccgggcaagctgcgcatctttgaaatttatccgccgaagccgctgctgagcatggcgctgggcagtcggctgcctgcgttgcgtatggattacaaaacggggcggctatgcgggcgatacttcctggcgaccgtcgggaaaatgctggccgagcaaccgcctcttcatcggcataaaagcatcatattgccacccgctagtgtggccaatgacgcggtggcgatgccgctggtggacgcgccgcaggccaacgacggcatactcgataacgaggacctggcgtga

SEQ ID NO: 525823 - DNA, 783 bp, Stenotrophomonas maltophilia
gtgacgcactcttttatcgatacccattgccactttgatttcccgccgtttagcggggaggaaacatcaagtattgcgcgtgcggctgaggccggtgtgagagccattattgtgcccgctattgaagcggcgagattcgagaaagtcctggcgcttgcccagggtcacgatgcgctgtatgccgcgctgggtctgcatccgatcgtgattgagcaccatcttgatgaccatctcgacaggctggatgccacgctgcaaaacgcggatacgaagctggttgccatcggtgagatcggcctcgatctctatcgtgaagatccgcagtttgaacgccagcagacgatcctggatgcgcagctccggctggcaaagcgccacgatctgccggtgatcctccactccaggcgcacccatgacaaactggcgatgcacctgaagcgcatcgacgtgccgcgcaggggtgtggtccatggtttcgctggaagccttcagcaggcgcagcgttttatcgagctgggctataaaattggtgtcggtggcactatcacctatccgcgtgccagcaaaacccgggatgtgatggcgcagctccccctgtcttcgctcctgctggaaacggatgcccctgacatgccgctgaatggttttcagggccagcccaaccgtccggagcaggcggcgcgcgtttttgatgtgctgtgcgagctgcgtcaggagcctgaagatgtgattgccagcgcgctgctggaaaatacccgcgcggtcttcggcatcacgctatag

SEQ ID NO: 525824 - DNA, 861 bp, Stenotrophomonas maltophilia
atgaacagcagatgcgctttagttagtcaggttattcccttctcctgcgtggacgggccgggcagccgcctggcgctgttcctccagggctgtaacctgcgctgcaaaacctgccacaacccgtggaccatcgggcgctgcaacgactgcggcgactgtgttccccactgtcctcatgatgcgctgacgattcaggccgggcgcgtctggtggcaggagagtcactgtcagcagtgcgatacctgcctgcacctgtgtcagcagcaggcgacgccgatggcgcagcgatacagcgtcgaggagatcctctcacggatccgcacgtccgcgccgtttattgagggcgtgaccgtcagcgggggtgaggccaccacgcagctgccgtttgtggttgcgctgttcaccgcgatcaaagccgatccgtccctgcgccatctgacgtgcctggtggacagcaacggcctgttaagcgaaaccggctggcaaaagctgttaccggtgtttgacggcgcgatggtggatctgaaagcctggggcaatgaacatcaccgttttctgaccgggcgcgaaaacacgctgatcaagcagagcatccgctggctggccgatcgtcatcgcctgacggagctgcgcctgctggtgatccccgatcggtgtgattatctgcaacatctgtcatcgctgaccgcttttatccacgcgttggggaacgttccggtgcggatcaacgcgtttcatgcccatggggtttacggggaggcggcgcgatggcggagcgccgcgccggaggacatcgagccgctggcgcaggccctggaaaggcagcagatcacggtgatccgcccggccctttatctatag

SEQ ID NO: 525825 - DNA, 1536 bp, Stenotrophomonas maltophilia
atgcccgacgccctgcaacaacgatgcctgcacattgtgaccagcccggtgttaaccccggaacaaaaacgtcattttctggcgctggaagcggagaacaatctgctctatcccgctctgccagaggcggcccgcgccgcgctggacgagggatacatctgcgacatgttcgaaggtcatgcgccttacaaaccgcgctacgtgctgccggactacgctaaatttctggctaacggctcagaatggctggagctggaaggggcgaaagatctggatgatgccctctcactgctcactatcctttatcaccatgttccgtccgtcacatcaatgccagtctatctgggtcagctcgatgagatactcaacccatatgttaaaattctaacacaggatgaaatcgatagccgaataaaacgtttctggcgttacctggacagaaccctgcccgatgcctttatgcatgccaatatcggcccggcggatacgcccgtcacgcgtgccattttgcgagcggacgcagagctgaagcaggtcgcgccgaacctgacctttatttacgacccggacgtcacccctgacgatctgctgctgagcgtggcgaaaaacatttgcgggtgcagtaagccgcatatttccaatggcccggtgaatgataaaattttcacaaaaggtcgttatggcgtggtgagctgttacaactccctgccgctggcgggcggcggcagcacgctggtgcgccttaacctgaaagcgattgcggagcacagccgctcaccggaagactttttcacccgtacccttccccactactgccagcaacaaatcgcgatcattaatgcgcgctgcgattttttatatgaacaatccggcttctttgagaatagcttcctggtgaaagaggggctgattgatgccgatcgttttgtaccgatgtttggcatgtacggtctggccgaagcggtaaacgtgctgtgcgagaaagcaggcattacgggacggtacggtaaaaacgagcaggccaatgcgctgggttaccgcatcagtgaacagctggcggcgttcgttgaaaacacgccggtgaaacacggctggcagcaccgcgcgatgctgcacgcgcagtcagggatcagttctgattcaggcaccacgccgggggcgcgtctgccgtacggtgacgagccagatcccatcagccacctgctggccatagccccgcatcataaacactatcattcggggatcagcgatattctcaccctggatgagacggttaaacgcaatcctcaggcggtggtgcagctgtgcctgggagcgttcaacgccggtatgcgtgagttcaccgcgaatgtggccggaaacgacctggtgcgcgtcaccgggtatatggtgcggctctccgacctggagaaatatcgggaggccggctcgcgcaccaacaccacctggctcggcgaggaggccgcgcgcaatacccgtattctggaacgtcagccacgcgtgataagccatgaacagcagatgcgctttagttag

SEQ ID NO: 525826 - DNA, 780 bp, Stenotrophomonas maltophilia
atgaccgatttaactgcaagcagcctgcgcgcgttgaaactgatggacctgaccaccctgaatgatgacgacaccaatgaaaaagtcatcgccctgtgccatcaggcaaaaacgccagtgggtaataccgccgccgtctgtatctatccgcgctttatcccgattgcccgcaaaacgctgaaagaacagggcacgccggacgtgcgcattgcgaccgtgactaacttcccgcacggtaatgacgacatcgagatcgcgctggcggaaacccgcgcggcgattgcgtacggcgcagacgaagttgacgtggttttcccgtaccgcgcgctgatcgccggcaacgagcaggtcggttttgacctggtgaaagcctgtaaagacgcatgtgcggcggcaaacgtgctgcttaaagtgatcatcgaaaccggcgagctgaaagaagaggcgctgattcgtaaagcgtctgaaatctctatcaaagcgggcgcggatttcattaaaacctctaccggtaaagtgccggtcaacgcgactccggaaagcgcgcgcatcatgatggaagttatccgtgatatgggcgtgtccaaaaccgttggcttcaaaccggcaggcggcgtgcgtaccgcagaagacgcgcagcagttcctggcgattgccgacgagctgttcggcgccgactgggcggactcccgccactaccgcttcggcgcgtccagcctgctggccagcctgctgaaagcgctgggtcacggtgacggtaagagcgcaagcagctactaa

SEQ ID NO: 525827 - DNA, 1323 bp, Stenotrophomonas maltophilia
gtgtttctcgcacaagaaattattcgtaaaaaacgtgatggtcatgcattaagcgacgaagagatccgcttctttatcaacggcattcgtgataacaccatctctgaagggcagattgcggctctggcgatgaccattttcttccacgatatgtcgatgcctgagcgcgtgtccctgaccatggcgatgcgagattcaggaaccgttctggactggaaaagccttaacctcaacggcccgattgtggacaaacactccaccggcggcgtgggcgacgtgacctccctgatgcttggcccgatggtggcagcctgcggcggttacatcccgatgatttccgggcgcggcctgggtcataccggcggtacgctcgacaaactggaagccattccgggcttcgatatcttcccggatgacaaccgcttccgcgacattattaaagacgttggcgtggcgattatcggccagaccagctctcttgcgccagcagacaagcgtttctacgcgacgcgtgacattaccgcgaccgtagactccatcccgctgatcaccgcctctatcctcgccaaaaagctggcggaagggctggacgcactggtgatggatgtgaaagtgggcagcggcgcgtttatgccgacctatgaactctctgaggcgctggctgaagcgatcgttggcgtttccaacggcgcgggcgtgcgcaccaccgcactgctgacggacatgaaccaggtgctggcgtccagcgccggtaacgccgttgaagtccgcgaggccgtgcagttcctcacaggcgaataccgtaacccgcgcctgttcgatgtcaccatggcgctgtgcgttgagatgctcatctccggcaagctggccaaagacgacgctgacgcgcgcgcgaagcttcaggctgtgctggacaacggcaaagcggcggagatctttggtcggatggtggcggcgcagaaaggcccgaccgacttcgtggaaaactacgcgaaatacctgcccaccgcgatgctcagcaaagcggtctatgcggacagtgaaggctttgtctcggctatggatacccgcgcgctcggcatggcggtcgtgtctatgggcggcggtcgtcgtcaggcatcggacaccattgattacagcgtcggctttaccgatatggcccgtctgggcgacagcgttgacggccaacgtccgctggcggtgatccacgcgaaagacgaagccagctggcaggacgcggcgaaagcggtgaaggcggcaataactcttgacgataaagcaccggaaaccacaccgacggtctatcgtcgtatcactgaatag

SEQ ID NO: 525828 - DNA, 1224 bp, Stenotrophomonas maltophilia
atgaaacgtgcatttattatggtgctggactcattcggcatcggcgcaaccgaagatgcagaacgttttggtgacgtgggttccgataccctgggtcacatcgcggaagcctgtgcaaaaggcgaagcggacaacggtcgtaaaggccctctgaacctgccaaacctgacccgcctcgggctggtaaaagcgcatgaaggttctaccggtaaaatcgcagccggtatggacggaaacgcggaagtggtgggcgcctacgcgtgggcgcacgagctctcttccggtaaagatacgccgtccggtcactgggaaatcgctggcgtgccggtgctgtttgactggggttacttctccgatcacgagaacagcttcccgcaggagctgcttgataagctggtgaagcgcgccaacctgccgggctacctcggcaactgccactcttccggtaccgtgattctggatcagctcggcgaagagcacatgaaaaccggcaaaccgattttctatacctctgctgactctgtgttccagatcgcctgccacgaagagacgtttggcctggataaattgtacgagctgtgcgagatcgcccgtgaagagcttaccgaaggcggctacaacattggccgtgttatcgcgcgtccgtttatcggcgacaaagcgggtaacttccagcgtaccggcaaccgtcacgatctggccgtggagccaccggcgccgaccgtgctgcaaaaactcgtcgacgagaaagacggccaggtcgtttccgtaggtaaaatcgcggacatctacgctaactgcggcatcaccaaaaaggtcaaagcgaccggtctggatgcgctgttcgacgccaccatcaaagagatgaaagaagcgggcgacaagaccattgtcttcaccaacttcgtggacttcgactcctcctggggtcaccgtcgcgacgttgccggttatgccgcgggtctggagctgtttgaccgccgtctgccagagctgatggagctggtgggggaagatgacattctgatcctgaccgctgaccatggctgtgacccgacctggaccggtaccgaccacacccgtgagcacattccggtgctggtgtacggcccgaaagtcaaaccgggctcgctgggtcatcgtgaaaccttcgcggacatcggccagacgattgcgaaatactttggtacgtctgacatggaatatggcaaggctatgttctaa

SEQ ID NO: 525829 - DNA, 720 bp, Stenotrophomonas maltophilia
atggcaactcctcacattaatgcagaaatgggtgatttcgctgacgtcgtattgatgccgggcgacccgctgcgcgcgaagcacattgctgaaaccttcctcgaagacgtgcgtgaagtgaacaacgtgcgtggcatgctgggcttcaccggtacctataaaggccgcaaaatctccgtgatgggtcacggcatgggtatcccatcctgctccatctacaccaaagagctgatcaccgatttcggtgtgaagaaaatcatccgtgtcggctcctgcggcgcggtgcgcatggacgttaagctgcgtgacgtggtgatcggcatgggcgcgtgcaccgactctaaagtcaaccgcattcgctttaaagatcatgactttgcggccatcgctgattttgacatggtgcgtaacgcggttgacgcagcaaaagcgctgggcgttgacgcgcgcgtgggcaacctgttctctgccgatctgttctactcgccagaaggcgacatgttcgacgtgatggaaaaatacggcattctgggcgtagaaatggaagcggccggtatctacggcgtggcggctgaattcggtgcgaaagcgctgaccatctgcaccgtgtctgaccatatccgtactcacgagcagaccaccgctgccgagcgtcagaccaccttcaacgacatgatcaaaatcgcgctggaatccgttctgctgggcgataaagagtaa

SEQ ID NO: 525830 - DNA, 1281 bp, Stenotrophomonas maltophilia
atgagcaagtctgaaaacctctacagcgcagcccgcgagctaatcccaggcggcgtgaactcacccgtgcgcgcctttaccggcgtgggtggcaccccgctgtttatcgaacgtgcggatggcgcatatctgtatgatgtggatggtaaagcctatgtcgattacgtcggctcctggggcccgatggtactggggcataaccacccagcgatccgcaacgcggtgattgaagccgctcagcgcggcctgagcttcggtgcgccaaccgagatggaagtcaaaatggcggagttggtcaccgaactggtgccaacgatggacatggtgcgtatggtgaactccggtaccgaagcgaccatgagcgctatccgtctggcgcgcggttttaccggccgtgacaagatcatcaagttcgaaggttgttatcacggccatgccgactgtctgctggtgaaagccggttccggcgcgctgaccctcggccagccaaactctccgggggtgccggctgatttcgcgaaacacacgttgacctgcacctataacgatctgaacaccgttcgcgccgcgttcgagcagtatccgcaggagatcgcctgcatcatcgttgagccagttgcgggcaacatgaactgtatcccaccgcagcctgacttcctgccgggcctgcgcgccctgtgcgatgagttcggcgcgctgctgatcatcgacgaagtgatgaccggcttccgcgtggcgctggcgggggcgcagtcatactacggcgtggagccggatctgacctgcctcggcaaaatcattggcggcggcatgcctgtcggcgcgttcggtggacgtaaggacgtcatggacgcgctggcgccaaccggtccggtttaccaggcgggtacgctctccggtaacccgattgcgatggcggcgggctttgcctgtctgaccgaagcggcgcagccgggtatccacgaaaccttaacggaccggacgacgcaactggcaaacggtttgctggaagccgcagaagatgcgggtattccactggtggtgaaccacgtgggcgggatgttcgggattttcttcaccgatgcgaaaaccgtgacctgctatcaggacgtggtgaaatgcgacgtggaacgcttcaaacgcttcttccacctgatgctggaagaaggcgtgtatcttgccccgtcagcgtttgaagcgggctttatgtccgtggcgcacagcgaagaagatatcaataacaccatcgacgcagcgcgtaaggtatttgcgaagctgtaa

SEQ ID NO: 525831 - DNA, 1983 bp, Stenotrophomonas maltophilia
atgagcacgcgtatggcccgtttcccgatgttactgttagcgctcatttttctggctgccctggcattaaccggctttaacctgaccacggcattaccgcgcgatcagtgggcagccgcgtttgtcgcaccggatatcgacaatattcagcaaatgctgttccactacagcctgctgccgcgtctggctatctccctgctggtcggggcgggactgggactggtgggcgtactgtttcagcaggtgctacgtaacccgctggcggagccaaccacgctgggcgtggcgacgggggctcagctggggatcaccatcaccacgctctggaccctgccgggagcgttaacctcgcagtttgccgcgctggcaggcgcatgcgtggtcggtgcgctggtctttggcgtagcctggggaaaacgtctctcaccggtcacgctgatcctcgcggggctggtcgtcagcctctactgtggggcgatcaaccagctgctggtgctgtttcaccacgaccagctgcaaagcatgtttatgtggagtaccggcacgctcacccagaccgactggagtatcgtccagcgtctgtggccgcagctgttcggcggcgtggtgctgacgctgctgctgctgcgtccgctcacgctgatgggcctcgatgacggcgtggcgcgcaatctcgggctggcgctgtcgctggcccgtctggcggccctgaccctggcgattgtgctgagcgcgttactggttaacgccgtcggcatcatcggttttatcggcctgtttgcgccattgctggcaaaaatgctcggcgcgcgccgtctgctggcgcgtctgatgctggcgccgctgattggtgcgctgatcctctggctttccgatcagctcattctctggctggcgcgcgtctggatggaagtttccacgggctcggtgacggccctgatcggcgcgccgctgctgctgtggctgctgccgcgcctgcgcagcattagcgctccggcgatggatgccggcgataaagtgcatgccgagcgtcagtcggtggtgtggttcagccttgccgggctggccgtgctggttatcgcctcgtttgccgcactctcgctgggacgcgacgccacgggctggcactgggcaacgggggatttgctgcatgaactcatgcagtggcgctggccgcggattttctccgcgctgattgcgggcgtcatgctggcggtggcgggctgtattatccagcgtctcaccggcaacccgatggcaagcccggaagttttagggatcagctccggggccgcgtttggcgtagtgttgatgttgttcctcgtaccgggaaatgcgttcggctggctgatgcctgccgggagtatcggtgcggcagtcacgctgatgattatcctgatcgcctccgggcgaggtggtttctcacctcaccgcatgctgctggccgggatggcgctcagcaccgcgtttactatgctgctgatgatgttgcaggcgagcggcgatccgcgcatggcgcagatcctgacatggatttccggttcaacatacaacgccaccggcagtcaggtggtgcataccgggattgtgatgatcgtgctgctggcgattgtgccgctgtgccgccgctggatgaccattctgccgctgggtggggataccgcccgcgcggtcggggtggcgctgacgccaacgcgcattgcgctgttgctgctggccgcgtgcctgacggcgacggccaccatgactatcggcccgctcagttttgtcggattaatggcgccgcatatcgcccgtatgatgggtttccgcaggactttgccgcatatcgtgatctctgcgctgacgggcggggcgatcctggtctttgctgactggtgcggaaggatggtgctgttcccgtatcagatcccggcgggcctcctgtcgacctttatcggcgcgccttactttatttatctgttgagaaagcagagtcggtaa

SEQ ID NO: 525832 - DNA, 891 bp, Stenotrophomonas maltophilia
atgctggatccaacattaattagccgccgtcgcctgctaacggccatggcgctctcaccgctgctgttaaagatgggcccggcccgcgctgccgcagtcgatccgcaccgcatcgtggcgctggagtggttgcccgtcgaactgatgatggcgctgggcgtgacgccttacggcgtggccgatattcctaactacaccctgtgggtgaatgagccaaaactgccggactccgtcatcgacatcggtctgcgtacggagccgaaccttgagcttctcacccagatgaaaccgtcttatttattctggtctgcggggtatggcccgtcggaagagaccatggcgaagattgcgcccggacggggcttttcctttagcgacggtaaaaagccgctgaccatggcaaaaaattccatccacgagatggcgcagttcctcaaccgtgaggctgaggcgaaaaaacatctcaatgaatttgatgcgctgattgattcccttaagccgcgctttgcccaccgtggcgatcggcctttgctgatggtgaccctgctggatgcccgccatatgctggtctttggaaataactgtctattccaggaagttctcgacagctttggcattcgcaatgcctgggaaggcgagatgacgttctggggcagtaccgccgtggggattgaccgtctggcggcgtttcgtgatgtggacgtgctgtgctttgaccacggcaatgagcgcgagatgcaaaccctgatggcgactccgctctggcaggcaatgccgttcgtccgcgagcagcgcttcctgcgcgcgccagcggtatggttctacggcgcgacgctgtcggccatgcattttgcccgcgtgctggacaatgcactgggaggcaaggcatga

SEQ ID NO: 525833 - DNA, 903 bp, Stenotrophomonas maltophilia
atgctactggggagcaggacgccaggttgttgccacggcgaccttccgcttctaacctctttatgggcacggttcgccgtgccctttttatttaagttggctgacatgcaggatactaaaacgcaatccgactccaccttcacgctcaacaatctctcctttcgcgtacccgggcgcaccttgctgcatccgctctctttgacgtttcccgcaggtaaagtgaccggtttaatcgggcacaatggttccggtaaatcgacgctgctgaagatgctgggccgtcatcagccgccgtccgagggcgacattctgctggatgaccagccgctggcgagctggagcagtaaggcctttgcccgcaaggtggcctatctgccgcagcagttgccgcaggcggaggggatgacggtgcgcgagctggtggcgattggacgttatccgtggcacggtgcgctcgggcgttttggcgttgctgacagagagaaagtggaagaggcgatcgcgctggttgggttaaaaccgctggcgcaccgtctggtggatagcctgtccggtggcgagcgtcagcgcgcatggatcgcgatgctggtagcgcaggacagccgctgcctgctgctcgacgaacccacttcagcgctggatattgctcatcaggttgacgtcctggcgctggtgcatcgcttaagccagcagcgcggcctgactgtgattgccgttctgcatgatatcaacatggcggcacgctactgcgactatctggtagcgctgcgcggcggtgaaatgatcgctcagggtacgcctgccgaactgatgcgcagcgaaacgctggaacatatctacggtattcctatgggcattctgcctcacccggccggggctgcacccgtgagctttgtctactga

SEQ ID NO: 525834 - DNA, 2211 bp, Stenotrophomonas maltophilia
atggcgctttccaatactgctcagccaattaacacgtcgctgcgtaaaatcgcagccgtcgtagccacagcggttgctggcatgtctgcttatgcacaggccgctgaaacccccaagaaagaagaaaccatcaccgtgactgccgcaccggctgcacaggaaagtgcctggggtcctgcaccgacgattgcggcaaaacgcactgcaacggcgacgaaaaccgatacacccattgagaaaaccccgcagtctatttctgttgtgactcgtgaagagatggacatgaaacagccggggacggttaaacaggccctggcctacaccccaagcgttttcgcaacgcgcggcgcctcaacaacttacgatgtggtttcgattcgtggtttcacgacctccagcaccgtgaataccaaccagtatctggatggtatgaagttgcagggagacaactactctgaagcgtccatggacccgtacttccttgagcgcgtagagctgctgcgtggcccgacgtctgtactgtatggcaaaagccatccgggcggcgtagtgagtatggtcagtaagcgtccaaccacggaaccgttgaaagaaattcagttcaaaatggggacggataacctctggcagacggggtttgatttcagcgacgcgattgacgatgacggcgtgtggtcctaccgtctgaccggtctgggacgtagtgagaacgcgcagcaggaaatggtgaagtctactcgttacgcgattgcgccgtctttcagctggcgtcctgatgataaaaccgatttcaccttcctgagcaacttccagagcgatccggatgcgggttactacggctggctgccacgtgaaggtaccgttgtgccttactatgatgctaacggaaaagcgcacaaactgccgaccgacttcaacgaaggtgatgaagacaataagatctcccgtcgtcagaaaatggtgggttacagcttcgcgcatgaattcaacgacaccttcaccgtgcgtcagaacctgcgttataccaaaatcaacacgctgtaccgttcagtttacggttacggctatatcgccccggcccagatcagccgtgcctacgtgcgctcagatgaagatctcaactcgttcacggttgatacacagctccagtcgaaattcgcgaccggcgccgttgaccataccctgctgacgggtgtggattaccttcgtatgcgaaatgacattgatgctgactacggcaccgccgatccgatcagcatgaacaatcctcagcacggcaatgcgaacgtcaatgtgaacttcccgtatgccatgctcaatcgtcaggagcagaccgggctctatgcgcaggatcaggctgaatgggataagtgggtactcaccttgggtggccgctatgactttgcgaaaacgtctgcctttaaccgtaataacggaaccaccgcggaaattaacgatcaggcatttacctggcgcggggggattaactacctgttcgacaacggggttacaccatacttcagctacagtgaatctttcgaaccgctctctggcaccacccagggcggcaaaccgttcgatccggcacgcggcaagcagtatgaagcgggcgtgaagtatgttccaaaagatctgcctgttgtagtgacggcagcggtataccagctgaccaagaacaataacctgaccgccgatccggcgaacccgaccagcggctttagcgtgcagggcggtgaaattcgctcccgaggctttgagctggaagcgaaagcggcggtgtcggctaacgtgaacgtgacggcggcctacagctacaccgatgcggaatacacccacgatacctggtatgaaggtcgtcgtccggcagaagtaccgcgcaacatggcatcactgtgggcggattacaccttccacgagacggcgctaagtggcctgaccgttggtgcgggtgctcgctacatcggtaacacggtgacgtactactcctcagcgtcgcctaaagcctatgagtcctttaacgtcgcgggttatgccctggcggatgcgaccgtgaaatacgatctggcgcgcttcggtctgccgggctcttccgtcggcgtcaacgtgaacaacatctttgatcgtgaatacgtctccagctgctacagcgagtatgcatgctactggggagcaggacgccaggttgttgccacggcgaccttccgcttctaa

SEQ ID NO: 525835 - DNA, 2526 bp, Stenotrophomonas maltophilia
atggcggggaatgaccgcgagccaataggacgtaagggaaagccgacgcgtccggcgaaagaaaaggtaagccgtcgtcgcctcagagatgaggagtatgacgatgactatgaagacgattatgaggatgaagaaccgatgccgcgtaaagggaaaggcaaagggcgtaagcctcgtggtaaacgcggctggttctggctgctgctgaagctgtttattgtttttgttgtcctgatcgcgatttacggcgtttatctggatcagaagatccgcagccgtatcgacgggaaagtctggcaattgcctgcggcagtgtacggccgcatggtgaaccttgagccggacatgtccatcagcaagaacgagatggtgaagctgctgcaagccacgcagtatcgtcaggtcacgaaaatgacccgtccgggtgaatttaccgtccaggcgaaaagcattgagatgatccgccgtccgttcgacttcccggacagtaaagaagggcaggtgcgcgcgcgtctgacctttgacggcgatcgcctggaaaccattgagaacatggataacgatcgccagttcggtttcttccgtctcgatccgcgtctcatcaccatgctgtcgtccgcaaacggcgaacagcgcctgttcgtggcgcgtaacggcttcccggatctgctggtggataccctgctggcaaccgaagaccgccacttctacgagcacgacgggattagcctctactccattggtcgtgcggtactggcgaacctgaccgcggggcgtacggtgcagggggcgagtaccctgacccagcagctggtgaaaaacctgttcctctccagcgagcgctcttactggcgtaaagccaacgaagcgtacatggccgtgctgatggatgcgcgctacagcaaggatcgtattcttgagctgtacatgaacgaggtgtacctcggtcagagcggcgataacgagatccgcggcttcccgctggcgagcctgtactactttggccgtccggtagaagagctgagccttgaccagcaggcgctgctggtgggcatggtaaaaggcgcgtcgatctacaacccgtggcgtaacccgaaactggcgctggagcgtcgtaacctggtgctgcgtctgctgcaacaacagcaggtgattgaccaggagctgtacgacatgctgagcgcgcgtccgctgggcgttcagccgcgcggtggggtgatctctccgcagcctgcctttatgcagatggtacgtcaggagttgcagtctaagctcggagataaagtgaaagatctctccggggtgaagatcttcaccacctttgactccgtggcgcaggatgcggcagaaaaagcggcggttgaaggtattccggttctgaagaagcagcgtaagctgagcgatctggaaaccgcgatggtggtagttgatcgcaacaccggcgaagttcgcgccatggtgggcggcgccgagccgcagtatgcgggctataaccgcgcgatgcaggcgcgtcgttcgattggttctctggcaaaaccggcaacctacctgaccgcgctgagccagccgaatctctatcgactgaacacctggattgccgatgcgccaatctccctgcgccagcctaacggccaggtgtggtctccgcagaacgatgataagcagttcagcggtcaggtgatgctggtggatgcgttaacccgttccatgaacgtgccaacggttaacctcggcatggcgctgggcctccccgccatcaccgacacctggcagaagctgggcgtaccgaaagatcagctgcaccctgtgccagcgatgatcctgggggcgcttaacctgacgccaatcgaagtggcccaggcgttccagaccatcgccagcggcggtaaccgagcgccgctttccgccctgcgttcggtgattgccgaagatggctccgtgctgtatcagagcttcccgcaggcggagcgcgctgttccggcgcaggcggcctatatgacgctgtggaccatgcagcaggtggtccagcgcggtaccgggcgtcagctgggggcgaagtatcctggtctgcatctggcgggtaaaaccgggactaccaacaacaacgtcgatacctggttcgccggtattgatggccgtgaagtggtgatcacctgggtgggccgcgataacaaccagccgaccaaactgtatggtgcgagcggcgcgatgtcgatttaccagcgttatctggccaatcagtctccggtgccgctgaacctcgttgccccggaagatatcgtcgatatgggcgtggacagctcgggtaacttcatctgtggcggcggcgtgcgttcgctgccggtctggacgaccaacccggatgcgctgtgccagcaaagccagccagaagaaccgacaggtaacccgttcgatcagtcttctcagcctcagcagccgcagcagcaacagccgcagcagcaggaagagaagaaagacagcgacggcgtcgccggttggatcaaggatatgttcggcggcaactag

SEQ ID NO: 525836 - DNA, 2430 bp, Stenotrophomonas maltophilia
gtgtcctctttgcccgtcgcagtcgtccttcctgagcttctcgcagccttagaacatgcgccacaggttttgctcagcgcgcccaccggagcgggtaaatccacctggctgcccctgcaaattctgcgcgaggggagcatcagcgggaaaattatcctgctggaaccgcgcaggctggcggcgcgcaatgtggcgcagcgcctggcggaactgctgaatgaaaaaccgggcgagacggtagggtaccggatgcgcgccgaaacctgcattggcccgtctacgcggctggaggtggtcactgaaggcattcttacccgtatgctgcaaaacgatccggagctgagcggcgtcgggctggtgatccttgatgaatttcacgagcgcagcctccaggccgatctggcccttgcgctgctgctcgacgttcagcaggggctgcgcgacgaccttcggctgctgattatgtcggcgacgctggataacgagcggctccggcagacgctccctgacgcgccgatgatctcctctgaagggcgtgcgttcccggtcgagcgccgctatcagccgctgcctgcccatcagcgttttgacgaagccgttgccatcgccaccgccgaattgctccgtcaggaacccggctcgctgctgctttttttacccggcctaggcgaaatccagcgcgtacaggagcaactggcatccagggtgagcagtgacgttatgctgtgcccgctctacggcgcgctgcatttggctgaccagcgcaaggcgatccttcccgcaccggcggggcagcgcaaagtggtactggcgaccaatatcgccgaaaccagtttgaccatcgaaggcattcgcctggtggtggacagtacgcaggagagggtggccagttttgatccgcgtaccgggctgaccaggctactgacgcagcgcatcagccaggcctcaatggtgcagcgcgcaggccgagcagggcgtcttgagccgggtatttgcctgcatttaaccagcgccgagcaggcggagcgtgcggcattgcagagtacgcctgagattttacaaagcgatctctccgggctggtaatggatctgatgcagtggggctgcccggaccctgaccagctcacctggcttaatcctccacctgttgtgaacctttccgccgcgcgcagcctgctgacccagcttggcgcgctggaaggcgagcgactgacggcgcgcggccagaaaatggcggcgctgggcaacgatccgcgtctggcagcgatgctggtggcagcacaaggcgacgatgaaattgccacggcggcaaaactggcggctattcttgaggagccgccgcgcggtggcagcagcgatctgggacaggccttttcacgccagcagggaaactggcaacagcgcgcgcagcagttgtgtcaccgcctgaagagccggggaggatcgcctgacagcgataaagttatccctcttctggcccaggccttcccggacagaatcgcgcgccgtcgcgggctggatggtcgttatcaactggcaaatgggatgggcgcgatgctggacagcgatgatgctctgacgcgtcatgaatggctgatcgcgccgctcttactccagggcagtcactccccggatgcgcgcatcttgcaggcggttgccgtagatattgacgccctgacgcgtgcctgcccgcagctgcttcagcaatctgacattgtcgaatgggatgatgcccagggcacgctgaaggcgttccgtcgtagccagattggcaaactgacgctcgggacaaaaccgctggcgaagctgtcggaggaagagttacaccaggcgatgctgaacggcattcgggaaaaagggctgagcgtattgaactggacgcctgaggctgaacaatatcgtatacgtctgcactgcgccgcgaagtggctgccggaacaggggtggccagcggtggatgatgagacgctgctcgcgacgcttgaacagtggttgttgccgcagatgagcggcgtacactccctgcgcgcccttaaggcgcttgatgttaaggcagcgttacagaatttactggactggtcgttacgtcaacgtctggatagtgaactgcctgggcattacactgtgccaaccgggagccggattgccattcgttatcatgaggataatccgccagcgctggcggttcggatgcaggagatgtttggtgaggccaccacgccgtccatcgctgaagggcgcgtgccgttagtgcttgagctgctttcgcctgcgcatcgtcccttgcagatcacccgcgatctgggtgcgttctgggcggggagctatcgtgaagtgcagaaagagatgaaggggcgatatcccaaacacgtctggccggacgatccggcgaataccgcgccgacacggcgcacgaagaaatattcgtaa

SEQ ID NO: 525837 - DNA, 555 bp, Stenotrophomonas maltophilia
atgtctgagtcaaaacggctattcttcgccattgaattacccaccacgcttcaacggcaaattgttcgctggcgcgccagccacttccccgcggaagcgggccgccctgtcgtcgccgccaatatgcacctgacgttagcttttcttggcgaggtgagcgcagaaaagcagcgcgcgttaagcgcaatggccggacgcatttctcagccgggttttacgctgcatcttgacgatgccgggcaatggctgcgctctcgggtggtctggctggggacgcggcagccccctcgcggactgctccagctcgcaaatatgctgcgggcacaggccgcgcgcagcggctgttatcagagcccgcagccgtttcatccccacattaccttgctgcgcgatgcgggtcaggctgttgccatcccgccaccgggctttcactggtcctttcaggtgaatgaatttgcgctgtacgaatctgcctttgtacaaggacgcacccgctatactccgctccagcgctggacgctgggcgatacgttaaggaatcctgatgaagtttag

SEQ ID NO: 525838 - DNA, 705 bp, Stenotrophomonas maltophilia
atgaagtttagccctgcactccagcccgccacgctgatccagcgttacaaacgctttctcgctgacgtgatcacgcctgagggcgaaacgctcacgctgcattgtcctaacaccggcgccatgaccggttgcgccacaccgggtgacacggtctggtattccacatcagaaaatactaaacgcaaatatcctcatacctgggaaatgaccgagacgcaaagcggggcatttatttgcgttaataccctgcgcgcaaatcagctggttaaggaagccctgacaaatggaatccttcctgaactggtgggttacggcacgcaaaaaagcgaagtgaaatatggcgatgaaagcagcagaattgattttatgttacaggcggaagaccgccctgagtgctatattgaagtgaaatcagtgacgttagcggaagaggaaaacggcttctttccggatgcggtaacgctacgtggccagaagcatctgcgggagctaatgagtgtagcggcggcgggcaagcgcgccgtgttgctgtttgcggttctgcattcagccattgaacggttttccccggcccgtcatattgatcctaaatacgcgcaattgttgaatgaggcacaaaagcagggggtagagattttcgcttataaagcggaactttctgccgataatatgactctgagatcctctcttcccattgtcctataa

SEQ ID NO: 525839 - DNA, 342 bp, Stenotrophomonas maltophilia
  misc_feature (292)..(301): n is a, c, g, or t
atgcaagaagggcaaaaccgtaaaacatcgtccctgagtattctcgccatcgctggggtggagccgtatcaagagaagccgggcgaagagtatatgaacgaagcccagctgtcgcacttcaagcgtattcttgaagcatggcgtaatcaactcagggatgaagtcgatcgcaccgttacacatatgcaggatgaagctgctaacttcccggatccggtcgaccgtgccgctcaggaagaagagttcagcctcgaactgcgtaaccgtgaccgcgagcgcaaactgatcaaannnnnnnnnngaggacgaagattttggctactgcgaatcctgcggtgttga

SEQ ID NO: 525840 - DNA, 891 bp, Stenotrophomonas maltophilia
atgtctgaatctcactatatcgggcgctttgcgccatctccctccggtgaattacacttcggctcattaattgccgcgctcggcagctacctacaggctcgcgcccgtcagggtaaatggctggttcgcattgaagatatcgatcctccgcgtgaagttcccggtgcggcagaaactattctgcgtcagctggaacattacggtcttcactgggacggcgacgtactctggcagtctcaacgccatgatgcctaccgtgaacgtctggcgtggctttctgaacagggcctttcctataactgcacctgcacgcgtgcgcgaattcagagcgtgggtggcgtttacgacggccactgccgtacgcggcacaacggccctgagaatgccgccgtacggctgatacagcgcgctccggtgacgcagtttaccgatgtcctctcaggaaccattcaggcggatgatcgtctggcgcgtgaagattttattattcaccgtcgcgatggcttgtttgcctataacctggcggtggttgtcgatgaccatttccagggcgtcacggaaatcgtgcgtggggcggatttggttgagcctaccgtgcggcaaatatcgctttaccagcagtttggctggacggtgccggattacatccatctgccgctggcggtcaatgaacaggggagtaagctgtcaaaacagaatcatgccccggcgctgcctgacggcgatccgcgcccggtattgatcgacgcgctgcgatttctcaaccagaatgtaacgcaggaatggcaggatctgagtctggatgaattgctgaaaacggccattgctgactggacgcttatggccgtgccaaaaatccagcattctcaaatgcgttgcgctgagctatga

SEQ ID NO: 525841 - DNA, 1365 bp, Stenotrophomonas maltophilia
gtgctgagccgcgaagagagcatggcgaatgatgctattgcacagccacacatgtcggtcattccgcgtgagcagcacaatatttcccgcaaagatatcagtgaaaatgccctcaaggtgctctatcgtctgaataaagcaggctacgaggcctatctcgtcggcggcggggtgcgcgatttactgctgggcaaaaaaccaaaagatttcgacgtgacgaccagcgccacgcctgaacaggtgcgtaaattattccgcaactgccgtctggttggtcgccgtttccgtctggcgcacgtgatgtttggaccggaaattattgaagtggcgaccttccgcggtcaccacgaagcgggcgtcaacgatcgcacaacttcccagcgcggccaaaacggcatgctgctgcgcgacaacatcttcggctctattgaagaagatgctcagcgtcgcgatttcaccatcaacagcctttactacagcgtggcggattttaccgtgcgcgattacgtcggcggtatgcaggatctgaaagacggcctgattcgcctgatcggcacgccggaaacgcgctatcgcgaagatccggtccgaatgctgcgcgccgtgcgtttcgccgccaagttaaacatgcgtatcagcccggaaaccgcagagccgatcccgcgcctggcgacgctgattaacgacgtcccccctgcccgtctgtttgaggagtcgttaaagctgctccaggcaggctacgggtttgaaacctacaatttgctgcgtgaatacaacctgttccagccgctgttcccgaccattacccgctacttcaccgaaaacggtgacagcgcaatggagcggatgattgcacaggtgctgaagaacacggatacccgtattcataacgatatgcgcgtgaatccggcgttcctgttcgcggccatgttctggtatccgctgctggaaacggcgcagcgcattacccaggagagcggcctcgcctattatgatgcgttcgcgctggcggcaaacgacgtgctggacgaaggctgtcgcacgctggcgatcccgaaacgtattaccacgctggtgcgtgatatctggcagcttcagctgcgtatgtcccgccgtcagggtaaacgtgcctggaaactgatggagcatcctaagttccgcgccgcgttcgatttgctctctctgcgtgctgaagtcgaaagaaaccaggagctacagcgcctggcgcagtggtggggagaatttcaggtctctgcaccaccggagcaaaaagatatgctcacggatctggatgacgagccggcaccgcgccgtcgtcaccgtcgcccgcgcaagcgcgcgccgcgtcgtgaaggcacagcatga

SEQ ID NO: 525842 - DNA, 480 bp, Stenotrophomonas maltophilia
atgacccttgcgtatattgccatcggcagcaatctggcctctccgcttgagcaggttaacgctgccgttcaggcgctgggggagatcccgcaaagccatatcgtggcggtctcctccttttaccgtacgcccccgctcggcccgcaggatcagcctgattatctgaacgccgccgtggtgctggaaacagcccttgacgcagaaacgctgctggataatacccagcgtattgagctacagcagggtcgcgtacgtaaagccgaacgctggggaccgcgcacgctcgacctcgatattatgcttttcggccacaaggtaattaacaccgagcgcctcaccgttccgcactatgacatgaaaaaccgtgcgtttatgctctggccgctgtttgaagtcgcccccgatctcaccttccctgacggcacctcgctgaacgccgttctgcaaagcctcaacgcggaaaaaccggtccgctggtaa

SEQ ID NO: 525843 - DNA, 792 bp, Stenotrophomonas maltophilia
atgaaaccaactaccatctccttattgcagaaatgcaaacaggaaaagaaacgcttcgccactatcaccgcgtatgactacagcttcgcaaaactgtttgccgaagaagggatcaacgtcatgctggtcggagactcgttagggatgacggtacaaggacatgattctactctgccggtcacggtcgaggatattgcttaccatacccgcgccgtgcgccggggtgcgcccgcctgcctgctactttccgatctgccgtttatggcgtatgccaccccggaacaggcctttgaaaatgcggcaactgtgatgcgcgccggcgccaatatggtcaaaatcgaaggcggcgactggctggtcgatacggtgaaaatgctcaccgaacgggccgtgccagtttgcgggcacttagggctgacgccgcaatccgtgaatatctttggcggttataaagttcaggggcgtggcgatgcggcgcagacgctgtttgatgatgccctggcgctggaagccgctggtgcacagctgctggtgctggagtgtgtgccggttgagctggctaagcgtatcactgaggcgctgtcgattccggtgatcggcatcggcgcgggcaacgtcaccgatggccagattctggtcatgcacgacgccttcgggatcaccggcggtcacattccaaaatttgctaaaaatttcctgacagaagcaggcgacatgcgtgctgctgtgcggcagtatattgccgaggttgagtccggcgtttatccgggcgaagaacacagtttccattaa

SEQ ID NO: 525844 - DNA, 852 bp, Stenotrophomonas maltophilia
gtgctaatcatagaaactctgccgctgctgcgccagcatatccgccgtgcacgtcaggaaggtaaacgtatcgccctcgtcccgaccatgggcaatctgcacgacggccatatgaagctggtcgatgaagcgagagcccgtgcagatatcgtggtagtcagtatcttcgttaacccgatgcagttcgatcgcgaagacgatctggcgcgctatccacgtaccttgcaggaagattgcgagaagctcaaaaaacgtcatgcggatatcgtcttcgcaccggcccccgcagatgtttatcctcagggtaccactgaagcgacctacgtcgacgtaccgggtatttcgaccatgctggagggtgccagccgtccgggccatttccgcggcgtttccaccatcgtcagcaagctgtttaacctggtgcagccggacatcgcctgctttggcgagaaagatttccagcagctggcgctgatccgcaaaatggttgccgatatgggctacgacatagagattgtcggcgtgccgattgtacgtgcgaaagatggcctggcgcttagctcccgtaacggctatctgactgcggaacagcgtaaaattgcgccaggcttaagcaaagtcctgaataccatggcagagcaactgctggcaaaagaattaaccgcagaagaaatcatcgctctggctgaacaggcgctgaacgagaaaggtcttcgtgctgacgacgttcaaattcgggatgccgatacgcttctggaactctcagataccagcaaacgtgcggtaattctggtggcggcttggctcggccaggcccgccttatcgacaacaaagtggttgaactggcgtag

SEQ ID NO: 525845 - DNA, 1437 bp, Stenotrophomonas maltophilia
atgatggccctgcccgtcattgtcgccgtcctgctgttgtttgtccccgttccggaaggtctgccgccttatgcgtggcactacttcgccatctttgttggcgtcatcgtcgggttgattttcgaacctctgccgggcgccgtaatcggcctcaccggcgtggtggcgattgcgctgtgcagccagtgggtgctctttagccccgaacagctggctgacccgaaattcaagctggcgggcgcctcctttaaatgggcggtgagcgggtttggtaactccaccgtgtggctgatcttcggtgcctttatgtttgccgcaggctacgacaaaacccgcttcggccgccgcctggcgctgattctggtgaagtacctgggccgtcgcagcctgacgctcggttacgccattacgtttgcggacctgctgctggccccgttcaccccgtccaataccgcgcgcagcggtgggaccatctacccgattatcgctaacctgccgccgttgtacggttcaaaacccaacgacccaagcgcgcgcaaaatcggttcctatctgatgtgggtggcaatcaccgcggcttgtatcaccagctcgatgttcctttccgctctggcacctaacctgctggcactggcgctggtgaaaagcaccgttggaattgatatctcctgggggacctggttcctcgccttcctgccgctgggtatcctgctgatcctgaccatgccgctgctggcctactggttctacccgccagaagtgaaggtaaacaatgaagtaccactgtgggcgacccgcgaactggaaaaactgggcaaactgtcgcgcaatgagatcctgctgctggtgttcgtgtgctgcgcgcttctgatgtggatcttcgccgcggcgtggattgaaccggccatggctgccctgctgatcgttggcctgatgctgtggaccggcgtgctggagtggaacgacatcaccggcaacaaagccgcgtggaataccttcgtctggttcgccaccctggtggcactggcggatggtctctcctccaccggctttatcagctggctgggtaaagaaggcggcctgctaatgagcggtatctcgccgggtgtcgccaccatcgtcctgctgctggcgttctacctgctgcactacctgttcgccagcaccaccgcgcacaccacggcgctgctgcctgcgatgctgaccatcgcctccaccattccgggcatgaatatggaagtgttcgtcctgctgatggtgacctcgctgggcgtgatggggatcattaccccgtacggtactggcccaagcccgatttactacggtagcggctacctgccaaccaaagactactggcgcctcggcactatcttcggcgccatcttcctggcagctctgctgctgattggttacccgtggatgtccatgatgttctga

SEQ ID NO: 525846 - DNA, 1650 bp, Stenotrophomonas maltophilia
atgtcaaacaaaccctttatctaccagaaccccttcccactcgcgcatgacgacaccgaatattatctgctgaccaaagagcacgtttccgttgccgagttcgacggtcaggaagtgctgaaagtcgagccagaggcgttgaccctgctggcccagcaggccttccacgacgcggcgtttatgctgcgcacctctcaccagaagcaggttgcggctattctgagcgacccggaagccagcgagaacgataagtacgtcgccctgcaattcctgcgcaactccgagattgcggcgaaaggcgtgctgcccacctgtcaggataccggcacggcaatcattatgggtaagaaaggccagcgcgtctggaccggcggcggtgacgaagccgcgctgagccagggcgtgtataacacctatattgaagacaacctgcgctactcgcagaatgcggcgctggatatgtataaagaggtgaatactggcaccaacctgcccgcgcagatcgacctctacagcgtggatggtgacgagtacaaattcctctgcatggcgaaaggcggcggttccgccaacaaaacttatctgtatcaggaaaccaaagcgctgatcaccccggcgaagctgaaaaattatctggttgagaagatgcggaccctcggcaccgcggcctgcccgccttaccatatcgccttcgttatcggcggcacctcagcggaagccacgctgaaaaccgtcaagctcgcctctgcgcgctactacgatagcctgccaaccgaaggcaacgcgcacggccaggcgttccgcgacgtccagctcgagcaggaactgcttcaggaagcgcaaaacctcggccttggcgcgcagtttggcgggaaatacttcgcccacgatattcgcgtgatccgtctgccgcgccacggtgcctcctgcccgatcggcatgggtgtttcgtgctccgccgaccgcaacatcaaggcgaagattaaccgcgaggggatctggattgagaagctggagcacaatccgggccagtatattcctgaatccctgcgccagcagggagaaggcgacgtggtaagcattgatctgaacaagccgatgcccgatattctggcgcagctctcctcgcacccggtctccacccgcctgtcgctgaatggcaccattattgtggcgcgcgacatcgcccatgcgaagctgaaagagctgctcgataacggcgaagccctgccgcagtacgtcaaagatcacccgatttactatgcaggcccggccaaaacgccggaaggctacgcgtctggctccttaggtccaaccacagccgggcgtatggactcctacgtggacttattgcaatcccacggtgcgagcatgatcatgctggcgaaaggtaaccgcagccagcaggtgacggacgcctgccataagcacggcggcttctacctcggcagcattggcggcccggcggcggtgctggcgcaaaacagcatcaagagtctggagtgcgtggcgtatccggaactgggaatggaagcgatctggaaaattgaagtggagaacttcccggcgtttatcctggtggatgacaaaggcaacgacttcttccagcagatccagaacaagcagtgcaaaggctgttcacagcgctga

SEQ ID NO: 525847 - DNA, 894 bp, Stenotrophomonas maltophilia
gtggcatcactgatctattcctttgcccaacttgaggcgttcaccgccgtcgctgagcacggcagcctgatgaaggcggccagtaaactcggcaaagatcgtacaaccctgcgggatctgatcgattttcttgaggatgggctgggctacgctctgttcctgcgggaggggcgcagcctgcgcctgacgccggagggggagcagcttcagcggcaggcgcacctgctgatgcggcaggtcaaagcatttgaggcgtttgcccgatcggtgccggacagcgccacgcaggacattgcactcgtttacgatccgttcacccccagagcttttttacaggcgctgattgccacactggcggcgaaaaagatccgcctgagcctgaccagcgcatcgcgcgatgaggcggaagccatgctggcgaacggtcaggccgatctggggatctgccaggcgcgcaaccgcagcgtgggcaatgagatggagtggcgggcgctgggggcgatcgaaatggatttttacgccgcaacgacgctttttgcggaggttgcgtcgccggtgtcgctgctcgatctctctctggttccgcaggtgattatgcatgccgcgtcagacgagccggttgcccgtcgcctgcaaatttcagggcacacgcttttcactaacgaactggagatgctgcgcggcctgctggagaaagggtgcggctggggatttttgccgacgcatcttcaggcggcgcgatggcaaaacgtaaaaaggctgcacaccgaagtgggcagccaggggatcggtcaaacgatggtgacgatctggaaaccgggcagcgacaagcgccggttaattaatgaaacgctgtcgctgctgccatcattgtggaaagactcagcgctgtga

SEQ ID NO: 525848 - DNA, 1296 bp, Stenotrophomonas maltophilia
atgaaaatcaaaacaaaccgcacactgctcgcggcgctggttgtcagcagcctgctctcgccctccgtcatggcggcctgcaacggtaccgacctcacgacctgtccggcgcctttcgatgccagactcccggacgcacataccatgctcacctggagccaggccgatcgcgtggtgggctttcgcaatgactaccgcaactacgcgggcgatgtgttccgccacggcaacgcaacgccgctgctgcccgcagaaaaaccgctcaccgatgcccgctatcaggtgaagggtaagatttacaatcttcaggattacctgaaacgccagaacgtcagcggcatgctggtgctgaaaaatggcaaagtggcctataaatacctgggagaaggcaataccaactcaacgctctggacgtcgcgttccgtgggcaaatcggtggtttccgcgctggtgggcgttgcgataaaagagggtaaaatccactcactggacgacctcatcacccagtacgaaccggatttaaaaggcaccgcctgggagggcgtaacgctaaaacagctcatcacccacacctcgggcgtggcgtggaacgaagattacactaacccgcagtcagacttcgcccggcttaccgaatgcgaagcgaaaccgggcacctacgactgcgtgcgcaccctggtgaaaggattacaccgtgaacacccggcgggtgaaaactggtcctattcctcgggtggcgcctggctgttaggcgatgtgcttgagcgcgccaccggcatgacgctcgcggcgtatctggagaaaagcatctggcagccgtacggcatggcgagcgacggcgtgtggcatgcctacagcaaaggccagcacgacgtgggtgcgcatggatttaacgccacgctggaagactgggggcgtttcggggagtttatcctgcataacggtacattgccggacggaaagcagatcctccccgagggctgggtgaagcagtcctcagcctggacacaggccaaaggatcggtgtccgccgcgcatccgaaaggcttgtacggctaccagtggtggaacaacgaagtgccggccaccgccacaaacgtggagccgaaagtcgaaaattcgctgaaggattccctgtgggcgctgggtatttttggtcagatgatcgtggttaatcagaaagaaaatctggttatcgtccagtggtccacctggccgcaggcagagccgtcattcagcgcccagccgctggaagcgtcgctgatgtttagcgcgattgcgaacgcgctgcgctga

SEQ ID NO: 525849 - DNA, 1302 bp, Stenotrophomonas maltophilia
atggtttcctcaacctcacctgcaacggttcgttcgaaagcgggcgcgattttccgcgtcacgtcgggcaactttcttgagcaattcgacttctttctgttcggcttttatgccacctacatcgcccacatgttcttcccggcaagcagtgaatttgcgtcgctgatgatgaccttcgccgtctttggcgcgggctttctgatgcgtccgatcggggccattgtgctgggggcttacattgataaagtgggtcgccgtaaagggctgatcgtcaccctgtcgattatggccgccggaacctttctgattgtgctgatcccttcttatcagagcattggcctgtgggcgccgctgctggtgctgaccggccgcctgttgcagggcttttcggcaggcgccgagctgggcggggtttcggtttatctggcggagatcgccacgccgggccgcaagggtttctacaccagctggcagtcgggtagccagcaggtcgccattatgatcgcggcggcgatgggctttgcgctgaatatggtgctggaagagagtgccattcgcgaatgggggtggcgtattccgttcctgtttggctgtctgattgtgccgttcatctttttcctgcgccgcaagctcgaagagaccgaggaattcagcgcccgtcgccaccatctggcgatgcgtcaggtcttcacaacgctgctcgccaactggccagtagtcatcgcgggcatgctgatggtggcgatgaccaccaccgcgttttacctgatcaccgtttacgcaccgaccttcggtaaaaaagtcctgatgctcagcgcctcggacagtcttttggtcacgctgctggtagccatttctaacttcatctggctaccgattggcggcgcgctgtcggaccgcttcggacgcaaaccggtgctgatcgccatgacgctgctggcgctggcgaccagctatccggcactgacgatgctggcggcagccccgagtttctcaatgatgctgaccgtgctgctgtggctctctttcctctacggcctgtataacggcgcgatgatcccggccctgacggagatcatgccagcagaggtgcgcgtggcgggcttctcgctggcttatagcctggcaacggcggtctttggcggtttcacgccggtgatttctaccgccttaattgagtacaccggcgataaagcctccccgggctactggatgagctttgccgccgtttgcgccctgctggcaacgctttatctctatcgtcgtcgcacgttaatcctgcaaaccgccgttaaggagtga

SEQ ID NO: 525850 - DNA, 789 bp, Stenotrophomonas maltophilia
atgcttacattcagaacggtgattgccgccctgaccttcgccaccctcagcgcgggcgcgcttgcgcaggaggtgacggtgatgatttctggcggcttcaaagcggcgctggagaagctggcgccgcagtacgaagcgcaaagcggcgacaggctcattgtggtctccggcccgtcgatgggcaaaacaccgcaggccattccggcccggctcgcccggggcgaaaaagcggacgtgttgattatggtgggcgatgcgctggcgaaactggaacaggatcgcaggacggcggcgggctcccgcgtggagctggcggattcgcccgtcgggatggtcgtcaaagcgggcgcgccggtgccggatatcagtacggtacccgccctgcggcaaacgctgctgaaggcgcattccatggcttattccgacagcgccagcggccggtatgttgagagccagttgttccgtaagctgggcatcgacggccaggtccaaaataaagcgcaccgggttgagcgcatcccggtggcgtctgaagtggcaaaagggaaatacgatctcggctttcagcaggtgagcgagcttctgccggtcccgggcgtgacgtttgtgggtaagttgcctgacgacatgcagtacattacccgtttcgccggagccgtaacgcagaaggccgaccatcccgaacagggaaaagcgctgctggcctttctctcctcgccacaggcggccagcgtcattacggcaacgggcttaacgcccgtcagtgcacctcgcgatactgctcggtga

SEQ ID NO: 525851 - DNA, 903 bp, Stenotrophomonas maltophilia
atgcccgtcaattttgacctcaacgatctctatgccttccgcgctttactggaatacggcaatttccgtcttgcggcggagtctatctgcctttcccagtcggcgttgagtcgcagaattgaaaagctggaggcggcactggggacaaaactgttcgacagaaccacccggcgcgtcacgctgaccctgtatggacagacctttgccgaccggtgcgggcaactgcttgtcgacgtggagtccatgctttcggatatcgataaggccagcgaggagcgcacgggattaatcaccgtggcgacagtgccgtcagccgcctgttactttatgccggatgtgatccgccgctttcagtcccgttacccccgcgtgcgcattaaacttatcgacagcagcgccggaaatgttatcgaggccgtcacccgcggacaggcggattttggtatctgctttgcccggagtttacagcccgacatcgagtttgtcccgttggttgaggatgtctacgtggccgcctgccgacgagacagcccgcttgcaaaaagaaaaagcctgacgtggcaggctttttatcagcaggattatatcggtctggataagacctccggcaaccgcaatcttctcgaccagcgggtcggacatattcggcctgagcgccccagcatctgcgaaacgcggcacgtgacgactatgctcgggatggttgaagccgggatcggcattgcggccgttcccgccatgtcaatgccccgcgcagagcattcgctgctgacgtcggtgcctttaacagagccagaggtcaggcgaaccgtggggttgattcgccgccgcgggcggatccagtcctacattgctgccgaactcgaaacgctgatcaccgagcagtatcgcgaggtgcactga

SEQ ID NO: 525852 - DNA, 798 bp, Stenotrophomonas maltophilia
atgattaagtggccctggaaaacgaacgacgctggtcgaaatatggcgctgccctgggatgaggctctggcgatccccgtgctggcgaatctcttgcctgaagagcaatcaaagctgattcagctggccgagcgttttttacagcaaaaacggctggtgccgctacagggcttcgaactggatccgcttaaaaattcgcgcatcgccctgctcttctgcttaccggtactggagctgggtatcgaatggctggatggcttccatgaagtgctgatctacccggcgccgtttatcgtcgatgatgagtgggaggatgacatcgggctggtgcacaaccagcgtatggtgcagtccgggcagagctggcagcaagggccgatcatcctcaactggctggatattcaggactcgttcgatgcctcgggcttcaacctgatcattcacgaagtagcgcataagctggatacccgcaacggcgatcgcgccagcggcgtgccgctgatcccgctgcgtgaagtcgcgggatgggagcacgacctgcacgcggcgatggaaaacattcaggatgagatagacctggtgggtgaaagcgcggccagcattgatgcctatgccgcgaccgatcccgccgagtgcttcgcggtgctgtccgagtatttctttagcgcacctgagcttttcgccccacgcttcccggcgctgtggcagcgtttctgccagttttaccagcaggatccgctccagcgtctgcggcaaagtgaggacgcagccagcacctcctctcatccgttccactaa

SEQ ID NO: 525853 - DNA, 1209 bp, Stenotrophomonas maltophilia
atgcgcacctgtactgagaacatcactgacaatatggccccgaaggcaaactggccccttgcactgggcgccggtttattgggtatcggacaaaacggtttgctggtcatgctgccgcagctggtctccctgaccggactgtcgctctccgtctgggccgggctgctgatgttcggctcgatgctctttttacccgcatcgccctggtggggacgccagagcgagcggcacggctgtaaggtcgtgatgctggcctcgttaggcggctatctggcgagcttcgtcgtgatggcgctggtggtctgggcgatggccaacggcgcgctgaatgccctctggggaatggcgggcctggttctgtcgcgcatgctgtacggcctgacggtatcggggctggtgcctgcggcccagacgtgggccattcaacgcgcggggctggataaaagaatggcggcgctggcaacgataagctctggccttagctgcgggcgtctgctgggaccgcctctggccgcgctgatgctcagcgtcagcccggtcgcaccgctctggctgatggcgctggcgccgtttatcgcgctgcttctggtgctgcgcgaagccgccgatcccccgctgccgccggtggcgtaccagtcgacgcggttacaggcctctatgatgcctttcctgctgctggcgctgctgctggcggcgttggtcagcctgatgcagcttggtttatcgccgcatcttcatccgttatttaatggcgatgccgtgcaaatcagccatcatgtcgccctgctgctgagcctggccgcgctggcgaccctggcggcgcagtttctggtggtacgcccgcagcattttagcccgagggttttactcttaattgccgcggtcttgatggtggcggggcttgggctgatgtgtctcgccagtttagccctgttctacgtgggcattgtcatcacctcgctgggtgccgccatggccacgccgggataccagcttttgctcaacgatcggctgacgacgggcaaaggggcaggggtgatcgccaccagccatacgctggggtacggggccagtgcgctgctggtacccgtggtgacgcgcttttacggtgagcagtttttgattactgccgcatggggaatggcgctgctgtttctcgcggtgagcgtgtgggtacgatcgaccgatcgtacccctgctgaacattag

SEQ ID NO: 525854 - DNA, 1743 bp, Stenotrophomonas maltophilia
atgcgtgctctgccccgctccgccggtacagatgttgcggcccagtgttttttgaacgcgctgctgcgcgaaacgaaggactggcactatcttcccgcaacccgtgcggatgagttatcgcagatacatatcccgctctccccaacccaggccatccgggttccggtacgctatttctcccccacgcagcatcaccagtattgtttcccggccacgctgattcaggctgacagcgacggcggtgacacggtcacattccatcaactgattgatttcattcttgaaaaagagacagtaaaaggcgctctggacgccgatacgctggcgcgctttaagcagcgcgtcctggagagccatacgcacacctggcaggccattgatttacgccacaactgggcaaacctgcgcgataagccgctgacctttgccgaagcggaacaggcgctgctggtcggccatgcttttcatcctgccccaaagtcgcacgagccgtttaacgaggccgaggcgcgccgctatctgccggatttcgcctcgcgcttcccgctgcgctggtttgcggttgagcatgaactgattgccggggaaagtctgaacgtctccctgcgtgaacgtctgctgtgcttcgcggcccagagtgcgccggatcttctcggccacttcaccgacacccgctggctgctgccgatgcatccgtggcaggctgcctatttgctggagcagccgtggtgccagcgtctggttgaaaaaggcgccctgcgggatcttggcgaggcgggcgcacagtggctgcctaccagctcttcccgctcgctgtacagcgaaaccaatagcgacatgattaagttttccctcagcgtgcggctgaccaactccgtgcgcacgctgtcggtcaaagaagttaagcgcggcatgcgcctggcgcggctggcgaaaacggcacgctggcaggagctccaggcgcgctacccgaccatgcgcgtgatgcaggaagacggctgggccgggctgcgcgatgaaagcggcgtcattcaggaagagagcctgatggccctgcgcgtgaacctgctatttgatacgccagatacccaaaccaacgtgctggtgagcctgacccaggcggcaccggacggcggcgacagcctgctggcggcggcggtgcgccgtctgagccagcgtctggatctcccgctcgcccaggccgcccgctgctggctggacgcctactgcgaccgcgtattgcttccgctgttcagcgccgaggcggactacggtctggtcctgctggcgcaccagcaaaatatcctcgttgagatgcagcaggatttccccgttgggctgatctaccgcgattgtcagggcagcgcctggaccgaaggggccgacgcgtggctgaaagaggcaggcgaaaccgaggtggaaaaccgcttcggtgagagccagctgctgcgctacttcccttattacctgctgctgaactctacccttgccgtcaccgccgcgctcgccgctgccggcttcgacagcgaagagaacctgatgccccgcgtgcgtgacgcgctggccaaactgcgcacgacggcgaagcagacccgctgccttgattatgtgctcgacagcccgacctggaactgcaaaggcaacttcttctgctacctgcacgatcgcaacgaaaacaccatcgtcgatccggcggtgatctatttcgactttagcaacccgttttataaggagaaggcgtga

SEQ ID NO: 525855 - DNA, 939 bp, Stenotrophomonas maltophilia
atggcaaacgcgaatatcgtccattccggctacggctttcgctgtacggccacggaacaaaacctgccgctgacgctgggtcttgacggcagcgcggtccttgcgcgtctggccgggctcccggacggctggctggtggacgccctcgaccagctgtttgtagcctcccccgccctgaccctgccgtgggccgcctggcaggatgaacctcaggcgcaggcgctgtttagcctcgcaaacggggattatctggcgcgcgaaatattctggcagctgccgctgtggctgaaaggcgaacgtccgcaggcgagcggcggaatgcagtttgatgaaagccgtcagctgtacttcccgctgcgccctcatcgtccgcagggcgaagtgtatcgccgttacgatccgcagattaagcgcaccctgagcttccgcgtagcggacgtggcgctggacggcgagcgttttacccgctggatgaacaccccacgcgtgaacgccttctgggagatggcgggcccgcaggccgagcaggagaactacctgcgccgtcagctcgactcgacctattgctacccggtgatcggctgctttgacgaccagccgttcggctattttgaactttactgggcggcggaagaccgcattggccgccactatcgctggcagccctatgatcgcggactgcacatgctggtgggtgaagagaactggcgcggggcgcagtatatccgcagctggctgcgcggcctcagccactatctgtatctcgatgaaccgcgtacggcgcgcattgtggcggaaccgcgcttcgacaaccagcgtctgttccgccatctggcgtctgccggtttcgacacggtgaaagagttcgacttcccgcacaaacgttcccgtctcatcatgagcgagcgtcaccgcttcttccatgaggtggaactgtga

SEQ ID NO: 525856 - DNA, 1743 bp, Stenotrophomonas maltophilia
gtgaacgcgctctggcagaaagtgaaccgcgagatggtggcgaagatcctcgctgaactggaatatgaacgcaccctgcgcgccgagccggtttcggcggactactggcgcatcagtatgggcaacgcgacctggcagtttagcgccacgcgtgggatctggggctggctgcatattgaccctgataccctgaccaccgccagcggcgcggcggtcgaagcggaaaacgcgctgctgcaactggccaccgtgctggagatgagcgacgcgcaaacggcggagcacatggaagatctctacgccacgctgcggggcgacatgcagctgttgcaggcgcgtgacacgctggatgccgatgcgctgatccacctcgacccggacgaactacagtgcctgatgcgcggtcaccctaagtttatttttaacaagggacgccgcggctgggggctggatgccctgcgcctttacgcgccggaatatcgcgggcgttttcgtctgtactgggtcgccgtgcaacgcgatcgtctggtctggagcagtgacgccgattgcgatatcaacaccctgctcgccagcgccatggacgatgccgagcgcaaccgattcgacgcccgctggcaggaactggatctggacgacagctggctgccggtgccgctgcatccgtggcagtggcagcaaaaaattgccattcatttcctggcacagctcgcgcgcggtgagatggtggagctgggagagttcggcgatgagtatctggcgcagcagtccctgcgcacgctgaccaacgccagccgtcgcgcgccgtatgacatcaagctgccgctgaccatctacaacacttcctgctaccgcggtattccgggcaagtatattgccgccggtccgctggcctcgcgctggctacagcagcagttcgccagcgatgccacgctgattcactccggggcgcaggtgcttggcgaacccgcagccggatatctgtcgcatccgggttatgccgcattgcctgaggcgccgtaccgctatcaggagatgctgggggtgatctggcgcgagaacccatcctgctatttacaggatggcgaacaggcggtgctgatggccgcgctgatggaaaccgataacgacgggcgcccgctgattgacgcatggatcaaacgctcggggttaaccgctgacgcatggctggaaaagctgtttgaggcgacggtgatccccttctatcacctgctctgccgctacggggtggcgctcatcgcccacggccagaacgtcacgctggtgatgaaagattacgtcccacagcgcattctgctgaaggatttccagggcgacatgcgcctggtggacgaggatttcccgcaggcgcagagcctgccggagcaggtaaaagccgtcaccgcacggctcagtgcggattacatcatccacgacctgcaaaccggcaactttgtcacggtgctgcgctttatttcccgtctcaccctgcaaaccggcgtgagcgaaacccgcttctatcagatcctggcgcaggtgttacgtcgctatatggccgcccatccggatcttgcggcgcgcttcgcgaagttcgacctgtttaagccgcagattattcgcgtgatcctcaacccggtcaaactgaccttctctgaacacgatggcggcaaccgcatgctgccgaactacgtctgcgatcttgataaccctctttttctggtctcccaggagtcagcgcaatga

SEQ ID NO: 525857 - DNA, 3558 bp, Stenotrophomonas maltophilia
  misc_feature (1315)..(1324): n is a, c, g, or t
atgaaaacctatgatttcatcggcattggtatcggtccgttcaacctcagtattgccgcgctggcagaggggctggacggttttagctcgctgtttcttgaacgcaaaccgcacttctcctggcacccgggaatgatggtaccggactgccacatgcagaccagcttcctgaaggatctggtcagcgccgtggagccaaccaaccgccacagcttcctgaactacctggtacagcgcaaaaagttctaccgtttcctcactaccgagcagcgcactgtctcgcgcgaggagtttgccgactacttgtgctgggcggcggataacctgactaatctggccttcagccagcaggtgcagcaggtcagctttgatgagcaaaacggtctgtttgaggtcgtgacccagcgggatcgcttcctggcgcgccacgtctgcgtggggattgggaagcagatcaatctgccagactgcgtcaccgcgcaggacgacacctgcttccatgccagcgaaatgatgctgcgcacgccggatttagcaggcaagcgcgtcaccgtcgtcggcggcggccagagcggtgcggatctgtttctgaatatcttccgtggggaatggggccagccgctgagcctcaactggatctcgcgtcgcaacaactacaacgcgctggatgaagccgcgtttgctaacgagtatttcacgccggagtatgtggacagcttctccaccctcggtgacgacgcccgtcgccagatgttgcaggagcagaagatgacctccgacgggatcaccacggagtcgctgctggccatctatcgtgctatgtatcaccgcttcgaagtgctgcgggaaaaaccctgggcgcacctgatgccgtcccgctcggtgacggcgctgacgcgccaggagaacgggcagcgcctgagcatccagcatcacctggacggcggtcgcgaacagctggaaagcgacgtggtgattttcgccaccggctaccgcgccgtgcagcctgctttcctcgctccgctctcttcccgactgcgtctggatgaggatgaagccttctgcatcaacaacgattttacccttgaatgggacggcccgcagagcaaccgcctgtttgccgtcaatgccgggatgcaccgtctcggtattgccgaaccccagctcagcctgatggcctggcgcgcggcgcgaattctgaatcgcgctcacgatgacgagccgtttgaactggcaaccacccccggcgtgatccactggcggagcaccaccagcccggagagcagccaggtttttaaatcattaatgaagaccnnnnnnnnnnaagaccaccgagtactgacacacacattcaggatcaacataacaatgaaacgttctcatctttgggttttaaatccgtgcttacttgccatgctttctacctctgcgtgggcggaagaacaaaaggaagaagatattgtggtctctgccagccgggcacatcgcagcgtggcagagatggcgcaaaccacctgggttatagagcgggcggaaattgagcagcaggttcagggcgggaaagagattaaagaggtgctggcccagctgatccccggcatggacgtcagcagccagggacgcaccaactacggcatgaacctgcgcggtcgctccatgatggtgatggtggacggcgtacgtctgaactcgtctcgcagcgacagccgccagctcgactctatcgatccgttcaacattgaccgtatcgaggtcatttccggcgccacctcgctgtacggcggcggcagtaccggcgggctggtgaacatcgtcaccaaaaaaggccagccggagaccgaagtggagttccagaccggggcaaaaagcggatttaacagccataacgaccatgatgagaacgtctcagcagccgtaagcggcggcaacgacaacgcctctggacgtctgtcggtctcctatcagcgctacggcggctggtatgacggcaacggcgacgaggtgattatcgataacacccagaccggcttgcagtattccgaccgtatcgacgtgatgggaacgggcaccatcaacatcgacgatcatcagcagctccagttaaccacccagtactacaagagcgaatccgacggcaagcacggcctgttcctcggagataatttcgctgcggtcacgggcgatgccaaagcctataacaaagacaacctggactctgaccgtatcccgggcacagagcgtcacctgatcaacctgcagtactcgaacaccgacttctgggggcaggatctggttgcgcagatttactaccgtgatgagagcctgacctactacccgttcccgacgctgagcaaaggcgcggtgaccagcattggcgcgtcccagcagaaaaccgatttttacggtggcaagctgacgctgaacagcaagccgatggacgacctgaccctcacctggggtgtggatgccgatcacgaaacgttcgacgccaaccagcagttcttcgacttaagcaaagcggcggcgagcggcggcatggagctggacaacgcctacaacgtgggccgttacccgggatacagcattaccaacctcgcgccgttcctgcaagccagctatgacattgacgctatcaccctgagcggcggcgtgcgctaccagtacaccgaaaacaaggtggacgattttgtcggttacgcccagcagcaggcaatcgccacgggcaaagccacctccgctgacgcggtgccgggcgggaaaaccgactacaacaacttcctgtttaacgccgggatccttggacgtctgaccgaacagcaacagctgtggtttaacttctcccagggcttcgaaattccggacctggcgaagtactacggctccggcacctatcagctggtcgatggtcactatcgcctgcaaaacagcgtgaacgtgaacgactcaacgctggacggtattaaggtcaatgcttacgagctgggctggcgcttcaccggcgataacctgcgtacccaggtggcggcctactactcgctctcggataaaaccatcaccatcaacaagagcgacatgaccatcaacctggaagacgacaaacgtcgtatctacgggattgaaggccaggtggattatttcttcaccgacagcgactggagcaccggggcgaactttaacgccatcaagtccgaaacgcgtgaaaacgggaaatggcagaagctgacggtcgacagcgccagcccgtcgaaagccagcgcatgggtgaactgggcgccgggcgactgggccctgcgcgtgcagagcacacaaaccttcgacgtgtctgacgccgacggtaagaagattgatggctataacaccgttgatttcctgggtagctacgccctgccggtgggcaaagtcagcttcagcgtggagaacctgctggacaaagactacaccaccgcctggggccagcgcgcaccggggctgtatagtccaacctacggtgcaccgggtctttatacttataaaggccgtggacgtacgtttggtctgaactactccgttctgttctga

SEQ ID NO: 525858 - DNA, 471 bp, Stenotrophomonas maltophilia
atgccacgtcgtcgcgtcattggtcagcgtaaaattcttccagatccgaaattcggatcagaactgctggcaaaatttgtaaatatcctgatggtagatggtaaaaaatctactgcagaagcaatcgtatacagcgcgctggagaccctggctcagcgttctggtaaaaatgaactggaagctttcgaagtcgctctcgacaacgtgcgcccgactgtagaagttaagtctcgccgcgttggtggttctacttatcaggttccagttgaagttcgtccggttcgtcgtaatgctctggcaatgcgttggatcgttgaagctgctcgtaaacgcggtgataaatccatggctctgcgtctggcgaacgaactttctgatgctgcagaaaacaaaggtactgcagttaagaaacgtgaagacgttcaccgtatggcagaagccaacaaggcgttcgcacactaccgttggtaa

SEQ ID NO: 525859 - DNA, 375 bp, Stenotrophomonas maltophilia; identical to SEQ ID NO: 117275

SEQ ID NO: 525860 - DNA, 288 bp, Stenotrophomonas maltophilia
atgctccataccctgagccgttcaccgtggcaatgcgatatcgacacgttactgagcatgctgcgcgaaggcgatgatctgctgctgattcaggatggcgtgctcgcggcgcttgatggcagccgttttgttgaaatcctcgctaatgcccccataacagtctctgcgcttaaagaggatctggatgcgcggggtctttctggtcaaatttcagccaaaattgacgtggttggctatactgatttcgtcaatcttactgtgacgcacgccagtcaaatgaactggtga

SEQ ID NO: 525861 - DNA, 360 bp, Stenotrophomonas maltophilia
atgaagcgcgtagcgtttgtttttacttctgccccgcatggcagcgcttcaggccgggaagggctggatgcattgctcgcgacctcggctttaaccgaagatattggcgtcttctttttaggcgatggcgtattccagcttctggcaggccaacaaccgcaggctattcttgcgcgcgactacattgcgacctttaaagttctgccgctctatgacattgaaaccttctatgtgtgcgccgactcgctggccgctcgtgggttaaatgagaaaataccgttcgtgctggacgtgacgatcctgacatcttctgcgctgcgcgaacaactttctcactacgataccgttctgactttctga

SEQ ID NO: 525862 - DNA, 387 bp, Stenotrophomonas maltophilia
atgcgttttgcgttaatggtgacgggcccggcgtacggtacccagcaggccagcagcgcgctacagtttgcccatgcgctgcttgatgccggtcatgaactggcaagcgtcttcttctatcgtgaaggggtctataacgcgaaccagtttacgtccccggcgagcgatgagtttgaccttgtgcgcgcctggcaaaaattaaacgaaacgcagggcgtcgacctgcatatctgcgtcgcggcggcactgcgtcgcggcgtgacggatgcgactgaagccgaacgccttggtctggcaggggctaacctgcaaccgggcttttcgctcagcggattaggcgcattagcacaggcggcgttaacctgcgacagagtggtgcaattttga

SEQ ID NO: 525863 - DNA, 723 bp, Stenotrophomonas maltophilia
atgtccaggtcgcttttaaccaacgaaaccagtgaacttgatttgctggatcaacgtccatttgaccagaccgacttcgatattctgaaatcctacgaagcggtagtggacgggttagcgatgctcattggttcccactgcgaaatcgtattgcattccctgcaagatcttaagtgttccgctatccgcattgcgaatggtgagcacactggccgtaaaattggttcgccaatcaccgaccttgcattgcgtatgttgcatgacatgaccggcgcggacagcagcgtctcaaaatgctatttcacccgcgccaaaagcggcgtgctgatgaaatcagaaactatcgcgattcgaaaccgcgaacaccgggtgatcggtctgctgtgcatcaacatgaaccttgatgtgccattctcgcaaatcatgagcactttcattccgccagaaacgccggacgtgggctcatcggtgaactttgcctcttctgttgaggatctcgtgacacagacgctggagttcaccattgaagaggtgaatgccgatcgcaacgtatccaacaacgccaagaatcgtcagatcgtcctgaacctctatgagaaagggatttttgatatcaaagatgccatcaaccaggtggccgatcgcctgaatatctccaaacacacggtttacctctatattcgccagttcaaaagcggcgacttcctggggcaagacaagtaa

SEQ ID NO: 525864 - DNA, 819 bp, Stenotrophomonas maltophilia
atgaaatcactgtttaaagttacgctgctggcgaccactatggctgtagcgctcaatgcgccgctgtctttcgctgctgatactgctgcgaagcctgctgcgactacagacagcaaagcggcattcaagaatgacgaccagaaatccgcctacgcacttggcgcgtctctgggccgttacatggaaaactctctgaaagaacaagagaaactgggcatcaaactggacaaaaaccagctgatcgcaggggttcaggatgcgttcgcagacaagagcaaactgtctgaccaggaaatcgagcagactctgcaagcgtttgaagcgcgcgtgaaaggcgccgctcagaccaagatggaagcagacgctaaagataacgaagcgaaaggcaaagcctaccgcgataagttcgctaaagagaaaggcgttaaaacgtcttctactggcctgatctataaagttgagaaagaaggtaccggcgacgcgcctaaagacagcgacaccgttgtagttaactacaaaggtacgctgatcgacggtaaagagttcgataactcttatactcgcggtgagcctctctccttccgtctggacggtgtgatcccgggctggaccgaaggcctgaagaacatcaagaaaggcggtaaaatcaagctggtcatcccaccggatctggcttacggcaaaaccggcgttccgggtatcccggctaactctacgctggtatttgatgtagaactgctggacatcaaaccggcgccgaaagcggatgcgaaaacagacgcaccggctgacgacaaagccgcagcagctaagaagtaa

SEQ ID NO: 525865 - DNA, 219 bp, Stenotrophomonas maltophilia
atgaaggatacaacgatcgaagcgagactggctgagctggaaagccgcctggcttttcaggacatcaccatcgaagaactgaaccagaccgtgacggctcatgagcttgaaatggcaaaaatgcgcgatttgatgcgacttctcactgaaaaagtgaaggctacgcagtcgtcgcacatcgcctctcaggctgaagagacgccaccacctcattattga

SEQ ID NO: 525866 - DNA, 603 bp, Stenotrophomonas maltophilia
  misc_feature (363)..(372): n is a, c, g, or t
atgaaagtagcaaaagacctggtggtcagcctggcctatcaggtacgtacagaagacggtgtgttggttgatgagtctccggtgagtgcgccgctggactaccttcatggtcacggttccctgatttccggcctggaaacggcgctggaaggtcatgaagttggcgacaaattcgacgttgctgtcggcgcgaacgacgcttacggtcagtatgatgacaacctggttcagcgcgttcctaaagacgtgttcatgggcgttgacgagttgcaggttggcatgcgcttcctggctgaaactgaccagggtccagttccggttgaaatcacagaagttgaagacgaccacgttgtggttgacggnnnnnnnnnnggcaaccacatgctggctggtcagaacctgaagttcaacgtagaagttgttgctatccgtgaagcgaccgaagaagagctggctcatggccacgttcatggtgcgcacggtcacgaccatgaccacgatcacggccacgacggctgctgcggtggtcacggccacgatcatggtcatgaccacggccacggtaaaggtggttgcggtaacggcggctgcggctgccactga

SEQ ID NO: 525867 - DNA, 201 bp, Stenotrophomonas maltophilia
atggctttacgtaaacgctttatcgcgggcgcaaaatgcccgtcctgccaggcgcaagatacgctggccatgtggcgggagaataatatcgatattgttgaatgtgttaagtgcggtcaccagatgcgtgaggccgacaaagaagcccgcgatcacgttcgcaaagaagagcaagtgatcggcatttttcatccagactag

SEQ ID NO: 525868 - DNA, 1806 bp, Stenotrophomonas maltophilia
atggacggttcgaatttactcctcgccggggtgctgtttttgtttgccgccgtcgtcgcggtcccccttgccgcgcgtctcggcattggcgcggtgctgggctatttgctggcggggatagccattggtccctgggggcttgggtttatcagcgatgtggatgaaattctccacttctccgagctgggcgtggtgttcctgatgtttatcatcgggcttgagcttaatccgtccaagctgtggcaactgcggcaatctatttttggcgtcggggcggcgcaggtgttgctcagcgccgccattctggcgggcctgctgatgctgacgcagttttcctggcaggccgcggtgattggcgggatcggtcttgcgatgtcgtcgacggcgatggcgcttcagctgatgcgcgacaaagggatgaaccgcaacgaggcggggcaactgggcttttcggtgctgctgttccaggatttagcggtgatcccggcgctggcgctggtgccgctgctggcaggctccggagacgatcatttcgactggatgaagatctccatgaaggtgctggccttcgcggggatgctgatcggcggacggtttttactgcgtccagtgttccggtttattgcggcatccggcgtacgcgaggtcttcaccgccgcaacgctgctgctggtgcttggttcagcgctgtttatggatgcgctggggctgtcgatggcgctcgggacgtttatcgccggggtgctgcttgcggaaagcgagtaccgccacgagctggagaccgccatcgatccgtttaagggactgctgttagggctgttctttatctcggtgggtatggcgcttaatcttggcgtgctctatacccatctgctgtgggttattgcgagtgtcgccgtgctggtggcggtcaaaacgctggtgctgtatctcctcgcgcggatttacgggctgcgcagctcggaaaggatgcagttttccagcgtgttaagtcagggcggagagtttgcgtttgtgctgttttccactgcgtcgtctcagaagctgttcaaagatgaccagatggcgctgctgctggtgacggtcacgctgtcgatgatgaccacgccgctgctgatgaagctggtggacaaactgctgtcgcgccgcctgaatcccgcagacgatgaagacgaagcgccgtgggtggaagatgataaaccgcaggtgatcgtcgtgggctttggccgcttcggacaggtgattggtcgcctgttgatggcaaataaaatgcgcattacggtgctggagcgcgatatcagcgccgtcaacctgatgcgcaaatatggttataaggtgtactacggggatgcgacgcagcttgagctgttgcgctcggcgggggcagaggctgcggagtccatcgtcatcacctgtaacgatccggaagacacaatgaagctggtggagctgtgccagcagcatttcccgcatctgcatattctggcgcgtgcgcgcggacgtgttgaggctcacgaacttttgcaggcgggtgtgaaacacttctcccgcgaaaccttctccagcgcgctggagctggggcgcaaggcgctggtttcgctgggtatgcatcctcaccaggcgcaacgcgcccagatgcatttccgccggctggatatgcgaatgctgcgtgaactgatgcctgtgcacagcgacacggcgcagatctcccgcgtgcgggaagcgcgtcgcgaactggaggagatcttccagcgtgagatgcaacaggaacgacgccagctcgacggctgggatgaatttgaataa

SEQ ID NO: 525869 - DNA, 552 bp, Stenotrophomonas maltophilia
atgtctcagacagcgaaagtgctgctgctgtatgcccatccggaatcacaggactcggtggcaaaccgggtgctgcttaagccggccacacagctcagtaacgtaacggtgcacgatctctacgcgcactatcccgatttctttattgatattccttacgagcaggaactgctgcgtcagcacgacgtgattgtgttccagcatccgctttatacctatagctgtccggcgctgctgaaagagtggctggaccgcgtgctgagccggggcttttccagcggggtggggggcaaccagctggcgggaaagtactggcggagtgtcatcaccaccggtgagccggaaagcgcttaccgtcacgacgggctgaaccgttaccccatgagcgacattctgcggccgtttgagctgacggcggcgatgtgccgtatgcactggatgagcccgattattatctactgggcacggcggcaggatccgaaagcgctggcgagccatgccagggcctatggcgaatggctggcgtcaccgattccggcgggaggacgctaa

SEQ ID NO: 525870 - DNA, 1905 bp, Stenotrophomonas maltophilia
atgattgttttctcctcgttacaaattcgtcgcggcgtgcgcgtcctgctggataacgcgactgctaccatcaacccgggccagaaagtggggctggtcggcaaaaacggctgcggtaaatccaccctgctggcactgctgaaaaacgagataagcgcggatggcgggaactttaccttcccgggcaactggcagctcgcctgggtaaaccaggagacccccgcgctgagcgaaccggcgctcgactatgttatcgacggcgaccgtgaataccgcaagctcgaagcggagctcaacgccgccaacgagcgcaacgacggccacgccatcgccaccgtccacggcaagctggacgccatcgacgcctggaccattcgctcccgcgcctccagcctgctgcacggcctgggcttcagcaacgaacagcttgaacgcccggtgagcgatttctcgggtggctggcgtatgcgccttaacctggcgcaggcgctgatctgccgctctgacctcctgctgctcgatgaaccgaccaaccacctcgatctcgatgcggttatttggctggagaagtggctcaagagctatcagggcactctgattctgatctcccacgaccgcgacttcctcgacccggtggtggataaaatcattcatatcgaacagcaaagcctgttcgagtacaccggcaactacagctctttcgagcgccagcgcgcgacgcgcctcgcccagcagcaggcgatgtatgaaagccagcagcagcgcgtggcgcacttgcaaagctttgtggatcgcttcaaggccaaggcgtcaaaagccaagcaggcgcagagccgcgtcaaaatgctggaacgcatggagatgattgcccccgcgcacgtggataacccgttccacttcagcttccgcgagccggagagcctgccgaacccgctgctgaagatggaaaaagtgagcgcgggctatggcgatcgcattattctcgactctatcaagctcaacctggtgccgggttcacgcatcggtctgctggggcgtaacggcgccggtaaatcaacgctgatcaagctgctggcgggcgagcttaacccggtcagcggcgaaatcgggctggcgaagggcatcaagcttggctacttcgctcagcatcagctggaatttttacgcgccgatgaatcgccgatccagcacctggcgcgcctggcgccgcaggagatggagcagaagctgcgcgactacctcggcggctttggcttccagggcgataaggtgactgaaaatacagcgcgtttctccggcggcgaaaaagcgcgtctggtgctggcgctgatcgtctggcagcgtccaaacctgctgctgctcgatgaaccgaccaaccacctcgatctcgacatgcgtcaggcgctgaccgaagcgctgatcgagttcgaaggggcgctggttgtcgtttcgcacgatcgccacctgatccgctccaccaccgacgatctctatctggttcacggcggcaaagtggagccgttcgacggcgatctggaagattaccagcagtggttgacggacgtgcagaagcaggaaaaccagccggaagagtcagcgaaagacaacgccaacagcgcccaggcgcgtaaagaccagaagcgccgtgaagcggaactgcgcacccagactcagccgctgcgtaaagagattacccgcctcgaaaaagagatggaaaagcttaacgccacgcttgccgccgtcgaagagaagctgggcgacagcgaactgtacgatcagagccgcaaagcggagctgacggactgtctgcaaacgcaggcgaaaaccaaatccagtctcgaagagtgcgaaatggcatggctggacgcgcaggaacagctggaagcgatgctgcaagccgactaa

SEQ ID NO: 525871 - DNA, 933 bp, Stenotrophomonas maltophilia
atgggcttcgataccacgagcgagattacattccgtaagctcagcatcttcatgacgttcatggacaagggcaatatcgcacgtaccgccgaaacgctcggcctgagcggtgtcagcgtgcaccgcgcgctgcataccctagaagagaacgtccgctgcccgctctttgctcacaaagggcgtaacctgattgcccacccctccgcatggacgctgctggagtattgtcaggaggtgatgcaggtgatggagcgcgggctggaagagtcgcgcaagattgccggtatcggccagggacggttgcgcgtcggtacgctttactcgctgacgctggaaaccgtgccgcgcctgataatgggtatgaagctgcgccgtccggatctggagatggatctgacgatgggctcgaacgaaaccctgctccatatgctggatgaggggtcgctggatgcgattttaatctctatctccgagagcgatatcgaccgtaacagcctcgaagtgctgcccctgttccatgacgatattttccttgccgcaccggcctctgccacgctgaataccagcggtcccgccgatctgcgtgactataaagatcagaagtttgtcgccctcgcggaagggttcgccacttacgccgggtttcaggaagcgtttcatattgccggtttcgagccggagattgtgacgcgggtaaacgatattttctcgatgctgagcctggtacaggcgggggtcgggtttacgctgatgccgggcaggatgaagaaagtgtacgaaaattcggtgcagctactgaagctggcacagccgtaccagatgcagcagctgattgcgatcgtctttgcccgcaaccgcgagcaggatccgagcctgcgagcattggccgcggaagggcggatgtacgccagaagtttgcaggacggagcctga

SEQ ID NO: 525872 - DNA, 897 bp, Stenotrophomonas maltophilia
atgaaaatactgtttacctttccggggcagggcacacagcacgaaggtatgctgcaaaacctgccgggaacggagctggagcaggcccgtgctgtgctgggggcggaagtcgataccctggacagcgcatcctcgttaacccacacccgtgcggttcagctttcactgctgattgccggcgtggcctgggcgcgcgagctggaacgtcgcggcgtgtcgccggatattgtcagcggtctgtccattggcgcttatcctgcggcggttatcgcaggctcgctggactttacggatgcgctgaagctggtggcgctgcgcggtgatttgatggagcaggcgtatccgcacggctacggcctgacggcgattatggggttgaccctgccgcaggtggaaaacctgattcaggggactggaacctatatcgctaacctgaacgccgaaacgcagatcgtgattgccggaaccgatgacggtatggcgcaggtggcggagcgcgcgctggcgaagggtgcaagcaaggccaaacggctggcggtgagcgtgccatcgcactgcgcgctgctggcggaaccggcgaagaagctggcagcggcgtttgaatcggtcacgctttcccgtccccgctgcgcgtacctgagcggcagtaccggacgcgtgctctggcagccggagaaaattgccgacgatctggcaatgaacatggcgcgaaccgtgcgctggcaggaggcggtgatttccgctaacgagcgtgaagcgcggctggcgattgagatgccgccgggaggcatattaacctgcctgacgcggcaggcggcgtgggaaggcgaatccatttcgctggagcgcagcggggtggacgtggcggtgcatctggcggggcggcttcgtgcgtga

SEQ ID NO: 525873 - DNA, 618 bp, Stenotrophomonas maltophilia
atgaccacaacattacgcccacacgacctcatctggcttaccgcgcgcgacgccctggaagggattaccgcatcctgggtagacgcggcctggcataccgggctgccggtagtggtgcggcgtgatgttgataatgaaggccgtattcccgttggcgtgcgcggattgcgccgcgaccagcgggcggccggatgggtgaagcctgagaacgtgttgcgcgtggtgtcgcccgaagagttgagcgttgccgccgacctgctgcgttcgccgtttgtcactcagccgccggttcaggtggctcttcagcttgcgcagcagtcgtggccgtggacgtgggggataaccggcagtacgggttatgcgctggcgaccggcattccggtgatccacgccgacagcgatctcgatctgctgatccgcgccccgcgtaccgtttcccctgaggcgtttactgactggcaggctcagctcagccgtgcgttgtgccgggtggatacgcaggtggacacgcccgagggcggattcgcgctggcagaatggttacgcgacggcaaaacgctgctaaaaacgcaatgtggaccgcgcctggtagcggatccatggcacagggaggagtaa

SEQ ID NO: 525874 - DNA, 960 bp, Stenotrophomonas maltophilia
atgacttacgtaattgttcatgctcttgcaccgattttcgtcatcatgctgctgggattctgggccggtaaagcaaagatggtcgataacaaaaatgtttccctgctgaatatcttcgttatggattttgcactccctgccgcgctgttcagcgccaccgtgcaaaccccgtggaccggcattgtggcgcagtcgccgctgatcctggttctcaccctggcgatgtggatcacctatgcggccatctacttcctcgccaccaaagtctttaaaaaatctccgcaggatgcggccgtactgacgctgaccgtcgctctgccaaactatgcggcgctcggcctgccgattctgggcagcgtgctgggtgaaagttcttctacttcactctccgtggcggtctccatcgcctgtggttcggtgctgatgaccccgttctgcctgcttattctggagcgtgaaaaagcgcgcgccgagggcaataactccggttcaacgctttccatgctgccggtgctgatgtggcgctccattaaaaaaccgatcgtgatgggcccgctgctgggggtgatcctgtccgctatcggcatcaaaatgccagagctggtactggcggcgattaaacctctgggactgtccgcgaccgctgcggcgctgttcctgaccggggtgatcctctccgcgcgtaagcttcagatcaacaccatggtgatcacttccactatcgccaagctgctgatccagccagcgattgcctggggtatcgttttaatcttcggtctgcacggctccgtggcgatcaccgccatcctgatgattgcgctgtctgcgggcttctttggcgtggtgttcggtaaccgctttggcgtgcagtcgccggatgctgaagccgtgctgctgttgagctccatactgtgtattctgtcgctgccgctgtttatctcgctgacttcaggaatgtaa

SEQ ID NO: 525875 - DNA, 804 bp, Stenotrophomonas maltophilia
atgatgactaactcaattagccgtggcgaactctggctggaaactctggccccgaacgcgaaacgtctggaggggttatgcccgtccgtgcaggcggcagacggcgagctgaacggtgaaacggtgcgctttgtcgccgtggtgccggacgccaacaaccacttcccgcgcgcggcgcagggtgaagtcggcctgctggaaggatggacgctggcaaaagtggtcagcgaaaccgtcgccgctgacgccgataaagccgtgaagcgcccgattgtggcggtgatcgatgtcccaagccaggcctatggccgtcgtgaagaggcgtttggtatccaccaggcgctggccggcgccgctgccgcctatgccaatgcgcggctggcggggcatccggtgattggtcttatcgtcggtaaggccatgtccggcgcgtttctggcgcacggctaccaggccaaccgcctgattgccttcaacgataaaggcgtgctgatccatgccatgggcaaagagtctgcggcgcgcattacgctgcgtaccgtggaggcgctggaaaaactggcggcaaccattccgccaatggcgtacgacatcagcaactacgccacgctggggctgctctccgacctgctggatatcagcaacccggatgccccttccgaaagcgatctgacgcgggtgaaaactaccctgcaacaggccatcagcgacgctcgtcaggacaccacgttgaaaaaccgtctgggtgctgacaaccgccgcagctcggcgctcgtacgtgaacgtatgcgagccagctggtaa

SEQ ID NO: 525876 - DNA, 834 bp, Stenotrophomonas maltophilia
atgcgtgatgacagcagctttatcgaattaaaagcgcgccagcgtgcgcaggcgctgctcgacgacggcagctaccgcgaactgctggatccgtttgaaggcattatctctccgtggcttgggccacaggggattgttcctcaggccgatgacggcatggtagtcgcgaaagggaccatcaacggccagcctgcagtggtggtggcgattgaaggcaccttccagggcggcagcatgggcgaagtgtccggtgccaaaatggcggcggcgctggagctggctgcggaagataaccgcaacggcattccgactcaggcggtactgtgcctcgaaaccggcggcgtacgtttgcaggaagccaaccttggcctggcggcgattgccgatatccacgccgcgatcgttgacctgcgtcgctataccccggttgtcgggattgtcgccgggaccgtgggctgcttcggcgggatgtctatcgccgcggcgctgtgcagctacctgattgtaacccgcgaagcgcgtcttggcctcaacggcccgcaggttattgagcaggaagcgggcattgaagaatatgactcccgcgaccgtccgtttatctggagcatgaccggcggcgaagtgcgctatgaaagcggactggtggacgcgctggtgggcgacggcgtgaacgcggtgaaagccgcgatgaacgaggccatcgccaaaggcgtaccggcgaaacatcgcaccgataactatgacgattacctgaaccgtctgacgaatttcgacacccgcaaacaggccgatgccgaacagattaaagcgctttttgcccgggaggtgaaatga

SEQ ID NO: 525877 - DNA, 300 bp, Stenotrophomonas maltophilia
atggaaaaaatcacattgaccgtgcccgccagccgcgaagtaagcggcagggcgctggcaggggtagtcggttccggggatatggaggtgcttttcaccgccgaaccgggccagaccttaatcattgatatcaccacctccgtcgacaacagccgtgggcgctgggaggcgttgttcaatcgcctgcaaaccgtcagcagcctgcccgcaggtaagctgaccatccacgacttcggcgcgacgccgggcgtggcacgcattcgtatcgaacaggtttttgaaggggtgaaccatgcgtga

SEQ ID NO: 525878 - DNA, 858 bp, Stenotrophomonas maltophilia
atgaaacttctgccccagatccaggttgaaggcggtgccgaatggctggcgcgaaccgccacgcagtgtctgattgacgaagcacgtttaagcccgaagcccggtctggtggacagccgggggaacggcgcgcatcacgatttatcgcttgcgctgatgaagcgctccgctcacagcctgacccccacgtttcaggcgctggcgcaacagagctggcagcgtccggcggatattgccctcaggcaaaccgttggccgcctgggtcgtgaaggcgaacggcagatgatggccgcaaccgacggcgtgaacacacaccgtggcgcgatctgggcgctgggattgctggtgagcgcggtggcgatgctgggcggcgatgcccgggcgcaaaccgtcgcgaacaccgccgctcagctggcgaaactgccggatgacgcggcgccgaaagtattcagcaaggggttacgcgtcacgcaccgctatcgtgtaccgggcgcgcgtgaagaggctcagcaggcgtttccgcacatcatgcagcgcgcgctgccgcagcttcacctcagccgtctcaacggcagcagcgaaacgcaggccagactcgacgcgctgatggcgatcatgacctcgctcaccgacacctgcgtgctgtcgcgcgccggcatggaggggctggatgccatgcagaacggtgcccgtgcggtgctgaacgcgggaggatgcgcaacacttgcggggcagcaggcgctggcgcggttagaccgtcagatgctgacgcttaacgcctcgccgggcggagccgcagacctgcttgccgccacgctgtttcttgaccgcgtcgaaacgccctattcaaagcattaa

SEQ ID NO: 525879 - DNA, 1656 bp, Stenotrophomonas maltophilia
atgttatctgggcaaacacccacccggcaatggaacacccgacgcagcgagaaagcgcgtcgtctggcgtccgtaccggtgcagggcaaggtactgccaaccggcgatcttgtcgccatgctggaaaaactgatcgcaccaggcgacaaagtcgttctggaaggcaacaaccagaagcaggcggatttcctttcccgttcactggccgaagtgaacccgcaaatcgtgcacgatctgcatatgatcatgccgagcgtgggccgcagcgaacatctggacatctttgagaaaggcatcgcccgcaagctcgacttctccttctccggtacgcaaagcctgcgcatttcgcagctgctggaggatggtcagctcgaaatcggggcgattcacacctacatcgaactctactcacgtttatacgtcgacctttcgccaaacgtggcgctgattgccggttttaaagcggaccgtaaaggtaacctctacaccggggcgagtaccgaagataccccggcgctggtggaagccgccgcgttccacgacggcatcgtcatcgcacaggtgaacgagctggtggacgacgagtgcgacctgccgcgcgtcgatattccgggctcgtggatcgattacgtggtggtggcggacaagccgttctttattgaaccgctcttcacccgcgacccgcgcctgattaaacaggaacacatcctgatggcgatgatggcgattaaaggcatctacgctgaacaccaggtgcagtccctgaaccacgggattggctttaataccgcagcgatcgaactgctgctgccaacctacggcgaacagctcggactcaaaggcaaaatctgtaaacactggactttgaacccgcatccaacgctgatcccggccatcgaaagcggctgggtggagagcgtccactgcttcggcggcgagctggggatggaagagtacatccgcgcccgtccggacgtgttctttaccggtgctgacggctccatgcgctctaaccgcgccttctgtcagctggctggtcagtacgcggtcgacatgtttatcggttccacgctacaggttgatggttacgctaactcctcaaccgtgacccgcggccgtctctccggcttcggcggcgcaccaaacatgggccacgatccgcacggtcgtcgccacgccactccggcctggctgaacatgatcaccgagcctgacccgatgcagcgcggtaaaaagctggttgtgcagatggtggaaaccttccaggcgggcgtgaagccaaccttcgtggagaaactcgacgccgtagacgtggcgaaagcctccggcatgccgctggcgccggttatgatttacggcgatgacgtcacccacgtgctgacggaagaggggattgcttacctctaccgggcgaaagatctggaagagcgtcgcgccatggtcgccgccgtggcgggtatcaccgatatcggtctgggcgttgacgccaaacgcgtggcggaactgcgccagagcggcaaggttgtgtatccggaagatatgggcattcgtcgtaccgatgccacccgctctctgctggctgcgggcagcgtggctgacctcgttgagtggtccggcggcctgtataacccacctgcgaaattccggagctggtaa

SEQ ID NO: 525880 - DNA, 1425 bp, Stenotrophomonas maltophilia
atgtctgtttttccacaaggatttttatggggcggcgcgcttgccgccaaccagagtgaaggggcttaccgtgaaggcggcaaaggactgacgacggtcgatatgatcccccacggcgcaaaccgtctggcggtaaaagtcggcaaggaaaaacggttttcgttgcgtgacgacgaattttacccgagccacgaggcgattgatttttaccatcgttacaaagaagacattgccctgatggcggagatgggctttacggtgttccgcacctcgattgcctggagccgcctctacccgaacggcgacgaaccgttgccaaatcaggagggcattgccttctaccgcgcggtgttcgaggagtgcaaaaagtacaacatcgagccgctggtgacgctctgccatttcgacgtgccgatgcacctggtgacggagtacggctcctggcgcaaccgtaagatggtggatttcttcgcccgctacgcccgcacctgcttcgaggcgtttaacgggctggtgaaatactggctgaccttcaacgaaatcaacattatgctgcacagcccgttctccggcgcggggctggtgtttgaggaaggggaaaacgaagaccaggtgaaataccaggccgcgcaccacgagctggtggcgagcgcgctggcgaccaaaatcgcccacgaggtgaacccggaaaaccaggtcggctgcatgctggcgggcggcaatttttaccccttctcctgcaagccggaagacgtgtggatggcactggagaaagaccgcgagaacctgttctttatcgacgtgcaggcgcgcggcagctatccggcctactccgcccgcgtgttccgcgagaaaggggtggtgattgtgaaagaccccggcgacgacgacctgctgaaaaacaccgtcgactttgtctcgttcagttattacgcctcgcgctgcgcgtcggcggatatgaacgcgggcaacaccagcgcggcgaacatcgtgaagtccctgcgcaacccgcatattcaggtgagcgagtggggctggggcatcgacccgctcgggctgcgcatcaccatgaacatgatgtatgaccgctaccagaagccgctgttcctggtggaaaacggcctcggggcgaaggacgtcattgatgaaaacggcgagatcaacgacgactaccgcatcagctacctgcgcgagcatatccgtgcgatgggtgacgcgattgaggacggcgtcccgctgatgggctacaccacctggggctgcattgacctggtctcggcctcaaccggggagatgagcaagcgctacgggtttgtctacgtcgaccgcgacgacgccgggaacggcacgctggatcgaaagcgcaagaaatcgttctggtggtataagaaggtgattgcgagtaacggggcggatctggcgtag

SEQ ID NO: 525881 - DNA, 1452 bp, Stenotrophomonas maltophilia
atggcaaaaaattacgctgcgctggcaaatgacgtggttagcgcgctgggcggtaaagagaacatcgtcgccgtcacccactgcatgacgcgcctgcgcttcgttctgaaagacgtaagccttaccgacgccgcgcgtctgaaaagcatcagcggcgtgctcggcgtggtgcgcaacgacaatcagtgccaggtgatcatcggcaacaccgtgtcccaggcataccgtgaagtggtgagcctgctgcccgccaacctgcaacctgccgtagcggaaggtccacagaagcttacgctgcgccggattggcgccgggatcctcgacgcgctgatcggcaccatgtctccgctgatcccggcgatcatcggcgggtcgatggtcaagctgctggcgatgatccttgagatgaccggcgtgctgggcaaaggtgacccgacgctgacgatcctgaccgttatcggcgatggcgcgttcttcttcctgccgctgatggtggcggcttccgcagcggtgaagttcaaaaccaacatgtccctggcgatagccattgcgggcgtactggttcacccgagctttatcgagctgatggcgaaagcggcgcagggcgagcatgtagaatttgccttaattccggttacggcggtgaaatacacctataccgttatcccggccctggtgatgacctggtgcctgtcgtatatcgaacgctgggtggatcgcatcaccccggcggtgaccaaaaacttcctcaagccgatgctgatcgtgctgattgccgccccgctcgccatcgtactgattggcccgcttgggatctggatcggtagcgccatctccgcgctggtctacaccattcacggctatctgggctggctctccgttgccattatgggcgcgctgtggccgctgctggtgatgaccgggatgcaccgcgtgtttacgccgaccatcatccagaccattgccgaaacgggcaaagaagggatggtgatgccgtcggaaatcggcgccaacctgtcgctcggcggttcgtcgctggcggtggcgtggaaaaccaaaaacccggagctgcgccagacggcgctggcggctgcggcctccgccatcatggcggggatctctgaaccggccctgtacggcgtggcggtacgtctgaaacgtccgctgattgcgagcctgatcagcggctttatctgcggcgcggtggccggcatggccggtcttgccagccactccatggcggcgccggggctgttcaccagcgtgcagttcttcgacccggccaacccgatgaccatcgtctgggtgtttggtgtgatgggtctggcggtggtgctgtcgttcgtgctgaccctgctgttagggtttgaagatatcccggtagaagacgaagccgaaaaagcacgcgccctgcaaaccgcaccggtacagaacaaagcagcagaagcataa

SEQ ID NO: 525882 - DNA, 1014 bp, Stenotrophomonas maltophilia
atgaccacgatgctggaagtggcgaagcgggcaggcgtgtcgaaagcgacggtctcccgggtgctgtcggggaacggttacgtcagccaggagacgaaagaccgcgtgtttcaggccatcgaagagagcgggtatcgccccaatctgctggcgcgaaacctggcgaccaaacgcacccagaccctggggctggtggtgacaaacaccctgtaccatggggtctactttagcgagctgctgtttaacgccgcgcggatgacggaagagaaggggcgtcagctgatcctggcggacggcaagcacagcgccgaagaggagcgcgaggcgatccagtatctgctcgacatgcgctgcgacgcggtaatcatctacccgcgtttcctgagcgtggaagcgctggaccaaattattgagaaatgcgagcagccgattatggtgctcaaccgccgtttgcggaaaaacagcagccacagcgtctggtccgatcataaagcgtcgtgtcaggacgcagtatcgcagttgatcgcgaaaggccaccgggagattgcgtttatcaccggttcgctggattcccccaccggcgtggagcgtctttccggctacaaggacgcgctggcgcagcacggcattgccctgcgtgacgcgctgatcgccgaagggaagtggagcccggccagcggcgcggcggcggtctctcagctgctcacccgcggcgaaacgtttaccgcgctggtggcgagtaacgacgatatggcgattggcgccatcaggcagttgcacgagagcggcgtcgccacgccgggcgcggtgtccgtcatcggctttgacgacgtggcaatcgcgccctatatcgtgccgtccctctccagcgtgcgtattccggtaacggagatgatccaggagactatcagccgcctgatcttcatgctcgacggcggtgagtttaagcctcagcaaactttttccggcgagcttatcctgcgcgactccgtcattgacggcccgcatcgctga

SEQ ID NO: 525883 - DNA, 546 bp, Stenotrophomonas maltophilia
atgaaccgttttattatggccgatgccagcaaatgcattggttgccgtacctgtgaagtggcgtgcgtggtgtcccatcaggcggagcaggattgcgcctccctgacccccgacaccttcctgccgcgcatccacgtcattaaaggcgtgaatatttccaccgccgctatctgtcgccagtgcgaagacgcgccgtgcgccaacgtctgtccgaacggggcgattaagcgcgagaaaggcttcgtgcatgtgatgcaggagcgctgcatcgggtgcaaaacctgtgtggtggcgtgtccgtatggcgcgatggaggtggtcgttcgcccggtggtgcgcaacagcggtatcgggctcagcgtgcgcgcggagaaagccgaagccaataaatgtgacctctgctaccaccgcgacgccggtccggcgtgtatggaagcctgtccgacgcatgcgctggtctgcgtcgatcgcgacaagctcgaacagatgagtgccgaaaaacgccgccgtgcggcgttcgacacctcgtcatcgctgctgttttaa

SEQ ID NO: 525884 - DNA, 2217 bp, Stenotrophomonas maltophilia
atgcgcgttaacggcgtacagcttcgggtgcgcggcaaggtgcagggggtaggatttcgtcccttcgtctggcagcttgcacaccagctggggctggcgggcgacgtgtgcaacgacggagagggtgtcctggtgcgtctcgcgggtagtgggggtgactttaccgcgagactgcgccaggactgcccaccgctggcgcgcatcgatcgcgttgaaacgcagccgtacagctggaatacgctgccggacgagtttgtcatccgccacagcgagagcggggcgatggatacgcaaatcgtcccggatgccgccacctgtcccgcatgcctggcggagatgcgcgatccgcgcgagcgccgttatcgctacccgtttatcaactgcacccactgcggaccgcggtttaccattatccgcgccatgccctatgaccgcccggccacgtcaatggcgcctttcccgctctgtgtgccctgtgaaacggagtaccgcaacccggctgaccggcgttttcacgctcagccggtggcctgcccggactgcgggccgcagctggagtggcaagccggggatgctgccaccacccgcgaatcggcgttaagcgcggcggtggagagattgaaaaacggcgggattgtggcggtcaaagggctgggcggatttcacctggtctgcgacgcgcttaacccacaggcgattcggaaattgcgggcacgcaagcagcgcccgaccaagccgctggcggtgatgatcccgcatgcgaacgatctgccggaggccatccagacgctgttacgttcacccgctgcgccgattgtgctgacgccaaaagcctgccttcctgcgtttcctgaggagattgcgccggggctgactacggtcggcgtaatgctacctgcgaacccgctccagcatttgctgatgttggactgccagcgcccgctggtgatgacctccggcaacctcagcggccatccacccgccataagcaaccagcaggcgctggaagaactcagtgacatcgctgacggcttcctgctgcacaaccgcgatattcttcaacggatggatgattcagtaatggatcgggacggtgcgatgctgcgtcgcgcacgcggttttgtgccggatgccatcacattgcccgccggattccgcgacatctcgcccatgttatgcaccggcgcggagatgaaaaataccttctgcctggtgcgtggcaaccaggcggtgctgagccagcattttggcgatctgagcgacgagggcatagaggcgcagtggcgcagtgcgctctcgacgatgcaggacatctacgccttccagccagagcgcgtggtgtgcgatgcccatccgggatatcacgcccgacagtgggcccgggcgcaggcgctgcccgttgagaccgtgctgcatcatcatgcgcatgcagcagcgtgtctggcggagaatggctggccgctcgacggcggggatgttattgccctgacgctggatgggatcggcatgggtgagaacggcgcgctgtggggcggcgagtgcctgcgggtgaactatcgcgactgcgaatggctgggcggtctgccagccgttgcgctgccggggggcgatctggcggcaaaacagccgtggcgcaatttgctctcccactgtcttgcgttcgtacctgactggcagcagtacccggaaacagaggcggtacagcgtcaaaactggccgctgctggcaacggcagtgtcgcgcggtatcaatgcgccgcgggcctcctcctgtggtcgtctgttcgacgccgtggcctgtgcgctgggcattgaaacgcaacgctatgagggcgaagcagcgtgccggctggaggcgctggccgaacgctgtgcaggggttgatcatccggtgacgctcaagacggataaccttgcgctgttctggcagcagtggctggcctggcgggcggagcccggcgagcgcgcctgggcctttcatgatgcgctggcaaaagggctgagcgaactggcggcaacgcatgcccgccgacggtcgctctctacggtgtgcttcagcggaggtgtccttcacaaccgcctgctacgcgcgcgccttcgtcattacctttctgatttcacgcttctttttccttcgcgcctgcccgcaggcgacggagcgatctccttcgggcaggcggtggttgctgccgcccgatcatgttcacaaaggatttaa

SEQ ID NO: 525885 - DNA, 1023 bp, Stenotrophomonas maltophilia
atgttacgacttttacgcaatgaacctcgtgcagcgtgcctgctgctggctctggtgatggctaacctgctggcctgggggctggcgtggcacacctttagcggcagtacggcgctgatgtcggccagcctgctggcctggtgttacggactgcgtcatgcggtggatgccgaccatatcgccgcgattgataccgtgacgcgtaagatgatgcagcagggcaagcgcccgtccggcgtgggcgcatggttttccctcggacactccaccatcgtggtgctggcctccattgccatcgccgccaccgccacggcgtttcagaaaaatatggaatggttccacgaaaccggcagcctgattggcaccgccgtctccgccaccttcctgctggcgatggcgctggtgaatatggtgatcctgcgcggcgtctggcgcagttttcaggcactgaaacacggcaggtccgtgcagggcgacatcacgctgcctgcccagggtggcgtcatgaactggctgttcggcaaaaccttccgcctcgtcaataaaagctggcagatgtatctggtgggcttcctgtttggcctcggctttgacacggccaccgaaatcggcgtactggggatctccgccgccagcgcctccagcgggatgtcggtgtggtcgatcatgatcttcccggcgctcttcgccagcggcatggcgctggtggatacgctcgataacctgcttatggtgggtgcctacggctgggcattcaacaagccgcagcgcaagctgtactacaacatgaccatcaccggcacttcggtggtggtggcgctgtttatcggcgggctggaagcgctgggtctgctgatggacaagttctccctcagcggcggcgtgtgggatctgattggcgcggtgaacgataacctgggcgacgccgggtttgtggtggtcgggctgtttgtcgcctgctggctgatctcgatggcgaattaccgctggcgcggttatgacgcgctggtggtgcggtcctga

SEQ ID NO: 525886 - DNA, 1134 bp, Stenotrophomonas maltophilia
atgagccacggcatcatcattatcggctcgggctttgccgcccgtcagctggtgaaaaatatccgcaaacaggatgctaacgtgccgttgacggtgatcgccgccgacagcatggatgagtacaacaagcctgatttaagccacgtcattagccaaaatcagcgcgccgacgatctcacccgccagacggcgggggagtttgcagaacaatttaatctgcgtctgtttccgtacacctgggtcaccgatatcgacgccgacgcccacgtggtgaacgcgaaagataaaacctggcagtacgacaagctggtgctggcgacgggggcatctgcgtttgtgccgccggttgagggccgcgagttaatggtcacgctcaacagtcagcaggagtatcaggccagcgagaccctgttacgcgacgccatgcgggtgatgattgtcggcggcgggctgattggcaccgagctggcgatggacttctgccgggcgggaaaatccgtcacccttgttgaccacgcggccagcattctgtcagcgctgatgccggcagaagtaagcagtcgcttacagcatcgtttgaccgacatgggcgtgcatctgctgctgaaatcgcagttgcagagcctgagcaaaaccgaaaccggcatttgtgcgacgctcgaccacaaccgcagggtggaagtggatgtggttattgcggcgacggggctgcgcccggaaaccgcgctggcgcaccgcgcaggcgcagagatcaatcgcggcgtgaaggtagacagctacctgcaaaccacccagccggacatttatgccctgggcgactgcgcggaaattaacgggcaggtgctgccgttcctgcaaccgattcagttgagcgccatgttcctggcgaaaaacctgctcggcggcaacgccccggtgaaattacccgccatgctggtgaaggtaaaaacgccggaactaccgctgcatctcgcaggtgaaacgcagcgtcaggatctgaactgggagattgtcctttcgcctcagggcatggtggcgcgcggcaccgatactgtcggtcagatgcgcgcctttgtggtcagcgaagacaaaatgaaggaggcctttgcactgctgaaatcgttacctgcttaa

SEQ ID NO: 525887 - DNA, 165 bp, Stenotrophomonas maltophilia
atgcagtgcagcgtctgccagtggatttacgatcctgagctgggcgaaccgttgcaggatgtcgcgccgggtacaccgtggagcgaggtgccggacaacttcctctgcccggaatgttccctcggaaaagacgtctttgatgaactggcaacggaggcaaaatga

SEQ ID NO: 525888 - DNA, 1323 bp, Stenotrophomonas maltophilia
  misc_feature (1163)..(1172): n is a, c, g, or t
atgtctattctggttaaaaataacattcattgggtgggtcaacgtgactgggaagtacgtgattttcacgggacggaatacaaaacgctgcgcggcagcagctacaacagctacctcattcgcgaaggtaaaaacgtcctgatcgataccgtcgatcacaaattcagccgcgagttcgagcagaacctgcgcagcgaaatcgatttgaatgacatcgactacatcatcatcaaccacgcggaagaggatcatgccggggcgctgaccgagctgatgtcccacattccggataccccgatctactgcaccaccaatgccattgactccatcaacggccaccaccaccatccagagtggaacttccacactataaaaaccggcgacacgctggatatcggcaacggcaaacagctgatcttcgtggaaaccccaatgctgcactggccggacagcatgatgacctacatgaccggtgacgcggtgctgttcagcaacgacgccttcggccagcactactgcgacgaacgtctgttcaacgacgaagtggatcagaccgagctgttcgaacagtgccagcgctactacgccaacatcctgacgccgttcagccgtctggtcacgccaaaaatcaccgagatcctcggcttcaacctgccggtggatatgattgccacctcccacggcgtggtatggcgtgaaaatccaacccagatcgtcgagctgtacctgaagtgggcggcggactatcaggaagaccgcatcaccatcttctacgacaccatgtccaacaacacccgcatgatggcggacgccattgcccagggcatcaacgaagtggacccgaacgtggcagtgaaaatcttcaacgtggcgcgcagcgataagaatgaggtattgaccaacgtcttccgctccaaaggcgtgctggtgggtacctccaccatgaataacgtgatgatgccgaaaattgccggactggtggaagagatgaccggcctgcgcttccgtaacaaacgcgccagcgcctttggttcacacggctggagcggcggcgcggtagaccgtctctccacccgtttacaggatgccggttttgagatgtccctgagcctgaaggcgaaatggcgtccggatctcgacgcgctggaaatctgtcgccagcnnnnnnnnnnacattgcccgccagtgggcgcttgcgccgctgccggaaaccgcacccgccgcggctgctgcgccggaagccgtagcagaagccgctcctgccgctgccgacctcggcccctgcatgcagtgcagcgtctgccagtggatttacgatcctga

SEQ ID NO: 525889 - DNA, 1515 bp, Stenotrophomonas maltophilia
atgagcttttccgtagatgtgctggcgaagatcgccatagaactgcaaaccggtattggtcatcaggaccgctttcagcggctgatctccacgttgcgccacgtgctggattgcgatgcctcagcgctgctgcgttacgaagggcggcagtttattccgctggctatcgacggtctggcgaaggacgtactcgggcggcgctttaccctggagggccacccgcgtctggaaaccatcgcccgtgcgggtgacgtggtgcgtttcccggcagacagcgatctgcccgatccgtacgacggcctgatccccggccaggagagcctgaaggttcacgcctgtatcggcctgccgctgtttgccgggcagaacctgattggcgcgttaaccctcgacggcatgtcgccggatcagttcgataccttcagcgacgaagagctacggctgattgccgcgctggcggccggggcgctgaacaacgccctgctgatagaacagctggagagccagaatattcttccgggtagcccgacggcgtttgagcaggtggcgcacaccgaaatgattggcctttcgccgggcatggcgcagcttaaaaaagagattgagattgtcgccgcgtctgatttgaacgtgctgatcttcggggagaccggcaccggtaaagagctggtggcgaaagcgatccacgaagcctcgccccgtgcggtgaacccgctggtgtatctcaactgcgcggcgctgccggaaagcgtggcggaaagcgagctgttcggacacgtcaaaggggcctttaccggggcgatcagcaaccgcagcggcaagttcgaaatggctgataacggcacgctgttcctcgatgaaattggcgaactctccctttcgctccaggccaaactgctgcgggtgttgcagtatggcgatattcaacgcgtgggtgacgatcgcagcttacgcgtggatgtgcgcgtgctggcggcgacgaaccgcgatctgcgcgaagaggtgctggcggggaatttccgcgccgatctgttccaccgtctgagcgtgttcccgctcacggtgccgccgctgcgcgagcggggcgatgatgtggtgctgctggcgggctttttctgcgaacagtgtcggctcaaaatggggctttcccgcgtggtgctaagccccggcgcgaggacgcacctgctgtgctacggctggccgggtaacgtgcgtgaactggaacatgcgattcaccgcgcggtggtgctggcgcgggctacgcgttcgggggatgaagtggtgattcatgcgcgccatttcgcgctgcatgaggaaacgacgccgtccgtgaagccggtgatacctgagagcgtgaacgaaaacctgcgcgaggcgacggatgcgttccagcgtcagatgatcacccgcgccctggagcagaataaccgcagctgggcggcatgcgcgcgggcgctggagatggacgtcgccaaccttcacaggctggcgaaacgtctggggcttaagggttaa

SEQ ID NO: 525890 - DNA, 966 bp, Stenotrophomonas maltophilia
atgagtgattttctgttaaacgcaggccgccagactctgctgctggagctacaggaagccagccgcctgccggagcgtctgggtgaggattttgttcgtgcagccaacaccattatccactgcgagggcaaagtgatcgtggcgggtatcggtaaatctggtcatatcggcaagaagattgccgcgacgcttgccagcaccggcacaccggcgttcttcgtgcatcctgccgaagcgctgcacggcgatctggggatgatcgaaagccgcgacgtgatgctgtttatctcctactccggttcagccaaagagctggatctcatcatccctcgcctgcaagaaaaatcggtggccctgttagcgatgaccggcaaatcccgttcgccgctggcgctggccgcgaaagcaacgctggatatttccgttgagcgcgaagcctgcccgatgcacctggcaccgacctccagcaccgtcaacacgctgatgatgggcgacgcgctggcgatggcggtgatgcaggcgcgcggctttaacgaagaggatttcgcccgttcccatcctgctggcgcgcttggggcacgtctgctcaacaaggttcaccacctgatgcgcacggacgatgccattcctcaggtcaaactcgacaccagcgtgatggacgccatgctggagctgagccgcaccggtctggggctggttgcggtatgcgacaacgaccgccaggtgaagggcgtcttcaccgacggcgacctgcgccgctggctggtgggcggcggcaagctggaggcgcgggtatccgaagcaatgacccggggcgggctgacgctgaatgccgacagccgcgccattgaagccaaagaggtgctgatgaagcgcaaaatcaccgctgcgccggtggtggacgagcacggcaggctgtgcggcgcgatcaacctgcaagacttctaccaggcggggattatttaa

SEQ ID NO: 525891 - DNA, 774 bp, Stenotrophomonas maltophilia
atgaaaccacgtcagcggcaggcggccatacttgagcatctgcaaaagcagggaaagtgctcggtagaggatctggcccactactttgacaccaccggcacgacaatacgcaaggacctggtgttgctcgaaaactccggcgccgtcattcgtacctacggcggcgtggtgctcaataaagacgaagccgacccgcctatcgatcacaagacgctgattaatacgcaccagaaagcgctgattgccgaagctgcggtcaaatttatccaggacggcgattccatcatcctcgacgctggcagtaccgtcctgcagatgatcccgctgctcagccgctttaataacatcaccgtgatgaccaacagcctgcacatcgtcaatgccctgtcagagttcgacagcgagcagaccatcctgatgcccggtggcaccttccgtaaaaaatccgcgtcgtttcacgggcagctggcggagaatgccttcgaccacttcagcttcgataagctgtttatgggcacggacggcatcgacctcaacgcgggcgtgaccaccttcaacgaggtgttcagcgtcagcaaagcgatgtgcaacgccgcgcgggaagtgattttgatggcggactcgtcgaagtttggccgtaaaagccccaacattgtctgtagccttgaaagcgtcgataaactgattaccgacgcagctatcgatccggcatttaaaaaagcgctggaagcgaagggcatcgacgtgatcgtaaccggagagaaaaatgagtga

SEQ ID NO: 525892 - DNA, 360 bp, Stenotrophomonas maltophilia
atggtaaccgcattaatcaccttcgccgccttcgcctggttctgccagatggcgtttggcggctggcaaatccatcagtttaaccgcgcctttgacgccctgtgccagaaaggccgtgtgggtgtcgggcgttccggcggacgcttcaaaccgcgggttgtcgtcgctgttgcgctggatgaaaacaataaggtctgcgattccctcatcatgcgcggcatgaccgtctttgcccgcccggtgaaaatccaggcgatcaacggcattttgctgcatgaattacaacctgatgtgatcttcccccatgattcactctgtcagaatgcactatcattagcgcttaatctgaaacatggataa

SEQ ID NO: 525893 - DNA, 780 bp, Stenotrophomonas maltophilia
atgagtcaggttgccgttgtcattggtgggggacaaaccttaggcgagttcctctgccgtgggcttgccgcagagggttaccgcgtggcggttgtggacattcagagtgaaaaagccgcccgcgtggcggacgccatcaacaccgagtttggcgaagggatggcgtacggatttggtgccgacgccaccagcgagcagagcgtggtggcgctggcccgcggcgtagatgagatatttgggcgtatcgacctgctggtctacagcgcggggatcgcgaaagcggcctttatcagcgatttcgaactgggggattttgaccgctcgttgcaggtgaatctggtgggctatttcctctgcgcccgtgagttttcccggctgatgatccgcgatggtattcaggggcgcatcattcagatcaactcgaaatccgggaaagtgggcagcaagcacaactccggctacagcgcggcgaagtttggcggcgtggggctgacgcagtctctggcgctggatctggccgaatacggcatcaccgttcactcgctgatgctgggtaacctgttgaaatcgccgatgttccagtccctgcttccgcagtacgcctccaagctcggcatcaaagctgaagaagtggagcagtactacatcgacaaagtgccgctcaagcgcggatgtgattatcaggacgtgctgaacatgctgctgttttacgccagcccgaaagcctcgtactgcaccgggcagtcgattaacgtcaccggtgggcaggtgatgttctga

SEQ ID NO: 525894 - DNA, 363 bp, Stenotrophomonas maltophilia
atgaccgtgatttaccagaccaccattacccgcatcggccagagcgcggccgatgcgctgagcgaccagatgctgatcaccttccgcgaaggggcgcctgcggatatcgaagagttttgctttatccactgccacggcgagctaaacggcgagctgaaggccgggagccagcttgagctgggcgaggcgcgctatgccgtgaccgccgtcggcgacgtcgctgaacaaaacctgcgcgagctggggcacatcaccctgcgttttgacgggcaaccgcaggcggagtatcccggcacggttcacgttgaggggccggttccgcaggctgtcacaccaggctgtacgttaaaatttgttgcgtaa

SEQ ID NO: 525895 - DNA, 960 bp, Stenotrophomonas maltophilia
atgaaccggatccgcattgagaaaggcacgggcggctggggcggcccgctggagttcgacgccaccgaaggcaaaaagattgtgtacatcaccgcgggcacgcgcccggcgatcgtcgacaggctgcacgagctgacgggctgggaagcggtcgacggcttcaaggaaggcgaaccgccggaagcggaaatcggcgtggcggtgatcgactgcggcggcacgctgcgctgcggcatctatccgaagcgccgcattccgacggtaaatattcactccaccgggaaatccggcccgctggcgcagtacatccttgaggatatttatgtctctggggtgaaggaggacaacatcacgctggtgaatggcacatccgcgccgcaaaaagcggcctcgcgcgagtacgacaccagcaaaaaaatcaccgagcagagcgatggcctgctggcgaaggtcgggatggggatggggtccgccgtggcggtgctgttccagtccgggcgcgacaccatcgacacggtgctgaaaaccattctgccgtttatggcgttcgtctcggcgctgatcggtatcatcatggcctccggcctcggcgactggattgcccacggcctcgccccgctcgccagccacccgctcggcctggtgacgctggcgctgatctgctccttcccgctgctgtcgccgtttctcggcccgggcgcggtgattgcccaggtcatcggcgtgctgattggcgtacagattggtctgggcaacattcccccgcacctcgctctgccagcccttttcgccattaacgctcaggcggcgtgcgacttcatccccgtcgggctgtcgctggcggaagcacgtcaggacaccgtgcgcgtgggcgtcccctccgtgctggtgagccgcttcctgacgggcgcgcccacggtgctgattgcctggtttgtctccggctttatttatcaataa

SEQ ID NO: 525896 - DNA, 564 bp, Stenotrophomonas maltophilia
atgatagaaaccatcacccacggcgccgagtggttcatcgggctttttcagaaaggcggcgaggtattcaccggcatggtgaccgggatcctgcccctgctgatcagcctgctggtaatcatgaacgcgctgattaactttatcggccagcagcgtattgaacgcttcgcccagcgctgcgccggaaacccgctgtcccgctacctgatcctgcccttcatcggcacctttgtgttctgcaacccgatgaccttaagcctcggccgctttatgccagagaagtacaagccgagctattacgccgccgcctcctacagctgccattccatgaacggcctgttcccgcacatcaaccccggcgagctgttcgtttatctcgggatcgccagcggcattaccacgcttggcctgccgctcggcccgctggcggtgagctacctgctggtcggtctggtcaccaacttcttccgcggctgggtgacggatctcaccaccgccatttttgagaaaaaaatgggcatccagcttgaacagaaagtccatctttcaggagctacagcatga

SEQ ID NO: 525897 - DNA, 912 bp, Stenotrophomonas maltophilia
atgttcaagcgtcgttatgcagcgctgttacctgcgcttattctcctgtccgcctgtagtagcaaacccaggactgaagctgttcaacaaacggcgggcgcgccttccggcgggtttctgcttgagccgcagcacaatatgatgcagatgggcggcgacttcgcgaataaccctgcggccgaacagttcatcgataaaatggtgagcaagcacggttttgatcgccagcagctgcatgccattttgtctcaggcgaagcgtctggactacgtgctgcgcctgatggacaggcaggcgccgacggcccaggtgccgaccgggccaaacggggcgtggctgcgctatcgcaaacagtttattaccccggacaacgtgcaaaatggcgtggtgttctggaatcagtatgaagatgccctgaaccgcgcgtggcaggtctatggcgtgccgccggagatcatcgtcggtattattggggttgagacccgctggggacgcattatgggtaaaacccgcatcctcgatgcgctggcgacgctctccttcaactatccgcgccgcgccgagtatttctcctctgaactggaaaccttcctgctgatggcgcgagacgaacaggacgatccgttagatctgaaagggtcgttcgccggtgcgatgggctacggccagtttatgccgtcctcctataagcagtacgcggtagattttaacggggatggtcacatcaacctgtgggatcccgaagacgccattggcagcgtggccaactacttcaaagcgcacggctggacgccgggcggccaggtggcggtacaggcgaacggcgaagcgtttggtctggaaaacggatttaaaaccaaatatagcgtggcgcagctggcagcggcaggcttaacgcctgggcaatgttga

SEQ ID NO: 525898 - DNA, 174 bp, Stenotrophomonas maltophilia
gtgagcctgctgcgcctggatgtcggaaccggttatcagtactggttcggactgccgaacttctacaccattacccgctacaaccacagcacgcactatgcgatggcggtgtggcagctggggctggcggtgtctcaggcgcgtgtgccggcagcgtcaccgtttagccagtaa

SEQ ID NO: 525899 - DNA, 1305 bp, Stenotrophomonas maltophilia
atgaaatttcccggtaaacgtaagtccaaacactatttccccgtcgatgcccgcgatccgctgttacagcaaattcagcaggaaagcgaaaccagcgctgcctgggtggtcggtatcgatcagacgctggtggacattgaagccaaagtggatgatgcgtttgtcgcacgttacggtctgagcgccgggcactcgctggtgattgaggatgacgttgccgaagcgctgtatcaggaactgatgcgcgaaaatcttatcacccaccagtttgctggcggcaccatcggtaacaccatgcacaactactccgttctggcagacgaccgctcggtgctgcttggcgtgatgtgcagcaatatcgaaatcggtggctacgcctaccgctacctgtgcaatacctccagccgcaccgatctgaactatttgcagggcgttgacgggccaattggtcgttgctttacgctgataagcgattccggcgagcgtacctttgccatcagccccggccatatgaacaagctacgcgctgaaagtattccggaagaggtgatcgcgggcgcgtctgcgctggtgttgacgtcttatctggtgcgctgcaagccgggcgaaccaatgccggacgcaaccatgaaggcaattgagtatgcgaagaaatacaacgtgcctgtggttctgacgctgggcaccaaattcgtcattgccgacaacccggagtggtggcaggccttcctgaaagaacacgtctcgattctggcgatgaatgaagaagaagccgaagcgctgaccggcgaaagcgatccgctgctggcgtctgataaggcgctggactgggtggatctggtgctctgcaccgccgggccggtcgggctgtacatggcgggcttcacggaagaagagagcaagcggaaaacccagcacccgctgctgccgggcgctatcgccgaatttaaccagtacgagttcagccgcgccatgcgtcataaagactgcatcaacccgctgcgtatcttctcccacattgcaccgtatatgggtggccccgagaagatcatgaacaccaacggcgcgggcgacggcgcgctggccgcgctgctgcacgacatcaccgctaacgcctaccacaaaaccaatgtgccgaattccagcaaacacaccttcaactggctgacctattcctcgctggcgcaggtgtgcaagtacgcgaaccgcgtgagttatcaggtgctgaaccagcattcaccgcgcttaacgcgtgggctgccggaacgggaagacagcctcgaagaggcgtattgggacaggtaa

SEQ ID NO: 525900 - DNA, 261 bp, Stenotrophomonas maltophilia
  misc_feature (13)..(22): n is a, c, g, or t
gtgaaccgtggtnnnnnnnnnnggttgaccccgtatactgatgaaacgctaaaaatgctgggcgagaagggcgtgaagcacattcaggttatgtcgccgggcttctcggcggattgtctggaaacgctggaagagattgccgtccagaacaaagagttcttcatggaggccggcggaacgaaatacgaatacattcctgcgcttaacgactcccctgaacacatcgatatgatggtgtcactggtcaccacccgccgctga

SEQ ID NO: 525901 - DNA, 756 bp, Stenotrophomonas maltophilia
  misc_feature (728)..(737): n is a, c, g, or t
atgagtcaggcgaaaaccggcatcctgcttgccaatctgggcaccccagaagcacctactccagcggcggtaaaacgctacctgcgacaatttttaagcgacacgcgcgtcgtggataccccaagactgctgtggtggccactgctgcgtggtgtcattctgccgattcgttctccgcgtgtagcaaagctctatcagtccgtgtggatggaagaaggctcgccgctgatggtctacagccgtcgtcaggagaaggcgctggccgcccgtctgccggacatgcccgttgcgctcggtatgagctacggtaagccatccctggaaagcgccgtcgactctctgctggcgcagggcgttgaacacattgtggtgctggccctttatccgcagtattcgtgctccacggtggctgccgtctgggacgaactggcacgcattctggcgacccgccgccgtataccgggcatcacctttatccgcgactacgccgataacgagctgtacattcaggcgcttgccagcagcgcgcgcgcgtcgtttgaaaaacacggcgagccggatctgctgctgctctcctatcacggtattccgcagcgtttcgcgaacgaaggggacgattacccccagcgttgccgcgataccacccgcgagctggtctccgccctcggcctgccgcctgagaaggttatgatgaccttccagtcgcgcttcggtcgtgaaccgtggtnnnnnnnnnnggttgaccccgtatactga

SEQ ID NO: 525902 - DNA, 645 bp, Stenotrophomonas maltophilia
atgcgtattattctgcttggcgctccgggcgcgggtaagggaactcaggctcagttcatcatggagaaatacggtattccgcaaatctctactggtgacatgctgcgtgccgctgttaaatctggctccgagctgggcaaacaagctaaagacatcatggacgcaggcaagctggtgaccgacgaactggttatcgcgctggtaaaagagcgcattactcaggaagactgccgcaatggtttcctgctggacggcttcccgcgcaccattcctcaggctgacgccatgaaagaagcgggcatcaacgtggattacgtgctggagttcgatgtaccggacgaactgatcgttgaccgtatcgttggccgtcgcgtgcacgctgcctctggccgcgtttaccacatcaaattcaacccacctaaggttgaaggcaaagacgacgtgaccggcgaagagctgaccacccgtaaagacgaccaggaagaaaccgtgcgtaaacgcctggtggaataccatcagatgaccgcaccgctgatcggctactactccaaagaggcgcaggcgggtaacaccaaatacgcgaaagttgacggcaccaaagccgtggctgacgtacgtgcagagctggaaaaaatcctcggctaa

SEQ ID NO: 525903 - DNA, 1875 bp, Stenotrophomonas maltophilia
atgaaaggacaagaaacccgtggtttccagtcagaagtaaaacagcttctgcacctgatgatccattccctgtattccaacaaagaaatcttcctgcgtgagctgatttccaacgcctccgatgcggcggacaagctgcgcttccgcgcgctgtccaacccggatctgtacgaaggcgatggcgaactgcgcgtgcgcgtctcttttaataaagagaaccgcaccctgacgattgccgataatggcatcgggatgaaccgcgacgaggtgatcgaccatctcggcaccatcgctaaatccggcaccaaagcgttcctcgagtccatgggctctgaccaggcgaaagacagccagctgatcggtcagttcggcgtaggcttctactcggcattcatcgtggcggataaagtcaccgtgcgcacccgcgccgcgggcgacagcgccgaaaacggcgtgctgtgggaatccaaaggggaaggcgaatacaccgttgatgatatcaccaaagcggatcgcggcaccgaaatcactctgcacctgcgcgaaggcgaagacgatttcctgaacgactggcgcgtacgctccatcatcagcaaatattctgaccacatcgcgctgccggttgagattgaaaaacaggaagagaaagacggcgaaaccgtggtttcctgggagaaaatcaacaaggcgcaggcgctgtggacgcgcaacaaagctgaaattaaagacgacgagtacaacgagttttacaagcacatcgcccacgactttaccgacccgctgacctggagccacaaccgtgtggaagggaagcaggagtacaccagcctgctgtacattccggcgcaggcgccgtgggacatgtggaaccgcgatcacaagcacggcctgaagctgtacgtgcagcgcgtcttcatcatggacgacgccgagcagttcatgccgaactacctgcgctttgtgcgtggcctgatagattccaacgatctgccgctgaacgtctcccgtgaaattctccaggacagcaccgtcacccgtaacctgcgtaacgccctgaccaagcgagcgttgcagatgctggaaaaactggcgaaagacgatgcggaaaaataccagaccttctggaaacagttcggcctggtgctgaaagaaggcccggcggaagacaccgcgaacgtggaagctatcgctaaactgctgcgcttcgcctctacgcacaacgactcctccgcccagaccgtatcgctggaagagtacgtctcccgcatgaaagaagggcaggagaagatctactacatcaccgccgacagctatgcggcagcgaagagcagtccgcatctggagctgctgcgtaagaaaggcatcgaagtgctgctgctgtctgaccgcatcgacgagtggatgatgaactacctgaccgagttcgacggtaaatccttccagtccgttgctaaagccgacgagtctatcgataagctggcggatgaagtggacgacagcgcgaaggaagccgagaaggcgctggagccgttcgttgagcgcgtgaaaaccctgctgggcgaccgcgtgaaagaggtgcgcttcacgcaccgtctgaccgatacgccagccattgtcaccaccgatgcggacgaaatgagcacccagatggcgaaactgttcgctgcggcgggccaggccgtgccggaagtgaaatatatctttgagcttaatccggatcatccgctggtgaaacgcgcggcggatacccaggacgacgcccgctttgcggagtgggttgaactgctgctggatcagtccctgctggccgagcgcggcaccctggaagatcctaacctgttcattaaacgtgtgaatgcgctgctgctggcgtaa

SEQ ID NO: 525904 - DNA, 606 bp, Stenotrophomonas maltophilia
atgcaaaccagtccgctgctcacgcagttaatggaagcactgcgctgcctgccgggcgttggcccgaagtcggcgcagcgtatggcgtttacgctattgcagcgcgaccgcagcggcgggatgcgcctggcgcaggctctgacccgcgccatgtcagaaattggtcactgtgcggattgccggacctttaccgagcaggacgtctgtaacatctgcacgaacccgcgtcgtcaggaaaacggtcagatttgcgtggtggagagtccggcggacatctacgccatcgaacaaaccgggcagttttccggccgctatttcgtgctgatggggcatctctccccgctggacggcatcggcccggatgatatcggtctcgatcgtcttgaacagcgtcttgagtccgagacgatcaaagaggtgatcctcgccaccaacccgacggtggaaggggaggcaaccgccaactacatcgccgagctgtgcgcgcagtacggcgttgacgccagccgcatcgcccacggcgtgccggtcggcggtgagctggagatggtcgacggcaccacgctgtcgcactcgctggccggacgacacaagattattttctga

SEQ ID NO: 525905 - DNA, 333 bp, Stenotrophomonas maltophilia
atgtttggtggaaaaggcggtctgggtggcctgatgaagcaggctcagcagatgcaggaaaaaatgcagaagatgcaggaagagatcgctcagctggaagtcacgggtgaatcgggtgccggtctggtcaaggtgaccatcaacggtgcgcacaactgccgtcgcgttgaaatcgacccgagcctgctcgaagacgacaaagagatgctggaagatctggttgcagccgcgtttaacgatgctgctcgccgtatcgacgaaacccagaaagagaaaatggcctctgtttccagcggtatgcaactgccgccgggctttaagatgccattctga

SEQ ID NO: 525906 - DNA, 1929 bp, Stenotrophomonas maltophilia
atgagttatcaggtgttagcccgtaaatggcgaccacaaacctttgctgacgttgtcggtcaggaacatgtgctgacggccctggcgaacggcttgtcgctaggtcgcatccatcacgcctatcttttctccggcacccgcggcgtcggtaaaacctctattgcccgtctgctggcaaaaggtctgaactgcgaaaccgggatcaccgccaccccgtgcggcgtatgtgacaactgccgggagatcgagcaggggcgttttgtcgatctgatcgagatcgacgccgcctcgcgcaccaaggtggaagacactcgcgatctgctcgacaacgtgcagtacgccccggcgcgcggccgcttcaaggtctatctgatcgatgaagtacacatgctgtcgcgccacagcttcaacgccctgctgaaaacgctggaagagccgcctgcgcatgtcaaattcctgctggcgaccaccgatccgcaaaagctgccggtcacgatcctgtcgcgctgcctgcaatttcatctgaaggcgctggacgttgagcagatccgcgctcagcttgaacacattcttgatgaagagaagatcgttcacgagccgcgcgccctgcagctgctggcccgcgcggcggacggaagcctgcgtgatgcgctgagcctgactgaccaggcaattgccagcggtgacggtaagctttccactgacgcggtcagcaccatgctcggcacgctggatgacgatcaggcgctgtcgcttatcgaagcgatgattgccgccaacggtgagcgggtaatgaccctcgtcaacgatgccgccgcccgtggcattgaatgggaagcgctgctggtcgagatgctcagcctgctgcatcgcgtggcgatgctgcaattgtctccgtcggccattggcgcggacatggcgaccattgaacagcggatgcgtgaacttgcgcgcaccgtgccgccggctgacgtgcagctttattatcaaaccctgctgattggccgcaaagagctgccgtttgcaccggatcgccggatgggcgttgaaatgacgctgctgcgcgcgctggccttccatccgcgcaagccattgccggagccggaaacgccccggcagtcctttgcgccggttgcgccgaccgcggtaatgtcaccgcagcaggtgccaccgcaaccggcatcgccgccgccgcagaacgtgccgctgtcggatgccaccagttcggtgcttgccgcacgaagccagttgcaacgcgcgcagggagcaaccaaaccaaaaaagagtgaaccggcagcgcctgcaagagcgcggccggtgaacaacgccgcgcttgaacgactggcctcggtaacggagcgcgtgcagtcgcgtccggcaccgtccgcgctcgagcaaaaagccccggcgaaagaagaggcataccgctggaaggcgactaccgttgttgaaacggtcaaggaagtggtcgccacgccaaaagcgctgaaaaaggcgcttgagcatgaaaaaacgccggagctgtccgcgaagctcgcggaagagtccatcgagcgcgacgcctgggccgctgaggtcagcaaacttcagctgccgaagctggtggagcaggtcgcgctgaatgcctggaaagagcaggaaggcaatcaggtgcgtctgcacctgcgccctggccagcggcacctcaactccccaggcgcgcaaaaggcgctggccgaggcgcttaccgcattacagggtgtgccggttgaattgactatcattgaagatgataatccggcggtgaaaacgccgctcgagtggcgacaggcgatttatgaagagaagctcgcgcaggcgcgcgagtcgattatcgcggataacaacatccagaccctgcgccggttcttcgacgccgatctggatgaagagagtattcgccccctttga

SEQ ID NO: 525907 - DNA, 552 bp, Stenotrophomonas maltophilia
atgaccgcaactgcacagcagcttgaatatctgaaaaatagcatcaaaagtatccaggattatccaaagcctggcattcttttccgtgatgtcaccagcttgctggaagacccgaaagcgtacgccctcagcattgaactgctggttgagcgttataaaaacgccgggatcactaaagtagtaggtaccgaagcccgtggcttcctgttcggcgcaccggttgcgctggcgatgggcgtgggttttgtgccggtgcgtaagccgcgcaaactgccgcgtgaaaccattgctgagagctatgagctggaatacggcaccgatcagctggaaattcacgttgatgccatcaagccaggcgacaaagtgctggtggtggacgatctgctggcaaccggcggcaccatcgaagcgaccgtgaagctgatccgtcgtctgggcggggaagtgaccgacgcggccttcatcatcaacctgttcgatctcggcggcgagcagcgcctggaaaaacagggtattaccagctacagcctggtgcctttcccgggacattaa

SEQ ID NO: 525908 - DNA, 378 bp, Stenotrophomonas maltophilia
atgcagcgtactattttaatcatcattggctggctcgcggtagtgctgggtacgctgggcatcgtattgcccttgctgccgaccaccccgttcatcctgttggccgcctggtgcttcgcccgctcgtcgccgcgttttcaccactggctcctgtaccgttcgtggtttggcggctacctgcggcactggcaaaaacaccgggccatgccgcccggggccaagccgcgcgccattgccttcatcctgatcaccttcgccgtctcgttatggctggtgaaaatgatgtgggtgcgcattctgctgctggcaatcctggcctgcctgctgatcttcatgtggcggatccccgtggttgatgaaaagcaacaaaagcactga

SEQ ID NO: 525909 - DNA, 528 bp, Stenotrophomonas maltophilia
ttgaaaacagcactgcttcttgagaggctgcaaaatcagctgatcgcgctgcgggcgcaggccacaccgctgatgggacatgctacgctgaaaccgcgctttgaccggcagctcttccgcacccgcagtaccgtcattcaggattaccttactgagatgcagaccaacctcgacgagcttcgccacgcggttgagagtgaacagcaggaacaggtggtgtggcttgcggagcatcttactgagcagatcaccgccctgcaccgcgaaatcgccgcctggccgctacgggcgtgggacagcgcctcgcctgggctcggaaaatggcagcgcaagcggctggagaaccaggagtttgagcggcgtctgtttgagatgaagtgtgagcgcgaagcccgcctgaccaccagcgaaacgctgcaagagcagcagttattaatgcgtgaaatcagcgcgctggaaggccgcatcgtccgctgccgtcaggcgctggatgagattgaacgcgtcattgaacgcctgacccgttaa

SEQ ID NO: 525910 - DNA, 195 bp, Stenotrophomonas maltophilia
atgtcactggaaaatgcccccgacgaggtcaagctggccgtcgatttaattatgctgctggagaatcacgagatcccggcggagacggtgctgaaagcgctggagattgtgcggcgggattttgagggaaaggtgaaggccggttgccctcaccctcaccctagccctctccctggagggagaggggaccgttag

SEQ ID NO: 525911 - DNA, 2976 bp, Stenotrophomonas maltophilia
gtggcgcagctgctggacgatctgcaaacggcgcagtccgatctctcgacctataacagccagctggtttcgctgcaaacccagcctgagcgcgtgcagaacgccatgtattctgcatcgcaacagctacagcagatacgtaaccgtctgaatggcatcactgtgggggaaggggcgcttcgaccgacccagcaaacgctgctgaacatccagcagacgctgctgaacgcggagattgaacagcagcgtaagagtctggaaggcaacacggtgttgcaggatgcgctgcaaaaacagcgtgactacgtgaacgcgaatatcaaccggctcgagcatcagcttcagctgttgcaggaggcggtgaacagcaagcgcctgacgctgaccgaaaaaacggcgcaggaagcggtctcgccagacgaaacggcgcgtatccaggccaatccgctggtgaagcaggagctggagattaatcatcagctgagcgagcgcctgattcaggcgactgaaagcggcagcgcgctggtgcagcagaatattaaagtcaaaaactggctggatcgcgctttgcaggctgagcgcaatgtcaaagagcagattgccgtcctgaagggaagcctgctgctggtaaagaatgcgcgacagcagcagacgctgccgtccgccgacgagctggaagacatgaccaaccgcattgcggatttgcgtcttgaacagtttgacgttaaccagcagcgcgatgccctgttccagagcgatacgtttgttgccaaagtggaagaaggccattcaagtgaagtaaacggtgaagttcacgacgcgctgttgcaggttgtggatatgcgccgcgaactgctcgatcagcttaataagcagctgggcaaccagctgatgatggcgattaacctgcaaatcaaccagcagcagctggtgagcgtgtctaaaagcctccaggagatcctgacccagcagattttctgggtgaacagcaacaaacccatggactgggactggtttaaatctttccctgaaacgctgaaatcccagatcaaaagcatgaaaattaccgtgaactgggagaaagcctggcctgcggtaatgattgccttccttgcgggtctgcctttgctgctcatcgccggagtaatacgctggcgtttgaaatggctgaagcagtaccaggcgaagctggcctcggaagtggggcaactgcgtaacgacagccagctgcacacaccgaaagcgatcctgatcgatctgatccgtgctctgccggtctgcctgctgatcctcgccgtcggcctgatcctgttgaccatgcagctcaatatcagcgacctgctgtgggcgttcagcaaaaagctggcgctgttctggctggtgtttggtctgtgctggaaagtgctggaaaaagatggcgtcgcggtccgacacttcaacatgccggagaaactcaccagccactggcgtcgccagattgtacgtatcagcctcgcgctgttgccgctgcacttctggtccgttgtggccgagctttcgccgctgcatctgatggatgacgtgctgggacagctggtaattatgctgaacctgctgctgatagccgtcctgatgtggccgatgtgccgcgacagctggcgtgataaagagtcccacaatcttcgtctggttaccgtaacggtgctggcgatcattccgctggcgctgatggtgctgacggcaacgggttacttctataccacgcttcgtctgtcaggccgctggattgaaaccgtgtatctggtgatcctgtggaacctgctgttccagaccgtgctgcgcggtttgagcgtggcggcgcgccgcattgcttatcgtcgcgctgttgcccgtcgacagcatcaggttaaagagggggctgaaggggctgagccgcaggaagagccgaccattgccctggagcaggtcaaccagcaaacgatgcgtattaccatgctggtgatgattgcgctgtttgcggtgatgttctgggccatctggtctgatttaattaccgtcttcgcctacctcgacagtatcaccctctggcaatacaacggtaccgaagcgggcgctgcggtaatgaaaagcgtcaccatgggcagcctgctctttgcgctggtgtcctcggtggtggcctgggcgttgatccgcaacctgcctggtctgctggaagtgctggtgctctcaaggctgaacctgcgtcagggggcgtcgtatgccattaccaccatcctgaactacgtcattattattgtcggggcgatgacggtattcggctcgctgggcgtctcgtgggataaactccagtggctggcggcggcgctgtcggtaggtctgggcttcggcttgcaggagatcttcggtaactttgtttctggcctgataatcctgttcgaacgtccggtacgtatcggcgataccgtcaccatcggcaccttctccgggaccgtcagcaagatccgtattcgtgcgaccaccatcactgacttcgatcgtaaagaggtgatcatcccgaacaaagccttcgtgaccgagcgactgatcaactggtcgctttcggatactacgacgcgcgtggtggtccgactcggggtggcctatggttcagatctggataaagtgaaagaggtcctgctggaagccgcgaaatcacatcctaaagtgatgcacgatcctgcgcctgacgtgttcttcaccaccttcgggccaagcacgctggatcatgagctgcgcctgtacgtacgcgaactacgcgatcgcagctacaccgtcgatgagctgaaccgcaccattgaccgtctgtgccgtgaaaacaacattaatatcgccttcaatcagcttgaggttcacctgcgtaacgagaaaggtgacgaacatacggaagtgaagcgcgagattaagggtgacgaaaactccgcccctcaccctgccctctccccagaggggagagggtaa

SEQ ID NO: 525912 - DNA, 399 bp, Stenotrophomonas maltophilia
  misc_feature (23)..(32): n is a, c, g, or t
atgcgtaaagcaacggaggcccnnnnnnnnnncgctaagcgcgttcagggcctccgttgctttacgcatgttctccggcgcctgagcgaccttctgccgcaactgggccgtttcggctttgatgcgatcgatcttatccagcgtatccagggtttccgtcaggtcctgctgaacgagcttttcctgggcggagagatctttttgtttattcagggtgtcgagttgcgactgaacctcggcacgcgtcgggacgtcactgccgttgtctgcacgggcccaggaatgcggtgcggctgcaaagaaaaacagcaggatcaaaaaaacggccagaacagaatgtgtcgagcgataggtgtgcagcatagtcgtgaatgtgatctgagaaatgaccgaaaatag

SEQ ID NO: 525913 - DNA, 594 bp, Stenotrophomonas maltophilia
atgcgtttgttctcacagcagggtgtttcggcaacctcgctggcgcagattgctcaggccgcgggcgtcacgcggggagcgatttactggcattttaaagacaagtcagatctgtttggtgaaatctgggagctttcagagtccagcatcagcgatcttgagagtgagtatcgggcaaaattccctcacgatccactctcagtattaagagaaatattagtatatatccttgaagcgactgttgtggaagaacgccgacgtctgatgatggaaatcatcttccataaatgtgagtttgttggcgaaatggcggtggttcagcaggcgcagcgcgacctgtgtctggaaagctacgatcgcatcgagcaagttcttaaggaatgtatgcaggccgacatgcttcccgctacgctgttaacgcgccgggcggcgatcctgatgcgcagttatatttccggcctgatggaaaactggcttttcgccccgcagtcgttcgatctgaaatcagaggcgcgcagctacgtcgcgattttcctggagatgtgccagctttgcccgaccctccgcagcgagggagcgccgcttactgcctga

SEQ ID NO: 525914 - DNA, 1194 bp, Stenotrophomonas maltophilia
atgaacaaaaacagagggttaacgcctctggcggtcgttctgatgctctcaggcagcttagcgcttacaggatgtgacgacaaagaggctcaacaaggagctcagcaggtgccagaagttggcgtcgtgacgctcaaatccgaacctctccagatgacaacagaactaccgggccgcaccagcgcctatcgcattgcagaagtacgtccgcaggtgagcggtatcatcctgaaacgtaacttcaccgaaggcggtgatgtgaaagcaggtgagtctctttatcagattgatccagcaacctatcaggcgtcttatgagagcgctaaaggcgatctggcgaaagcagaagcggcagccaaaatttcgcaactgacgttgaatcgttacaagaaactgctcggcacgcagtacatcagccaacaggattacgattctgccctggccgatgcacagcaagccaatgcagccgttgtggcggcgaaagcggcggtagaaaccgcgcgtattaacctcgcctacaccaaagtgacctcccctatcagcggtcggattggtaaatcagccgtcaccgaaggtgcgctggtgcagaacggtcaaaccaacgcgctggccaccgtgcagcagcttgacccgatctacgttgacgttacacagtccagcaacgatttcctgcgtctcaaacaggagcttgccagcggacaactgaaacaggaaaacggtaaagccaaagttgaactggttaccaacgacggtatcaagttctcacagacaggcacactggaattttctgatgtgaccgtcgatcagaccaccggctctatcaccatccgggctattttcccgaatccggataaaaccctgctgccgggtatgttcgtacgcgcccgtcttgaagaagggactaacccaagcgccattctggttccgcagcaaggtgtgacccgtacgccacgcggcgatgcgagcgcgctggttgtaggtgccgataacaaagtcgaaacacgcaatatcactgcaacgcaggcgattggcgacaagtggctggtaacggaaggtctgaaagatggcgatcgcgtgattattactggtttgcaaaaagttcgtcctggcgcgcaggtcaaagctcaggaagtgaaatctgacgacaaacaacaagcatcggccgctggccagtcagaacaaaccaagtcttaa

SEQ ID NO: 525915 - DNA, 822 bp, Stenotrophomonas maltophilia
gtggatacggaattgctaaaaactttcctcgaagtgagcagaacgcgacactttgggcgagcagctgaagccctctacctgacgcagtcagcagtcagttttcgtattcgacagctggaaaatcaactgggtgtgaacctttttacccgccatcgcaacaatattcgtctaaccccggccggtgaaaagctattgccttatgcagaaaccctgatgaatacctggcaggcagcgcgaaaggaggttgcgcacacctcccggcataatgaattctcgatcggtgccagcgcttcactatgggaatgcatgctcagccagtggcttatgcggctatatcgcacacacaaccatctgcaatttgaggcgaggattgcgcaacgccagtcgctggttaagcaactccacgagcggcagcttgatctgctgatcaccacagaagcccccaagatggatgaatttagcagccagattgttggacagtttagcctggcgctctatgcatccgagcctgcaatgatgaaggccgacctgaattatttacgcctggaatgggggcctgattttcagcagcacgagacggggttaattgccagcgatgatatcccgcaactcacgacaagctctgcggagatcgcatgccagcatcttcccacactgaaaggctgtacctggttacctgttcgctgggcggataataaacctgcactccatgttgtcaccgattcaacaacgctctccaggccgctgtatgccatttggctgcaaaacagcgataagcagtcgcagataaaagatctgttaaaaaccagcatactggattaa

SEQ ID NO: 525916 - DNA, 339 bp, Stenotrophomonas maltophilia
atggcggaaagctttacgacgactaatcgttttttcgataataaacattatccgcgcgggttctctcgtcacggcgatttcactatcaaagaagctcaacttcttgagcgccatggttatgcctttaacgagctggatctgggtaagcgcgaaccggcaaccgaagatgaaaaacaatttgtctctgtttgtcgtggtgagcgtgagccgcagtctgatgcagaacgtgtatggatcaagtatatggctcgcattaagcgtcctaagcgtttccatacgctgtctggcggcaagccgcagatggaaggtgcagaagactacaccgagtctgacgattaa

SEQ ID NO: 525917 - DNA, 1521 bp, Stenotrophomonas maltophilia
atgtcactgtcagttgtttatacacgcgcggccatcggcgtgaaggcaccgcttatttctgtagaggttcatttaagtaatggactgcccggactgacgctggtcggcttacccgaaacgaccgttaaggaggccagggatcgcgtgcgcagcgcaattattaatagcggttatgcttttccggcgaagaagatcaccatcaaccttgcgcccgccgatttgccaaaggagggagggcgatatgatttacctattgctatagcgcttctcgcggcttctgaacagctcaatacgccagggttaagctcgtgcgagttcgtgggtgaattagcgcttacaggcgcgttaagaggcgttcccggagcaatctcgggtgcgcttgaagccatacgcgcgggaaggcaaatcattgtggccaatgaaaatgcctctgaagtcagccttaccgccgaaaaggggtgtcttgtcgcgggacatttgcaggaggtttgcgcctggctggaaggccgacatgagcttgccgagccgcaggagaatgaggaggtagtggcagattcacccgatgacctcagcgatattatgggtcaggaacagggtaagcgggcgttagaaataacggccgcgggtgggcataacctgctactgataggtccgccaggcacggggaaaacgatgctggcgagcaggttgagcggcctgctgccccccctcaataatcacgaagcgctggaaagcgccgcgatatttagcctggtcagttcaatatcgctgcataaacagtggcgccgccgtcctttccgctcgccacaccacagtgcgtctcttaccgcgatggtgggcgggggctcaattcccggaccgggtgaaatctcactggcacacaacggcattctgttcctggatgaattgccagagtttgaacgccgcgtgctggatgcgttgcgggagccgattgaatccggcgaaatccatctgtctcgtacacgcgccaaaataagctaccctgcgcagtttcagctggtcgccgcgatgaaccctagcccaacgggccattatcagggcaaccataaccgctgtacgccggagcagacgctgcgctatctgagtaagctgtccggccccttcctcgaccgttttgatttatctctcgagatccccctgccaccgcccggtctgctgaggcaaaccggtatcaaaggcgaaagctcagcagcggtgcgagaacgggttattgcggctcaggcgcggcagtatgctcgtcagaacaggctgaatgcccggctggataacagcgggatccgacagttttgctctctcaacgccgaagatgcaggctggctggaagagacactgacgcggtttgggctatccattcgcgcgtggcagcgtttgttgaaagttgcgcgcacggtcgctgacgtggagggctgccccggaatagagaggcgacatttgcaggaggcattaagctaccgtgcgatcgatcggctgctgttgcatctgcaaaaaatgctggcataa

SEQ ID NO: 525918 - DNA, 1647 bp, Stenotrophomonas maltophilia
atgaatggggcacaatgggtagtacatgcgttgcgcgcgcagggagtcgaaaccgtattcggttatccgggtggcgcaattatgccgatttacgatgcactgtatgacggcggcgtggaacacctcttgtgccgacacgagcagggcgcagcgatggccgccatcggttatgcccgtgcgaccggtaaaaccggcgtctgtatggccacctccggtccgggcgcaacgaacctgatcaccggcctggctgacgcgctgctcgattccgtacccgtggtggcgatcaccggccaggtggcctctccgttcatcggcaccgatgccttccaggaagtggatgtgcttggtttatcgcttgcctgcaccaaacacagcttcctcgttcagtctctcgtagagctgccgcgcgtgatggccgaagcgttcgaggttgccagctctggccgtcctggcccggttctggtagatatcccgaaagatattcaggttgcactcggcgatctggaaccgcacttctccaccgttgaaagcgacaacgtgtttccccatacggaggttgaagaggctcgccagatgctggcgcaggcgaaacagccgatgctgtatgtaggcggcggcgtgggcatggcgcaggctgttcctgccctgcgcgaatttatcgcagtaacgcaaatgcccgccacctgcacgctgaaaggattgggcgcggtcgacgcggactatccatactatttgggcatgttagggatgcacggcaccaaagcggcaaacctggcggtgcaggagtgtgacctgctcatcgccgtcggcgcccgttttgacgaccgcgtcaccggcaagctgaacacctttgcgccgaacgccaaagtgatccatatggacatcgacccggcggagatgaacaaactgcgtcaggcgcatgtcgcgttgcagggcgatctcaacgcgctgttaccggcgctggagcagccgctggatatcaacgcatggcgtcagcacaccgccgatatgcgcgctgaacacgcctggcgttacgaccaccccggcgaggccatctatgcgccgctgttgttgaaacagttgtccgaccgcaaacccgcagacagcgtggtgacgacggatgtcggccagcatcagatgtggtcagcccagcacatgacctacacccgcccggagaacttcatcacctcgagcggcttaggcacgatgggcttcggcctgcccgctgccgtgggcgcacaggttgcccgcccgaacgataccgttatctgtatctccggtgacggctccttcatgatgaacgtccaggagctcggcaccgtgaagcgtaagcagttaccgctgaaaatcgttttgctcgataaccagcgtttgggaatggttcgccagtggcagcagctgttcttccaggagcgttacagcgaaacgaccctgaccgacaaccccgatttcctcaccctggccagcgccttcggcattcctggccagcacatcacccgtaaagaccaggttgaagcggcactcgacaccatgctgtcaagcgaagggccatacctgcttcatgtctcaatcgacgagcttgagaacgtctggccgttggtaccgcccggtgccagtaactcacaaatgctggagaaattatcatga

SEQ ID NO: 525919 - DNA, 264 bp, Stenotrophomonas maltophilia
atgatgcaacatcaggttgccgtgcaggctcgcttcaacccggaaacgttagaacgcgtattgcgtgtggtccgtcaccgtggttttcagatttgctctatgaatatggaaacggccacggatgcacaaaatatcagtatcgaattaaccgttgccagcccgcggccggtcgacttactgtttagtcagttatcaaaactggtagacgttgcccatgttgccatctgccagagcacaaccacatcacaacaaatccgcgcttaa

SEQ ID NO: 525920 - DNA, 930 bp, Stenotrophomonas maltophilia
atgacgacaaaaaaagctgattacatttggttcaatggtgagatggttcgctgggaagacgcgaaagttcacgtgatgtcccacgcgctgcactacggcacctccgtgtttgaaggcatccgttgctacgattctcacaaaggaccagtggtgttccgccatcgcgaacacatgcagcgtctgcatgactcagccaaaatttatcgtttcccggtctcccaaagcgttgatgagctgatggaagcctgccgcgaggtgatccgccagaacaaactgaccagtgcctatattcgtccgctggtcttcgtgggtgatgtcggcatgggtgtcaatccgcccgctggctataacaccgatgtgatcattgctgcgttcccgtggggcgcctacctgggcgcggaagcactggatcaggggatcgacgcaatggtttcttcctggaaccgcgtggcaccaaacactatcccgaccgcggctaaagcgggcggtaactacctctcctcactgctggttggcagcgaagcgcgccgtcacggctatcaggaaggtatcgcgctcgatgtaaatggctacatctccgaaggtgcgggcgaaaacctgtttgaagtgaaagacggcattctgttcaccccgccgttcacctcgtccgcgctgccgggcatcacccgcgacgccatcatcaagctggcaaaagatctgggtatcgaagtacgcgagcaggtgctgtcccgcgaatccctgtacctggctgacgaagtgttcatgtccggtaccgcggctgaaattacaccggtgcgtagcgtcgacggcattcaggtgggcgaaggccgctgtggtccggtcaccaaacgcattcagcaagccttcttcggcctgttcaccggcgaaacagaagacaaatacggctggttggatcaggttaatcactaa

SEQ ID NO: 525921 - DNA, 1851 bp, Stenotrophomonas maltophilia
atgcctaagtatcgttcagccaccaccacccacggccgtaatatggcgggtgcccgcgcactgtggcgcgccaccggaatgaccgacgccgatttcggcaagccaattatcgccgtggtgaactccttcacccagtttgtgccgggccatgtgcacctgcgcgatctcggtaagctggttgccgagcaaatcgaagcctccggcggcgtggcgaaagagttcaacaccattgcggtggatgacggtatcgcaatgggccacggggggatgctctattcactaccgtcgcgcgagctgatcgccgactcggtggagtacatggttaacgcccactgcgccgatgcgatggtctgtatctccaactgcgacaaaatcaccccggggatgctgatggcctccctgcgcctgaacattccggtgatcttcgtttccggcggcccgatggaagcgggtaaaacaaagctttccgacaaaatcatcaagctcgacctggtcgatgcgatgatccagggagcggacccgaaagtctctgacgagcagagcgaccaggtggaacgctccgcgtgtccgacctgcggctcctgttccgggatgttcaccgccaactccatgaactgcctgaccgaagcgctgggcctttctcagccgggtaacggctcgctgctggcgacccacgccgaccgtaagcagctgttccttaacgcgggcaagcgcatcgttgagctgaccaaacgctactacgagcaggacgacgccagcgcgctgcctcgcaacatcgccagtaaagcggcgttcgaaaacgccatgacgctggatatcgccatgggcggttccaccaacaccgttctgcacctgctggccgccgcgcaggaagccgaaatcgacttcaccatgagcgacatcgacaagctctcccgcaaagtgccgcagctgtgtaaagtcgcgccgagtacccagaagtaccatatggaagacgtgcatcgtgctggtggtgtcatcggtatcctcggcgagctggatcgcgcagggctgctgaaccgcaacgtgaaaaatgtgctcggcctgacgctgccggagtcgctggaccagtacgacgtgatgctgaccaaagacgacgcggtgaaaaagatgttccgcgccggtccggcaggtattcgcaccacgcaggcgttctcgcaggattgccgctgggacacgctggatgacgatcgcgccgaaggctgcatccgctcgctggaacatgcctacagcaaagacggcggtctggccgtgctgtacggtaactttgcggaaaacggctgcatcgtgaaaaccgcaggcgtggacgacagcattctcaaattcaccggtccggcaaaagtgtatgaaagtcaggacgaggcggtagacgctatcctcggtggcaaagtggtggaaggcgacgtggtggtcattcgctacgaagggccgaaaggcggtccgggcatgcaggagatgctctacccgactaccttcctgaaatcgatgggcctcggcaaagcctgcgcgctgatcaccgacggtcgtttctctggcggcacgtcaggcctctccattggccacgtctccccggaagcggcaagcggcggcaatatcgcgatcatcgaagatggcgacctgatcgaaatcgacattccgaaccgcggcattcagctgaagctgagtgaccaggagattgcggcccgtcgtgaagcgcaggaagcccgcggcgacaaagcctggacgccgaaagaccgccagcgcaaagtctccttcgccctgcgcgcttacgcgagtcttgccaccagtgcagataaaggcgcggtgcgcgataaatctaaacttgggggctaa

SEQ ID NO: 525922 - DNA, 1548 bp, Stenotrophomonas maltophilia
atgatggccgagtcacaacccttatccgccgcccccgagggggcggaatacctgagagcggtgctgcgcgcgccggtctatgaagccgtgcaggtcacgcccctgcaaaaaatggacaaactctcctcgcgcctcgacaacgtcattctggtgaagcgcgaagacaggcagccggtgcacagcttcaagctgcgcggcgcctacgcgatgatggccgggctgacggatgagcagaaagcgcgcggcgtcattaccgcgtcggcgggcaaccacgcgcagggcgtggcgttctccgcggcccgtttagggctgaaagcgctgatcgtgatgccggttgccacggcggatatcaaagtcgacgcggtgcgcggttttggcggggaagtgctgctccacggcgcgaattttgacgaagcgaaagccaaagcgattgagctggcgcagcagcagggcttcacctgggtcccgccgttcgatcacccgatggtgattgccgggcagggtacgctggcgctggaacttttgcagcaggatgcccatctcgaccgcgttttcgttccggtgggcggcggtggcttagccgctggtgtggcggtgctgatcaaacagctaatgccgcagatcaaagtgattgcggttgaagcggaagactccgcttgcctgaaggcggcgctggacgccggacatccggtggatctgccgcgcgtcgggctgttcgccgagggcgtggcggtgaagcgcattggcgatgaaacgttccgtctgtgccaggagtatctcgacgatatcgtcaccgtcgacagcgacgctatctgcgcggcgatgaaagatctcttcgaggatgtgcgtgcggtggcggagccgtccggcgcgctggcgctggcggggatgaagaaatacatcgcccagcacaacattcgcggcgagcgtctggcgcacgtgctttccggcgccaatgtgaacttccacggcctgcgctacgtgtccgaacgctgtgagctgggcgagcagcgtgaagccctgctggcggtgaccattccggaagagaagggcagcttcctgaagttttgccagctgctgggcggccgttcggtaacggagttcaactaccgctttgccgatgccaaagatgcgtgcatttttgtcggcgtgcgtctgagccgcggcgtggaggagcgcaaagagatcctcagcctgctgcatgacggcggctacagcgtggtcgatctctccgacgacgaaatggcgaagctgcacgtgcgttacatggtcggcggccgtccatccaagccgctcaaggaacgcctgttcagcttcgagttcccggaatcgccgggcgcgctgctcaagttcctgcacacgctgggcacccactggaacatttctctgttccactaccgcagccacggcaccgactacggccgcgtgctggcggcgttcgagctgggcgagcacgagccggatttcgaaacgcgcctgaacgagctgggctatgagtgccatgacgaaacccacaacccggcgttccgcttcttcctcgcgggctaa

SEQ ID NO: 525923 - DNA, 891 bp, Stenotrophomonas maltophilia
gtggatttacgcgatctgaaaatgttcctgcatctggcggaaagccgtcactttggccgcagcgcccgggcgatgcacgtcagtccttccacgctgtcgcgccagatccagcgccttgaggaagacctcggccagccgctgttcgtgcgcgataaccgcaccgtcaccctcacggaagccggtgaagagctgcgcatctttgcccagcaaaccttgttgcagtaccagcagctgcggcacaccatcgaccagcaggggccgtcgctttccggcgagctgcatattttctgctccgtgaccgccgcctacagccatcttccccccattctcgaccgcttccgcgcggaacatccgtcggttgaaattaagctcaccaccggcgatgccgccgacgcgatggaaaaagtggtcacgggcgaagcggatctcgcgattgccgggaagccggaaaccctgccgggcgcggtagcgttctcaatgctggagaatctggcggtagtactgattgccccggccctgccctgccctgtgcgcaaccaggtctcggtggagaaaccggactggtcgacggtgccgtttatcatggccgatcaggggccggtgcgccgccgcattgagctgtggttccgccgccagaaaatcagcaacccgtcgatttacgccacggtcggcggccatgaggcgatggtgtcgatggtggcgctcggctgcggcgtggcgctgctgccagaagtggtgctggaaaacagcccggagccagtgcgcaatcgcgtgatgattttagaacgcagcgacgagaaaacaccgttcgagcttggcgtgtgcgcacaaaaaaagcggctgcatgagccgcttattgatgcgttctggaagatattgccgaaccactaa

SEQ ID NO: 525924 - DNA, 1476 bp, Stenotrophomonas maltophilia
atggctaactactttaatacactgaacttgcgccagcagctggcgcagctgggcaaatgccgctttatggcgcgcgacgaatttgctgatggcgcgagctaccttcagggtaaaaaagtggtcattgttggctgtggcgcacagggtctgaaccagggcctgaacatgcgtgactccgggctggatatctcctacgccctgcgcaaagaagcgattgctgaaaagcgcgcttcctggcgtaaagcgaccgaaaacggcttcaaagtaggtacctacgaagagctgatcccgcaggcggacctggtggttaacctgacgccagacaagcagcactctgacgttgtgcgttccgtacagccgctgatgaaagacggcgctgcgctgggttactcccacggcttcaacatcgttgaagtgggcgagaagatccgtaaagacatcaccgtagtgatggtggcaccgaagtgcccgggcaccgaagtgcgcgaagagtacaaacgtggtttcggcgtaccgacgctgatcgccgttcacccggaaaacgatccgaaaggcgaaggcatggcgattgccaaagcctgggcagcggccaccggcggccatcgtgcgggcgtactggaatcttccttcgttgcggaagtgaaatctgacctgatgggcgagcagaccattctgtgcggcatgctccaggctggctccctgctgtgcttcgacaagctggtggaagagggcaccgacccggcatacgcggaaaaactgattcagttcggctgggaaaccatcaccgaagcgctgaagcagggcggtattacgctgatgatggaccgactgtccaacccggcaaaactgcgcgcgttcgcactctctgaacagctgaaaaccatcatggcaccgctgttcctgaaacacatggacgacatcatctccggcgagttctcttccggcatgatggcggactgggcgaatgacgataagaaactgctgacctggcgcgaagagaccggtaaaaccgcgttcgaaacggcaccacagttcgagggtaaaatcagcgagcaggagtacttcgataaaggcgtactgatgatcgcgatggtgaaagcgggcgttgagctggcgttcgaaaccatggtggattccggcatcattgaagaatctgcgtactacgaatcgctgcacgagctgccgctgatcgcaaacaccatcgcccgtaagcgtctgtatgagatgaacgtggtgatctccgataccgccgagtacggtaactatctgttctcttacgcctgcgtaccgctgctgaaagagttcatgactaccctgcaagcaggcgatctgggtaaagcgattgcggaaggtgcggttgataacgcgcagcttcgtgacgttaatgaagcgattcgcagtcacgaaatcgagaaagtgggccagaaactgcgtggctacatgaccgatatgaaacgtatcgcagtagcagactaa

SEQ ID NO: 525925 - DNA, 474 bp, Stenotrophomonas maltophilia
atgcttaacatcgtcttattcgaaccagaaatcccacccaataccggcaatatcatccgcctgtgcgccaacaccggttttcgtctgcacatcattgagccgatgggctttacgtgggacgacaaacgtctgcgccgcgcggggctggactaccatgagtttactgccgtcgttcgtcatcacgattacgccgcgtttctggacgcagagaagccgcagcgcatgttcgccctgaccaccaaaggcacgccagcgcacagtgccgtaagctatcaggacggggattatctgatgtttggtccggaaacccgcggcctgccggccaccattctggatgccctgcccgctgagcaaaaaattcgtattccgatgatgccggacagccgcagcatgaacctgtcgaatgcggtgtcggtggtggtgtatgaggcgtggcgccagctgggttatcccggcgcgatactgcgtagctaa

SEQ ID NO: 525926 - DNA, 1341 bp, Stenotrophomonas maltophilia
atgacgtattcaggtcgggtggatattcagcaggtgatcgatgagagtcctttttcagggtttcactggcttcttattgtgctgggctttctggtgctggcgatcgatggtttcgataccgcagcgatgggttacattgcgcctacgctgtcggcggagtggggaatacataaacaggatctggggccggtgttgagtgcggcgctactggggctgtcgctgggagctcttattgcaggtccggtatcggaccgtatgggacgcaagcgcgtactggtcttttcatgcctgttcttcggcctggcgagcctgggcacggcctgggcgcaaagtctgaataccctgacgctgtggcgatttctgaccggtctcgggctgggcgccgcgatgcctaacgccatcacgctgatctcagagtttgccccccagcgctgccgcgccatggcaattaacaccatgtactgcggctttccgctgggtgcggcgggcggcggggcgatctcgtcctggcttatccctcaccatggctggcgaagcgtgctgctgaccggcgcgattgcgccgctgattttaacggtgctgctggcgctgctgttgccggagtcggtgaagtttctggtgcagcgcggaaaagacgtcgcgcaggttcgccgcatcgccagccggttcgcccgcagcacgctggatagcgtcacaggctttttcctggcggaggagaaggtcgcgtcgaaaaaaggcagcgtgtcgcagctgttttccatgccctggctgcccggcaccctgatgctgtgggtcacctactttatgggactggtgatttattacgtcctgctgagctggatgccaacgctgatgcaggggatggggtatgcgctggcggaatccgcctggctcacctcgctgttcaccttcggcggcaccgctggcattctgctcgcgggctggatgatggaccgctgggaagcgcacaaggtggtcgcgtgtggtttcgtgctgacgatgggcctgattcttttactcggcattgagcataatcatatcgccctgtttggcgggttaatcttcctgatggggatcgcgatgaatggcgcgcagtcggggatgcagaccctggccgccaccttttaccctaccgagtgccgtgcgacgggtatcgcctggatgcaggggatcggccgcttcggcggcgtggcgggcaccatgaccagcgcccagcttctttccatgcagtggcaggcggacagtattttgatgatcctcagcgtgcctgctctcgtggccgcggcggcaaccgtctacaaaatgctgtatagccgctcgcaggagccgggcgtcgcctag

SEQ ID NO: 525927 - DNA, 1188 bp, Stenotrophomonas maltophilia
atgattatttccgcagccagtgactatcgcgccgcggcacagcgcattttgccgccattcctgttccactacattgacggcggggcgtacgccgaatataccctgcgccgcaacgtggaggacctgtcggaagtggccctgcgccagcgcgtgctgaagaatatgtctgacctgagccttgagacgaagctgtttaacgagacgctctccatgccggtggcgcttgcgcccgtcggcttatgcggcatgtatgcccgccggggcgaagtgcaggccgccgccgcagcagatgccaaaggcattccgtttaccctttccaccgtgtccgtctgcccgattgaagaggtcgccccgaccatcaagcgcccgatgtggttccagctgtacgtcctgcgcgatcgcggttttatgcgtaacgcccttgagcgcgccaaagcggcgggctgctctacgctggtctttaccgtcgatatgccgacgcccggcgcacgctaccgtgatgcgcactccggcatgagcggtccgaacgccgcgatgcgccgctactggcaggcggtgacgcacccgcagtgggcgtgggatgtcggcgtgaatggccgtccgcacgatctgggcaatatttcggcctacctgggtaaaccgaccgggctggaagattacatcggctggctggcgaacaacttcgatccatccatctcctggaaagacctggagtggatccgcgaattctgggacggcccgatggtgatcaaagggatcctcgatccggaagatgcgcgcgacgcggtgcgttttggtgccgatgggatcgtggtctctaaccatggtggccgccagcttgacggggtgctctcctccgcccgcgccctgccagccattgccgatgcggtgaaaggcgatattgcgattctggccgacagcggcatccgtaacgggctggacgtggtacgcatgattgccctgggcgcagacagtgtgctgctgggccgtgcttacctgtacgcgctggccaccagcggccaggcgggcgtggcgaatctgctgaacctgatcgagaaagagatgaaggtggcgatgacccttaccggtgcgaaaacaatcggtgaaatcagcaaagactctctggtgcaggagctcagtaagctgcctgcggcgctggcccccctttctcagggaaacgcggcctga

SEQ ID NO: 525928 - DNA, 774 bp, Stenotrophomonas maltophilia
atgatagtgatgcccagacgcctgtccgacgagattgccactcgcgtacgggcgctgatagaagaacaacagctggaagcgggcatgagattgcccgccgagcgtcagcttgccgcccagcttggcgtgtcgcgcaattcactgcgcgaggcgctggcgacgctggtcagcgaaggggtgctgctgagccgtcgaggcggcggcaccttcgtgcgctggcagcatgacgactggtccgaacaaaacatcgtgcagccgcttaagacgctgatggaaaacgacccggactacagctttgacatcctcgaagcgcgtcacgccatcgaaaccagcaccgcgtggcatgcggcgatgcgggcaaccgaggccgacaaagagaagctcaaagcctgctttgaggccacgcaaagcagcgacccggacatcgcctcccaggcggacgtgcgttttcacctcgcgattgccgaggcctcgcacaacgtggttctgctgcaaaccatgcgcgggttcttcgacctgctgcaatcctccgtgaagcagagccgccagcgcatgtatctggtgccgccggtatttgcccaactgaccgaacagcacgaggcggtgctcaacgccattctggccggtgatgccgaggccgcgcgcaaggcgatgatggcgcatctcggcttcgtgcataccaccattaaacgattcgatgaagatcaggcccgacaggcgcgtattacccgtctgcctggcgagagtgatatttccagggagaacaaagcatga

SEQ ID NO: 525929 - DNA, 1656 bp, Stenotrophomonas maltophilia
atgagcctctggcaacaaaactacgatccggccggaaatatctggctgtcgagcctgatcgcatcgctaccgatcctgtttttcttctttgcgctgattaagctcaagctgaagggctacctcgccgcgacgtataccgttgccatcgccctgatggtggcgttgttcttctacaaaatgccggtcgatcgcgcgctggcctccgtcgtctatggcttcttctacggactgtggccgattgcgtggatcatcatcgccgccgtctttgtctacaaaatctcggtcaaaaccgggcagttcgacattattcgctcgtcgattctctccatcacgccggaccagcgtttgcagatgctgatcgtcggcttctccttcggagcatttctggaaggggcggcaggattcggcgcaccggtggccatcaccgccgccctgctggtcggtctgggctttaacccgctgtatgccgctggcctgtgcctgattgtgaataccgccccggtggcgtttggcgcgatgggcattcctattctggtggcgggccaggtgaccgggctggacagcttcgagatcggccagatggtgggccgccagctgccgttcctgaccattatcgtgctgttctggatcatggcgattatggacggctggcgcggcgtgaaggagacctggcctgcggtgatggtagcgggcggttcgttcgccattgcccagtatctcagctccaacttcctcggcccggaactgccggacatcatctcttccctggtgtcgctggtctgtctgacgctgttcctgaaacgctggcagccggtacgtatcttccgctttgctgacatgggcgcatcacacgtggatcagacgctggcgcgcaccggctataccgccggacagattgtacgcgcatggtcaccattcctgttcctgaccgccaccgtgacgctgtggagcattccgccgtttaaggccctgttcgccccgggcggcgcgctgtacgacatggtgattaatatctccgtgccgttcctcgacaagatggtcgctcgtatgccgccggtggtacacgacgccacgccgtatgcggcagtgtttaagttcgactggttctcagccaccggcacggccatcctgtttgccgctatcctttccgtagtgtggctgcgcatgaagcctgccgccgcggtgcagacctttgcggcgacgattaaagagctgatgctgccgatttactccatcggcatggtgctggcgttcgcgtttatttcgaactactccggcctgtcgtcgacgctggcgttagcgctggcgcataccggccacgcgtttaccttcttctcgccgttcctcggctggctgggggtgttcctgaccggttcagatacgtcatctaacgccctgtttgccgccctacaggccacagccgcgcagcagattggcgtctcggacgtgctgctggtcgccgcgaacaccaccggcggcgtgaccgggaagatgatctcaccgcagtccatcgccattgcctgtgccgcggtggggctggtaggcaaagagtcggatctgttccgctttaccgttaaacacagcctgatatttacctgcatggtgggcgtgatcaccacattgcaggcctatgtcttaacctggatgattccatga

SEQ ID NO: 525930 - DNA, 711 bp, Stenotrophomonas maltophilia; identical to SEQ ID NO: 100200

SEQ ID NO: 525931 - DNA, 186 bp, Stenotrophomonas maltophilia
atgacatcacatcagttattacgcttaaaaaaggttgaagaaaaaaccggcttgaaacgttcacaaatctatctgtatatgaaagagggtacatttcctcgttcaataaaaatcggaccagccagtgtggcctggctggaatcagaaattgacgaatggatcaatattaaattgtcccggcgctaa

SEQ ID NO: 525932 - DNA, 588 bp, Stenotrophomonas maltophilia; identical to SEQ ID NO: 83361

SEQ ID NO: 525933 - DNA, 210 bp, Stenotrophomonas maltophilia; identical to SEQ ID NO: 121176

SEQ ID NO: 525934 - DNA, 222 bp, Stenotrophomonas maltophilia; identical to SEQ ID NO: 121177

SEQ ID NO: 525935 - DNA, 645 bp, Stenotrophomonas maltophilia
atgctttccaccacagcctttctggcgctggcgacgcagtgcgccaccagtgttcacccgtccacggcacttgatgtggcacgggtcgaatccggttttcacccttacgccattgctgaaatcgtgccgggcggcaaaggtgtgatttcacattttcccgcaagccatgatgaggcgatgagcctcaccggacggctggcggcgcaaggccgacgctattcggtcggcctgatgcaaatcaccagcaccaatttccgccattacggcgtcatggccagcgacttacttaacccttgcatcaatctgtcggtatttgagcgcattctcgccgactgttaccggcgcggtagcactctgaaacgagcgctcagttgttactactccggcaactttgaaaccggtcagcgaccggaatccgcctttaaccagaccagctacgtacagcgcattggctatgtcgtcccgtccacccgggaagaccggcagcgagcccctgacccgagcacacaaccgtctgcccgttatcccgccgttgtgctgcgcggcgagcctgccggtgccactgcgccgatcctgacttccctgcattatcccgattccgtcattcgcggcgctatccctgttatccctgatgaggagaaatga

SEQ ID NO: 525936 - DNA, 273 bp, Stenotrophomonas maltophilia; identical to SEQ ID NO: 121179

SEQ ID NO: 525937 - DNA, 2748 bp, Stenotrophomonas maltophilia; identical to SEQ ID NO: 121180

SEQ ID NO: 525938 - DNA, 729 bp, Stenotrophomonas maltophilia; identical to SEQ ID NO: 121181

SEQ ID NO: 525939 - DNA, 273 bp, Stenotrophomonas maltophilia; identical to SEQ ID NO: 121182

SEQ ID NO: 525940 - DNA, 1032 bp, Stenotrophomonas maltophilia; identical to SEQ ID NO: 121183

SEQ ID NO: 525941 - DNA, 141 bp, Stenotrophomonas maltophilia; identical to SEQ ID NO: 121184

SEQ ID NO: 525942 - DNA, 684 bp, Stenotrophomonas maltophilia; identical to SEQ ID NO: 121185

SEQ ID NO: 525943 - DNA, 891 bp, Stenotrophomonas maltophilia; identical to SEQ ID NO: 121186

SEQ ID NO: 525944 - DNA, 1305 bp, Stenotrophomonas maltophilia; identical to SEQ ID NO: 121187

SEQ ID NO: 525945 - DNA, 1020 bp, Stenotrophomonas maltophilia; identical to SEQ ID NO: 121188

SEQ ID NO: 525946 - DNA, 1860 bp, Stenotrophomonas maltophilia; identical to SEQ ID NO: 121189

SEQ ID NO: 525947 - DNA, 747 bp, Stenotrophomonas maltophilia; identical to SEQ ID NO: 121190

SEQ ID NO: 525948 - DNA, 948 bp, Stenotrophomonas maltophilia; identical to SEQ ID NO: 121191

SEQ ID NO: 525949 - DNA, 624 bp, Stenotrophomonas maltophilia
gtggtagcgcagttcgtccatgaccggacgcagcacttcacgcgcggcattttcagcctcgtcgaagttttcttgcgcgagattgcggtcagtaaagtagcgctcaagccaggttacgcagcccatcgacagactgaacagcgaggtcgcctgggcacccgtgccggtcaccagttcagtactcgctccgccaatatccaccaccagacggcgatcgtcgcccccggtagtgtgcgccacgccctgatatatcagacgcgcttcttcttcaccgctgatgacttgcaccgggcagccgagaatttcctgcgctttggcaataaaatcgacggcattaaccgccagacggagcgtcgcggtcgcgacaacgcggatttgggcatgcggtatgtcctgcagacgctctgcaaagaggcgcagacactgccagccacgttccatggcttcgggagagaggtgattatcgctgctcaggcccgccgccaggcggaccttgcgcttgatgcgcgtcagcgtctgtatgcttcccgccacctcgcgtacaaccagcatatgaaaactattcgaaccgagatcaattgccgcataaagcgaggtggaactgagcatcattttttaacctga

SEQ ID NO: 525950 - DNA, 1269 bp, Stenotrophomonas maltophilia
atgagcaaaacacatttaacagaacagaagttttccgacttcgccctgcacccaaaggtgatcgaagcccttgaaactaaagggtttcataactgcacgcccattcaggctctcgccctgccgctgacgctggccggtcgtgatgttgcagggcaggcgcaaaccggtactggcaaaacgatggcgtttttaacgtcaacgtttcattatttactttctcacccagcgattgcagaccgcaaagttaaccagccgcgcgcgctaattatggccccgacgcgagaactggcggtacagatccacgcagacgctgagcccctggcgcaagccactggcctgaaacttggcctggcctatggcggcgacggctacgataaacagctgaaagtgctggaaagcggcgtggatatcctgattgggaccacaggccgtcttatcgactacgctaaacagaaccatatcaacctcggcgcaatccaggtcgtggtgctggatgaagcagaccgcatgtacgatctgggcttcattaaagacatccgctggctgttccgccgtatgcctgcggcaaaccagcgtctgaatatgctgttctccgcaaccctttcataccgcgtacgtgaactcgcattcgagcagatgaacaatgcggaatatgtggaagtagaaccggagcagaaaaccgggcaccgcattaaagaagagctcttctatccttctaatgaagagaaaatgcgcctgctgcaaaccctgatcgaagaagagtggccggatcgcgcgatcatctttgcgaacactaaacaccgctgtgaagatatttggggccacctggcggcagatggtcaccgtgtgggcctgctgaccggcgacgtggcgcagaaaaaacgcctgcgcattctcgacgaatttactcgtggcgaccttgatattctggtcgcgaccgacgtggcggcccgtggcctgcacattccagccgtgacgcacgtctttaactatgacctgccagatgactgtgaagactatgtacaccgtatcggtcgtaccggtcgtgctggcgcaagcggtcactccatcagccttgcatgtgaagagtatgcgctgaaccttccggccattgagacctatatcggtcactctattccacagagtaaatacaatccggacgcgctgatgagcgaactgccgccacctaagcgccttacccgtccacgtaccggtaatggcccgcgtcgttccggcggtgcgccgcgtaatcgtcgtcgttcaggttaa

SEQ ID NO: 525951 - DNA, 330 bp, Stenotrophomonas maltophilia; identical to SEQ ID NO: 117058

SEQ ID NO: 525952 - DNA, 783 bp, Stenotrophomonas maltophilia
  misc_feature (706)..(715): n is a, c, g, or t
atgaatcttaccgaattaaagaatacgccggtttctgagctgatcactctcggcgaaaatatgggactggaaaaccaggctcgtatgcgcaagcaggacatcattttcgccatcctgaagcaacacgctaagagtggcgaagatatctttggcgacggtgtgctggagatactgcaagacggatttggtttcctccgctctgcagacagctcctacctcgccggccctgacgacatctacgtatcccctagccaaatccgccgtttcaacctccgcactggtgacaccatttcaggtaagattcgtcctccaaaagagggtgaacgctactttgcgctgttgaaggttaatgaagtcaactacgacaaaccggaaaactcccgcaataagatcctgttcgagaacttaacgccgctgcacgcgaactctcgtttgcgtatggagcgtggtaacgggtctactgaagacttaaccgctcgtgtgctggatctggcatcgccaattggtcgtggccagcgtggtctgattgtggcgccgccaaaagccggtaaaaccatgctgctacaaaacatcgcgcagagcattgcttacaaccatccagactgtgtgctgatggtgctgctgattgacgaacgtccggaagaagtgaccgagatgcagcgtctggtgaaaggggaagtggttgcgtcaaccttcgacgagcctnnnnnnnnnngacgagcctgcttcccgccacgttcaggttgcggaaatggttatcgagaaggcgaaacgcctggttga

SEQ ID NO: 525953 - DNA, 528 bp, Stenotrophomonas maltophilia
atggttatcgagaaggcgaaacgcctggttgagcacaagaaagacgtgatcatcctgctcgattccattacccgtctggcgcgtgcctacaacaccgtggtgccggcttccggtaaagtactgaccggtggtgtggatgccaacgccctgcatcgtccgaagcgtttcttcggtgcggcgcgtaacgtggaagagggcggtagcctgaccattatcgcgacggcgctgatcgataccggctccaaaatggacgaagttatttacgaagagtttaaaggtacaggcaacatggaactgcacctttctcgtaaaatcgcagaaaaacgcgtcttcccggcgatcgactacaaccgttccggtacccgtaaagaagagctgcttaccactcaggaagagctgcagaaaatgtggatccttcgcaaaatcatccatccaatgggcgaaatcgacgcaatggaattcctcattaacaaactggcgatgactaaaacgaacgacgatttcttcgacatgatgaaacgctcgtaa

SEQ ID NO: 525954 - DNA, 1104 bp, Stenotrophomonas maltophilia
gtgaacctattcgatacgtttgctgaactcaccagtatttttttgttcactacttgctttctttttttagcacgtaaggtagcaaaatatgtcggtttagtggacaaacctaacttccgtaaacggcaccaaggtatgattcccttggtgggcggaatctccgtttttgcaggtgtttctttcacttttgctatcgcggattactatatcccacatgccaggctgtacctgtgctgtgcgtctgttctggttgttgtgggggcacttgatgatcgctacgatatcagtgtaaaaattcgagccttcgtgcaggctgcagttgctcttgccatgatggtggcggcaaaccttcaccttagcagtcttggatacatttttggttcttgggagatggtacttgggccgtttggttacttccttacactctttgccgtatgggtcgccatcaatgcatttaatatggtagatggaattgatggtttattgggcggactatcttgtgtttcatttgctgccattggcataatcttatggtttgatggtcaatacagcctggcaatgtggtgttttgctatgattgcggccattctgccctatattcttttaaatcttggcgcgctgggccgtcgctataaagtctttatgggcgatgcgggtagcacattgattggtttcactattatctggatcttattggaaaccactcagggtaaaacacatccaatcagcccggttacagcgctttggatcattgccattccgctgatggatatggtggcgattatgtatcgtcgtctgcgtaaaggaatgagcccattttctgcggaccggcagcatattcatcatctgattatgcgcgccggcttcacgtctcgtcaggcgtttgtgctgattacgctagcggctgctattctggctgcgattggcgttgccgcggaatacgctcatttcattcctgaatgggtaatgttggtattattcttgctagcatttttcatgtacggttactgcatcaagcgtgcatggaaagtcgcgcgttttattaaacgtttaaaacgcaggatgcgtcggaacagtggcaaaaatacaactttaactaagtaa

SEQ ID NO: 525955 - DNA, 1047 bp, Stenotrophomonas maltophilia
atgactcaaccgttggcgggagcgaaatcagtgggcactgagaacgagctggatattcgtggtttgtttcgagtgttatggcagggcaaactgtggattgtggggattggcctggggttcgcgctgttagcgcttgcctacaccttctttgcgaaacaagagtggagcgccacggcgatcacagaccgaccaacggtgaatatgcttggaggctactactcccagcagcaattcctgcgtaatcttgatatcaaggccaatctggcgaccccggatcaggcctcggtgatggatgagtcctacaaagagtttgtgatgcagctggcgtcgtgggatacacgtcgcgatttctggtcccagacagactactacaagcagcgcatggtcggtaacagcaaagcggatgccgcgctgctggatgatttaatcaacaacattcagtttatgcctggcgatgtgctccgtaacgttagcgacagcgtgaagctgattgcggaaacggcgccggacgccaataacctgttgcgtcagtacgttgcttttgccagccagcgtgcggccagtcatctgaatgacgagctgaaaggcgcctgggctgcgcgaactatccagatgaaagcgcaggtcaaacgtcaggaagaggtcgctaaggccatcttcgcccgtcgcgtgcataatattgagcaggcgctgaagattgcggaacagcacaatatttcccgtagcgaaacggatgttccggctgacgaactccctgattcagaaatgttccttcttggtcgcccaatgcttcaggcacgtctggaaaatatccaggccgttggccctgactttgaccttgattacgaccaaaaccgcgccatgctcaatacgctcaacgtcggtccaacgctggacccgcgttttcagacctatcgttatttaagaacgcctgaagagcctgtaaaacgcgatagtccgcgtcgcgcattcctgatgatcatgtgggggattgtgggcgcactgactggcgctggcgtagcgttattgcgtcgccgcacaaactaa

SEQ ID NO: 525956 - DNA, 1086 bp, Stenotrophomonas maltophilia
atggcgcctctggttcatgcgctggccagagatcctgatattgaagcgaaagtgtgcgtgactgcccagcaccgtgagatgctcgatcaggtcttaaccctcttttctatcgtcccggattacgatctcaatataatgaaaccgggacagggactgacggaaatcacctgccgtattctgcaagaattaaagcctattctggagtcgttcaagccggatgtagtgctggtgcacggcgacaccaccaccaccgtggcgaccagcctggccgcgttctatcagcgtatccctgttggccatgtcgaagcgggactgcgtaccggcaatctctattccccgtggccggaagaggccaaccgtacgctcaccggtcacctggcgatgtaccattttgcgccaaccgagaactcacgtcagaacctgctgcgcgaaaatatcagcgacagcaaaatcttcgttaccggcaatacggtcattgatgcgctgatttgggtgcgtgaccgcgtgctggctaacagcgagcttcaggcagaactcgctgcgcgctatccgttcctgaacaacggcaagaaaacgattctggtgacgggacaccgccgcgaaagttttggccgtggctttgagcaaatctgccacgcgctggctgaaatcgccgcgcagaatgaggatgtgcagattgtctatccggtgcaccttaaccctaacgtcagcgaaccggtcaaccgtatcctgggccacgtggaaaacgtgctcctgatagagccgcaggactatctgccatttgtctggctgatgaaccacgcctggctgatcctgaccgattctggcggcattcaggaagaggcgccttccctcggtaagccggtactggtgatgcgcgaaaccactgaacgtccggaagcggtcactgccggtaccgtgcgtctggtgggaacggatccgcgtcgcattgtcgaagaggtcacgcgcttactgcatgacgaagaagagtatcaggcgatgagccgtgcccataacccgtacggggacgggcaggcttgtggacgtattttgcacgcacttaaacacaatcgggtaacgctatga

SEQ ID NO: 525957 - DNA, 1263 bp, Stenotrophomonas maltophilia
atgagttttactaccatctctgttgttggtctcggctatatcgggctgcctactgcggcggcctttgcctctcgtcaaaagcaggttattggcgtagatatcaacgcgcacgcggtagaaaccatcaaccgtggcgaaattcatatcgtggagcccgatctcgatcgcgtggtgaaaaaggcggtggacggtggcttcctgcgcgccagcaccacgccggtagaagccgatgcgtacctgattgcggtgcctacgccctttaaaggcgatcatgagcctgacatggtttacgtcgaggcggcggcaaaatccattgcgcctgtgctgaagaaaggggcactggttattcttgagtccacttcacctgttggggcaaccgagcagatggcacagtggctggccgaggcgcgtcccgatctcagcttcccccagcaggcgggcgaccaggccgatatcaacatcgcctactgccctgagcgcgtactgccaggccaggtgatggtggaactgattaaaaatgaccgcgtgattggcggcatgaccccagtctgctccgcgcgcgccagcgagctgtataagatcttccttgaaggcgaatgcgtggtgaccaactcccgcaccgccgagatgtgcaaactgaccgaaaacagcttccgcgatgttaacattgcatttgcgaatgaactgtcgttgatttgcgccgatcaggggattaacgtctgggaacttgttcgccttgccaatcgtcacccacgcgtgaacatccttcagccggggccgggtgtgggtgggcactgtatcgctgtcgatccgtggtttatcgtggcgcagaatccggaacaggcgcgcctgattcgcaccgcgcgcgaagtaaacgaccacaaaccgcactgggttatcaaccaggtgaaagccacggtggcggattgcctcgccgacagcggtaaacgtgccagtgagctgaaaattgcctgctttggtctggcattcaaaccgaatattgacgatcttcgcgaaagcccggcaatggaaattgccgaaacgatcgcagcctggcacagcggtgaaacgctggtggttgagccgaatattcatgcgttgccggcaaaacttgccggccactgcacccttaccgcactggatgacgcgctggcgacggcggatgtgctggtgctgctggtggatcacaatgcgtttaaagcggtctccgctgatgccgtgcgtcagcagtatattgttgatactaagggcgtttggcgttga

SEQ ID NO: 525958 - DNA, 678 bp, Stenotrophomonas maltophilia
ttgattactctcaacggcgtgctggagtcccttgagtgggaaagcgtatttttttcgctcccctcagcgatagtgcgtctgcgcgataacgctcctgcgttgcaggacgcagacttcagcgcctggcagcgcgtacaggctaagatcccggcggaccgcgccgatctgctggacgcgctccagcagcacggattccggctggtcgagggcgaggttgatctctctgttaccgtggcccgccacggctcaccgggcgcggaaattgcaacggagcaggatatccccgcgctgcgcaagatggcggcgctggctttcgctcaaagccgtttccgggcgccctggtatgcgcccgatgacagcggccgcttttatgcccggtggatagagaatgcggttaaaggcacgtttgaccacgtctgtctggtgttccgtactgccggtgggcagattcagggttttgtttcgcttcgcaggctcaacgagcaagaggcgcgcatcggtttgttagccgggcgcggcatgggcgaaaaactcatgcaggcggcgctgcactgggcggagcaacaacaggtatcgacgctgcgggtcgcaacccagatgggcaacaccgctgcgcttaaacgttatattgcgagtggtgccagcatcgacgccaccgcctactggttatacaggtga

SEQ ID NO: 525959 - DNA, 1131 bp, Stenotrophomonas maltophilia
atgattccatttaacgcgcctcccgttgtgggcactgaacttgattacatgcagtcggctatgggcagcggcaagctctgtggcgacggtggttttacccgtcgctgccagcagtggatggagcaacgttttcacagtgccaaggtgctgctgacgccgtcctgtaccgcatcgctcgaaatggccgcgctgctgctggatattcagcccggcgatgaagtgatcatgccgagctacaccttcgtctccacggcgaacgcgtttgtcctgcgcggggcgaaaatcgtgtttgtggatatccgtccggatactatgaacatcgacgaaacgctgattgaagcggcgatcaccgacaaaacgcgggcgattgttccggtgcattacgcgggcgtggcctgtgaaatggacaccatcatggccatcgccaaaaagcacaacctgttcgtggtggaagatgccgcgcagggcgtgatgtccacctacaaaggtcgcgcgctgggaaccatcggtcatatcggctgctttagcttccacgaaaccaaaaactacaccgcaggcggcgaaggcggcgcgacgctgattaacgatcgtgcccttgtcgagcgtgcggaagtgatccgtgaaaaagggaccaaccgcagccagttcttccgcggtcaggtggataaatacacctggcgcgatatcggctcaagctacctgatggcggacttgcaggccgcgtatctctgggcgcagctggaagcggcagagcgaatcaatctgcaacgcctctccctgtggcaaacctactacgacgcgctggagtcgctggctaaagccggacgtattgaactgccgactattccggcagactgcatccacaacgcccacatgttctatatcaagctgcgcgataacgacgatcgcagcaagctgattgcctggctgaaggaggcggaaattatggcggtattccactatattccgctgcactccagcccggctggcgaagccttcgggatgtttgccggtgaagaccgctacaccaccaaagagagcgaacgtctgctccgcctgcccctgttctacaacctcgcgccggtgaaccagcgtacggtgatcaattcgcttctgagttatttcgcctga

SEQ ID NO: 525960 - DNA, 1251 bp, Stenotrophomonas maltophilia
atgtctctggcaaaagcgtcggtgtggacggcagcgtccacgctagtaaaaattggcgccgggttactggtcgtcaagctgctggccgtctcatttggtccgtcaggcgttgggctggcagggaacttccgccagctggtcacggtgcttggcgtgctggcaggtgccgggatattcaatggcgtcaccaaatacgtcgcgcagcatcatgacgatgccgaaaagcttcgcacggtggtgggcacctcctctgctatggtgctgggcttctctacgttgctggccatcgtctttttgctggcggcggcacctgttagtcagggactgttcggacacacgcactatcagggactggtgcgcctggtggcgttcgttcagatgggcatcgcctgggcgaacctgctgctggcgctgatgaaaggcttccgtgatgccgccgggaatgcgctggcgctgatcctcggcagcattatcggcgttatcgcctactacttctgctatcggctgggcggctatgaaggcgcgctgctggggctggcgctggtgcctgcgctcgttgtcgttccggcagcgtttatgctgatgcgcagaggcaatgtcccgctgagttacctgaaaccgcagtgggacaagatgctggcggggcagctaggaaagtttaccctgatggcgctcatcacttcggtaacgcttcccgtggcttacgtgatgatgcgaaacctgctggcagcgcattacagctgggatgaagtggggatctggcagggcgtaagcagcatttcagatgcttacctccaatttattacggcttcctttagcgtctatttgctgccaaccttatcgcgcctgacgtccaggcaggatattacccgcgagatttttcgcgccctgcgtttcgtgttgccggccgttgcgattgccagctttaccgtctggttactgcgtgatttcgccatctggctgctgttttcagcgaagtttaccgccatgcgcgatctgtttgcctggcaactggtcggcgatgtgctgaaagtgggggcatacgttttcggctatctggtgattgcgaaggcttcgctgcggttgtatatcctggctgagatcggccagtttgcgctgctaacggcattttctcactggctgatccccacccacggtgcgctgggggcggcgcaggcctatatggcaacttatatcgtttatttcgctgcctgttgcggcgtatttttactttggcgtaaacgcgcatga

SEQ ID NO: 525961 - DNA, 1080 bp, Stenotrophomonas maltophilia
atgactgcactgatacacatactgggatcggatatcccgcatcataaccagaccgttctgcggttcttcaacgatgaactggcatccggcacgcccgatgcgcgtgagtttatggtcgttggatgcgataacggcctgagcgcggcgtgtccggcattgcatatcaccttctggccagacaaagcggcgctgacgaaggccgtggttgctaaagccaaagcggatcgaagccaacgtttcttcttccatggacagttcaataccggactgtggctggcgctgttaagcggcgggatcaaaccttctcagttcagctggcatatctggggagcggatctctacgaagtctcccgtggctggaagttccgacttttctatccgctgcgtcgtctggcgcaggcgcgcgtgggctgcgtttttgctacccgaggcgatctcaactattttgctaaacagcacccgaaggttcgcggggagctgctctatttcccgacccgtatggatccggcgctgaacaccatggcgaatgacacggttcgagagggcaagctgaccatcctggtggggaattccggcgatcgcagtaacgagcatgtcgcggcgctgagggcggtgcatcagcagtttggcgacacggtgaacgtggtggtgccgatgggctatcccgccaataacgacgcctacatcgatgaagttcgccagcaggggcttgcgctgtttagcgcggaaaacctgcacattctcagcgataagctggaatttgatgactatctcgcgctgctgcgaaaatgcgatctgggctatttcatctttgcccgtcagcaggggattggcacgctgtgtctgctgattcaggcgggcgtaccctgcgtgctcaaccgcgaaaacccgttctggcaggacatggccgagcagcatattccggtgctgtttacctctgacacgcttaatgtcgaggtggtacgggaagcgcagcgtcagctcacgctggtggataaaaatagcatcgactttttcagcccgaactacctcacgccgtggcaccgcgcgctgcgtattgcttcaggagacaacgcatga

SEQ ID NO: 525962 - DNA, 1353 bp, Stenotrophomonas maltophilia
atgagccagttgcagtttagcggcttgctggtggtctggctgctgagcacgctgtttatcgccacgctcacctggtttgaattccggcgggtacgttttaacttcaacgtattcttctcgctgctgtttttgctgacctttttctttggcttcccgctgaccagcatcctcgtgttccgctttgatgttggcgtcgcgccgccggaaatcttgttgcaggcgctgctctctgcgacctgcttctacgcggtgtactacgtcacttataaaacgcgcctgcgcgcggcaaaagacaccaccccccgtcgtccgctgtttaccatgaaccgggtagaaacccatctgacgtgggttatgctgatgactatcgccctcgtcagcgtggcgattttcttcatgcataacggctttttactgtttaagttgcagtcctatagccagattttctccgccgaagtctccggcgtcgcgctcaagcgtttcttctatttctttatcccggcgatgctggtggtctttttcctgcgtcaggacagcaaagcctggctgttcttcctggtcagcaccgtcgcatttggcattctgacctacatgatcgtcggcggcacccgcgccaacatcattatcgccttcgcgattttcctgtttatcggcattattcgcggctggatctcgctgtggatgctggcggcggcaggcgtctttggcattgtggggatgttctggctggcgctgaagcgctacgggctgaacgtggcgggcgacgaagcgttttacaccttcctgtatctgacgcgcgacaccttctcgccgtgggaaaacctggcattactgctgcaaaactacgacaagatcgaattccaggggctggcgccgattgttcgcgatttctatgtctttataccgacgtggctgtggcccgatcgtcccggcattgtcctgaacacggcgaactacttcacctgggaagtgctgaacaaccattcgggtctggcgatttccccaaccctgattggctcgctggtagtgatgggcggaacgtggtttatcctgcctggcgcgatcgcggtagggctgataataaaatggttcgactggctatatacgctgggtaacgaagagaccaaccgctacaaagccgctgttttgcacagtttctgtttcggtgccattttcaatatgatcgttctggcgcgcgaggggctggattcattcgtctcacgcgtggtgttctttatggtcgttttcggactctgtctgctgctggcaaaactgctgtactggttgtttgacagtgcagggcttgtgcacagacgtgagccacagggcagcacaacgctgtcgcaagtctga

SEQ ID NO: 525963 - DNA, 741 bp, Stenotrophomonas maltophilia
atgacggatacaacttcagccccgcgttatgcgctgcgcgggctacagctgattggctggcgtgacatgcagcacgcgctggattttctgtttgcggacgggcagatgaagtcgggcacgctggtggccatcaacgcagaaaaaatgctggcggttgaagataatgtggaagtgaaaagcctgattgaagccgcggagtttaaatacgcagacggtattagcgtggtgcgttcaattcgtaaaaagtttccagacgctaatgtgtctcgcgtggcgggtgctgacctttgggagcggcttatggagcgcgcaggcgctgaaggcacgccggtatttttgatcggtggcaagccagaggtgctggcgcaaaccgaacaaaagttgcgtaaccagtggaatgttaacatagtgggcagccaggatggctatttcaggccggaagatcgcctggcgttatatgagcgcgtgcgcgacagcggggcgaaaattgtcactgtcgctatggggtcgccgcgccaggaaatactgatgcgcgattgccgtctggtcagcccggatgcgctttatatgggcgttggcggcacctacgacgtctttaccggccacgttaagcgtgcgcccaaagtctggcaaaacctggggctggagtggctctaccgcctgctctcccaaccgacgcgtataaaacgacagattcgccttctgcgctacctcgcctggcactacaccgggaaaatgtaa

SEQ ID NO: 525964 - DNA, 1386 bp, Stenotrophomonas maltophilia
atggcagagaaaaaaccggagcttcagcgtgggctggaagctcgacatattgaactgatcgcgctgggcgggactatcggcgttggcctgtttatgggctcggcaagcacgctgaagtgggcggggccttccgtcctgctggcgtatattattgccggactgttcgtcttcttcatcatgcgctcaatgggcgaaatgctgtttctggagccggtgacgggctctttcgccgtttacgcccaccggtatatgagcccgttctttggttatctcacggcctggtcgtactggtttatgtggatggccgtggggatttcggagatcaccgccatcggggtctacgtgcagttctggttcccggagatggcccagtggatacccgcgcttattgccgtagggctggtggcgctggcgaaccttgccgccgttcgtctttacggcgaaatcgagttctggtttgcgatgatcaaagtcaccaccatcatcgtgatgattgtcgttggccttggggtcatcttctttggcttcggtaacggcgggcacgctatcggatttggtaacctgaccgggcacggcggcttctttgcgggcggctggaagggctttctgacggcgctctgtatcgttgtcgcctcctatcagggcgttgagctgatcggcattaccgctggtgaggcgaaaaacccgcaggtcacgctgcgtagcgcggtaggcaaggtactgtggcgtatcctgattttctatgtgggcgcgatcttcgttatcgtgaccattttcccatggaacgagatcggcaccaccggcagcccgtttgtcttaaccttcgctaagattggcatcacggcggcagccgccattatcaactttgtggtgctgacggcggcgctctccggctgtaacagcggaatgtacagctgtgggcgtatgctttacgcgctctcgcaaaacaaacagctgccggcggtgatgggtaaagtctcccgcgtgggtgtaccggtggcgggcgtagcggtgtcgattgtgattctgctgattggctcttgcctgaactacatcatcccgaatccgcagcgcgtgtttgtttatgtttatagcgccagcgtgctgccggggatggtaccgtggtttgtcattttgattagccagctgcgtttccgacaggcgcacaaagaagcgatcgccagccatccattccgttccattctgttcccgtatgcgaactatttgacgatggcgttcctgatttgcgtattaattggaatgtactttaatgaagatacccgcatgtcgctgtttgtcgggatgatcttcctggctgccgtcacagctgcatataaactttttggcctgggtcgccgtggctccgcccataaagtggaggaataa

SEQ ID NO: 525965 - DNA, 450 bp, Stenotrophomonas maltophilia
atgaatacagaaaacaatttggcccatttatatagcgaactttccctcaaccccaatctcccaactcttgccgaacgctgtaacctgctcactgaaatcctgctcgactgtcattcgctcccacaaacgcagcccgtttgccgctgtctcggagcttatctggaagaggtaaaatccggcctcacagaatccatgcgtgattttcaggtggtggaatttgaggacgaagcggaacagccgcgacaaaaagagtggttgctggaagatacagaaacgaaatgtgactactgccgggcgttaaaccacgtgctgctggtttcgcattttgaccgcgatatgttgccgcacctgacgggactgttgcatgacattacccacgcgatagctgaagatttaatcgtacccatgaactcgtgcatgacaatacatctgccgacacagccacactaa

SEQ ID NO: 525966 - DNA, 219 bp, Stenotrophomonas maltophilia; identical to SEQ ID NO: 116158

SEQ ID NO: 525967 - DNA, 705 bp, Stenotrophomonas maltophilia
atgcgcctggtgcagctttctcgccataatattgcgttcccttctccggagggggcgctgcgtgaacctaacggattgctggctttgggcggcgatctcagcccggcgcgtctcttaatggcttaccagcgcggcatcttcccgtggttttctcccggcgacccgattttatggtggtctccggacccgcgagccgtgctgtggcccgggcagtttcacctgagccgcagcatgaaacgttttcacgcaaattcgccctatcgcgtcacgctcaatcatgccttcgggcaggttatcgaaggctgcgctgaagatcgtcatgaaggcacctggataacccgcgacatcattatcgcctaccaccagcttcatgagctgggctacgcgcactccatcgaagtatggaaagatgatgacctcgttggggggatgtacggggtggcgcagggcacgctgttctgcggcgagtcgatgttctcccgcgccacgaatgcgtcgaaaaccgcgctgctggtttttagccaggaatttgcccaacgcggcggacaactgatggattgtcaggtgctgaatgagcacaccgcctcgctcggcgcggttgaaatttcccgccgacgctatatcgaacaccttgaacagtgccgacaggagactcttccgcgcgatttttgggttcccagaatgctctttatgcccaatgcctaa

SEQ ID NO: 525968 - DNA, 1722 bp, Stenotrophomonas maltophilia
atgcgcgccctgcttccctatcttgctttgtataaacgccacaaatggatgctgacgctcgggatcgtactggcgattatcactctgctcgccagcatcggcctgcttacgctttctggctggttcctctccgcgtctgcggccgcaggctttgccgggctatacagctttaactacatgctgcctgccgccggggtgcgcggcacggcgattacgcgaactgccgggcgctacttcgaacgcctggtcagccacgacgcgaccttccgcgtgctgcaacacctgcgtatttatacgttcagcaaattgctgcccctctcccctgccgggctggcacgttttcggcagggcgaattactcaaccgcgtagttgcggatgtggatacgctggatcacctctatctgcgcgtcatctcgcccatggtgggcgcgtttgtggtgattgtcgtggtcacgctggggttgagtttcctggatgttcccatcgcactgacgctcggcggcatcatgctgatgacgctgattattctgccgcccctgttttatcgtgcaggtaaaaccaccggggaaaacctgacgcgtctgcgcggggaataccgccagcagctcacctcctggttgcagggtcaggccgagctcaccatttttggtgccagcaagcgctaccgcacccgtatggaaaatacggaactgaactggcatgaagcccagcgtcgccagtctgaactgaccgcgttttctcaggcgctgatgatgttaatcggtgggtttgccgttatcgccatgctctggatggcctccggtggcgtgggcggtaacccgcagcctggcccgctgattgcgctgtttgttttctgtgccctggcagccttcgaagccttagccccggtcaccggcgcctttcagcatctcggccaggtgattgcctctgcgctgcgcattacggatattgcagagcaggagctggaagtgaagttcagcgcgggtcaaaccgctgtgccggagcaggtcgcgctgacgctcagcaacgtcaccttcgcctacgacaagcaggcgcaaaacgcgctggaagacatcagcctttctgttgatgccgggcagcgcattgcgatccttggccgtacgggatgtggcaaatcgacgcttctgcaactcctcacgcgcgcctgggacccgcagcagggcgagattcggtttaacgaccttccgctgtctgattttagcgaagcggccttgcgtaaaacggtcagcgtcgtgccccagcgtgtgcacctgttcagcgctacgctgcgcgataatcttcttctggcggcaccagacgactctgacgatacgctgcgggcgatgctggaacaggttgggctgcacaagctgcttgaggacgacgggttgaacagctggctgggtgaagggggccgacagctttccggtggcgaactgcgtcgtctggccatcgcgcgcgccttactgcacgatgcgccgctgatgttgctggatgaaccgacagaaggtctggatgcgacaaccgagagtcaaattcttgatttactgacaaaggtgatgaaaggcaaaaccgtgctgatggtcactcaccgcctgcgcgggctggtgaatttcgatcgaataattgtgatggacaacggacacataattgagcaaggtaatcacccagagctgctggcaaaacagggtcgctactaccagtttaaacagcgcctgtag

SEQ ID NO: 525969 - DNA, 1767 bp, Stenotrophomonas maltophilia
atggaaaaaacccgtcaacaagagttaacgcgctggctgaaacagcaaagctttctgtcccgccgctggcttatgatttcccgcgttctgggatttatcagcggtctgttgattgttgcccaggcatggctgctggcccgcattctcaatcatatgatcatggagagcatcccgcgcgaagcgctgctgctgccgtttatcgttctggtgctggttttcgtcctgcgtgcgtgggtggtctggctgcgcgaacgggttgggttccatgccggccagcacatccgctatgagatccgccgcaaagtgctcgaccggctttcggaagccgggcctgcgtggatccagggcaaaccggccggtagctgggcgacgctgatccttgagcaaatcgacgatatgcacgattactatgcgcgttatcttccacagatggcgctggcagtgtttgtgcctctgatgattgttatcgccatcttccctgttaactgggtagcggctctgatcctgatggggaccgccccgctcatcccgctgtttatggcgatggtcggcatgggtgcggcagatgctaaccgtcgcaacttccttgcactgggtcggttgagcggtcatttcctggaccgtctgcgcggaatggaaaccctgcggatctttggtcgtggtgaagcggaaaccgaaaacattcgcctggcgtcgcaggattttcgtcagcgcaccatggaagtgttgcgcatggccttcctttcttccggcgtgctcgagttctttacctccctgtcgattgcgcttgtggcggtttactttggcttctcctacctcggcgcgctggactttggccactacggtacggcggtcacgctttccgccgggttcctggcgctgatcctggccccggaatttttccagccgcttcgcgatctcggcaccttttaccatgccaaagcgcaggcggtgggtgctgccgacagcctgaaaacctttatggaaacgccgctggcacatccggagcgtggtgaagtgacgctgaatacgaacgatccggtgaccattgaagcacaggatttttctgttctgtcgcctgaaggcaaagtgctggccggcccgctgaactttaccctgcctgccgggcaacgtgtggtgctggtgggtaccagcggctcaggtaaaagctcattgttgaatgcgctgtcaggttttatggcgtacaccggatcgctgcgtatcaacaaaacggagctgcgcgagctcgatcctgatgcctggcgtaaacagctaagctgggtgggtcaaaaccctcagctgcctgccccaacgctgcgcgagaatgtgctgctggcaaggccggatgcacgtgacgatgagctgcaatcggtcctcgaccgcgcctgggtcagcgagtttttgccgctgcttgcgcagggtgtcgataccgtcattggcgatcagtctgccgggctgtcagtgggccaggcacagcgcgtcgcggttgcccgtgcgctgctgaacccctgttcgttaatgctgctggacgaacccgccgccagcctggacgctcacagcgagcagcgcgtgatggatgcgcttaacgcagcctcacgccagcaaactaccctgatggtgacccaccagctggaaggtattgccggctgggatcagatctgggtgatggaaaacggacacattgttgagcaaggcgattacgccgcgcttgttgccgcgcaggggccctttgcgaccctgctggcgaaccgtcaggaggatatctga

SEQ ID NO: 525970 - DNA, 969 bp, Stenotrophomonas maltophilia
atgggcacgaccaaacacagtaagctgctaatccttggttctggacctgcgggatataccgcagcggtctatgctgcacgcgctaacctgcaaccggtactgattaccgggatggaaaaaggcggtcagctgaccaccaccacggaagtggaaaactggccgggcgacccgaacgacctgaccgggccgctgctgatggagcgcatgcacgagcatgctgctaaattcgaaaccgaaatcctgttcgaccacattaataaagtggatttgcagaaccgtccgttccgtctgaccggcgacagcggtgaatacacctgcgatgcgctgatcatcgctaccggtgcctctgcccgttatctcggtctgccgtctgaagaagcattcaaagggcgcggcgtatcagcctgcgcgacctgcgacggtttcttctatcgcaaccagaaagttgcggtgattggcggcggcaacaccgctgttgaagaagcgttgtatctggcgaacatcgcctcagaagtacacctgatccaccgtcgcgacaccttccgcgccgagaagatcctgatcaaacgcctgatggataaagtggcgagcggcaacattgtgctgcataccaaccgtacgctggaagaagtgaccggcgatcagatgggtgtggcaggtctgcgaattcgtgatacgcagaacaccgacaccgtcgaaacgctggaggtagcaggcctgtttgtggcaatcggtcacagcccgaacacggccattttcgaaggccaacttgagctggagaacggctacatcaaagtgcagtctggcattcacggcaatgccacgcaggccagcatcccaggcatcttcgcggctggcgacgtgatggaccatatttatcgtcaggcgatcacctctgcggggaccggctgtatggccgcactggacgcagaacgctatctggacggactggcagaacaaggtaaataa

SEQ ID NO: 525971 - DNA, 495 bp, Stenotrophomonas maltophilia
atggtagatagcaagaagcgccctggcaaagatctcgaccgtatcgatcgtaacattcttaatgaattgcaaaaggatgggcgtatttccaacgtcgagctttcaaaacgtgtgggactttccccgacgccgtgccttgagcgtgtgcgtcgactggaaagacagggttttatccagggctatacggctctgctaaacccgcattatctggatgcctcacttctggtatttgttgagattactctgaatcgtggtgcgccggatgtgtttgagcaatttaacgccgctgtacaaaaacttgaagaaattcaagagtgtcatctggtttccggtgattttgactacctgttaaaaacccgtgtgcctgatatgtccgcctaccgtaagctgctgggtgaaaccctgctgcgtctgccaggcgtgaacgacacccgtacttatgtggtgatggaagaggtcaaacagagcaatcgtctggttattaagacgcgctaa

SEQ ID NO: 525972 - DNA, 3684 bp, Stenotrophomonas maltophilia
ttgagccaggaatacactgaagacaaagaagtcacattatctaagctaagcagcggacgtcgtctcctcgaggcgttactgattgttattgccctttttgccgtctggctgatggccgccttactcagtttcaacccctcagatcccagctggtcgcaaaccgcatggcatgagcctattcataacttaggtggcgttcccggtgcctggcttgcggacacgctctttttcattttcggagtgatggcttatacccttcccgtcatcattattggcggatgctggtttgcctggcgtcatcgacagaacgacgactacatcgattattttgccgtttcgctgcgcctgattggcgccctggcgctgatcctcacctcctgtgggctggcggcgatcaacgctgatgatatctggtacttcgcctccggcggggtgatcggcagcctgttgagctccgcgctgcaaccgatgcttcatagcagcggcggcacgctggcgctgctctgtatctgggcggcgggcctgacgctgtttaccggctggtcctgggtgagcattgctgagaagatcggcagctttattctgacgctgctgacgttcgccagcaaccgtacccgtcgtgacgatacgtgggtcgatgaagacgagtatgaagatgagtacgaagaggaagacgaggcgcctgtacagcggcgtgaatctcgccgcgcgcgtattctgcgcggtgctctggcgcgccgccagcgcgtcgctgaaaaatttgctaacccgttaggccgtaaaacggatgccgcgctgttctccggcaaacgtatggatgaagacgagcagattgagtatcgcggtgcggccgtcgaccctgatgacgtactgttctctggccatcgagccacgccgggagagtatgacgaatacgatccgctgctgaatggccactccgtgactgaaccggtagccgctgctgctgccgcaacgacggctgcgcaggcccatgttgcgcctgttgaagccgtgatgccgtcctcgcctgttccggcaccggagtccgcgatccagcaaccgcaggtagactggcagactgcgccaggcgtccatacgcctgaaccgaccattgcgccggagcctgaaagttatattcctgtgcagcaggaacagtggcagcaaccgtatcagccgcctgagcctgccagcgtgccgcaacaaccgtatcaggcttatacgcccgaacccgctgtacctgaacagccatacgttgcaccggtgtctgaacccgaagtggtggaggaagcgaagccatcccgtccgccattatactattttgaagaagtggaagagcgccgcgcccgtgagcgcgagcagcttgccgcctggtatcagcccgtgcccgagccggtgcaggagcctgttgcaaaagcgccttcggtcagcgttccacctgtagaacctacgccagccgttgcgtcgggtgcagaagccgtgaagcaggcaacggcagccgctgccgcgtccgctccgctattcagcccggcagccgacagcgccccgcgtcctcaggtgaaagagggcattggtccacagctgccgcgccctaaccgcgtgcgcgtaccgactcgccgggagctggcctcttatggcattaaactgccttcccagcgtatggcggaagaaaaagcccgtgagtccgactacgaagatgatgccgacgaactgcatcaggatgagctggcgcgtcagtttgctgcccagcagaatcagcgttacggcgaagagtatcagcatgacgtgccttcacagcatcacgtgccttcacagcaggacgaggatgatgcggccgaagcggagctggcgcgccagtttgcagcaacgcagcagcagcgttattccggtgagcaaccttcgggggcaaacccgttctcgctgtcggatttcgaattctcaccaatgaaagatctggtggatgatggcccaagcgaaccgctgttcacgccgagcgtaatgccggaagcggagccggtgcgtcagccgcctgcaccacaggcttacgtgcagccgcaacagccggcgccgcaggcgtatgcgcagccgcagacaccttctccaccgcctcagccacagttccagcagccagcaccacagccgcaggagagcctgattcacccgctgctgatgcgtaacggagacagccgaccgctgcaacgaccaagtacgccgctgccgtcgctggatctgttaacgccaccgccagcggaagtcgagccggtggatacctttgcccttgagcagatggcccgtctggtggaagcgcgtctggctgacttccgcattaaagcggacgtggtgaactactcaccgggcccggtgatcacccgtttcgaactgaacctggcaccgggcgtaaaagcggcgcgtatttctaacctctcccgcgacctggcgcgttctctgtccaccgtggcggtacgcgtggtggaagtgatcccaggcaagccttacgttggccttgagctgccaaacaagaaacgccagaccgtttatctgcgtgaagttctggataacaccaaattccgcgacaacccgtccccgctgaccgtggtgttgggtaaagatatcgccggcgatccggtggttgccgatctcgcgaagatgccgcacctgctggttgcgggtactaccggctccggtaaatcggtcggggtgaacgccatgatcctcagtatgctctacaaagcgcagcctgaagacgtgcgtttcatcatgatcgacccaaaaatgctcgaactgtccgtctacgaaggcattccgcatctgttaacggaagtggttaccgacatgaaggacgccgccaacgcattacgctggagcgtcaatgaaatggagcgtcgctacaagctgatgtcggcgctgggcgtgcgtaacctggccggttataacgagaaaatcgccgaggcggcgcgtatgggccgtccgattccggacccatactggaagccgggtgacagcatggatgcccagcatccggtgctggaaaaactgccttacatcgtggtgctggtggatgaatttgccgacctgatgatgaccgttggcaagaaagtggaagagctgattgcgcgtctggcacagaaagcgcgtgcggcgggcatccacctggtactggcaacgcagcgtccgtccgtggatgtaatcaccggtcttattaaggcaaacatcccgacccgtatcgcgtttaccgtgtcgagtaaaattgactcccgtactatccttgaccagggcggagcagagtcgctgctggggatgggtgatatgctctattccgggccgaactccacctcgccggtgcgtgttcacggtgcgtttgttcgcgaccaggaagtgcacgcggttgtgcaggactggaaagcgcgcgggcgaccgcaatatgttgacggcatcacctctgacagcgaaaacgaaggtggcggcggtggttttgacggcggcgaagagctggatccgttattcgaccaggcggttaatttcgtcaccgaaaaacgcaaagcgtccatctccggcgtgcagcgccagttccgtatcggttacaaccgcgcggcgcgtatcattgagcagatggaagcccagggcatcgtgagcgaacaggggcacaacggtaaccgtgaggtgctggcgccaccgccttttgagtaa

SEQ ID NO: 525973 - DNA, 615 bp, Stenotrophomonas maltophilia
atgaaaaaaatcgccatcgcctgtgcattactctccagttttgttgccagcagcgtctgggctgatgcagccagcgaccttaaaagccgactggataaagtgagcagtttccacgccagcttcacgcaaaaagtgactgacggcagcggcaacgcggtgcaggaaggccagggagatttgtgggtaaaacgcccaaatctgttcaactggcacatgacccagccggatgaaagcgttctggtgtctgacggtaaaaccctgtggttctacaatccgtttgttgagcaggcgaccgccacctggctcaaagacgcgaccagcaatacgccgtttatgctcattgcccgtaaccagtccagcgactggcagcagtacaacatcaaacaaaacggtgatgagttcgtcctgacgccaaaaggcagcaacggtaatctgaagcagttcaccattaacgtgagcagcaacggtaccatcaatcagttcggcgcggttgagcaggacgatcagcgcagcagctatcagttgaagtctcagcaaaacggcgccattgatgcatcgaaattcacctttaccccgccgcagggcgtaacggtggacgaccaacgcaataagtaa

SEQ ID NO: 525974 - DNA, 1344 bp, Stenotrophomonas maltophilia
gtgagcaacctgtcgctcgatttttcagataatgcgtttcaacctctggccgcccgtatgcggccagaaaatttagcgcagtacatcggtcagcaacatctgctggctgcggggaaacccttgccgcgcgctattgaggcggggcatctgcactccatgatcctctgggggccacccggcactggaaaaaccacgctcgctgaagtgattgcccgctatgccagcgcggacgttgagcgcatctcggcggtcacgtcgggggtgaaagagatccgcgaggcgatcgagcgggcgcgacaaaaccgcaatgccggacgtcgcaccattctgtttgtcgacgaagttcaccgcttcaacaagagccagcaggacgcctttctgccgcacattgaagacggtacgattttctttatcggcgccaccacggaaaacccgtcgtttgaactgaactctgcgctgctctcccgggcgcgcgtgtatctgcttaaatcgctgaccacggaagatatcgaaaaagttctgacgcaggcgatggaggacaacgcgcgtggttacggcgggcaggatatcgttctgccggacgagacgcgtcttgctatcgccgaactggttaacggtgatgcccgtcgtgcgttgaacacgctcgaaatgatggccgatatggccgaagtggacgatgcgggcaagcgcgtattaaagcctgaactgctcaccgaaattgccggtgagcgcagcgcgcgcttcgataataaaggcgatcgtttttacgacctcatctctgcattacacaagtccgtgcgcggcagcgctccggatgcggcgctctactggtatgcgcgtatcatcaccgccggtggcgatccgttatatgtcgcgcgtcgctgcctggcgattgcgtcagaagatgtcggtaatgccgatccacgcgccatgcaggtcgctatttccgcctgggactgctttacccgcgtcgggcctgcggagggcgagcgtgccattgcgcaggcaattgtctatctggcttgcgcaccgaaaagtaacgcggtgtataccgccttcaaagcggcgatgtcggatgcacgtgaacgtccggactacgatgtgccggttcatctgcgcaatgcgccaaccaaattgatgaaagagatgggttacgggcaggagtatcgctacgcccatgacgaacccaacgcctacgccgccggcgaggagtatttcccgcaggagatggcacaaacccgctattatcaccccacaaatagaggtcttgagggtaagattggcgaaaagctcgcctggcttgccggacaggatcaaaatagccctataaaacgctaccgttag

SEQ ID NO: 525975 - DNA, 1293 bp, Stenotrophomonas maltophilia
atgctcgatcccaatctgctgcgtaatgagccagacgcagtcgctgaaaaactggcacgccggggctttaagctggatgtagataagctgcgcgctcttgaagagcgtcgtaaagttttgcaggtacaaacagaaaatctgcaggcagagcgtaattctcgatcgaaatccattggccaggcgaaagcgcgcggggaagatattgagccattacgcctggaagtgaacaaactgggtgaagagctggatcaggcgaaagctgaactggacgttcttcaggctgaaattcgtgatatcgctctggcgatcccgaacattcctgacgacagcgtccctgtcggcaaagacgaaaacgacaacgttgaagtgaaacgctggggtacgcctcgcgagtttgacttcgaggtgcgcgatcacgtgacgctgggcgaaatgcacgcgggcctggactttgcggctgcggttaagctgaccggttctcgcttcgtggtaatgaaaggtcagattgctcacctgcaccgcgcgctggcgcagtttatgctggatctgcacaccgagcagcatggctacagcgaaacctacgttccgtatctggttaaccacgatacgctgtacggtacaggccagctgccgaaatttgccggcgatctgttccatacccgtccgctggacgaagaagctgacagcagcaactacgcgctgatcccaaccgcggaagtgccgctgaccaacctcgtgcgtgatgagatcatcgacgaagacgatctgccaatcaaactgactgcgcactctccatgtttccgttctgaagccggttcttacggtcgtgatacgcgcggtctgatccgtatgcaccagttcgataaagttgagatggtgcagatcgttcgtccggaagagtctatggacgcgctggaagagatgacaggtcacgcagagaaagtgctggagctgctggggctgccataccgccgtatggcgctgtgcactggtgacatgggcttcggcgcctgcaaaaccttcgacctcgaagtctgggtgcctgcgcaaaacacctaccgtgaaatctcttcttgctctaacgtctgggatttccaggcgcgtcgtatgcaggcgcgttgccgcagcaagtccgacaagaagacccgtctggttcataccctgaacggttctggtctggcggttggccgtacgctggttgccgtgctggagaactaccagcaggcagatggtcgtattgagatccctgaggtgctgcgtccttacatgaaaggccagcagttcatcggctaa

SEQ ID NO: 525976 - DNA, 2445 bp, Stenotrophomonas maltophilia
atgaaaatcaaagcgcctgaagcgttaatggctgccgaggtcactcgccgtgggttgatgaaaaccacggcaataggtggtctggcggttgccagcagcgcctttacgcttccttttacccgtctggcgtcggcggcggaggctctgtctcccgcttcagccccggaaaaagtggtgtggagtgcctgtaccgttaactgtggtagccgttgtcccctgcgtatgcatgttgtggacggtgaaatcaaatacgttgaaaccgacaataccggcgatgataactacgaagggttacaccaggttcgtgcctgtctgcgtggccgctcaatgcgccgtcgcgtttataacccggatcgtctgaaatatccgatgaagcgtgtcggtaagcgtggggaagggaagttcgagcgcattagctgggacgaagcctacgatattatcgcgaccaacatgcagcgcctgatcaaagaatacggcaacgaatccatctacctgaactatggcaccgggacgctgggcggcaccatgacccgctcctggccgccgggtaaaacgctggtagcgcgcctgatgaactgctgcggcggctatctcaaccattatggcgactactcttccgcacagattgccgcgggcctgaactacacctatggcggctgggcagacggtaacagcccgtcggatatagaaaacagcaagctggtggtattgttcggcaacaacccgggcgaaacgcgtatgagcggcggtggggtaacctattatcttgagcaggcgcgcgccaaatccaacgcacgtatgatcatcgtcgatccgcgctacaccgataccggcgcggggcgagaagacgagtggatccctatccgccctggtaccgatgcggcgctggtcaatgcgctggcgtatgtgatgatcactgaaaacctcgtcgatcagccgttccttgataaatactgcgtcggctatgacgagaagacgctgccagccagcgcaccggctaacgggcattacaaagcgtatattcttggtcagggcagcgacggggtagcgaaaacccctgagtgggcatctaccatcaccggcattccagtcgaacgtattgttcaactggcccgtgaaattggttcagcaaaaccggcttatatcagccagggctggggaccgcagcgtcacgcgaacggcgaaattgccacccgcgctatttctatgctctcgattctgactggcaacgtcggcattcacggcggtaatagcggggcgcgtgaaggctcgtatgaagtaccgtttgaacgtatgccaacgctggataacccggttcagaccagcatctccatgtttatgtggacggacgcgatcgagcgcggcccggaaatgaccgcgctacgcgacggtgttcggggcaaagataagctggatgtgccgatcaaaatgatctggaactatgccggtaactgcctgatcaaccagcactcagagatcaaccgcacccacgaaattttgcaggacgacaagaagtgcgaaatgattgtggtgatcgactgccacatgacctcatcggcgaagtatgccgatattctgctcccagactgcaccgcgtctgagcagatggatttcgcgctggacgcctcctgcggcaacatgtcctatgtgatcttcacagaccaggccatcaaaccgcgcttcgagtgcaaaactatctatgagatgacgtccgagctggcgaaacgtcttggcgttgagcagcagttcacagaggggcgtactcaggaagagtggatgcgccatctgcacgagctctcacgcaaagccattccagacctgccggacttcgataccttccgcaagcagggcatgtacaagcagcgcgatccggaagggcatcacgtggcgtataaagccttccgcgacgatccgcaggccaatccgctgaccacgccgtcgggcaaaatcgagatctactccgaagagctggcaaaaattgccgccacgtgggaattgccggaaggggacgttatcgatccgctgccgatctatacgcctggcttcgaaaactacaacgatccgctgacggagaaattcccacttcagttaaccggtttccactacaaagcgcgtgttcactccacctacggcaacgttgacgttctgaaagcggcctgccgacaggagatgtggatcaacccgatggatgcgaaagcgcgcggcatcagtaatggcgatcgcgtacgtatcttcaacggacgtggcgaagtgcatatcgaagctaaagtgactccgcgcatgatgcctggcgttgtcgcgctgggggaaggggcctggtataacccggatgcgaaccgtatcgatcaggcgggctgcatcaacgttctcactacgcagcgtccatcgccgctggcgaagggcaacccatcccacacaaacctcgttcaggttgaaaaggcgtaa

SEQ ID NO: 525977 - DNA, 918 bp, Stenotrophomonas maltophilia
atgaacttaagacgactgaaatacttcgtaaaaatcgtcgatatcggcagcctgacccaggcggctgaagtgctgcatatcgcgcagcctgcgctgagccagcaggtcgcgactctggaaggcgaaatggaccagcaactgttgatccgcaccaagcgcggcgtaacgcctaccgaagcgggaaaaattttatatacccatgcccgtacgatcctgcgtcagtgcgaacaggcgcaactggccgtgcacaacgtaggtcagaccctgagcgggaatgtctccatcggcctggcaccgggaacggccgcatcgtcggtaaccatgccgctgcttcaggcggtgcgcgcggagctaccggaagtgctggtttatctgcatgagaacagtggttccgtgctcaatgacaaactgctcaacggtcagctggatatggcggtgctgtacgatcgctcaccggttgccgggatcaccagccagccgctgcttaaggaagatctttatctggtcgggacccgtgattgccccggccagagcattgatttaaccgccgtggcagagatgaacctgttcctgccgcgcgactacagcgccgtgcgtgttcgcgttgacgaagcgttctcgctgcgccgtctgacggcgaagattatcggggagattgattccatctccacgctgactgccgccattgccagcggcatgggggtaacggtactgcccgagtctgccgcacgttcactgtgcagcgcggcgaatggctggatggcccgcatcaccacgccatccatgagcttaccgctgtcgttgaatatgtccgcgcgcggctccctgtcaccgcaggcgcaggcggtgaaagagatcctgatgtctctggtcagtaagccgtcgctggaaaatcgcgagctgcaactggtcagctga

SEQ ID NO: 525978 - DNA, 837 bp, Stenotrophomonas maltophilia
gtgggagcgccgataactgtcaccgtacctgaaggcaataccctgccgctcgaagcgtttgcagcgcagcacgggcaagggttaagcaatatgctggaagctaacccgggggtagatccgtttttaccacgtgccggtacagcgctggtggtgccgcagcagcttattctgccgccaaccgtgcgtgaagggattgtggtgaacgtcgcggaaatgcgtctttactattatccacccggcagcaacacggttgaggtgctgcctattggcattggtcaggccgggcgcgaaacgccgcgtaactgggtaaccgccgttgagcgcaaacaggaaggcccaacttggtcacccacgccaaatacgcgacgtgcttacgcgaaggaggggaaaacgttgcccgcgttcgtgcccgccgggccggataacccgatggggctgtatgccctttatatcggcaggctgtacgcgatccacggtaccaactcaaatttcggcattggcctgcgcgtcagccagggctgcattcgcctgcgtaataacgatatcaaatacctgttcgataacgtttcggtggggacgcgggtacagcttatcgatcagcccgtaaaagtgaccaccgagccggatggtagccgctgggtagaggttcacgagccgctttcacgcaatcgcgcggaatttgaatcaacccgaaaagtgccgctgcccatttcggccgcgcaaaggacgcagctgataagtgaaggggcgggcgctgagctggaacggcggtcggggatgccggtgaggcttgcaatgcccggtggcgttgcgctttccgggcctacaggaccgtag

SEQ ID NO: 525979 - DNA, 1356 bp, Stenotrophomonas maltophilia
atgtccaccctttatcgcctgggcgacgaagaggtgatgttaatcaccggtgcgccggacgtccttttccgtctttgccagcaccagcagacccaaaacgggctggagccgttcaacctgcactattgggaagagaagattgaagagtatgcgcgcgaaggattgcgcatggtggctgcggcctggaaaccggccgccagcgggcagcgcgagctgacgcatgcggatctgcaagagggggtcatactgctcggcattgcgggcatgatggatcccccgcgcccggaagccatttcggccattgccgactgcttgcaggcgggcattcgcgtgaaaatgattaccggggatcatccacaaacggcgatgagcattggtcagatgctgggtattggcaacgcggcgagcgccattaccgggcgcgaactggaggcgatggacgaccaccagctgagcgaggcggcgcaaaaatacgatatctttgcccgaaccagcccggaagataaattccgtctggtgcaggcgctgcaaagtaagcaggaagtggtcgggatgaccggggacggcgtgaacgatgcgcctgcgctgaagcgggcggatgtcggcatcgcgatggggatcaaaggtactgaagtcaccaaagaagccgccgatatggtgttaacggatgataactttgccaccattgcccgggcggtccatgaagggcgtcgggtctacgacaacctgaaaaagaccattctgttcgttatcccgagcaacatcgcccaggccctgctgatcattattgccctgctggcggggaacctgatcccgttaacaccggtactgatcctgtggatgaacatggcaacctcggcaacgctgtcgtttggtctggcgtttgaagcgggtgagaaggacatcatgaaccggccgccgcgtaagtctaacctgcacgtgatggacggttacgccatctggcgcgtggtgtttgtcggcctgatgattgccatcagcgcctttgtgctggaggcctggctgcaaccgcgcggttactcggcggagttcatccgcaccgtgttgctgcaaacgctggtcactgcccagtggttttacatgctcaactgccgcgtcaccgacggcttctccctgagtaaaggtctgctggctaacaagggcatatggatcgtgagcggcgtacttctggcccttcagcttctgatcgtctatgcgccatttatgcagatgttgttcggtaccgaagcgctgccgttccgctactggatcattaccttcctgatcgggttcgcaatgttcatgattgtggaagcggaaaaagtccttacccggagatggcgcacgacgaaaggttaa

SEQ ID NO: 525980 - DNA, 1371 bp, Stenotrophomonas maltophilia
  misc_feature (1358)..(1367): n is a, c, g, or t
atgataacagaaaagcctcaccatccgtattatcaacagaccgttgatgaaaccctgacaaatatccaatccagcctggacggacttaccagtgcagaagccaccgccagactggaaaaatacggtgaaaatgccttaccgcaaaaaccgggtaaacccggctggctgcgctttctggcccatttcaacgatgttctcatttacgtccttctggcggcggcgctgctgaagctgataatgggacactgggtggatatgtttgtcattcttggggtggctatcattaacgccctgattggacatattcaggagagcaatgcggagaaatcgctgcaaagcattcgtaatatgctctccagcgaggctgtggtcatccggcagggcaaccatgaaactatcccgacgacagcgctggtgccgggagatatcgtggtgatacgcgccggggatcgcattcctgccgaccttcgcgtaatagaggcgcacaacctgcgggtggaagaagctattcttaccggcgaatccacggtagtggagaaaagcagcgatgcgctccacggggagttgccgttaggcgaccgttacaacctgctttattctggcaccaccgtcagctccggcgggggaaaagggctggtggtggcgaccggtggggagaccgaactcggccatatcaaccagatgatgtcggacattgaaaaacaccgtaccccgctgatggtgcaaatggacaagctcggcaagaccatttttatcaccattctggtgatgatgctggcgctgttcgttttcagtcttatcttccgtaatatgcccgtatcagagctggtgctgtcgctgattagccttgcggtggcggcggtgcctgaaggtttaccggccattatctctatcatcctctcgctgggcgtgcaggcgatggcgcgtcgcaaggcgattattcgcaagctgcctaccgtggaaacgctgggggcgatgacggtgatctgctcggataaaaccggcaccctgaccatgaatgagatgacggtaaaagcggtgattaccgcggacaccacctaccgcgtggagggagacagctacgagccggtgggcaatattcaccctgttgacgatccaacaccggtaaccgtgacccaggggtctgtgctggagcgctatctgcgcaccgtcgatctctgtaatgacagtcagttgatcaaagatgagcaggggctatggaaaatcaccggcgggcccaccgaaggcgcgctgaaggtgctggcggcaaaaatcccgcttccggcaattgacgccgaattgcgcagtaaaatcccattcgattcgcaatataaatacatgtccactctttatcgccnnnnnnnnnnataa

SEQ ID NO: 525981 - DNA, 432 bp, Stenotrophomonas maltophilia
atgtatagaacgattctggtgccggtggatgtatacgaaacagcgttgtctgataaagcgctacagcatgcccaattcctggcgcaaagcgcatcgggtaatgtccatctgctgtacgttatgccaaagttctcggcggaactgacccgcggttttattgcagacgcgagaaagatggatgaatatatgattaataatgctaaagaaaaactggccgcgctggtaaaaaaaatcagcctgccggaagcaaatgtccatctacatgttcgcagcgggaatatacgtgatgaggtaatcaaactggcggatgaacttaacgtcggcgcgattattgtggggtcgcgcaatcccaatattcaaacccatttattagggtcagaggcggcgagtatcgttcgttatgcacatgttcctgttttcgttattcgttaa

SEQ ID NO: 525982 - DNA, 417 bp, Stenotrophomonas maltophilia
  misc_feature (295)..(304): n is a, c, g, or t
gtgaagcgctacctctctcttctgcctgctgttttattgctgctgacggcgtgcgaccccaaacccgaccgcgccgcgcccctgccaaaaatggtaaaagtcacagaggtggtcaaggccggcaacgcgcagcagcgcgtatttcccgcgcgtatcgaatccggcgacgccaccgatctcgcgttcaaacgtgccgggcagattgagaccctggacattcgccagggtgccgttgtcaaacaggggcaaaggctcgccagtcttaacgatcgcgaagcccggcagcgtctgaacnnnnnnnnnnccgcttccagaccctggcaggacgccaggccgtgtcgaaggccgagatggatgtccagcgcgcaaaccgcgattctgcaaacgccgcgctacagattgctcgcgaggaattaa

SEQ ID NO: 525983 - DNA, 633 bp, Stenotrophomonas maltophilia
atgacgctcgtcgccccctttagcgggacagcggccagcgtacatgtgcgaaatcatcaggtcgtctcagccggccagcccgtcgtcaccctgacccgtaccgacctgctggacgtggtgttcagccttccagagaacctgtttaacaccttcgatatccgcaatgcgcagtacaaaccggtagtgaggatcaacgccctgcccggtcgcgagtttaccgctgtgtacaaagagcactcaggcagtagcgacagcaacacattgacctggcaggtgattttaaccatgccccgcccggatgattttcccgtcgtgggcggcgtcagcggaacggtcaccatcaatttaaccaacctaccggcgggcgtgggcagtgaggcgctggtggtgccggttgaagcggtctttaacccggataaccgcccgcgcaatgagccacacgtctgggtggtgacgggcgaaggcgatacattgcacctggaagatcgtaaggtcagcgtcgggcaagtcagcgctgagggggtcgtcatcgccggtgggcttaaggccggtgaacgcgtggtggccgcaggcgttggggagttacatcccaaccagccggtacgtatctggacgcgtgaacggggactgtaa

SEQ ID NO: 525984 - DNA, 579 bp, Stenotrophomonas maltophilia
  misc_feature (496)..(505): n is a, c, g, or t
atggatatctctcgtcagtttatcagcaacccggttcgcgtctggctgactattctgctgctgggcgtaggtggcattattgccctgttgaacatcggcagactggaagatccggcgtttaccatcaaaacggcggtggtaatcactcattatccgggcgcgtcggcgcagcaggttgaggaagaggtcaccctgccactggaaaacgcgcttcagcagttaccttacctggataacgtcagctccatctcctccagcggcctgtcgcagatcacggtcaatatagcctcgcgctaccactcaaatgcgctgccgcaaatctgggatgaactgcgtcgccgggtgggagatgccgcccgacagtttccaccgggggtagtgaccccgtttgtgaatgacgattttggcgatgtgttcggctttttctttgccatttccggcgatgaattcagcaatccggaactggtccggtatgccgagcagctgcgccgggagnnnnnnnnnncctcgtgccgggcgtgggcaaagtggccatcggcggagccctcacccagcagattaacgtggacatttctctga

SEQ ID NO: 525985 - DNA, 2550 bp, Stenotrophomonas maltophilia
gtgggcaaagtggccatcggcggagccctcacccagcagattaacgtggacatttctctgagcaaaatggccgcgcgcgggattacgcttaaccagctttctgcccagctctgcaggctgaacgtggtttccagcgcgggagagatcccctccggtactgagtcaattcgtctgcatcctaccggtgaattcgaaagtattgacgagctggccgatctcatagtgaccccgcccggcgttggggcggctacccgtttacgggatattgccaccctgtcacgtgggctggatgcgtcccctgccagcatctaccatgccaacggcagaaaagccgtcaccatgggcgtctcctttatacccggcgttaacgtgatcgacgtgggacatgccctggaggcgaagcttgagcagatgtcagccgagaaaccggcaggtatccatatcgacctgttttacgatcaggcggcggaggtcgggcattccgtcaacggatttatcattaatttcctgatggcgctggcgattgtcgtcggtgtgttgctgatctttatgggcttacgcagcgggctcattatcgccttttccctcgcgctcaacgtgctgggcacgctgctgatcatgtatctctggggcatagaactacagcgtatttcactgggggcgctgatcatcgccctcagtatgctggtcgataacgccattgtggttgtcgaaggggtactgatagcccggcagcagggctcgcctctgcttaacgccattaacgctattattcgccgctctgcgctgccgctgctgggtgcgacggtcatcgccatcctggcttttgcgcccgtcgggctgtcacaggactccaccggcgaatactgtaagtcgctgtttcaggtgttgctgatttcgctgatgctgagctggttctcagccctcaccattacgccggtgctgattaaatggtggctgtttaaacatgacgcagcaccgccagacgccgacgaaacggatccctacgacaaacgcatctatcggatctaccggggtttgctcaatgcactgttacggcgtaaagcgccaacgctgatggtgatggccgcactgctggctgccgccatctggggctttggctcggtgcggcagaacttcttcccctcatccagtacgccaattttctttgtcgacctctggctcccttacgggaccgacattaactggaccgagaagatgaccggtgatatcgagaaaaccattaacggccagcctggcgtggaaactacggtctcgacgattggtcagggaagtatgcgatttattttgacctacagcggacagcggcagtacagcaactatgcacaaatcatggtgagaatggacgaccagcgtaacatccccgccctgacccgccacgttgatgagtacattgcacggaactacccgcaggttaacgccagcacgaaacgggtgatgtttggcccctccggtgacagcgccattgaaatacgtattaagggccccgatccggacaggctgcgtctgatcgccagccatgtagacagtattcttacgcgcgatccggcgacggacagcgtcaggaacgactggcaaaaccgcagcaaagtgatccgcccgcagtacgtcaccgcgctgggacgtgagcttggcgtggacaagcaggacgtcgataacgccctggagatgaatttctccggcagccgggcgggactgtacagagaaggaagcgacctgttacccgtggtggtgcgcccgccggaaagtgaacggctggacgccaatcacctgaataacgtcctggtatggagccagacccgtcagcagtatattccgctgagcaacgtcgtcagcggcttcgcgctggagtgggaagatccgctgatcctgcgtcgcgaccgctcgcgcgtgctgaccgtgcagaccgaccctgacccgctaagccagcaaacgtccggcgatattctcgcccgcgtgaagccgcaaatagatgccctgcctctgccccacggctacagcatcgaatggggcggggacgcggagaactccagcgaagcgcagcaggggctatttaccacgctgccgctcgggtatctggtgatgtttgtgatcacggtgctgatgttcagttcggtgaaaaacgccgtcgctatctggctgaccgtgccgctggcgctgatcggcgttacgcccggttttttacttaccgggatcccctttggctttatggcactgattggcctgctgagcctgagcgggatgctgatccgcaacggcattgtgctggtggaagagattgagcagcagaaagcgcagcaggatcagcacagtgcgatcgtttacgccgccacgtcgcgcctgcgtcccatcctgctcaccgcctttacgaccgtgcttggcctcgcccccctgctgctggatgtgttcttccagagcatggccgttgtgattatgtttgggcttgggtttgctacaatcctgacgctgctggtactccccgtaatttacgcgtgttttcatcgtaaggacgaagctgaacaacaatga

SEQ ID NO: 525986 - DNA, 966 bp, Stenotrophomonas maltophilia
atgaatgcgacagggctgaacatcatcaagacgctgggctgtatgacggcggtcaccttcttcaccatctacaacacctgggaccattacgattatgactatcactggatcctcggttttttaaccttcatttcgaccatcgccacgccgttgttttttgtggttgcagggtatctggatgggcaatcccgacacggcacgcgctggcagcttgataagatcaaaagcctggtgatcgtctttctgttctgggtaaccatttactacctgtgggagccctatcagcgcggatatcttatccagccctggttcgtgttcgcatttgtcgtgatttacacttttcatccggcggtggagtggctcagccagcggcgaacgctgttttgcggggtgattgtcaccctgctgcttttctcatacgggtacgatttgctgtcagccctctatcctgatgtccacgtgctttcattgtcgccgcagtatcgcctgtggacgtggctgctgttttatctgacggggcagctcttttgcgatccgcagattgcggcgtggatcggccgcaaaaatgtggtcagggcagcggtgattgccataccgtttatctatctcttcacgtggttttacgaacggcatttcttttttgcgctatttaaagcggacagaaacgcctttatcctcaccggatcgcaaatctacatcctgattattgccctggtgattgcggccaacggcgtacgttttcgccgcaatgcggagtttaaagagtccgtgctggccgccattagcaaaacgatgaccggggtctatatcatgcactactcggtgtttcacctgctgacggcgctcattccggtaacgtccctgagcaccaaacttgctctgattgtgctcacctttgttacgtccgtcctgttttcgctgctgattctgtccaacgcagtggccaaaaaagtgatcacactttaa

SEQ ID NO: 525987 - DNA, 576 bp, Stenotrophomonas maltophilia
atgcaacgcctctttcctgcactctgggtagtcctgtttttggtggcttcgccgctgcatgcggagccaaaagtctacggcgaacagcgcatccaccgctggtgggatgcggtaacagacgatatttcccagacctgggagcagccagatcgttacgatctctacctgccgtttctgagctggcatgcccgctttatgtatgacaaagagaaaacggataactacaacgaaatgccgtggggcggcggactgggcgtttctcgctacaacgacgagggcaactggagcgcactctttgccatgatgtttaaagattcacataacgagtggcagcccgcgatgggctacggctgggaaaagggctggtatctggataacgcaaaagatttccgtctggggctgggggccgccgcggggatcaccgcgcgcgacgactttgctaactatgtcccgctgccgtttatcttcccgcttttctctgccggatataagcgcgtcaccgtccagttcacctatattcccggaacctacaacaacggcaacgtgctgtttgcctggctgcgcctgggcttttaa

SEQ ID NO: 525988 - DNA, 1317 bp, Stenotrophomonas maltophilia
atggactccaccctcatctccgctcgccgcaacgaggagacaccttcgcttaaccgcgcccgccgcgccgctttaggtagcttcgcaggcgccgtcgtcgactggtatgactttctgctctacggtattaccgctgcgctggtctttaaccgtgaattctttcctcagatcagccccgccatgggcacgcttgctgcgtttgccaccttcggcgtcggttttctgtttcgtccgctgggcgggataattttcggccacttcggtgaccgccttggccgtaagcgcatgctgatgctcaccgtctggatgatgggcattgccaccgcgctgatcggtgttttgccctcctttgcatcgattggctggtgggccccggtgttgctggtgacgcttcgcgccattcagggctttgccgtcggcggcgaatggggcggcgcggcactgctgtccgtggaaagcgcgccgaagaataagaaagcgttctacagcagcggcgtgcaggtaggttatggcgtgggtctgctgctctccacgggcctggtgtcgctcataagccagctcacgacagacgagcagtttctgagctggggctggcgtattccgtttatcttcagcattgtgctggtcgtggtggccctgtggatccgtaacggcatggaagagtcggctgagtttgagcaacagaagcgcgaaaaaccggtcgcaaaaaaacggctgccggtgatggaagcgctggtgcagcaccctggcgcttttctgaaaattatcgccctgcgcctgtgcgaactgctgacgatgtatatcgtcaccgccttcgccctcaactactccacgcaaaacctcggcctgccgcgggaattgttcctgaatattggcctggtggtgggcgggatcagctgcctgaccatcccctgcttcgcctggctggcggatcgctttggtcgtcgacgggtgtatatcaccggggcgcttatcggcacactcagcgcctggccgttctttatggcgctggaggcccagtcggtcttctggattgtcttctttgcgatcatgcttgcgaacatcgctcacgatatggtggtctgcgtgcagcagccgatgtttaccgagctgtttggcgcaagctaccgctacagcggcgcgggcgtgggatatcaggtggcgagcgtggtcggcggcgggtttacgccgtttatcgccgccgcgctggtgacgttctccggcgggaactggcatagcgtggcgatttatctgctggcaggttgcctgctttctgctgccaccgccctgttgatgaaggaaaccgcgcacagctga

SEQ ID NO: 525989 - DNA, 1371 bp, Stenotrophomonas maltophilia
  misc_feature (55)..(64): n is a, c, g, or t
atgaaaaggccagaacccagggcctttttgtttatccatcgctctctgtcacctnnnnnnnnnntcgggaagtttccctgtttcgatatcgtcacctgggacggcagcgccagcagcaatccgaaaacccgcgcctatgcgcgtttcacccactccggctgttacagcacgaccatcacgcgacctgcgctgttccgcccctatctggaagagcagcttaccctgctgtatcaggattacggcgcgcatatcagcgttgaaccgtccctgcacgagatcccttacccgtacgtaatagacggctcagcgctgacgctggatcgctccatgagcgcggggctgacccgccattttccgaccactgagctgtcgcagattggcgatgagacggcggacgggatctatcacccggcagagttttcaccgctgtcgcactttgatgcccgccgtgtcgatttttcgctggcacgcctgcgccactacaccggcaccccagccgaacatttccagccgttcgtactgtttaccaactacacccgctatgtagacgaatttgtccgctggggctgtagccagatccttgacccggacagcccttacatcgctctctcctgcgcgggcgggatctggatcactgccgaaaccgaagcaccggaagaggccatctccgacctggcgtggaaaaagcaccagatgcccgcctggcacctggtcaccgctgacggtcagggcattacgttgattaacatcggcgttggcccgtcgaatgcgaaaaccatctgcgaccatctggcggttctgcgcccggacgtctggctgatgatcggccactgcggcggcctgcgtgaaagccagctgattggtgattatgtcctcgcccacgcttatctgcgtgacgaccatgtccttgacgcggttctgccgccggacattcctatcccgagtattgcggaagtgcagcgcgccctgtacgacgccaccaaagaggtgagcggcatgccgggtgaagaggtgaagcagcgcctgcgtaccggtacggtcgtcaccaccgacgatcgtaactgggagcttcgctattccgcctccgccctgcgtttcaatctcagccgtgcggtcgcgatcgatatggaaagcgccaccattgccgcgcagggctaccgcttccgcgtcccgtacggcacgctgctgtgcgtgtccgataaaccgctgcacggcgagatcaaactgccgggtcaggcgaaccgtttctacgaaggggcgatctcagagcaccttcagattggtattcgcgccatcgatttactgcgtgcagagggcgacaaactacattcccgtaagctgcgcaccttcaatgagccaccgtttaggtga

SEQ ID NO: 525990 - DNA, 1773 bp, Stenotrophomonas maltophilia
atgcacaccacatcaccgcttacggccctgcgccagtggctacaggacaatcagctcgacgggatgattgtgccgcgcgccgatgcctggcagagcgaatcttgcgcaccgtatgatgcaaagctggcctggctgacgggctttgacggctcggcggggctggcgctggtactgaaagacagagcgctgctgtttgttgacggacgctatcaggttcaggcccgcgtacaggtcaatctccacgaggtggagatccaccatctgcacaacgagccgctggccgagtggctggcgaaaaacgttgcggccggcacgcgcatcggctttgatacgctgctgatgaccaatgcagagtttacgcggctctcggccacgccgtgcgaactggtaccgctcgcgcgctctccgttcgataccctctgggttgaccgccctgccgcccccgcagggcttatccgcgagatgcctgtagacatcagcggcgaaagcagcgccgccaaacgccagcgcgccgccgccgtgctggcagagcaccgcgcggattatctggccgttaccctgccggacaatatcgcctggctgctgaacgtgcggggctcagatatccccttttgcccggtgcctctgtcgtttgccctgctgagccgcgagggtgcggtggaatggtttgtggatgacagcaagctgaatgcgctgccggatgccgtgcggaacgccttcacgattgcgcctcaggaagcctttatcccgcgctgtaggcagcttgcgcagggtaagcgggtcatgatcgatcccgattccgcaccggtggcgttacgctttgcggttgaacctcagggggaaattatctggcagaccgacccgatcaccctgatgaaagctacgaaaaacccggtggagctggcgggctatcgtgaatgtcatcaccaggacggtgcggcatgggtgaatttcctggcctggctgagccgggaagttcctcagcgggccgcgtcgggaatgccgctgaccgagcttgacgtgcaggcgaaacagcttgcgttccgcctgcaacagcctggctttgtcgagccgagtttcgccaccatttccgcttccgcgagtaacgcggcgatgtgccattaccactcaagcgaggccagcaacaagcccatcggccacgaccacttttacctgaatgattccggggggcagtaccgcaacggcaccacggacgcgacgcgtaccctggcctggggaaaggtcgatccacagcagcgtttgcactacaccgcagtgcttaaaggcttcctgtcgctgattacccttcagttcccgtccggcactcaggggcaccagctggatgcctttgcgcgccgtccgctgtgggagttgggactggattacgaccacggcaccgggcatggcgtagggcatcagcttctgatccacgagaacccgcaccgttttgcgcaaaaggtcaacccgtggccgctggtggcgggcaatattatgaccattgagccgggttactacctgggcgatagccacggtattcgcattgaaaaccaggtggagattgtcgaaagccgtccgggattttgtaagtttgcctcgctgacgctgatcccaatcgatttaagccaggtggagctgcatctgttgagcgagtcagaaaaacagtggctggatgagtaccaccagcaggtacgagaggcgctttcaccccgggtggacagcgatgcgcggccgtggctggtggaggcaacggcgccaattcgtgtgaacggatag

SEQ ID NO: 525991 - DNA, 996 bp, Stenotrophomonas maltophilia
atgtttaacaaactcgcatattcagcagtcgcattgaccgtttcgcttggcaccttaatgtcctgtcaggcagaagcgatgggtaaggattactcgtcggcttttaaccaggtaaaacaaattaacgccggcgatctgaacgtcggttatgtcgatatcgggccgaaagacgggcaaccagtgatcctgctgcatggctggccgtacgacattcacagctacgctgaagtggcccccgcgctggccgcgaaagggtatcgtgtcattgtgccgtccctgcgcgggtacggcaccacgcgctttatttctgataaaacgccgcgaaacggccagccttcggcaatggcgaaagacatcgtcaacctgatggacgccctggatatcaaacaggcggtgtttgccggttatgactggggtgcacgtacggcggatatcgttgcggcgctctggccggaacgggtgaaatcgctggtctcggtaagtggctacctgatcagcagccaggcgattggcaaacagcctttaccgccgaaggcagaagttcagtggtggtatcagttctatttcgccacgccgcgcggggcggaaggctatgctaaaaatacgcacgattttgcccggttgatttggtcccaggcttcgccggactggaaattcagcgatgccaccttcaatgccagcgccaaatccctcgataacccggaccacgttgccgtcacgctcagtaattaccgctggcgtctgggtctggaaaaaggggagcctaaatatgacgcctatgaacaaaaactggcgacgctgccgaacattacggtgccgaccatcaccatcgaaggcggtaataacggggcgccacaccctgcacctgcggcctatgccgggaaatttaccggaaaatatgagcaccgtactttcggcgcaacagttggccacaacccgccgcaggaagatccgcagaactttgttaaagccgttgtcgacgcggataagctctga

SEQ ID NO: 525992 - DNA, 741 bp, Stenotrophomonas maltophilia
gtggagcatattgatcacatccttgtcgtcgatgacgacagggatattcgtgaactgattgtcgattacctcgtgaaatccggctaccacgcatctggcgcggcgaacgggaaagagatgcgcgtagtgctcgacaaacagcatatcgacctggtggtgctggacgtgatgatgcccggtgatgatggcctgacggtatgtcgacagctgcgcagcagcaggcataaggatctgccgatcctgatgctcaccgcgcgcaacgaggacatggaccggatcctgggactggagatgggcgccgacgattatgtggtaaaaccgtttgtggcccgcgaactgctggcgcgtatcaaaactatcctgcgccgttttcgtactatgccgcctaatcttcaggtgaccgaggcagggcgcctggtggtgttcggtgaatggcagctggataccgtggcgcgtcatctgattgataacgaggggatggttgtggcgctcagcggggcggaatatcgccttctgcgtgtatttctcgatcatcctcaacgggtgctgacccgcgatcaactgctgaacctgacgcagggacgtgatgccgagctgtttgagcgttcgattgatctcctggtgagccgcgtgcgacagcgcctgaatgaagatgcccgctcgccagcctacattaaaaccgttcgcagcgaaggctacgtttttactatgccggtgaccatcgtcgaggccaatgaatga

SEQ ID NO: 525993 - DNA, 1296 bp, Stenotrophomonas maltophilia
atgacgctgtggccccgcaccttactggcccggctgctgatcattgtgctgcttggactcttgctggctaacgcgctcagcctgacgctggtcatggttgagcgaatgcacagcgcgcgcacggttatgctgggcaatcttgagaatgacgtggcgaccagcgtggccattctcgaccggcttccggccaaagagcggccagagtggctggaacggctcggtcgcggtaattatcgttatatccttggtcccggcgaggcaggcgctgcgccaacggacaagcgctcgcaggatgcgattcgcaccctgaaagagacgctttcagttcaatatccgctccagtttacggcagtgccggggcctgtttcccacattcaggcccatctgacgctccgcgacggcgcaccgctcactatcgatctgatcccgcgcatgccgccagtcgccagctggttacccgtggtgctggttcttcagttgttacttgtcgcgctctgctcctggattgccgtgcgccaggttgtccggcctttcctgcaattcacgcgcgcggttgattccctcgatcctgcggcccattctcctatgactgaaaaaggtccggttgaggtgcgacaggcggcgcaggcttttaatgagatgcagtcgcggatacaaacttatctgcgtgaacgcgcgcagattctggcgtccatttctcacgatcttcagacgcccatcacgcgtatgaagctacgggtcgaaatggcggatcagcccgaactccacgataagttgttgagcgacctggataatatgtcgcgcctggtacgagaaggtattgcctatgcccggtcatcagaatcactgaaagagaccacgcttaagctggagctgaacgcgtgggttaacagcatcgccagtgattatcaggacattggtaaaaacgtgcagtttcatgcacgcagtacacgtctgccgatcgtcacccgcccccaggcattgcgccgggtaatgaccaatctgctggataatgcgctcaagtttggccatagcgcggtaatagagattgatgaagatgaaaggcaggtagcgatccgcattatggataacggccccggcatcccggaggcagaactgggggcggtgttacagccgttctaccgggttgaaacgtcgcgcaaccgcgaaacgggcggcaccgggttaggcctcgccattgccgcgcagctcaccgcccagcttgacgggaaattgcatcttgcaaaccgggcagagggcgggctggccgtaagcgtgactcttccgcgcgtttaa

SEQ ID NO: 525994 - DNA, 1191 bp, Stenotrophomonas maltophilia
atgtttctgataatcgcttttttaggcggcatgattagcctgcttagtccgtgcacgcttcccgttattcctctgctgttcgccggctttcaggggcagcgcaaacacattctggcgcttctggcgggaatgatagtgatgttcacgtttgtggcgatggtagtaacggttgccagtgactggatcgctgacgccaccgttatcggtcgctggattgcgctgctggtactgagcattgccgccctggccctgatcttcccgcagttcgctcagcgcattgccagcccggcggtcagcgcggggaacgttcttaacacccacagcgttcagcgacacggcatgtcttcggcttttctggcagggctggccgttggacttctgtggtccccctgtgcaggaccgattctcggggcgatcttcggcattaacattactggccactcggccatcgcaaccggagcgctgttagccgcttacggcagtgggtgcgcgttgatgctggggctgcttgtcgcggggggccgtaagctgataacccctctgagagccaaatccgcattgatggagcgtctgcgtcagggcgcaggggtgatgatgatagccgccgtggctttcaacgcctcaggaatgacgtcggtcctgaaaggcgccagcggtattaccgaccagctggaaaacgctctcttgagccttgcgcaaccaacctccacgcaggtgaaactgcgaccgatcgctgacgcaatgccgagcagccagctaccgacattaagcggcggtacgggctgggtaaacggtgaccctgtcacctctaaggccttgcgggggaaagttgtgcttatcgatttctggacctgggactgtatcaactgccagcatacccttccgcatgttcgagactgggcgaagaaatatgagtcacaaggtctggtggtgattggcgtccacacccctgaatacccctgggaaaagccgttatcatcggtgaaaaacgcggtcaacgaatggcagttgccgtaccgcgtagtgacggataataactacaaaatctggagcgcgttcggtaatcagtactggccagcacattactatttcgatgcgaaagggcaactgcgttacacctcgtttggcgaaggcaactacgacaagcaggaggctgtaattcagcatttgctcaaggaagcgcgttcctga

SEQ ID NO: 525995 - DNA, 759 bp, Stenotrophomonas maltophilia
atggccgactgggatccttctctatatcttcaatacagcgcagaacgcacacgtcccgccgctgagttactggcccgggtgccgcttgctgatataatctctgccgtggatttgggctgcgggccaggcaacagcaccgcgctgctgaaacaacgctggccttcagcgcagatagccggtgtggataactccccggcgatgctggaggaagcccgacaggccctgccagactgccactttgttgaatcggatatccgtcactacaaacctgaccagcctctcagcctgatctacgccaatgcttccctgcaatggatcccggaccattaccaccttctgccgcatctggtttcactgctccagttaaacggcgtgctggcgttacaaatgcctgacaactggcttgagccgacgcacgccctgatgcgtgaagttgcctgggaacagggctaccccgatcgtggccgcgagcagctgccgggtattcatgcctactatgatattctgacggacgcgagatgcgacgtggatatctggcgcaccacctactttcatcagatgagctctcatcaggcgattattgactgggtcagcgcgacggggttacggccgtggctacaggatctcaacgagagcgagcagcaaaactttctgaaacgctacctcgagctgctggaagagcagtatccgctccaggagaacgggcagatactgctggcttttccgcgcctgtttatggttgctcagcgggttccgtaa

SEQ ID NO: 525996 - DNA, 585 bp, Stenotrophomonas maltophilia
gtgcaatcaaaacgtgcagatatacgcatcatcaacagcgaaacgttgtccgacaactggtataacctgaaaaaatacacttttgacctccagcgcagcgatggtgactggcagcggcaagagcgtgaagtgtatgaccgcgggaatggcgcgacgatcctgctctataatcgcgccagcaaaacagtcattcttacacgtcagtttcgtttccctgtgtttatcaatggtcacgaagaggatctcattgaggcggctgccgggttgctcgataaccttgacccggaaagccggattaaggccgaagcggaagaggaaaccgggtataaggtgacgcgcatagagaaaatttttgaggcctatatgagcccgggctccgttaccgaaaaactctacttctatctggcggaatatcacccgcaggatcggaccagcgcgggcggcggcgttaaagcagagggggaagatatcgacgtgctggaaatgacgctggacgacgcgcttcgtggcatcgagaatggccagatcgtcgacggtaaaaccatcatgctgctttatcacgtggccctgaaaggcattttataa

SEQ ID NO: 525997 - DNA, 759 bp, Stenotrophomonas maltophilia
atgctcacaagtcagcgtaaacagttgattctggaaaagctggaggcggaaggccaggtccagtcaactgcgctcagcctctttttctcggtgtctgaggacactatccgccgggatctacgtgaactggcggcagaagggcgtttgcagcgtgtccacggcggcgcgcttccggcatcttcagcgattgcgccttttgccgagcgtcagtccgttaaaatggatgcaaaaagacgcgtggcacgtcggggcgcgcagctcatttcaccggggcaggtggtgatcattgatggcgggacgaccacctcagaacttattaccttcttgccgccagatttgcgggtaaccgtggtgacgcacagcccgggtattgcattggggctggtcaaccatccgtgcatagaggtgatcctgattggcggtcgtttgtataaacactccatcgtcacggtcggcgcggccgctattgaaggcatcaacaatattcatgcggatctgtttttcatgggtgtcaccggcgtgcatcctgaggccgggctgaccaccggagattatgaagaagcatgcatcaaacgtgcattttccggcagagcggcggaaacggtggtattggcctcaccggaaaagatcaacacggcctcggcgtttgtgattggcgatttgtcgcaggtgaatacgctcgttgttgaaaacacaacggatgaacgctgggtcaacgctatgaaagaaaagggcgttgcagtgatcgccagccagtaa

SEQ ID NO: 525998 - DNA, 1191 bp, Stenotrophomonas maltophilia
atgaaagcgatctccattctggcgtatggcgcggacccaaccgcgcaacgcctggcaacatccgccattcagcaggccataaatagtgctcaacagaacgatgtcatcgttattccgcaaggccgttttctaaccggagcgttgtttctgaaaagcggtgtttcacttcgcctggacgctggcgcacagctcgttggaagccaggatctggctgattatcccctgataaatacccgggtggccggcattgatatgcgctggccggcaggcattattaatatcatcgattgtgaaaacgtcagcattaccggtacaggcacgatagacgggcagggtgcaatttggtggcaacgctactggggcgatgacgagcgcagcggcatggttggcgattacagcgcaagaggattgcgctgggttgttgattatgactgtcagcgcccgcgcaatatcctggtctttgaaagccagagcattctgctgcgtgattttaccagtcgggagtccggattctggaacatgcacctctgttattcgcgccatatcgcggttgagggcgtgcaaatcagcaattctgcggggccgagcaccgacgggattgacgtcgactcctgcgagcaggtgcggattgaacgctgcatagtgtcctgcaatgacgacaatatctgcatcaaatcaggacgaggacgcgaagcggcgcaaaaagctcgtgccgcgcgggatatagtgattcgaggatgtacgctgaataagggatccgggatcacactggggagtgaaacttcaggtggcattgaacgcgtcctgatagaagataacgcgtttaacggaacgggcgtcgggtttcgcattaaatctgctcgcaaccggggcggatttatccgtgatatcaccgtacaaaatctacggcttacggacgtgcgttttccggtgctgatccagttgaactggtttccgcagtatagctatggcgaccagagcaatttatctgataaaccagaacactggcgcaaactggctgaaggtgttgagggcgaagccggtcttactgcggtcagcggactgacgattaaaaatatgacggcgcgtcgatcagacagcaaatgcttttcgcgggcatttttcatcgagggatatccggagcgtcctgtggtcgggttaacgctggaggggattttgattgacgcgtaa

SEQ ID NO: 525999 - DNA, 138 bp, Stenotrophomonas maltophilia
atgaatcagagaaatcatctcatagttgatgatgtgactaccctaccggttatgttcgccacaatttatggaatgaatgaactgagcaagaaacatctggggattcaagaaaacattctgtgttcgctgcgtttctaa

SEQ ID NO: 526000 - DNA, 264 bp, Stenotrophomonas maltophilia
atgtccatagcggaatttatggggttcagtcgcgatgttggcctggggatctttaacgcaaccacgcttgcagccagcgtttatggggtgtttggtatgactggtaaagctgatgcctggcgtcttttccgttatcttcccggagactattaccgcaaggtggaaaccatgtctccgggcaaactgacgatgaaggttatgggatggggggtgagcgcgaaggtggtactggaactccttacccgtgatgaccggagtcgctga

SEQ ID NO: 526001 - DNA, 330 bp, Stenotrophomonas maltophilia; identical to SEQ ID NO: 125345

SEQ ID NO: 526002 - DNA, 570 bp, Stenotrophomonas maltophilia
atgtttaaagttttaacccgtcgcctgcaatattgtaatgaggtgtccgccagcataaaaaatgccgccccgaaacagttgcagcagctgaagacgcagttggctgatgatatggttaagcccgtggggcttcataccatgggtattccggcagcggttagtaagctcggggtgattgtcagtttcgccattccgcaactgtggctggggtatggcgtactcaccgcgctcggccagccagcacagcgcgttttcgtgtgggttgtgctgatcgccctactctttgccggcatcaacggagtgacgatgtttatgattggcaaaggtagcatgcgcgccgtgcggttacatcttacgctggcggtgttaagcctggtattaacggcagcctatctgctggctgcgctgagcggtacttcttctccgggcgtcagcctgaccgcggcgctggtaactattgtcatgcttgggcttagcggcagctgtatcctctctaccgctttctataggatgctgctatttactttgcataacagagtctggcgcaagcttatcagccagacgggctga

SEQ ID NO: 526003 - DNA, 267 bp, Stenotrophomonas maltophilia
atgaaatcagatgttcaactcaatcttagagccaaagaatcccagcgggcgcttatcgatgccgccgcagagatcctacataaatcacgtactgacttcattctggagatggcctgtcaggcagccgaaaatgtgatcctcgatcggcgtgtattcaattttaacgatgaacagtatgcagagttcattgatatgcttgatgccccggtcgccgacgatcctgccatagaaaaactgctggcaaggaaacctcagtgggacgtgtaa

SEQ ID NO: 526004 - DNA, 930 bp, Stenotrophomonas maltophilia
atgtccgaacccgattttaatttgctgatagcactcgacatattgctgagcgaagcgagcgtggcaggcgcggcacgtcgtctgaacctcagcacctcggcaatgagccggacattaagcaggttacgcgacgtcactggcgatccgattctggtgcgcgccggacgtaacatggtactgaccccgtgggccgaagcgacccgggaccgtgccaggcgtgcagtgcacgaggccagggcagtattacagccctcaactgatacgttcagcgcgcgaagtctggcgcgactttttaccatcagggcaaacgatggttttgtggtggcgtttgggcctgcgcttatagcggctgtggccgacgccgcgccggacgtctgtatacgctttgcgcctaagccggaaaaaacgtcgcgctatcttcgggaagggctggttgatctggagattggcgtccagagtaatatggggcctgaaatacggcttcaactactgtttgaggatcggtttgtgggcgtcgtgcgtaaggggcatccgctggctaagcaggcagaaataggggtgaaggattatgtcgcctggggccatgtggtagcgtcacccgagggtgcactgcacggatccgttgacgatgcgctggccgaactcggaacaaaacgtaaaatcgcgagcgtcgtaccgggatttccgacggcgctgtccgtggcggtggcatcggatcttatcgccatgatacccgcgctctatttactcaatcagcaggtaacggaccaggtacacgttttcgagctgccgttcaaaagccgtcaaattacggtatcacagatgtggcacccaagaatggaacgcgatcccgcgcaccgctggctgagagagcaaattcttgcgatatgcagagtgaagaggtcagacatgattaagggacttgtatag

SEQ ID NO: 526005 - DNA, 1389 bp, Stenotrophomonas maltophilia
atgatgcttttttccagccaacccggcgacgatggactgcctggcccgacgcgcgcacgggtgatggccgcgataatgaccaccacgttaatgggcgtgtttgatggcaccatgatcaacattgccctgccctccatggctcaggagatgcaggtgccagccagttatgccgtctggttcgccaacgggtatctgctggcggctgcaatgacgctggcgatattcgcggcgcttgcggcccgcctgggttatcgcccagtatttctggcaggcctgacgacctttaccctgacatcgctgggttgcgcgctggcgaaaacgcccgaagtgcttatcggtatgcgcgtgcttcaggggatcggcggcgcagcgacgctgagtattgctcccgcgatactgcggtccgtatttcccggacgattgcttggccgcattctgggtttgcacgccctgctcatcgcctccagctccgctatcggcccggtattgggcggtacgatccttcacaccctgagctggcaatggctttttgcgataaacgttcttcccggcaccctcgccttgctgctggcggtcaaagcgctgccgcgggatgcggttcgaaagcaagcgccctttgactccctgggcgccatattgtcggcgctgctattgggttcgacgatcgtggcggcgaacagcctccatgatgctacttatcacacaggtagtctttgctggacggttctcgctgcgctgagcggcatggcttttatctggcagatccgccgcacggataaccccttactgccgccagccatattcaaaaatgaacgttttaccctcgcggccctaacgtcgatgattgcttttgtcagccagggtatcacctttattgcgctacccttcctgtttcagagcgaatacggctacagtccggtgatttctgccctgctatttacgccgtggccgctcgggatcgtgctgattgcgccgcatgcaggccggtgggcggacacgatttcctccccggtgatttcaactctggggctgatgatttttgtcgtcggtttgattctgctggcaacgttacccgccagcccttcgatgtgggatatctgcctgcgaaacctggtttgcgggatgggatttggctgctttcagagtcccaataaccgggaaatgctctcaaacgttagtcgtgactatgcgagctatgcatccggtgtgttatccattatgcgcacgttcgggcagtgtctgggggccgccgctgtgggcgtactgctggcgacaaatgagagagctattcatgctgcactgtggatcgctgcggcggcttctgcggtagcggtcatcgtcagcgcgagccggctgcgtaaaatcactcatcctgcggaaacaggttga

SEQ ID NO: 526006 - DNA, 558 bp, Stenotrophomonas maltophilia
atgattactaaacggtctgagccacgcttttcattcattctgttaatttttgtgtgtcttgtaggattatattcttttaacggtcaccttaagcctcacgccggacaaaaaggggttgcatgtatttcttacaagcggatcctgcgtgaatcaccgttactggcacaggaaaaaaagcagaacgaaatacttctcgcattagctaaaaaatccgcgcttgaagttgagaaaaaatattacgctctgccagaacccttgcgccgtgaaatgaaagcgatcgatgatatgagtaaaaacacgcaactgcgggcagagcagggtcgcctgcggcatataagccagcgagtcatatctgataccgttgaaaaatacagaatagatcatcactattcggtcgttttcaataaagatagcgcctctacagtggattatggtcacgacatcagtaatgaaattattaatgaattacagcatgtaaaagtggtgtacgggccgcgccctaattttgaagatgcgacccgggagcttttgctcgctcaacctgtttccgcaggatga

SEQ ID NO: 526007 - DNA, 1137 bp, Stenotrophomonas maltophilia
atgtcaaaatatttatattatctggtgttattgctggggacagtcccactattaagtcatgcagcctgtaaccgggataacggcgatgatgttaccgtcacgacgatcccattaccctcgaaactgttggtcagtgcgaaaaattatacctttggcgaagtgttatacgattctggatatatcagcgggacggatggggatgtcacgattaaaaactgtagcagggattattacgtaggatttcattataacccgactcatttagcgtcggcgtcgccggtgggagataatatctacccgaccacgataccgggtatcggcattaagacctacacgcttaaccaggccggtccgtatgattatgaacgtgcggttgataactcatggcagtccggcgatggcgagagcagccatacgctggcgggctcggcctatcgtgtgcagttgattgcgacggggggtacaatcccgagcggtaatctggccctcgagagcggcaaactggcgacggtggaatttcgtgaagggcaaagcagttcggataacggtgataatgcgtcagaagtctatttgtcaaatacgcagatagaagtctatgcgatgggatgctcagcatccgtttcttccctgctgtttaatatgggcgatgtggatacctctgcgtttgataatcttaagatggtggaaggacccgaacaggatgttggtctgagctgtcagccaggcaccaacgtgaccatgaccatcaacgggccgcttgccgagggcgacaatgataatggctcagtgattgccttagaccagtctgaatcgggtacgacggcgaccggtgtgggggtcgtgatatcagcctatcaaccggcgctacgcagttttacctactgggccattggtcaggaggtgcaagcttttaattccagtcgtgtaaaagccgcatcacaaggcagtgggctggctgccgatggtaccgcgattgctgatatcggctccgcaacaacctatagcgatccggcaaatgcaggcggggccggagagtctgaaaccttacgtttcaaagcgtggtattacaaaaccagtgacgttgtcacgccagggcaagcaaatgccaccgggacaatcacccttaaatataattga

SEQ ID NO: 526008 - DNA, 579 bp, Stenotrophomonas maltophilia
atgtcacgcttcattattctccgttccggccttaaatcgctcatcggcccgggaatggtattcatgctgagcgtgtcgccggcaatggcgtacaccgatcgcaatgatattgagttccatgtcaccggaaacattattgatggctcatgtaacgtcaccaaaccggaggcagtcgacctcgggaaatattactggaaagactttgccgtagcgggggggaacacaggaaatgtgccagtgaccatcgcgtttgacagctgcaccgcagggttaagccaggcaacggttacctttacaggcgcaccttacgctgaagatccggcttatgcctctgtcatttacgccaatcaggtggcggcagatgcaggcggcgcgaccgatgtcggccttcagttgtttatccgtgaccacgaacatcccatcagcggtgtcgcgctggccaacggcgtgagctacccggttgcgctcgaaaaccaaaccggcgcgatgacttttactgcccgaatgtataccccacatgggaccccaacaccgggtgcattcagcagtgcgattacattgaatgttgtttataactga

SEQ ID NO: 526009 - DNA, 1035 bp, Stenotrophomonas maltophilia
atgtacgacgcctcttactggaacagtgaacatgcggactccatgaacctgggcttcagcagcacgcttggaccggtgtcgtactcgctgaactatgcccactctaaaaacgtcaatggcggttacaataacgattccgataactacgacgacgataacgtcttctcgcttaacctgagcgtaccgttcagcgccttcagccacagtgaagcggcccggtctgtttcggctaactattcgatgaacagtagtaaaaacggcgataccacgcacaacatcggaatttccggtaccgcgatgcaggaaaaccagctgaactggcaggtttcagaaggctataacgccgattctgaagctactaacggcaatgtcactgtgggttatcaaagtacttatgccgatatgtccgcaggctatagctacgacgattacagccgacgagtgaattacagcctgcgcgggggcatggtgctgcatcgcgacggtatcaccctggcgcgtcagcttaacgatagcgtagcgctggttgaaacgccgggggtttccggtatgccgatcaacgggcagacgaacgttcataccgattatttcggtaacgccattgtgccgtacgttcgtccgtatcacagcaattcgatctcactcaacacagtggatgccagcgatacttccgcggccattgataacatcgccaaaaccgtggtgccgaccaaaggggcggtagtacgcgtgaagtacaacacctggattggacaaaaggcgatgatgacgctgacctacaacggtaaaccggtgccgtttggcgcagtagtaacacaaaccagcggcgagtcggatgacacgcgcagcagtattgttggcgacggcggggaagtgtatctcgtcgggctcgccgggaaagggcggttaattgttaagtggggggagacggcgaacaagcagtgcgccgttgattacacacttgccggcgctaaaacagaggccgatattttattcatcaacggggtttgccatcccgtatcgggagcaaattaa

SEQ ID NO: 526010 - DNA, 813 bp, Stenotrophomonas maltophilia
  misc_feature (761)..(770): n is a, c, g, or t
atgtactcggataacgatatgaagccggacagcatgcaaggcttcgcccctgtaatacgcggtatagcccgcagcaatgccgaagtgacggtataccagaacggtcacagcatttataaggctaccgtgccgccggggccgtttgaattcagcgatatgtatccgaccggcagctccggcgatctgcaggtggtgatcaaagagtccgacggtacgcaaagtagctttattgtgccttacgccacgctgccggtattgcaacgtgaaggtcaggtgcagtatggcctggtggcgggcaaaacccatcaggacgggtcgggttcacgtgcagaggattttaactttattcagggatcagcggcctggggcgtcggaaaagggatcacgctttacggcggctatattcaggcggaagacaattattccaacttgattgccggaaccggttttaatatgggcagcgccggagcgctctcatttgatatttcccagtcgtgggcggatatcccgcagccggacaacatgcgacaacaggaacaccatagcggccagtcgtatcgcgtgcgctacagtaagacgcttcagcagaccaacaccgatattgccgtcgccggttataaattttcaacccggggttatctttcgtttcaggacttcctcaatgactgggatccgggcaatagcactattgataatggccgcgagcgaaaccgttttgatgtgacaatctcacagacgttgcctttcggcaccctgtcacnnnnnnnnnnccctgtcactgagcatgtacgacgcctcttactggaacagtga

SEQ ID NO: 526011 - DNA, 753 bp, Stenotrophomonas maltophilia
atgcagggtcaccatattcaggaaagctcagcgtactttttccgcaatggcgggaaacccagcggtgttatcgaggttccgggctcgattacggaagagaacgccaggaagatcaaagaaaactgggacactggttataccggggaaaatgcgggtaaaaccgccattctgagcaatggtgcgaaatatgttccccggacggtctcagctgctgatgcacaaactgtcgaacagcttcgcatgaccgcgcagattgtctgttcagtatttcacgtgcctgcttataaggttggcatcggtgaactgccaacgcatgacaacatcgaggcgcaggatcagcagtattactcacagtgtcttcagtcactgattgagtccatcgaattgctgctggatgaagcgtttgaacttgagggtgatacagggactgagtttgatgttaatgcgctgctgcgtatggacagcgaacgccgtatcaaatcactcggcgagggtgtgaaaaataccattctgacgccaaatgaggcgcgacggagtgaaaaccttccgcccttacccggcggcgacgcactgtatcttcagcagcagaacttcagtcttgaagcgctggcgcgccgtgatgcttcggatgacccgtttgccaaatccggcgccggcagccgtaccacatctgacgatgcgaacgggaaatccatgtcggaatctgaactgacagcggcaaaagccatgctgagaggattgttaaccaaatga

SEQ ID NO: 526012 - DNA, 1044 bp, Stenotrophomonas maltophilia
atgaatgaacgtgaactttcccttatcagggctcttggagaggaattttcccttgcgcttggcgagcttcgtgagtctttcagaaaaagcctcagtgactatcagcagacaacggaagagcaccttaccaggctctctcttgaggttgcgtccctgaaggatacaccggcacctgactttaccaagctgctggctgatgcagtggcatcccttccggttcctgagactcctgaattgccggatatcggcgctatggtcagcgaagcggtcgctgctatcccggcaccgcaggacggtaaaagtgtcacggtcgacgatattacccccgttttacaggaactggtcagcaatgccgtggcagagatacctgtaccaaaggacggtaaagactttgatcccgccatgcttaaacaggcagttgaagaagctgtcagcgaggcggtagccgccatcccggtaccgcgtgacggtaaaagtgtcacgactgaagacgtccagccgatgattcaggagctggtttccgcatccatgccggagctgccagatgtgaaatcgttggttaatgaggcgattgcagctctgcccgcagcagagccgggtaaagatggagaaaatggccgggacgccctgtcgctggagattctacctttcattgatgaggggaaaagctacccacgtggcagctatgcgacgtataacggcggcctgtggcgcgcttacgagaaaacccatggtatgcgtggctgggagtgtcttgttgatggtgtggcgggtattgatattcagcaatctgagcagcgttgcttcaccctgacggttaaccgcaccagtggcgccagcgaaaccaaatcctttgacgtgccagtgatgatttatcagggcgtattcaaatccggtcaggaatatctgcctggcgacacagttacatggggcggttcgctctggcactgcgacgcgcagactcaggacaagccgggtgaggcaggttcgaaaggctggaccctggctgccaagcgtggccgcgacgggagggataaaacgtga

SEQ ID NO: 526013 - DNA, 327 bp, Stenotrophomonas maltophilia
gtgattgaacttgtgacactggatgagataaaggaacacctgcacattgatcatgatgctgacgacggcccacttaaggaaaaaatacaggaagccagttcggtgttgctggcttttattcagggaagccgggacaaggtcgttgatgagaaaggaaagttaatcgagggtgaagcgctcagtcggatgaaggccgccacgatgcgtctggtgggcatgttgtaccgaaatcccgacctggctgataaggaagatttacttcatggagagcttcctttctctgtatcgtttttaattcatgatctccgacttccgacaattatttga

SEQ ID NO: 526014 - DNA, 450 bp, Stenotrophomonas maltophilia
atgattgagacgagcctggatttttccggtttaaatgacatcgcaaaggatctcgaggcgcttagccgtgctgaaaacaataaggttcttcgtgatgccacgcgcgccggcgcggaagtgcttaaggaagaagtgatcgcacgtgcaccggtacgcaccggaaaactgaaaaaaaacgtggtggtagtgacccaaaaaagccgccgccgcggggaaatttcttccggcgtccatattcgtggcgttaacctgcgcaccggcaacagcgataacacgatgaaggcgaataacccgagaaacgccttttactggccattcgttgaactgggcaccgcgaacatgcctgcacatccgtttgtgcgacccgcttacgatacgcgcgaggaagaggccgccagcgtcgccattgccaggatgaatcaggctattgatgaggtattgagcaagtga

SEQ ID NO: 526015 - DNA, 348 bp, Stenotrophomonas maltophilia
gtgaatgaagataatatctacgccttgctttcttccctggcagaaggacgggtatatccctatgttgcgccattaggtagtgacgggaaaccgtctgtctctccaccctggattatcttttccatcgtcgatgatgtttccgctgacgtactgtgtggccaggcggaatccagcacatcagtgcagatcgatgtttactcactgaccattgaggaagccagatccattcgtgatcatgcgctgaaggcggttaagtccctggctccgactgagataacgaaaattcaaggctatgaacccgatttccggctttaccgcgccacgatcgattttcgggtcacatcctga

SEQ ID NO: 526016 - DNA, 531 bp, Stenotrophomonas maltophilia
atgaaatatccaaccgtatcagtaaacggcgtttccgttcgtgttgatgacgagggacgctataacctcaatgatctccatgctgcggcggtcgcaaacggagaggctacagagcagcagcgtccaagtcagtttttacgtagcgctcaggtaaagcgatttatcaaggcacttaaatccaaagtgcaaaaaagcactctggaacaaattcaaccacttagagttgttaatggtggtgatgaacctggagtgtggggcgttgagctactggccattcgctacgcagcctggattaagcctgagtttgagattgaagtatatgaggtgttcagaacagtggttcgcctcggcatcagtgccatgtcacgcctgaataaattagatcacatcattaatactgagactaaagcgataagccagtgcgccagccagatggcgaagtggggtgtcggcggcagaaagaaaatcctcctttctgcgcgggagcgggtggttggtgaagtacagatgtacttaccaggcatcaattaa

SEQ ID NO: 526017 - DNA, 444 bp, Stenotrophomonas maltophilia
atgtctgcactttatgaaaaatcgcagctgacgaagatccttatttcctccctgccagccaccaaagaaacgatggattccgcaacctttctcgatctgagttgcaccatcaaagaaattcagttcaccggtggccagaagcaggatatcgacgtaacaacgctttgctctaccgagcaggagaacatcaacggcctgccttctccgtcagaaatctctctatccggtaacttctacaagaatccggcgcaggacgccttgcgtgaagcgtatgacaacgatacgacctacgctttccaggttatcttcccgtccggcaagggctttaagttcctggctgaaatccgccagcacacctggtcttccggtaccaacggcgtagtggcggcaacgttctccctgcgcctgaaaggtaagcctgaaaacatcgagtctggctcctga

SEQ ID NO: 526018 - DNA, 384 bp, Stenotrophomonas maltophilia
atgaagaatattaaaaatctcgccctggctaagatgtcgggatttcgtcataagacggtcgccgttcctgagtgggaaggcgtcaaagtggttctccgtgagccgtcaggtgaagcctggctgcgctggcaggaagtggtgaaagcgggtgctgatgatgaaaatgtgtcagtatcggaaaaggcacaccgtaatctttgcgctgacgttgtgctcttcattgacgttctgtgtgacaccgataagcaaccggtattcagcgtagatgaagaagagcaggtgcgtgaaatctacggccccgtccattcacgcctgctaaaacaggcgcttgacctgatcaacaacgcggacgaagcgcgggaaaagtctcaacccccggcgtaa

SEQ ID NO: 526019 - DNA, 207 bp, Stenotrophomonas maltophilia
atgtggattgagtacgacaggcaaagtccggttggcgatattcgtggtgacattcaggccgcccagctcgtctctgccatctacggctcgcagggggcaaaagtaccgctggacgatgcgatcctgcgctggggtggtgatgagcaatcagaaccgaaggacccgtttgctgggcttgaggctgcacttactgccgcgacgcagtga

SEQ ID NO: 526020 - DNA, 1308 bp, Stenotrophomonas maltophilia
  misc_feature (1279)..(1288): n is a, c, g, or t
atggcaactttacgtgagttaataatcaaaatttccgctaactcgcaatcattccagacggaaatttcccgcgcttcacgtatggggcaggattattaccgcaccatgcaaaatggtggccgtcaggctgccgctgccgcccgagagagcgaaagggcgttatctgatctgaccgctgggtttgcatcggcaggaagagccgctgctgctgctacggccgcttttgcgactggtaagctcgtgcagattgctgatgagtggaattcagtaaacgcccgccttaagcaggcatcatcttcagctgatgattttgctgcctctcagcgccagttaatggaaatcagccaaagaactggcaccgcgttttcagacaacgcaaaccttttttcacgcgcagctgcttcaatgcgtgagtttgggtatagctctgacgaagttctgaaaattaccgaagctgtttctaccggtcttaaactttcgggggctaatactcaggaagcgagttctgttatcactcaattcagccaggctctggcgcagggcgttcttcgcggtgaagaattcaacgccgttaacgaagcaggtgatcgtgttatccgcgcacttgccgccggaatgggcgtggcccgcaaagacctgaagagcatggctgaccaggggcaacttacgattgataaggttgttcctgcattaatgagccagttgggctcattacagggggagtttgccagcatgccgcaaactgtttccggctccctgcaaaaagtcactaactcattcatggcctgggttggtggtgtcaaccaggctactggtgctaccgatgcgttgtctggtggactggataatgtcgcacagacgcttgattcttttacctcatcagcagtgagcggtgcgctcagtgaagttgctgacaatatgtccacaataacaacagtagctggtgcgcttgttggcgttgggttggcaagatatctcagcggagttgtaaccagtgccacgagtgcaactggtgcactaatatcagccgctaagtcagaggttgctcttgctgtcgcgcaggacaaagcggctcagtccgctgttgcggcttccagggctgaagtttatcgggctcagcaagcagtacagagttcaagaagtgcaggtgttcaggcggctcagcaagagaaagtcgcggcagctgaagcaaaagtcactgctgcccataccagactgactaccgctcttgccagtggtacagctacggaaaaagtgcgagccagaacagcacttgaannnnnnnnnntgcgcaggcagggctggtag

SEQ ID NO: 526021 - DNA, 2055 bp, Stenotrophomonas maltophilia
atgagtggtgcccttggtctcatcggcggaattcctggtttggtaatgttgggtgctggcgcatggtatgcggtgtatcaaaatcaggagcaggcccgtcgctctgctctggaatacgccagcacaatagatgaagtcagtaaaaagtcgagggcaatgtctctacctgaagcttcagacaatgccgagaaaacgcgcgcagcattgaatgagcagaataggctgatcgatgaacaaaaaagcaagattgaaagcctgaaagaacagatagctggttatcagtcagtgatcagcaaccccggcccaacgaccagcggtggtttcatgattaaccacctgacatctttggacactgtaactcgtgggctggctacggctacagagcagttatctgttgagcaagaaagacttgctcagatgcaggaaaaatctgcttctattcaacaggttcttgaagggcttgaacatcggcgggtgacattgattcgggaggaggccgccaatcagaaccgggcttatcaatctctcctattgatgaatggccagcatgacgaatttaaccggttacttggtctcggtaatcaactcctaatggcacgtcagggactggctaacgtcccgctcagactccctcaggccgacctcgacaaaaagcaaactgatgctctcgaaaagagtcgccgggatctggaattgtcacgcctgaagggtgaggccaaagagcgcctgcgtctgagttatgcagccgatgacctggggttaaccagtgatccgcaattccatacaggccgtcaggagttgattaataacggtcttgctgaatggcggaataatgaggccaacaaacctaaggcgaagggtggtaaaaccgaaggcgagaaaaccgaggatgtgtataagcgccttatcaagcagcaaaaagagcagattgccctgcaaggccagaatactgaactggcgaaggttaaataccaggtcagccagggcgagcttgcttctctgacagaagcccagaaaaagacggtattgcagaatgctacgctgattgaccaggttaaattacgtgagcaactgcgaaattacgaagccaaccttgccgacagtaacgccagcgcccgcgcagccaatgaagcgcaactgctgggatacgggcagggaaccaggttccgtgaaagacttcaggagcagttcaatctgcgtaaggagtttgagcagaagaataccgatcttctccgccagcgtcaggctggtgaaatcgacgagacgttctatcagcaggggctgacacttaataagcgctacctcgaagagcgcctgcgcgaccaggagggatattacgcagcttctgatgcgcagcgtgacgactggatgacgggactgtctgagggttatgcgaactgggtggacgaagctactgattattcttccatggccgctgacggcatgaagcaggctatgggtggcgcggtcaccacgatcaccgacatgctcaatggcaacgttgacagctggaaggactggggcgtgagcgtactgaagattattcagaacgttctggtgaacatggctgttgctaatggcgtcagctcaattggatcactgttcagttttggtgcctcgtcagccgcaaccgccagcagcggtaccgctattcagaatgctggcgcgaacttcacatttaatgcgaagggtaacgtttacgactctccgtccctgagcgcttacagcaatggcgttttccagacgcctcagctgtttgcttttgccaaaggcgcagggattttcggcgaggcaggtcctgaagcaatcatgcccctcacgcgggcacctaatggtgatcttgccgttcgcgcagtggggatgccgcaggtctctggcggtgtgccttcagttaacttcggcgatatcaatattcagggcggatctccacaggcatccagtcagggtactgccggagcagcaggcaggcagcttaaggatgccatcactggtgtcattaacgaacaggccagcatgccgggctcgcctctgtggcgattaatcaagggagtttaa

SEQ ID NO: 526022 - DNA, 339 bp, Stenotrophomonas maltophilia
atggcagtcgaaaccttcagctggtgcccaaaggttgcctctcaggttgatacaagttttcgtacccgaaaggcgcagtttggtgatggctatacacaggtggccggggacggcatcaacccggtaacacctcagtggagcgtgagctttaccggcgacgaggcttacattcaggccattaaaaactttctgaacagacatgcagggtggaagtcatttatctggaagccgccgcttgagccttcaggtttatggcgcgcggaatccttccagatatctacccacggcaacaaaaaatacaccctcagcagcacattcatacaggcataccatccatga

SEQ ID NO: 526023 - DNA, 759 bp, Stenotrophomonas maltophilia
atgagtatttcatctgatgtccagaaactggaaccgggtaagcgcgtccgcctgatcgaggtggacggctcagcgttcggtgcgggtattcttcgctttcacaacgagacaatcccgcataccgaggcggaaatcatcgccgcaggcggcgacgagtcaaaacttgagccgaagtcggtgtggtggcaggggcaggagtatggcgcgtggccgtatgaactgaccggcatatctgtaagcagtgacggccagagttcacggccgtctctcaccgtggcaaacatcagcggtacgattggcgcgctgtgccgaagatttcaggggatggctaaagctaaggtgatcatccatgacactttcgcacactatctagacgccagaaacttccctgatgggaacccgaccgcgaatcccaacgaggagcgcaaacaggtttattacatcgaccgtaagtcaggatcggacgatgaaaccgtagagtttgagctttccagtccagccgatctgcgcgggcaacttattccgacccggcaaattcagccaatgtgcacgtggtgcatgcggggctggtacaaaaccgggaacggctgcacctacgccgggcaaaacggctggttcgataaagacggcaatcgggtggacgatccttcacaggatgtttgctccggattgctgtcaacgggctgtaaacctcgcttcggagagaatgaacagctggattatggcgggttccccggcgcttcacttctgagaggataa

SEQ ID NO: 526024 - DNA, 711 bp, Stenotrophomonas maltophilia
atgcgcgacaaaacagttagcgccattctggcgcatgccgccgcatccttccccgaggagtgctgtggcgtggttattcagaaggggcgggtggagaaatacatcccctgcaaaaataatgctgagtcgccgactgagcaatttgaacttaatcctgaggattatgcggccgccgaagagcagggcactgtggtggcgatcgtccacagccatcccggcgacggggcaacaactcagccgagcgagctcgacatgctgatgtgtgatgccacggaactgccctggattattgcatcgtggccggagggcgacattcgcaccgtcatgcctcgcggagaccgtcccctcacagggcgccagtttgtactcgggtatgcagactgctggtctctcatcatggactatttccgcatcgagcacggcattgaactgcccaactacagcgtagatcgccactggtgggagcagggtgaaaacctctatatggataactggcaggaatgcggtttccgtgagtacgacggtcccgctcagccaggtgacatggttatcatgcaggttcagtccaccgtcccgaaccatgccgggattttgcttgatggcaacatgctactgcatcacatgtatggccagctaagccagcgtattccctacggtggctattaccgtgaccgtaccatcaaaattctgcgttataaggatttgatgtaa

SEQ ID NO: 526025 - DNA, 588 bp, Stenotrophomonas maltophilia
atggaaagaaaaaccgttatcaaactcagcggctcaatggctcagcgatttggcaggatacatcgccgcgcactaacgtcggccagcgaagtgttcagggcactttctaacaccattgacggatttgatgcctacctgcgagagaccagagcgaaagggctggactttgtcatcttccgaaaccaaataaacataggcaaggaagagtttgaacttcttgggcctggtgatgagctccgtattatccctgtcatacgcggtagtaaaagggcggggctctttcaaattgttactgccgccgcaattgcggcctttacctggtggaacccaataggatgggcagcaagcacacaaatggcactatatgccgcagctggttctatggccgttggtggtgtagtgcagatgctctctcctcaggtttcaggtctgcgaatgcgtcaggaacctgataacaaaccctcctatgcgtttggtggtcccgttaacacgacggcatctggcaatcccgtccccctgctttatgggcaacgggaaattggcggcgccattatatccgccggggtttatgcagaagatcagcaataa

SEQ ID NO: 526026 - DNA, 3558 bp, Stenotrophomonas maltophilia
atgacgacgacaatcatcaaaggccgcggtaaaggtggcagcaatcagacccgaacacccgttgaagcaccggacagcattcagtccattgcaagggcaaaggtgctgattgcgcttggagagggtgagttcgctggcgggcttgatggtaaaaacatttttcttggtgactcatcttcctacacgcctcttcagaacgccgacggaagttataacttcaataatgtgaaatatgagttccgttccggcactcaggaccaggactacattcagggcttccccggcattgaaaacgaacttcaggtttcatacgagctgaaacaggctgtgccgtacgtgcgcgcggtttccaacacgcagctctctgcgctgcgaattcgcctgggatggccaactcttttactccagaaaaacaacggtgataaagtcggcacccgcgtcgagtatgctatcgatctgtcggtcgatggcgggccgtatgaaacggtggttaacggtgctgttgatgacaaaaccacgtcgctttatgagcgcagtcaccgcgtcaatcttccgaaagcctcgactggatggcagttgcgggttcgcagaatcacgccggattccacgagcgtgaatatcgtcgacaccatgcgcgttgtggccgttactgaaattattgacgccaaaattcgctacgttaacacagcgctgctgtatgtagagtttgacgcaaagcagttccctaatggcattcctcaggttgtgtgcaatccgaaagggcgaatcatccgtgtacctgatacttatgatcccgaaacccgcacttattctggtacatgggagggcgtatttaaatgggcgtggacggataaccctgcctggatttattacgacatcattctgaacgagcgcttcgggctgggtcaaagaatcgatgcgactcagatagacaaatgggaactttatcgcatcgcccagtattgcgatcaactggtaccagacggcaagggcggcagcgggacggagcctcgttttcgttgcaacgtttatatccaggaccgtaatgacgcctggaccgtacttcgtgatctggcgggtatatttcgcggcatgacgtactggggcgacaataagatgtatgtcctggctgatatgccacgggatgtgtggcacatctataaccacgccagcgttgttgaaggaaaatttacctttgcggatccgagtgaaaccacccgaaacactgccgcgctggtgaactggtctgacccagctaaccactacaaagacacgcctgagcctgtttacgataacgatctggccatgcgcttcgattatcgtcagctcgaaatgactgcaatcggctgcaccaggcagtcagaggcaaaccggcgggggcgctgggcgctgcttaccaacggtatcggcgaggtggtgaccttcagcacgggcatggacgttccccctgttggtgaggtgatcggcgtggctgctaacgagctggccggaagaactatcggcggcagggtgagcgcggttaacggccgcaacataaccctcgatcgcgctgctgatgtgaaagccggtaataggctgtttttgaatcttccatcaggcacagctcaggccagaaccgtccaggccgttaacggaaacacagtcactgtcaccacaccctacagcgaaacgccggaggctgaatgtaactggggcgtggactctgacgatctgtttatagcgcttttccgtgttacgggaacgcgggacaacaacgatggcactttcgaagtcaccgggacgacttacaaccctgatatctattccgccgttgataccggcgcaagacttgacgagcggccagtcagtgtcattccacctggggttcaggctccaccaggagatattgtcgtagacagttactctacggttaaccagaacattgcgattaccactatgcgtgttgcctgggattctgttcaggatgcagttgcgtacgaggcggaatggcggcgtgacagcggcaactggattagtgtgccccgaacgtcttctctcggctttgaagtgcagggtatctactcgggtcgctatctggtccgtgtcagggcggtgaacgccagcgacgtttcatcagtatgggcgacatcatcagaagtaaatcttacgggtaaagtgggcaatccgccgaaactggtcggcttcatcgcttccgataatgtggtattcggtatcgagctgagctggggattcccggcgaataccgacgacacgctgaagacggaaattcagtacagcctgaccggtaccgaagacgatgcgatgctgctggccgatgtgccttacccgcagcgcaaatatcagcagatgggccttaaggcagggcaaattttctggtaccgcgcgcagctggtggaccgcagcggcaacgaatcagggtacacagaatgggtgcgcgggcaggcaagtatagatgtttctgatgtctccagtgtgattttggaggacatgaaggaatctcagacgttcaaagacctgatcgagagcgcagtggacggcaatgcaaaaattgctggtatggctgacgatatcaaacaggccaacgatgaactggcgcaacaggcgcaggaaatcgccaaaaacgcccaggatatcgggaaggttcagaccagcgttacaaacctgtcgagcacggtcggaggtgtgtcttcttctctgagcgagcttgagcagaccgttgcgacggctgataccgcgctgggccagcgaatcgatagcatcagtgtgtctatggacggcatggcggggggagtgaagaactcagccatcgcgattattcagggcaacctggcgcaggtggccgcgcgcaaaacgctgtcggcatcggtcgccggtaacagcgcgcagctggatcgcattgatgaggtgatcgtcaacgagaaggaggcaacggcgcgttcgctgctgagtgtgcaggcggaagtcaacgggaacaaggcatccatcaacagcctgaaccagaccttctccgattaccagcaggccaccgccacgcagataaacggcatcacggcgaccatcaacggacatacctcagccattaccactaacgctcaggccatcgcgaacgttaacggggatctgaaggcgatgtacagcatcaaggttggcgtctccagcaacggtcagtattacgcggctgggatggggatcggcgttgagaatacgccttcaggtatgcagtcgcaggttatcttcctggctgaccgcttcgccgttactcaccaggccggagccaccgttacgcttccgttcgttattcagaacgggcaggtgttcatcagagacgcgctgataggtgatggcactatcaacaacaacaagatcggcaactacatccagtccaataactatgtcgctggctcagtcggatggaggctggataagggcggtacgtttgagaactacggttcgacagctggtgagggggcgatgaagcagactaatcagacgattagtgtcaaggatgccaacaatgtgttgagggtgcagatcgggagaattacgggaacatggtaa

SEQ ID NO: 526027 - DNA, 315 bp, Stenotrophomonas maltophilia
atggcggaatatggtgttcagacatgggacgcatcaggcaaggtaaacaactatggcgttaaacctgtcagcgtttgtggctatctccagttggcccagaaccagaaaacaggctcttacacagtagcgcttccaccgggttgcaggctgacctattttcagagcatgaacggcgatcagtttggtacgagtcggaggaagatcaccatttcggggggaacagcaacagtgtcagcagcaggtgataccgactactcagcagggactgagcctgcggcagcggcttatctcattttccagatcgagagggcataa

SEQ ID NO: 526028 - DNA, 672 bp, Stenotrophomonas maltophilia
atggcggagtatggcgttttactgacgaccacgagcggggaagtatgggtgaccgcgaacagctcgccaatcgctcttcaggcgcgaaagacagcggcacttcagggaacatcggggttcaataccaaagtgacgcacacattccccgcaggtcagcccgttgtcgcgttcgttcattgcacggttgaggtcgaaatcactcagacgataagcgggaacaccatcacgattgattttctcagaccgaacgcaaccggcacagcgtacgtttattttttctctattttcccgcagacaaagccagactacgggctggctgtgtgggatgcatcagggacgctgattttaacaaacgaaacgcgcacactgagcgatgtaatcaccctcggtacagccggggtggatgccagctcaggatataacatcaatacaactctggcggggaagtgggcctgtatgcctgccatgctggggctaattaccggggttgtatccgccggcggtcagccgcagccctactcggccatatacaaaagcatggcaaagcttgagggaagcaatacgcggatattcgccaggccgcagacaacccccggcggcaatcttcagaacgttacgtattcgaatctgaggaacgtgattatggccattaactgcgccaattatgattga

SEQ ID NO: 526029 - DNA, 234 bp, Stenotrophomonas maltophilia; identical to SEQ ID NO: 160546

SEQ ID NO: 526030 - DNA, 2439 bp, Stenotrophomonas maltophilia
atgtccgaagttgaacatcacgacgggataagccgtcgaactctggttaaatctactgccataggatctctggcgcttgccgccggtgggatcgcattgccttttggtctgaaaagcgccgccgccgcagtgcagaccgctaatcagccagcggaagataaagtcgtctggggcgcctgctcggtaaactgcggtagccgctgcgcgctgcgtctgcacgttcgcgatgacgaagtctattgggttgaaacggataataccggcgaggatgtttacggcaaccatcaggttcgcgcctgcctgcgaggccgttcaattcgccgtcgcattaatcatccagaccgtctgaactatccgatgaaacgcgtgggcaaacgcggagaaggcaagtttgaacgtatcacctgggaagaagcgctggacaccatcgccgcgagcctgaaaagcgtggtcgaaaaatacggcaacgaagcggtctacattaactactcctccggaattgtcggcggcaatatcacccgctcctccccttacgcctcgctggtggcacgcctgatgaactgctacggcggcttcctcagccactacggcacctacagcaccgcgcagatcgcctgcgcaatgccctacacctacggcagcaacgacggcaacagtacatcggatatcgaaaacaccaaactggtggtgatgttcggcaataatccggcagaaacgcgcatgagcggcggcgggatcacttactaccttgaacaggcacgtgaacggtctaacgcacgaatgatcgttatcgatccgcgctacaccgacaccgccgcaggccgcgaagacgagtggatcccgattcgtccgggcaccgatgccgcactggtggcaggtattgcgtgggtgctgattaatgaaaacctcgtcgatcagcccttcctcgataaatactgcgtaggttatgacgaaaaaaccctgccggaaggcgcacctgttaacggtcattacaaagcctatattctcggccagggtgatgacaaaaccgcgaaaaccccggaatgggcgtcgcgcattacaggcattcctgccgatcgcatcattaagctggcccgtgaaatcggttcggcaaaaccggcctacatttgccagggctggggcccgcagcgtcaggccaacggcgagcagacatcccgcgccatcgccatgctgccgatcctgaccggcaacgtcggcattaacggcggcaacagcggcgcgcgcgaatcgacctacaccatcaccatcgaacgtatgccgctgccggaaaatcctgtgaaaacgcaaatctcctgcttcagctggacgggtgccatcgtgcgtggaccggagatgaccgccctgcgcgacggcgtacgcggtaaggataagctggatgtgccgatcaagttcatctggaactatgcgggtaataccatcatcaaccagcactctgatatcaacaaaactcacgacattttgcaggatgagagtaagtgcgaaacgatcgtcgttatcgacaacttcatgacctcgtccgcgaagtatgccgatattgtcctgccggacctgatgaccgttgagcaggaagatatcatccccaacgattacgccggcaacatgggatacctgattttcctccagccggtaaccgccccgaagttcgagcgcaagcccatctactggatcatgagcgaagtagcgaaacgtctcggaccggatgtctatcagaaattcaccgaaggccgtacgcaggagcagtggctgcgctacctttacgccaaaatggttgccaaagatccgctgctgccgtcctacgacgcgctgaaaaaaatgggtatttataagcgcaaagatccaaatggacattttgtggcctataaaaaattccgtgacgatccggatgccaatccgctgaaaaccccgtcggggaaaatcgagatctactccagcaagctggcggatattgcggcaacctgggaactgcaaaaagacgaaaccatcaccccgctaccggtctatacctcaacctttgaaggctgggacgcgcccgagcgcagcaaattcccgctgcaactgttcggtttccactttaaagcccgtacccacttcagctacggcaacgtggatgtgctccaggccgcctgtcgccaggaggtgtggcttaaccctgtagacgccgagaagcgcggcattaaaaacggtgacacggtgcgcgtgtttaacgatcgcggcgaagtgcgcattgccgccaaagtcaccccgcgcattatgcctggtgtgagcgcgatgggccagggcgcctggcatgacgccaacatgaacggcgatcgtgtcgatcacggctcctgcatcaataccctgaccacacaccgcccgtcaccgctggcgaaaggcaatccgcagcacacgaacctggtgcagatcgagaaggcataa

SEQ ID NO: 526031 - DNA, 306 bp, Stenotrophomonas maltophilia
atgaaacggttaccctggattaccgccctgctgttaatgagtgcttcacctgctattcttgcggccccggactcctgcgagcgcgtgaaaagcgacattcagcagaagattatcaacaacggcgtaccggagtctggctttaccctgaacatcgtgccgaacgatcaggccgaccagccggatgcgcaggtcgttgggcattgcgccaacgatactttcaaaattttgtacactcgcaccagtagcggcaactacccggtaagcggtgcaggtacgcaggagaatgcacccgctgagccgcaatga

SEQ ID NO: 526032 - DNA, 855 bp, Stenotrophomonas maltophilia
atgatttacgactgttttttgtactatgacgaagatatgttgctcgacatcagattacatacgctcgctgatgtcgttgaccgttttgtcattgtagaagcaacacactcttttacgggcataccgcgagaattacatttcgatattacgaagtttgccaaattcagagacaaaattatttacgtgccttttgacgcgcagcctattttaaacagtgctgacaataaccaggttgatgcctgggcaaatgaagcagcgcttcgcaactccattatgaatgggttaaaagacgcggcagacgacgatctgattctggtgtcagacgttgatgaaattttctctcccgagacggtcagggccattaatccacgcgcgctctgcacgactattcatcaaaacgtgttcaactatcagtttaatcttcaggttcacaacatggatggtacgccgagaaaatgtaccttgccccgcgcgacgtcctattacaaccttaagcatttcttccacggtgagcctgaatctttcagaaactggaagcgtgcacgcaaagataaaaactggtcatggtttaaatggaactggctaaaaatcaataataaggttgtgaaagatggcggctggcatttctcctgggtaatgaccccagaaagaatttccgaaaaaatgtctaccatttctcataccgaatacgatctgccggaatttaataacccggaacatattatgaaggttatcaccaacgccgaagatatctggggacgagaccgaaaactggtcaggcaagaggtatcaaaacgcaccctgccttcttatctggtagacaatcagcaccattattcgcaatttattttatga

SEQ ID NO: 526033 - DNA, 510 bp, Stenotrophomonas maltophilia
atgtcaacggaaggatgtttcgatacgcttgaactgcacgatctcgacgctaatacgggcgttgcgctggtgctggatgctaactactacgtcgatgcggaaacccagcagcagaaggtgaagttgcagggaaaatgtcagctggcggaactgccgtctgccggcctgacgtgggacaccgacgataacgggtttgtggttgccgcgcacagcaaagagatggaagtgaagtaccagtatgataccgacggctacccgctcggtaaaaccacggtctccggcgaccagcgtttatcggtcaaatcgatgccgtcgaaagatctgcgtaagcgcatggattatacggcggtaagcctgttgaacgataaaccgatgggcaatgtaaagcagagttgcgattacgatcgccacaacaacccggtgagctgtgagctggttatcgtcgatgacagcgttaaacctgccattgagcgcaagtacaccatcaaaaacagcattgaatattattaa

SEQ ID NO: 526034 - DNA, 561 bp, Stenotrophomonas maltophilia
atgtcgatgccgtgtgacgtaaagctccgtccgctggagcgcgaagatttacgctttgtccaccagctcgacaacaatgccagcgtgatgcgctactggtttgaagagccttacgaggccttcgtcgagctgtccgatctctacgataagcatatccacgatcaaagtgaacgccggtttgtggtggagtgcgaaggtgagaaagccgggctggttgagctggttgagatcaaccatgttcaccgtcgggcggaatttcagatcattatttcaccggagcaccaggggaaaggtcttgcgtcgcgggcggcaaagctggcgatggattatgggtttaacgtcctgaatctctacaagctttacctcatcgtcgataaagagaacgaaaaagcaattcatatctaccgtaagctcggctttatggtggaaggtgaactgatccatgagttctttattaatggcgaataccgtaacaccatccgcatgtgcattttccagcatcagcatctggccgggcataaatcctcctccgccaacctgcttaaacccaccgcgcagtaa

SEQ ID NO: 526035 - DNA, 339 bp, Stenotrophomonas maltophilia
atgactacattaagcaaacgcctttgtctgacagccgcactggcgctgtcctcgttcgccttcaccgcaacggcatcagccgaaaccagcaaactcatcattgagtctggtgacagcgcgcaaagccgccagaatgctgccatggacaaagaacaatggaatgacacccgcagcctgcgtcagaaagtgaataagcgcgtggaaaaagagtgggataaagaagacgtcgcgtttgatgcccgcgacaaatgccagcaaagtgccaacgtcaacgcttactgggagcctaacaccctgcgctgtctggatcgtcgcactggccgcacggtagcaccgtaa

SEQ ID NO: 526036 - DNA, 327 bp, Stenotrophomonas maltophilia
atgttcaaaacgacgctgctttttttcgcgaccgcgctgtgtgaaatcatcggatgctttttgccgtggctctggctaaagcggggcgcttccgcgctgctgctgatcccggcgggtgtgtccctggtccttttcgtctggctgctcaccctgcatccggccgccagcgggcgggtttatgcggcctacgggggggtgtacgtctgtactgcgctgctgtggctgcgcgttgtcgatggcgtcaggctaagcctgtatgactgggcaggcgcgctggttgccctgtgcggcatgttgatcatcgtggccggctggggacgcgcatag

SEQ ID NO: 526037 - DNA, 1215 bp, Stenotrophomonas maltophilia
atgaagattgtcggggctgaagtatttgtcacctgcccggggcgtaactttgtcacccttaaaatcaccaccgatgagggcattgtaggcctgggtgatgccacgcttaacggacgtgaactttccgttgcctcctacctgaaagatcacctgtgccctcagctgattggccgcgatgcgcaccgcatcgaagatatctggcagttcttctataaaggcgcgtactggcgtcgtggcccggtcaccatgtcagcgatttctgccgtggatatggcgctgtgggacatcaaagcgaaagccgcgaacatgccgctctatcaacttcttggcggagcctcccgggaaggggtgatggtttattgtcataccaccgggcacaccattgacgacgtactggaagattatgcccgtcataaagagatgggcttcaaggctattcgcgtgcagtgcggcgtgccggggatgaaaaccacctatggtatgtctaaaggaaaagggctggcgtatgagcctgcaaccaagggcgactggccggacgagcagctttggtccaccgagaaatacctcgacttcacgccgaaactgttcgacgcagtgcgcagtcagttcggcttcaacgaacatctccttcacgacatgcaccaccgtctgacgcccatcgaagcggcgcgattcggcaaaagtattgaagagtaccgcctgttctggatggaagatccgactcccgctgaaaaccaggagtgtttccgcctgatccgccagcacaccgtcacgccaattgcggtgggggaagtgttcaacagcatctgggactgcaagcagctgattgaagagcagctcattgactatatccgcgccaccataacccatgcgggcggcatcaccgggatgcgtcgcattgcggactttgcctcactctaccaggtgcgtaccggctcacacggcccgtcggatctgtcgccgatttgccacgccgcggcgctgcattttgacctgtgggtaccgaactttggtgtgcaggagtatatgggttattcagagcagatgctggaagtgttcccgcacagctggcgcttcgataacggctatatgcacccgggcgataagccagggctgggcattgagtttgatgagaagctggcagcgaaatacccgtacgaaccggcctgtctgccggtggcccgtctggaagacggcaccctctggaactggtaa

SEQ ID NO: 526038 - DNA, 1020 bp, Stenotrophomonas maltophilia
atgaaaagcgtagtgatccaacagccgaatgcgctggtgattgaggagcgtcctctcccgttgccggacgcaggcgacgtccgcgtcagaattaaactcgccggtatctgcggttcagacagccatatctatcgcgggcataacccgtttgcgaaatacccgcgggtaatcggtcacgagttctttggcgaaatagacgcggttggcgaaggtgtggagagtacccgactgggccagcgcgtgtctgtggatccggtgatcagctgcgggcactgctacccgtgttccgtcggaaaaccgaacgtttgtacctcgctggtggtgctgggcgtccaccgtgacggcggcttcagcgaatacgccgtcgtgccggcgaaaaatgcctggcacattccggatgcgatccctgacaaacacgcggtgatggttgagcctttcaccattgccgccaacgtgacggggcaggcgaaacccaccgaacaggacgtggcgctgatctacggcgcaggcccgatggggctggtcaccgtgcaggcgctaaagggcgtttacaaggtgaagcaggtcatcgtggtggatcggattgatgagcggctggggatggcgcaacgcagcggcgcagactgggtcttcaacaacagcgagcactcattacaggccgcgctggaagaaaaaggcatcaagccgacgttaatcatcgatgctgcctgtcatccatccattttgcaggaagcgattacgctggcgtctccggcggcgcgcatcgtgctgatgggcttctccagcgacccgagtcagatcgtgcagcaggggatcaccggcaaagagctgtcgatcttctcttcgcgcctgaatgccaacaaattcccggtggtcattgactggctggaaaaagggctgatcgaccctgaaaaactggtcacccatacatttgactatcaccacgttacagacgccatcgaactgtttgaaaaagaccagcggcagtgctgcaaagtcttgctcacgttcgaccaataa

SEQ ID NO: 526039 - DNA, 1380 bp, Stenotrophomonas maltophilia
atgactcaagcacaacctcaaagaagtacgtcagacctggtgaaagccgccgtatccggctggctgggcaccgccctggagtttatggattttcagctttactcccttggcgccgcgctggtattccatgaaattttcttccctgaacaatccgcggccatggcgctgatcctggcgatggggacctatggggcaggctacatcgcgcgtatcgtcggggcatttatcttcggcagaatgggcgacagaattggccgcaaaaaggtgctgtttatcaccatcaccatgatggggatctgcaccaccttaatcggcgtcctgccaacctacgcgcagatcgggattttcgcaccggtgctgctggtgacgctgcgtattattcaggggctgggcgcgggggcagaaatctcaggcgcaggtaccatgctggcggagtacgcgccgaagggtaaacgcggcatcatctcctcgctggtggccatgggaaccaactgcgggacgctgagcgccacggcgatctgggccgtgatgttctttgccctcgatcgtgaagaacttattgcctggggctggcgcgtgccgttcctcgccagcgtggtggtgatgatcttcgccatctggctgcgtatgaaccttaaagagagcccggtgtttgagaaggttaacgacgctgaaaccattgcgccggttgctgcgcaggatacctcattaggcgcgatgtttaagagcaaatcgttctggctggcgacggggctgcgctttggtcaggccggcaactcaggtttgattcagactttccttgccggatatctggtgcagacgctgttgtttgataaggcgatcccaaccgatgcgctgatgatcagttcgattctcggcttcctctccatcccgctgctgggctggctgtccgataaagtggggcgccgtctgccgtatatcctccttaacatttcagccattattctggcttacccgatgctgtcgattatcgtcgataagagttacgcgccgggcgtgattatgctctctatcatcgttattcataactttgcggtgctcgggctgttcgcgctggaaaatatcaccatggcagagatgtttggttcgcggaaccgctttacccgcatggccatttcgaaagaggcgggcgggctggtagccgtaggctttggtccggtgctggcggggatcttctgcaacatgaccgggtcctggtggccgattgtggtgatgctggtggcgtactcgctgattgggctggtctccgcgttgctgatgccggaagtgcgcgaccgcgatttgagtgaagccgaagatgctgcggaggctcctcataaggaatcggtagcctacggcgcgctctcttcacgccgctag

SEQ ID NO: 526040 - DNA, 579 bp, Stenotrophomonas maltophilia
atggaaaaccggttattacaggcgaaggcaacgcatcctcaatacgatcgcgacagcctcaaggcacgcattgttcatttagggtttggcgcgtttcaccgtgcgcaccaggcggtgtacaccgatatactcgccgcagaacagggcagcgactggggttactgcgaagttaacctgattggcggcgaacagcagatcgccgatctgaaggcacaggataacctttataccgtggcagagatgtctgccgatgcgtggacggcgcgcgtggtcggcgtcgtcaaaaacgcgctgcatgcgcagatcgacgggctggaaatcgtgctggcggcgctgtgtgagccgcaggtcgccattgtttccctgaccatcaccgagaaaggatattgccactccccggcaaccggacaactgatgttcgatcatccgttaatcgttgcagacctgcaaaacccgcatcagcctaaatctgcgccgggcgtggtggttgaggcgctggcgcgtcgcaaggcggcggggctaccggcattcagcgtgatgtcatgcgataacatacctgtgcctacgcgcgcgccgtag

SEQ ID NO: 526041 - DNA, 699 bp, Stenotrophomonas maltophilia
  misc_feature (678)..(687): n is a, c, g, or t
atggtggaccgcattgtgcccgccgtcacggctgatacgctggataaaatcgaacagctgactggcgtacgcgatccggcaggtgtcgcctgcgagccgttccgccagtgggtggtggaagataattttgttgccggacgtccccagtgggaaaaggccggtgcggagctggtttctgatgtcattccgtttgaagagatgaagctgcgaatgcttaacggcagccactcgttcctggcctatctcggctatcttgccggttatcagcacattaacgactgcatggaagatgaacattatcgcgcagccgcgcatgcgctgatgctgatagagcaggcgccgacgttgaaagtgcggggcgtggatttgggtcgttatgccgaccagctgattgcgcgttacagcaatccggccctgcgtcaccgcacctggcaaatcgccatggacggtagccagaaattgccgcagcgcatgctcgattccgtgcgctggcaccttgtccaccagaaacccttcccgctgctggccctcggcgtggcgggctggatgcgttatgtcggcggtgtggatgagcagggtaacgcgattgaggtgagcgatccgcagctggcggtgattcaggcggcggtaaacggtagcgctgaaggtgaaagccgcgttagcgcgctgttgggcatnnnnnnnnnngttgggcattga

SEQ ID NO: 526042 - DNA, 204 bp, Stenotrophomonas maltophilia
atgatgacatacgaccgtaaccgaaatgcaatcaccactggcagccgcgtcatgattagcggcacaggtcagtttggcgtgattaaagcgatccacagcgacggccttaatgccgagcaggtgcgtcgtggtaaaacggttgaagtggaaggatgcgaaggtaagttcgaaccgattgagctgattcgcctggggatgcactaa

SEQ ID NO: 526043 - DNA, 432 bp, Stenotrophomonas maltophilia
atgtataagaaaattttgatgcctgttgacgtgtttgaaatggatctaagcgataaagcggtacgccacgcggtcaacctcgcgaaatcggaaggcgcgacgatcaccctggtcaacattctccctaacagcagccgttcgttactgcgggggttcaatgccgatattaagaagttcgaagagtatatgaccgccgagtcggataagaagatgaaggcactgaaacggctctttgatatgtccccagaaaatattgattgtgaagtacgtttcggcaacgtacgcgatgaaatcatccagctcagcaaagaggggaaatatgacgttattgttattggatcaagaaacccgagcatgacaacacatctgctgggctcgaatgctgaaactatcctgcgctacgccactattccggtattagtggtccgctaa

SEQ ID NO: 526044 - DNA, 687 bp, Stenotrophomonas maltophilia
atggccgctgaatcgcaacttaatcctacccagcctgtaaatcagcaaatttatcgcatcttacgccgtgatatcgttcgctgcctgatcccaccgggaacgccactctcagaaaaagaggtttcggtacgttttgacgtttcccgtcagcccgtgcgcgaggcgtttattaagctcgcagaaaacggccttatccagatccgccctcagcgcggcagctatgtaaataaaatttcgctttcgcaggtacggaatggctgttttgttcgccaggccattgagtgcgccgttgtgcgtcgcgccgcgtcgctcatcaacgataaccagtgctacctgctggagcaaaacctgcatcagcaacgcattgccatcgaccgcaaacagttaaacgactttttccagctggacgacgaatttcaccagaaactggcgcagatcgccgagtgccagctcgcgtgggataccgtcgaaaacatcaaagctaccatcgaccgcgtgcgctacatgagcctcgaccatgtttctccgccagagatgttgctgcgccagcatcacgatattttcagcgcactggaaaaacgcgacgtggaagccgtagataaagcgatgacgcttcacctccaggaaattagcgagtcagttcagttaattcgtcaggaaaaccgcgagtggttcagcgaagaataa

SEQ ID NO: 526045 - DNA, 747 bp, Stenotrophomonas maltophilia
atgattatattagttaccggggcgacagcaggttttggtgaaagcatcacgcgtcgcttcgtcgccaacggacataaggtgattgcaacgggtcgtcgtcaggagcgtctccaggagttgaaagacgagctgggcgacagcatcctgaccacacagctggacgtacgcaaccgcgccgccattgaagagatgattgccaacctgcctgccgaatggcgtgaaatcgacgtgctggtcaataacgctggcctggcgctgggcatggagcctgcccacaaagccagcgtggaagactgggagaacatgatcgacaccaacaacaaaggcctggtgtacatgacccgcgccgtgctgccgggcatggttgaacgtaaccgtggtcatatcattaatatcggttccaccgcaggcagctggccttacgcgggcggcaacgtctatggcgcaaccaaggcctttgtacgccagttcagcctgaacctgcgcaccgacctgcacggtaccgcgattcgcgtgaccgatgttgagccgggcctggtcggtggaacggaattctccaacgtgcgcttcaagggtgacgacgcgaaagcggataaaacctatgaaaatgcgaatgcgctgacgccggaagatatcaccgaaaccgtctggtgggtcgcgacgctgccgaagcatgtcaacatcaacacggttgagatgatgcccgtcagccagacctatgccggactcagcgttcatcgcgggtaa

SEQ ID NO: 526046 - DNA, 2034 bp, Stenotrophomonas maltophilia
atgtcggtcaacaaccctttctttgacgttagcctgctgccttatcaggctccgcgttttgatgtgatagaagacagccactatcgcccggcgtttgatgaagcaatgcgcctcaagcgtgcagacattgacgcgattatcgcgcagagcgccgcgccggacttcaacaacaccgtgctggcgctggaaatgagcggggccatgctgtcgcgcgtcagcagcgtgttcttcgccatgacgtccgcacacaccaacgattatcttcaggcactggacgagcagttctccaccgaactggccgggctggcgaacgatatctggctaaacgatacgcttttcgcccgcgtggaagccgtctggcaggatcgcgacacgctggatgccgaatcccgccgactgacggaggtgacgtatcagcactttgttcttgcgggcgcgcgtctgaacgccgatgaaaaagccgagctgaaatctctgaataccgaagccgccaccctgaccagccagttcaaccagcgcctgctggcggcgaataaggcgggagggctggtggtggatgatgttcaccagcttgacggactcagtgcggaggagatggctgccgcggctcatgctgccgcagaaaaagggctgacggatcgctggctgatcccgcttctgaataccacgcaacagcccgcgctggcggcgctgtctctgcgcgagacccgtaaaaagctgtttagcgcgggctgggaacgcactcaaaaaggcgacgaaaacgatacgcgcgacctgatccgtcggcttaccgcgttgcgggcaagacaggcgcagctgctcggctttgacaactatgccagctggagcattgccgatcaaatggcgaaaacgccggatgccgcgctcgaattcatgcgcgggatagttcctgcggcgcgcagcagagccgcgctggagcaggcggatattcagaaggtcattgacgacgagcagggcggttttacggtgcaggcctgggactgggcgttttatgccgaacgcgtgcgttcagcgaaatatgcgctggatgagtcgcagatcaaaccctatttcgcgctcaataccgtgcttgaagatggcgtattctggaccgccacgcagctgttcggtatccgctttgtcgagcgtttcgatattccggtttatcacccggacgttcgcgtgtgggagattttcgaccacacgggtgaaggcatggcgttgttctacggcgactttttcgcgcgtgattccaaagcgggcggggcgtggatggggaattttgttgagcagtcttacgagtttgccgcgcgtccggtgatttataacgtctgcaactatcaaaaaccagcgaacgggcagaccgcgctgatctcctgggatgatgtgattaccctgttccacgagtttggccatacgctacatggcctgtttgccagccagcgctatgccacgctttcaggcaccaacacgccgcgtgatttcgttgaattcccgtcgcagatcaatgaacactgggccagccatccgcaggtgtttgcgcactttgcccgccattatcaaaccggcgagccgatgccggatgcgctgcgggaaaaaatgctcaatgcgacccagtttaataagggttatgacatgacggaactgctgagcgccgcgctgctggatatgaactggcacggcattcatgagcccattgaagacgtggaagcctttgaagccgccgcgttgaaaaaagaagggctggatcttccagccgtaccgccgcgctatcgcagcagctattttgcccatatcttcggcggcggctacgcggcgggctattacgcctatctctggacgcagatgctggcggacgatggctatcagtggtttgtcgagcagggtggtttaacgcgcgaaaacggacagacattccgcgaggcgattttgtcgcgcggcaacagcactgatttagctgaactttaccggaactggcgcgggcacgatccgaggatcgaaccgatgctggagaatcgtggattgagtgtttaa

SEQ ID NO: 526047 - DNA, 987 bp, Stenotrophomonas maltophilia
  misc_feature (965)..(974): n is a, c, g, or t
atgacctccagtagcgggtatgactattatggaaaaaggttaagtgtccctgcgtttggtgaagataattacaccctgagggaagtgatcacagatctccaaaataatgaaatttctcgccgggactacgttatatctatcgaccgcactccccctaaaactagcacaattggatatacgcgaaatggatggcaatatggtagcgaagccatctttaccagcgttccttcaggtatgcagtatgcctctgttcaggctctcgtcttttcaggcctttcagacagtcgctctggtctcgaccgggctgagtactttcttgtcgattcgaacggcgttgaacgaaagagaggggctgtaattaacctggtcgataattcagtaaccgtccaaaatactactgcgagcgatccagccctggcgccagcttctcagtctgaataccgtatgggcctttatgtttatgacaaggcaggaaataaagcatcagtaagcagacaaagtgtgattgatcgggtcaaccctccttctgttctacaggtgcttaataccaggacaaatacctgggaaaactactcagctgggataactgtttacagtaatccaatatcattgcgggtactcaggaataaaagtaactttactgctgctaataaaacaagctttgggtgggcagatgccaattatcaaagttctgacagcacatataatatttattcgttcaattttgttttccccagtaccggtgatatttatcacgaattccagacacttgcgggaggcgttcgtcggtaccatcactctgagttatctttcactccttccccaaccatggaacttgcaccaaaggtcacaagcaaagaaatttttcgtagtgataccggtaaatggagcagtgctactgggaatgtaagaactgccaaatttacccaaatacgcgtgactaccgaacctcgtaactatgtacnnnnnnnnnnattcgaaccgtaa

SEQ ID NO: 526048 - DNA, 1095 bp, Stenotrophomonas maltophilia
atgaacgtggattatacctttacttccgataaggggatgcaatacatccatctggtctcaggtaaagacggtactgctatttatgataatctggctggggcattcgtagtgatttgggataacaacccaccggttattaacgccgtaaaaattaaccgtatggataaaaatgtaaccatgacggttactgatgatgaccggataaatggatggcaaataggagcatgggatacccgagaatttggcgtggtgcttaaaaccgaaacggggaatgtgattgacctacccgccaggacatggacagagagtgattttaaaacaaaaaacgcggtcatttcctatgctgatctgccggacggcaaatataccgttctgtccgcctatgcaagagatcttgtgggcaacacggcaaactacgtgataaatgatttgcttaccattgactccactgcccctctaatttcctaccggtatctgaatgatgatcctgaaggcaaactggttaagggactagaaaacctcagaattagtgtagctgacccttcaggtgacgcctcgcttgaatcactggtgttgagcggtggaccaaacagtgaacaggtgacattagcttattccagtcagggctcaggagtttatacgccagagtacccgcgtatctttcccgtaatagcaaaagaggatggcatttatacaattgaagctcacgcagtcgatgcctctggaaaccggtcctcgaaaaagctcaatttcctctatcaaccagcaaacatgatcactctggacaggctacgtacccttgctactgcggctgcactaaagaccacggataaccagccactggcttttatccggacaagcgtacttcgccgaaaggatggttctgtcattactgggcagttaaacggtacgctgtccgtgcggaaagatgctgacttcccggtaagtgtagctggcgtaaccgttgcgccaggagagacaaaggcaatcatttttgatatggggcagggtgaagaacgtatttattctgtcacaccaggaaagagtggcgtttctggtacatctgagtttgccgtggaattcccgcagttctga

SEQ ID NO: 526049 - DNA, 2457 bp, Stenotrophomonas maltophilia; identical to SEQ ID NO: 144517

SEQ ID NO: 526050 - DNA, 552 bp, Stenotrophomonas maltophilia; identical to SEQ ID NO: 430811

SEQ ID NO: 526051 - DNA, 297 bp, Stenotrophomonas maltophilia; identical to SEQ ID NO: 159010

SEQ ID NO: 526052 - DNA, 192 bp, Stenotrophomonas maltophilia; identical to SEQ ID NO: 159005

SEQ ID NO: 526053 - DNA, 564 bp, Stenotrophomonas maltophilia; identical to SEQ ID NO: 199576

SEQ ID NO: 526054 - DNA, 504 bp, Stenotrophomonas maltophilia
atgatacccgtattagcgatctctgcctggagcggcaccgggaagactacgctgctaaaaaagctgatacctgcactttgcgctaaaggtattcgtcccggattgattaagcacacgcaccataacatggatgtcgataagccggggaaagatagctatgagctgcgtaaggctggcgctgcacaaacgatggtggcgagtaaccagcgctgggcgttaatgacagaaactccggatgaagcaccgctggatctcgcttatcttgtcagccggatggatcattccacgctggatctggtgctggttgaggggtttaagcacgaggctgttgcgaagatcctgctgttcagaaacggtgccgggcatgatgtaagtgagttaacgctggatgaacatgtgattgctgtggccagtgacgctgcgttgacgctggaagtaccggttctggatttgaataatgtggaggggattgcagagtttattttggcgtggtgtgcagtctga

SEQ ID NO: 526055 - DNA, 528 bp, Stenotrophomonas maltophilia
atgggcggaaaagataaaggtcttcagctcctgaacaacacccccttatggcagcatgttgctgatacgctggcaaatcaggtgtcgtcgatggcgatcagcgctaaccgacatgttgatatttatcagcgcagtgggtatccggtttatcaggataagcttgtggactaccccggcccgctggcgggaatgctttccgttatgcagcagtcgcacggagagtggtttctcttttgttcatgtgatacgcccttcatcccgtcctgtctggttgaacgtctggtgcagcggtgcgagggtgctcccgtcgtctgggtacacgacggcgaacgcgaccatccgacgatcgcattgattaatcgctcgttaatatctgcgctggaagattacctggccgcaggagagcgacgcgtcatggtatttatgcgccagtcaggagggcattccgttgatttcagcgacatgaaatcggcgtttgtgaatgtaaacacgacggaagatttgcagatgatgcaggagaagaaatga

SEQ ID NO: 526056 - DNA, 270 bp, Stenotrophomonas maltophilia
atgaaatgtaaacgtcttaatgaagtcatcgagcttctccagccggcctggcaaaaagagccagagctgaatctgatgcaatttttacagaaactggcgaaagagtcaggttttgatggcgaactggcagacctttctgacgacatcctgatctaccacctcaaaatgcgtgactcggctaaagatgctgttattcctggtattcagaaagattatgaagaggattttaaaaccgcattactgcgcgcccgaggcgtaattaaagagtaa

SEQ ID NO: 526057 - DNA, 987 bp, Stenotrophomonas maltophilia
atgaacgaccaggcttttactttccagacactacacccggataccattatggatgcgctgttcgagcagggtattcgggtggattccgggttaacccctttaaacagctacgaaaaccgtgtctaccaatttcaggacgaagagcgccagcgctttgtcgtaaagttttaccggccacagcgctggtccgcagaacaaattcaggaagagcatcagtttgcccacgatctgctggatgacgatgttcccgttgcggcaccgctcaaatttaataaccaaacgctgctgacccatcagggtttttactacgcggtatttccgagcctgggcggaagacagtttgaggcagataatatcgatcagatggaatgggttgcccgttatctggggcgcattcatcagacgggacgtaaaaaatcgtttgttgcccgaccgacgattggtgttcaggaatatcttattgagccgcgagaggtattcgaaacatcggcgctgatcccaaaggcgcttaaggataatttcctcacggcgaccgataagcttattgatgctgtaaaagcctgctggcgggatgatattaccgctctacgcctgcacggtgactgccacgccgggaatattctctggcgcgacggcccgctatttgtcgatcttgatgacgctcgtatgggacctgcggtgcaggatctgtggatgctgctcaacggtgataaagccgagcagcgcatgcagcttgagaccataattgaagcttatgaagaatttagcccctttaattcagacgaaattgccctgatagagcctttacgtgcgatgcgatttgtttattatctcgcgtggttaatcaggcgttgggaagacccggcttttccccgaaatttcccctggcttaccggggaggattactggcgcaaccagatatccacatttaccgagcaggttaaggttctacaggaaccccctctgcaattaacgccgatgtattaa

SEQ ID NO: 526058 - DNA, 624 bp, Stenotrophomonas maltophilia
atgaaaaaaatttggctggcgctggctggtatgattctggcatttagcgcaactgctgcgcagtttaccgacggcaagcagtacattacgctggacaagcctgtagctggcgagcctcaggtgctggagttcttctccttctactgcccgcactgctacgagtttgagcaggtacttcatgtttctgacaacgtgaagaaaaagctgccggaaggcaccaaaatgacgaaataccacgttgagttccttggcccattgggtaaagatctgactcaggcatgggcggttgcgattgcgctgggtgtggaagataagatcaccgcgcctatgtttgaagccgtacagaaaacccagaccgtacaaactacggcagatatccgtaaagtgtttgttgatgccggtgtgaaaggtgaagactacgacgctgcctggaacagttttgtggtgaaatctctcgtggcacagcaggaaaaagctgccgctgacttccagttgcagggcgtgccggcgatgtatgttaacggtaaataccaggtaaatatgcgtggtatggacaccaccagtatggatatcttcgtacaacagtacgctgataccgtgaaacacctggttgagatgaagtaa

SEQ ID NO: 526059 - DNA, 909 bp, Stenotrophomonas maltophilia
atgtcgaaaatactcgctgcgataaccttattgctaagcgtcattttaactattctggttaccatcgcctgttctgtgccaatcatcgttgccggaataattaagctcctgctgcccgtccctccggtatggcgtgcagtgtctgctttttgtaattttatgatgtactgctggtgtgaagggctggcgatcctgttgtatctgaacccctggttaaagtgggacgttcagggccttgagaagctgaataaaaagaactggtatctgctgatctgcaatcatcacagctgggccgacatcgttgtattgtgcgtgctgtttcgcaaacatattccgatgaacaaatactttctgaaacagcaactggcatgggtgcctttcattggtctggcctgctgggcgctggatatgccgtttatgaaacgctattcacgcagctatctgattcgtcatccggaacgccgcggtatggacgtggaaactacgcgccgttcttgcgagaagtttcgcgcgcatcccaccaccatagttaatttcgtcgaaggttcgcgctttaccgaagagaagcgccagcagactcgctctccgtatcagcacctgttgccgccaaaggcagcgggtatcgcaatggccctcaacgtgctgggtgagcagtttgataaattgttgaacgtaacgctctgctatccggaaaacgacaggacgccgttctacgatatgctcagcggcaagctgacgcgtatcgtagtccgcgttgatctgttgcccatcgatacggaactgcacggtgattacgttaacgataaaaacttcaaacgtcgtttccagctttggctcaatacactctggaaagagaaagacgaacagatagcggagttaaaatcttcatacaaaaacgccggtcaatga

SEQ ID NO: 526060 - DNA, 2793 bp, Stenotrophomonas maltophilia
atggttcagatcccagaaaacccacttatactcgtcgatggctcttcttacctttatcgggcgtatcatgcgtttcctcctctgaccaacagcgcaggggaacctaccggcgcaatgtacggcgtgctgaatatgctgcgcagcctgattctgcactaccacccaacccatgcggcagtggtgtttgatgcgaaggggaaaaccttccgcgatgaattatttgagcattacaaatctcaccgtcctcccatgcctgacgatctgcgtgcgcagattgaaccgctgcacgctatggtcaaagcgatggggctgcctttgctggctgtctcgggcgttgaggctgacgacgttattggcaccctggcgcgcgaagctgaaaaggctggccgcccggtgctgatcagtaccggtgataaagacatggcgcagctggtaacacctgggatcacgctgattaataccatgaccaacaccattcttggcccggaagaagtggttgccaaatatggcgtgccgccagaactcattattgatttcctcgccctgatgggggattcctcggataacatccctggcgtgccgggcgtgggcgaaaaaacagctcaggcgctgctgcaagggttaggtgggttggatacgctgtacgctgagtccgacaaaattgccggacttaccttccgtggtgcaaaaaccatggccggaaagctcgccgataacaaagaggtggcttacctctcttatcagttagccaccatcaaaaccgacgtcgagctggagcttacctgcgaccagcttgaagtgcaggaacccgccgcagaagaactgcttggcctgttcagaaaatacgaatttaaacgctggaccacggatgtcgaagccgggaaatggcttcaggcgaaaggggcaaaagctgcggcgaagccgaaagaaactatcgttgtcgatgccgaagagcaggcagaagaagaagcggcagcgctctcattcgataactatgaaaccatccttgaagagtcgcagctcgtcgcctggattgaaaagctgaaaaaagcaccggtatttgcgttcgataccgaaacggacagtctcgataacatatctgccaatatggtaggtctgtcattcgcgacggagccgggtatggcagcctatgttccggtagcgcatgactatctggatgcgccggagcagatctcgcgcgagcgcgccttagaactgctgaagccgattctggaagacgagaaagcgctgaaggtcgggcaaaacctgaagtacgaccgcggtattctgcaaaactacggcattgaactgcgtggtatcgcttttgacaccatgctggaatcttacattctggacagcgtggcgggccgccatgatatggattccttatccgatcgttggctgaaacacaaaaccatcacctttgaagaaattgccggtaagggcaaaaatcagctgacctttaaccagatcgcgctggaagaagcaggccgctacgccgcggaagacgctgacgtcacgctacagctgcatctcaaaatgtggccgaaattgcagaagcacgaagggccgctgaatgttttccagaacattgagatgccgctggtgcctgtgctgtcccgcattgagcgtaacggcgtcaaaatcgaccaaacggtgctgcataatcactctggcgagctggcgcagcgcctgaccgagcttgaacagaaagcgcatgaacttgctggagaggcatttaacctgtcgtcaccgaaacagctgcaaaccatcctgtttgaaaagcagggtattaaaccgctgaagaaaacgccgggcggcgcgccttcaacctctgaagaggtgctggaagagctggcgctggactatccgctgccaaaagttatcctgcagtaccgtggtctggccaagctgaaatcgacctataccgacaaactgccgttgatgatcaacccgaaaacgggccgcgtacacacctcctatcaccaggctgtagcggcgaccgggcggctttcgtcaaccgatcctaacctgcaaaacattccggtgcgtaatgaagagggccgccgtatacgccaggctttcattgcgccagaggattatctgattgtctccgcagactactcgcaaatcgaactgcgtattatggcgcacctgtcgcgtgacaaaggcctgctgacggcatttgccgaagggaaggatatccaccgggcgacagctgccgaagtgtttggcctgccgctggacagcgtgacaaacgaacagcgtcgtagcgctaaagcgattaactttggccttatttacggcatgagcgcatttggcctttcacgccagctcaacattccgcgtaaagagtcgcagaagtatatggatctctactttgagcgctatccgggcgtgctggaatatatggagcgtacccgcgcgcaggcgaaagagaaaggctacgttgaaacgctggatggccgtcgtctttaccttccggacatcaaatccagcaacgccgcgcgccgtgctggcgctgaacgtgctgctatcaatgccccgatgcagggcactgcggcagacatcatcaaacgcgcgatgatcgccgttgatgcctggctggaaaaagagaaaccgcgcgtgaaaatgatcatgcaggtacacgatgaactggtatttgaagtccataaagacgacctggaagaggtctctcagaagatccatgaactgatggaaaacagcatgaagctggacgttccgttgctggtggaagtgggtagcggcgaaaactgggatcaggctcactaa

SEQ ID NO: 526061 - DNA, 630 bp, Stenotrophomonas maltophilia
gtgactacctggaactaccaacagacgcattttgtcaccagtgcgcccgatattcgccacctgccctcagacacagggattgaagtggcatttgctgggcgctccaatgcgggaaaatccagcgccctgaatacgctgaccaatcagaaaaacctggcgcgtacctcaaaaacacctggccgtactcagctgattaacctgtttgaagtggctgaaggcaaacgcctggtcgatttaccgggctacggttacgcgcaggtaccggaagagatgaagatcaaatggcagcgtgcgctgggtgaatacctggaaaaacgcatgtgtctgaaaggtctggtggtgctgatggatattcgacacccgctaaaagatctcgaccagcagatgattgactgggcggtggcaagcgatattgcggtgctggtgctgctgacaaaagcggataagctggcgagcggcgcgcgcaaggcgcaggtgaacaaggtgcgtgaagcggtgctggcattcaacggtgatgtacaggttgaaccgttctcctcgctgaaaaagcagggtgtggacaaactgcgacagaagctagacagctggtttaacgatctggaaccggcgacagaagcggaagcagagtaa

SEQ ID NO: 526062 - DNA, 228 bp, Stenotrophomonas maltophilia; identical to SEQ ID NO: 119303

SEQ ID NO: 526063 - DNA, 516 bp, Stenotrophomonas maltophilia
atgaaaaaaccgacctccgctgcgggcgcgaaacgccctgcaaaagcacgccgcaaaacgcgcgaagaactgaatcaggaagcgcgcgatcgcaaacgcgataaaaagcatcgtggccatactgcgggtagccgtgctaacggtggcggtgccgcaggcgcttctgcaaaaggcaaacagcagaaagatcctcgtatcggcagtaaaactcccattccactgggcgtgacagacacgccggtcactaagcagcacaaaccaaagagcgagaaacctatgctttcaccgcaggctgagctggatatgctggagaacgatgagcgcctggatgcgctgctggaacgtcttgaagagggtgaaaccctgaccgctgaagagcagtcctgggtagatgccaaactggatcgcattgatgaactgatgcagaagctgggtctgtcctacgatgatgaagaagacgaagaggaagacgaaaagcaggaagatatgatgcgtctgctgaaaggtggaaactaa

SEQ ID NO: 526064 - DNA, 1374 bp, Stenotrophomonas maltophilia
atgtctgtaccatctatcgactgggatttggccctgatccagaaatataactattccgggccgcgttatacctcataccccaccgcgctggagttttctgacgcttacggcgaggcggattttcagcatgctgtggcgcgctatcccgagcgcccgctgtcgctctacgtccatattccgttctgccacaagctctgctacttctgcggctgcaataaaatcgttacccgccagcagcacaaagccgatcaatacctcgatgcgcttgaacaggaaattctgcaccgcgcaccgctgtttaaaggccgtcacgtcagccagcttcactggggcggcggtacgccaacttatctgaacaaagcgcagatcagccgcctgatggcgcttctgcgcggcaatttcagttttaaccacgacgctgaaatttcgatcgaggtcgatccgcgtgaaatcgagctggatgtgctggatcatttacgcgccgaaggcttcaaccgcctgagtatgggcgtacaggacttcaacaaagaagtacagcgcctggtcaaccgcgagcaggatgaagcgtttatctttgccttactcaaccatgcgcgtgaaatcggctttacctcaacgaatatagacctgatttacggcctgccgaagcagacgccggagagcttcgcctacacgcttaaacgcgtggctgagctcaacccggaccgtctgagcgtctttaactatgcgcacctgccgacgctgttcgccgcgcagcgcaaaatcaaagatgcggatctgccttccgcccagcagaagctggacattttgcaggagaccatcgcctcgctgaccgaaaccggctatcagtttatcgggatggatcactttgcccgccctgacgacgaactggcgattgcccagcgcgaaggtgttctccaccgtaacttccagggatacaccacccagggagataccgatctgctcggaatgggtgtctccgctatcagcatgattggcgactgctacgcccagaaccaaaaagagctgaagctgtattaccagcaagttgatgaaacgggcaacgcgctgtggcgcggcattgcgttaacgcgcgacgactgcatccgtcgtgatgtgattaaggcgcttatctgcaacttccgtctcgaattccgcgaggtggagtcgcaatgggatctgcaattcagcgattactttgccgaagacctgaagcttcttgcgccgctggcgaaagacgggctggtggatgtgtcggagagcgcggtggtcgtcacgccgaaggggcgtctgttgattcgtaatatctgcatgtgcttcgatgcctatctgcgccagaaagcacgtttacagcagttctcgcgcgtgatttaa

SEQ ID NO: 526065 - DNA, 1413 bp, Stenotrophomonas maltophilia
atgcaacgagggatagtctgggtagtcgatgacgatagctccatccgttgggtgcttgaacgcgcgctcacgggagcgggattaagctgcacgacgtttgagagcggcagcgaggtgctcgatgcgcttaccaccaaaacgccggacgtgctgctctcggatattcgcatgccgggaatggacggactggcgctcttaaagcagatcaaacagcgccaccccatgcttccggtcatcataatgaccgcccactccgacctggatgccgccgtcagcgcataccagcagggggcgtttgattacctgccaaaaccgtttgatatcgacgaagccgttgcgctggttgagcgcgctatcagccactatcaggagcaacagcagccccgcaatgcccccgactttggaccaacgacggacatcatcggtgaagcgccggccatgcaggacgtgtttcgcatcatcgggcgtctgtcgcgttcgtctatcagcgtcttgattaacggtgaatcagggaccggtaaagagttggtcgcacacgccctgcatcgccacagcccgcgggcgaaagccccctttatcgccctgaacatggcagcgatccctaaggatttaattgagtctgaactcttcggccacgaaaaaggggcatttaccggagccaataccattcgtcagggacgctttgaacaggctgacggcggcacgcttttcctggatgaaatcggcgatatgccgctggatgtacagacccgactgttgcgcgtgctggcagatggacagttttaccgcgtgggcgggtatgcgccggtgaaggtggacgtacgcattatcgccgcgacgcaccagaacctggagctgcgcgtacaggaggggaaattccgtgaggatttattccatcgtctgaacgtgatccgcgtccacctgccgccgctgcgcgagcgtcgggaagatatcccgcgtctggcgcgccatttcctgcaggtggcggcccgcgagctgggcgtggaagccaagcagcttcatccggaaacggatgccgccctcacccgtctggcgtggccgggcaacgtgcgtcagctggaaaacacctgtcgctggctgacggtgatggccgccggccaggaagtgctgattcaggatttaccggcagaactgtttgaagccaccgtgcccgagagcaccgcaggacatacgttgccggacagctgggcaacgctgctggcgcagtgggcagatcgcgcgctgcgttccggtcatcaaaacttgctctctgaagcacagcctgaaatggagcgcacgctgttgaccaccgcgcttcgtcatacccagggccacaaacaggaagcggctcgcctgttgggatggggtcgaaacaccctgacgcgcaagctgaaagagctgggaatggagtga

SEQ ID NO: 526066 - DNA, 1050 bp, Stenotrophomonas maltophilia
atggcaactggcacgctgcccgatgctgggcagatcctcaattctttaattaacagtattttgctggtcgacgacgagctggcggtgcattacgccaacccggcggcgcagcagctgctcgcccaaagcgcccgtaaactgtttggcacgccgctgccagaactgctgagctatttctcgctgaatattggcctgatgcaggagagtttgcaggcgggtcagggcttcaccgataacgaagtgacgctggtgattgacggacgctcgcatattttgtccctcaccgcacagcgcctgccagatggcatgattctgctggaaatggcgccgatggataaccagcgtcgtctcagccaggagcagcttcagcatgcgcagcagattgcggcgcgcgacctggtgcgcgggctggcccatgagatcaaaaacccgctgggcggcttacgcggtgcggcacagcttctgaccaaagcgctgcctgaccctgccctggcggagtataccaacgtcattattgagcaggcggaccgtctgcgtaatctggtcgatcgcctgctcgggccgcagcagccagggatgcacgtttcagaaagcattcacaaggtcgcggagcgggtggtgaaactcgtctcgatggagctgccggataacgtcacgctggtgcgtgactatgacccaagcctgccggagctggcgcacgatccggaccagattgaacaggtgctgttgaacattgtgcgtaacgcgttgcaggcgctgggcccggaggggggcgaaattattctgcgtacccgcaccgcgttccagctgacgctgcacggtgtgcgttatcgtctggcggcacgtattgatgtggaagataacgggccggggatcccgccgcatctccaggacaccctgttctacccgatggtcagcggtcgcgaaggcggcaccgggctggggttatccatagcccgtaatttgattgatcaacactccggcaaaattgaatttaccagttggccgggacataccgagttttcggttttcctgccgattaaaaaataa

SEQ ID NO: 526067 - DNA, 1425 bp, Stenotrophomonas maltophilia
  misc_feature (131)..(140): n is a, c, g, or t
atgtccgctgaacacgttttgacgatgctgaacgaacatgaagtgaagtttgttgatctgcgcttcaccgataccaaaggtaaagaacagcacgtcacgatccctgctcatcaggtgaacgccgaattctnnnnnnnnnnattctttgaagaaggcaaaatgtttgacggctcctccattggcggctggaaaggcattaacgaatccgacatggttctgatgccagatgcaaccactgcgctcattgacccgttctacgaagaacctacgctgatcatccgctgcgatatcctggaacctggcacgctgcaaggctatgaccgtgacccacgctccatcgcaaaacgcgctgaagagtacctgcgttctaccggtattgcagacaccgttctgttcgggccagagccagagttcttcctgttcgacgacatccgttttggtgcttccatttctggttcccacgtcgctatcgatgacatcgaaggcgcatggaactcttccaccaagtatgaaggtggtaacaaaggtcaccgtccgggcgtgaaaggcggttacttcccggttcctccggtcgattcttcacaggacatccgttctaccatgtgtctgatcatggaagagatgggcctggttgttgaagcgcaccaccatgaagtggcaacggctggccagaacgaaatcgccacccgcttcaacaccatgaccaaaaaagcggacgaaattcagatctacaaatacgttgtgcacaacgttgcgcaccgtttcggtaaaaccgcgaccttcatgccaaaaccaatgtttggcgacaacggttccggcatgcactgccacatgtccctgtccaggaacggtactaacctgttctctggcgacaagtacgcgggtctgtccgagcaggcgctgcactacatcggtggtgttatcaaacacgctaaagcgatcaacgccctggcgaacccaaccactaactcctacaagcgtctggtccctggctacgaagcaccggtaatgctggcgtactctgcccgtaaccgttctgcgtctatccgtatccctgtggtggcgtctccgaaagcgcgtcgtatcgaagtgcgcttcccggacccggcggctaacccatacctttgcttcgcagcactgctgatggccggtctggacggtatcaagaacaagatccacccgggcgaagccatggacaaaaacctgtacgacctgccgccagaagaagcgaaagagatcccacaggttgccggctctctggaagaagccctccaggcgctggacgcagaccgcgagttcctgaccgctggcggcgtgttcaccgatgaagctatcgacgcttacatcgcgctgcgtaccgaagaaaatgaccgcgttcgcatgacgccgcacccggttgagttcgaactgtactacagcgtttaa

SEQ ID NO: 526068 - DNA, 1506 bp, Stenotrophomonas maltophilia
gtgaataccgatgatctggccttcgtaaacttcagcaccgtgacccaggaacagcttaccgcgatcctgcagaccgaacagcgcaaacgcaaccgctttaccctgaccgttggagatcagtacgccgttgttacgctggcccacttcgccaggacggatgtcgtcatagtggctgaaggtggagtacagcagacccgtaccggaggtcatggtcatgaactcagaacggaagccgatcaggccacggcttgggatcacgtagtcgagacgtacgcggcctttgccatctggattcatgtttttcaggtcgcctttacgctcacccagtgcctgcatgacagaaccctggtgctgctcttcaacgtccagcgttacgttttcgaacggctcttgtttacggccatcgatttcgcggaagataactttcggacgggataccgccatctcgaaaccttcacgacgcatgttctcaatcagaacagacaggtgcagctcaccacgaccggaaacgcggaatgcatcagcgtcttcggtttcttcaacgcgcagcgcaacgttatgcaccagctctttgttcaggcggtcaaggatctgacgagaggtaacgaacttaccttctttaccacagaacggagaggtgttgacgttgaagaacatggatacggttggttcatcaacggacagggctggcagcgcttcgacgttctgcggatcgcagatggtgtcggagatgttcagttcacccagaccggtaatagcgatgatgtcgcccgcttcagcgatgtcgctctcgatacgctcaagacccaggtgagtcagaactttaccgactttaccgttacgggttttgccttcgctatcgatgatagtgacctgctggttaggcttcactttaccgcgcttgatacgaccaatgccgattacgccaacatagttgttgtagtcgagctgggagatctgcatttgcagggtgccttccaggtcaacgtttggcgcaggaacgcggtcaacaatcgtctggtacagcggagtcatgtcttccgccatgtcttcgtgatccagaccggcgataccgttcagcgcagacgcataaacgatagggaagtccagctgttcgtcagtcgcgtcgaggttaacgaacaggtcgaagacctggtcaacaacccagtcaggacgcgcgccaggacggtcaaccttgttgatcacaacgataggtttcaggccgtgggcaaatgcttttttggtcacgaagcgcgtttgcggcatagggccatcaaatgcgtcaaccaccagcagcacggaatccaccatggacatcacgcgctcaacttcaccaccgaagtcggcgtgccctggggtatcaacgatgttgatacggtagtcattccatttgatagcggtgtttttggcgaggatggtaatcccacgctctttctccaaatcgttggagtccatcacacgctcttgagtttcggcacgagcatcaaacgtaccggactgctgtag

SEQ ID NO: 526069 - DNA, 1074 bp, Stenotrophomonas maltophilia
atgaatcagatgcaacagacgcttgcgaatatcgataagctccaatctaagggaattatctctcttgaacaagcaacagcaagacgtaatcaactaatggcaaattcttctaaagaatttaaagaccagttgactatgaatcctgatgatatcggtgaaattgcacaaggcgttgaacaagcatatcagatgcagttagaacagctttatgcaaaacagaaacagggtcttgtaagcactcaagaatataacagtcagttagaagcgattgaacaggatcatcaatcgaaaatgtctgtaattcaggatatcgatgcaaactcagttaataccaagaatcttgatgctttaggttttgcgactgatgaacagatgatggctctaagagaacagcaattggaagaacagattgcacgttacaaagaacagaaccaacagatgtacgatgcaggattaatcagtcatgaagaatttttgaaacagaaagaaactcttgataaggcttattcagttaaatcaaaagctatcgctctggcagaaattcaaaccaaaatgcagatgtatgatggattcgcacaaggtatgtcaggtgttatcagtggcatcgctggtgaaaatagtaaagctgctcaagctgcattcgcagtagctaaaggaacgtctattgcaaccggtatgttaaacgcgtatgagtccgcgactaccgcaatggctaagtatccaggacctcttggttacgctctggctgcttcgtcttatgctcaagttatcggacaagtcatgcagatgaaatctgttggattaacaggtatggctcacgatggtctgagtgaagttcctcgcgaaggaacatggctgcttgatggtggtgagcgtgttgtggatcagagaaccaacggtgatctaaaagatttcttggataataacaaggatacgggaggtcaacagacaattgacgctagtattcatatcaatggcaacgttaccgatcagaaatggttcgctgaacaattgaagaaacagcaaaaaacaatttcgtctattgttcaagaccagaacagacgcaaactgtga

SEQ ID NO: 526070 - DNA, 921 bp, Stenotrophomonas maltophilia
atgaacatgaaattaacaacgctttttgcggcggcgttagccgtagtaggtttttgtaagaccgcgtctgcggtgacgtatcccctgccgacagacggaagccgtctggtgggtgaaaaccaggtggtgacggttccggaaggtaacactcagccgctggaatactttgcggcgcagtatcagctcggcctgtctaacatgctggaagcgaacccgggcgttgacccgtatctgccgaaagcgggtaccgtactcaacattccacagcagttgatcctgccggataccgtgcacgaaggtatcgtgattaacagcgccgaaatgcgtctgtattactacccgaaaggcaccaacaccgtgatcgtgctgcctatcggtatcggtcagctgggtaaagacaccccgctgaactggaccaccaaagtggagcgtaagaaagcgggcccaacctggacgccgaccgccaaaatgcacgctgagtacattgctgccggtgaaccgctaccggccgttgtgcctgctggccctgataacccgatgggtctgtacgcgctgtacattggtcgtctgtatgccatccacggtactaacgccaacttcggtatcggcctgcgcgtaagccacggctgcgtacgtctgcgtaatgaagacatcaaattcctgttcgataacgtgccggtcggtacgcgcgtgcagttcattaacgaaccggtgaaagcgacgtcagagccggacggcagccgttacattgaagtgcataacccgctgtccaccagcgaagatcagatcaacaacaacgaaatcgtaccgattaagctgaccagcgcggtgcagtccgttacctctcaggcggatgttgacacgaccatcgttgaccaggcgattcagaaccgttccggtatgccggtgcgtttgaactaa

SEQ ID NO: 526071 - DNA, 717 bp, Stenotrophomonas maltophilia
atggcggcgaagtacatcaccatagcgcgggaaattaagaaacgcattattacccagcagtacgccgccaatgaaccgctgccggaccagttcgcgctggcggcggaattcagcaccagccggatgaccattcagcaggcgatgcgtcagctgatcgtagaagggctggtctatacccggcagggacagggcacgttcatccgcaaaaatttcctccagctttcccagtgggatctctccggcagcgactactttggggcgaccaaaacctgggaacatttaggcacggtgtcgagccaggtggtgcacttcgaacttcgcttcccgaacgagaaagagcaggcctcgctgatgataaatccggatacgccgatctatgacttcatccgtctgcgtttactcaacggtgagccgatgtccctggacgccacggtgatgccgctcaatctggtgcccggcctgaacaaaacccatcttgaaagttcggtattccggtatgtgcaggagacgctggggctgaagatcatgggatcgtatcgtgtggtgcgggcgctgaagcccagtgcgctggatatgcagcatctggtctgtgagccaaccgacccggtgctggaggtcgagcaggtgatctatctggaagatggtacgccgctggagtacgcccattgtcactatcgctatgatcatggcggcatcgtaattgtgaataacggataa

SEQ ID NO: 526072 - DNA, 1323 bp, Stenotrophomonas maltophilia
atgtctgaaacaaaaataacaccgcacatgcagtcttttgtcgataaatttgttgagttctcggcgcgcctggcaaaccaggtacacctgcgatccctgcgggacgctttcgccacggtgatgccgattttcatcctcgccggtctggcggtgctggtgaacaacgtcgtgtttccatgggtgctggaaggcgacacgctcacgcagtttaaggtgtggggcgaggctattatcaacggcacgctgaacatcgccgcgctgctgctggcaccgatgatcgcctggtcgctggcgcgcaacaaagatttcgacaatccggtctcggcagtggttatcgccgtcagcagcttcatcatcatgatgccgatgcgcttacagattacgcctgtcggcagcgacgccccggtgaacgtcacccaggtgctgacgttcgccaatatcggctccaccgggatcttcgccggggtgctgattgggctgctctcaaccgagctgtttatcgccatttcacggctgaaggcgctgcacatttcgctgggggagaacgtgcctccggcggtgagcaaatcctttaccgcgctgatcccgacaatcctcacgctctccctgtttgcggtgctggcggccatactggcgaacgtgctgcatacggatctgatccatctcattacgacattcattcagcagccgctgcggctgatcaacaccagtctgcccgggacgatcttcatttacagcttcggtaacttcctgttcacgctcggtattcatcagtcggtagtcaacagcgtggtgctggaaccgttcctcctgatcaacactaacgagaacatgctggcctttgccaacggccagccgatcccacacatcatcaacaacatctttgtgccgacctttggcatggtgggcgggacgggcagcactatctcattgctgatcgctatcttcatcttctcaagacagaaatcagcgaagcaggtggcgcgtctgtcactggcgccgggtctgttcaacatcaacgagccggtgattttcggcctgccgattgtctttaacctgccgctgatgatcccgtttgtgctgctgcccgccatcgggatttactttgcgtggctctgtaccacgctgggtctgatgtcgcgctgcgtggtgatgatcccgtggaccacgccgccgatcctcagcgcctggctggcgacggcgggggactggcgggcggtggtggtgcagttggcaatcatcgtatttggtgtattcttctacctgcctttcctcaaggtggccgagcgagtggccttgaaaaacagcgggacagaaaactaa

SEQ ID NO: 526073 - DNA, 1377 bp, Stenotrophomonas maltophilia
atgaacaaatcactgccagccaactttttatggggcaactcggtatccagcatgcagacggaaggggcatggaatgagggcgggaaggggatgtcggtatatgacattcgggaagcaggagaaaacatctccgactggaaagtggcgaccgactcctaccaccgctaccgggaagatttcgatctgatgcaggatctgggcatgaactgctaccgcttccagatctcctggagccgcgtctgcccgcagggtgacggcgagttcaacgccgaaggtatcgcgttttacgaccgctttattaacgatctgctcgcccgcggtattgagccgatggtctgcctctaccacttcgatatgccgctggcgctggcgcaggagtacaacggcttcaacgaacgccgggtgatggaggcctttatccgctacggcaagaagatgatcgactgctacggcgatcgcgtgaagtactggctgaccttcaacgagcagaacattttccatatgccggaagcttttcgcatttccggttacatgaaaggtgaacaaaccctgcgcgagctgtatgagcttcagcaccatgcgatggtggcgcacatgactctgaccgaatacctgcaccagactaagccaggcaagctgatgggcggcatgctggcgcaccagttgatttatccagccacctgcaaaccgcgcgatatcttctgcgcccagcagtacgacgaattcctcaaccagaacctgctgcgcgtcttcgcgggacagggctacagcccggcggtgatggcggtggtggagcaggagggcttcggtgatatctaccgcgcagacgatctcgcgctgtttgcgcgcacgaagaacgactttatggccttcagctattacgccagcaaaacgctggacagcgatgccatcccggaaggcacgccggtgaaccattacctgctgcatggcgagaaaaataacccgtacctgaaagccaccgagtggaactggcagatcgacccgctgggctttcgcaccatcatcacccgctatgccaacgactggcggatgccggtattcccgattgaaaacggcatcggcgtgatcgagtcctgggacggggtaaacccgatcgaggacacctaccgcatcgactaccaccgggcgcacatcgaggcgatgaaagcggcaatattcgaggacggggcagaggtaatgggctacctcggctggggcttaatcgacattctcagctcgcagggtgacatgcgtaagcgctacggcgtggtctacgtcaaccgtgaaaatcacgacctgaaagaccttaagcgcgtgccgaagaagagctacgcgtggttaaaacaggttatccatactaacggatgcgagatgtaa

SEQ ID NO: 526074 - DNA, 1041 bp, Stenotrophomonas maltophilia
atgcgttatcaaaaactgggcaataccggactgtttgtttctgaactctgcctcggcaccatgaccttcggcggcgagggcggcatgtggggcaagattggccagctaaggcaaaacgaagccgagcagctggtgggccgcgcgctggacgcgggcatcaactttatcgacactgccgacgtctattcggaaggacgctcggaggagatcctcgggcaggcgctgaaaaacctgaacgttccacgtgaaaacgtggtggtcgccacaaaggtgtttggtgaaacgggcacggcgggagtgaactcacgcggcggctcgcgctatcacattatcgacagcgtaaaggagagcctgcgccgcctgcagctcgatcatatcgatctctatcagctgcacggtttcgaccccgcgacccccattgaggagacgctttacgcactggataaccttgtacagcacggtcacgtgcgatacatcggcgtctcgaactggactgcgtggcagattgccaaagcgctcggtatttctgaacgtcttgggctggcgcgtttcgcatcgttgcaggcgtattacaccattgccggacgtgacctggagcgcgagctggtgccgatgatgcagagcgaaggcgtcggattgatggtctggagcccgctggcgggcggcctgctgagcggaaaatacggtcgtgacgggcagagcgaaaccggaggccgccgtctggaatttgacttcccgccggtgaataaagatcgcgccttcgactgcgtggacgtaatgcgcgtcattgccgagcgtaggggcgtctccgtggcgcaaatcgcgctggcatggctgctgcatcaaaaagcggtgaccagcgtcattattggtgcgaaacgcgtcgatcagctggacgataatattgccgccaccgggatccgcttaagcgaagacgagcttaaacagcttgatgccgtcagtgcgctgccgcgcgaatatccaggctggatgctggagcggcagggggaataccgtcgtagtcagctcgcgcagcagtaa

SEQ ID NO: 526075 - DNA, 1524 bp, Stenotrophomonas maltophilia
atgatacacagacgtttacacctcctgatgataatgatgctgctggtgggctgcgccgtcgggccggactaccaacagcctgcaccgcccgccaccacgcactggaacgataagggcgacggcgcggtgaaatcgcaaacgtcctccgccgccaccaacccgcgctggtggaaaaccttcggctcgccgcagctcgacagcctgattgaacgcgccatcgccggaaatctgacgctacagcaaacggtattgcgcattgccggcgcgcgcgaacagattaaccaggccggcggggcatttttcccgtcggtgaatggcaatgtgcaggcgacgcgccagcagcttgggctggaaggggagctgaaatcccacggcgtgtatgaccagttgaataatgtcgatccgcagctgcgaagcgcgttaggcccgctgacgcagccgattaacctctatcagggcagcttcgacgctcagtgggaaatcgacctgtggggcaaggtgcgccgtcaggtagaagcggccgaggcgcagcagcgggcggcgatcgagcagcgtaacgatgcgctggtctcgctggaagccgaagtggcgcgggcgtggctacagctgcgaggggcgcagagcatcattgccacgcttaatacgcaaattgaaagcgcgcagcagacgctggatctgaccgaaagccgtcagcggggcgggctgtcaccgcagatggacgtagaaaacgcccgggcgcagttgggcaatcttgaagcccaattgccgcagtatcaggcgcaggaacgccaggcgatgaacgggctggccatcctgctcggcaaaccgccgggggcgctggatgccgaattacaatccgtgcagccgatgccagcgttgccggatattgtgcaaaccggcattccgtcaacgctggcgcgtcgtcgcccggacgtgcgcgaagctgaggcgaacctccatgccgccacggcgcaaattggcgtttcggtagccgaactgttcccaagcttcaccctctccgggcagtttggcctgcgtaacagcgaatccggctggctgaccgactggagcagccacttttacagcttcggtccgcaggtctccatccccatcttccagggcggtcggctggtctccagcgtcaaggtggcccgcgcacagcaaggggcggcggtgctggactatcgtcagacggtgctgacggcgctcggcgatgttgaaaacgcgctggtgagctatcgcactgaccagcagcgtgaggcgggcctggcgaaaaccatcgacgcgctgcaaaacgcttttgatctcgccagcgacagctaccgacaggggatcgccagttttattgacgtgctggacgcccagcgtcagctcgctcaggccgaacagcagcgggcgcaggcgcaggtgcagagcgcgcttgacctggtggcgctctacaaagccctcggcggcggctgggagccgtatcagcaggttcagctgccagactacagcgtctttggcgatgccccgcgcggatag

SEQ ID NO: 526076 - DNA, 1572 bp, Stenotrophomonas maltophilia
atgacggacagcagccacgaaaactggaagcccgccagtaacccgtgggcggtggcgattgtggtcaccctggcggtgtttatggaaattctggacaccaccatcgtcaacgtggcgctgccccacgtcgcggggtcgctctcggccagctatgacgaatccacctgggtgctcaccagctacctggtggcgaacggcatcgtgctgccgatctcggccttcctgagccggctgtttggccgcaagcagttcttcctgatctgcattgtgatgttcaccatctgctcgttcctgtgcggcatcgccaccgagctttggcaaatcatcctgttccgtgtgatgcagggcttttttggcggcgggttgcagcccacgcagcaatcggtgctgctcgattacttcaagccggaggacaggggcaaagcctttggcctttcatccattgccattatcgtcgcgccggtacttggcccgacgctgggaggctggatcaccgataactactcctggcgctgggtgttctttatcaatattccggtagggattgtgacggtgctggccatctatcagctgctggaagatccgccgtgggagaaaaagtcggaagagaagctcaccgtcgactggacggggatcggcctgatcgctctcggacttggctgtttgcaggtgatgctcgaccggggcgaagatgatgactggttctattcgaactttatccgcaccttcgcggtactgacgctggtcggcattatcggcgcgatctactggctgatgtatgccaaaaagccggtggtggatctgcactgtatgaaggaccgcaactttgcgatctccagcctgctgatggcggggatggcgatgatcctgtacggcagttcggtggttattccgcaactggcgcagcaggatttgggctataccgccacctggtccgggctggtgctctcgcccggcgcggtgctgattgtgctgactattccgctggtactgaagctgatgccggtggtgcagacgcgctggatcatcgccttcggctttacctgcctggcggtgtccttcttctggtcccggacgctgacgccggatatcgatttcgaaacgctggtgctgttccgcagcgcccagtcgattggactcgggttcctgtttgtgcccctcaccaccatcgcctttatctcgatcccaaggcggcttaacgccgacgcggcggcgctgtttaccatgttccgcaacgtggctggctcgattgggatttcgctctcgacggcggcgatcaccgagcgctcacaggcgcacagcgcgcatctggcttaccacgcttcgccgtttaatgagcagttccagctggcgatacgcgaaagcgcccaggcgatccagaacttcaccactcaggtgggcgatccgaccggcattgccaccgggcggatgtaccagaccatgatcgagcagtcgcgctttctggcctacatcgacgtcttcaccattctgagcgcggtggccttcttacttattccgttttgtttgttgctctcgccggttaagagcgaggggagtgcaggagcacactga

SEQ ID NO: 526077 - DNA, 1095 bp, Stenotrophomonas maltophilia
atggcagaagatcaaaatccacctgctgacgagcaggatcaaaacaataacgagcgcaagcgcccgggcaaaaaaccgttaattatccttggcatcgtggtcatcgtgatggtgatcgtggcgctggtctggtggtttttaacccgtaacgaagagaccaccgacgacgccttcaccgacggcgacgtagtgaccattgccccaaaaacggcaggctacgttaccgaacttcgcgtgcgggataaccagcgtgtaaagaaaggggatgtgctggtggtgatcgatccgcgtgataccaccgcccagcgcgatcaggctcaggcccagcttgggctggcggttgcgcagttgcatcaggcacaggcgcagctggcgctctcgaaggtgcaatatcccgcccagcgcgatgaagccaaagcccaggtactgaaagcccaggcggatatgaccaacgctcaggcggagtaccgccgtcagcgcggcgttgacccccgcgcgaccacacaacaaagcatcgatgccgcgaacgctcaactgcggagtgcccaggcgggtctggccagcgcgcaggcgcagctggaggtggcggagcaagtccagctgcaaatccgccagcaggagactaacgtcgaagcccgcgaacggcaggtcgatcaggccagagcgcagttggaaaccgccaacctgaacctctcttataccgaagtccgcgccccgttcgacggttttgtcaccaaacgcaacgtccagcctggtacgctggtgcaggcaggcacggcactgttctcgctggtttccccgaacgtgtgggtggtggcgaacttcaaggagtcgcagcttgaacgtatgaagccgggcgacaaagtgaccgtgtccgtcgatgcctggccggatatggcgctcgaaggccatattgacagcatccagcagggcagcggctcgcgcttctccgccttcccgtcggaaaacgccaccggtaactttgtgaagatcgttcagcgcgtgccggtgaaaatcgtcattgataaggggctggatccgaacaaaccgctgccgctggggctgtcggttgaaccgaaggtcaccgtggaatga

SEQ ID NO: 526078 - DNA, 1110 bp, Stenotrophomonas maltophilia
atgaacctccccggcttgcaggccctgaaacgcgatcgttttttccatcttttacttatcactggcgttgggctcagcgtctttgtgcccttcacgccgcacacctggccggcggccatagactggcgcaccattattaccctgagcggtttgatgatgctcaccaaaggcgtagagctgagcggctattttgacgtgctggggcgcaaaatggtgcgccgcttcgccaccgagcgcaaactggctctgttcatggtcttttcggcggcgctgctgtcgacgttcctcactaatgacgtagcgctgtttatcgtggtgccgcttacgctcacgctgcgtaagctgtgcgaaataccggttacccgtctgattatctttgaagcgctggccgtcaatgcaggctcgctgctcacgccgatcggtaacccgcagaacattctgctgtggggacgctccggcctgtcgtttaccgcatttacctggcagatggcgccgctggcgctggcgatcgtggcgacgctgctggtggtgggctggtttgctttcccgaataaatcgttgcagtaccacagcggtaccaccggcccccagtggcagccgcgtctcgtctggagctgcctgggactgtatatcgttttcattaccgcgctggagttaaaccaggcgctggcgggcgcgctgctggtggcgtgtggcttcctgttcctcgcccggcgggtgctggtgagcgttgactggacgctgctgctggtgtttatggcgatgtttattgacgtccatctactgatccagctcccggtattgcagaccgttctccatagcgtcagcggtctgtcgcaaccgggactatggctgacggcgattggtctctcgcaggtgatcagtaacgtgccgtccaccattttgctgcttaactatgttcccccaacggtactgctggcgtgggcggtcaacgtcggcggctttgggctgctgcccggctcgctggccaacctcatcgccctgcggatggccaacgatcgccgcatctggtggcgcttccatttatggtcaatcccgatgctgctctggtctgcggcggtcggtttcggactattccttctcatatag

SEQ ID NO: 526079 - DNA, 474 bp, Stenotrophomonas maltophilia
atgaaccgtcgcgcaggtaagccaacaacaaaaaaaacgacgcaactggtgaacgttgaagaacatgtggaaggcttccgccaggtgcgtgaggcgcaccgccgggagctgattgatgattatgtcgaactgatctccgatctgattcgtgaagttggagaagcgcgccaggtggatatggccgcacgcctgggggtgtcgcagccaaccgttgccaaaatgttaaaacgtctggcgtcggtcgggctgatcgagatgatcccctggcgcggggtgtttctcaccgctgaaggcgaaaagctggcgcaggagagccgcgagcgccatcagatcgtcgagaattttttactggtgctgggcgtcagcccggaaattgcccgtcgggatgccgaaggtatggaacaccacgtcagcgaagagacgctggtgaagttccgcgaatttacgctcaaatatggccccgccgctgaatga

SEQ ID NO: 526080 - DNA, 129 bp, Stenotrophomonas maltophilia
atgaatgaattcaagaggtgtatgaacgtgtttacccactctccttttaaagtgcgtctaatgctgttgaacatgctgtgcgatatgtttaacgccaaaccgcatcaggacgacaaatcttctcactaa

SEQ ID NO: 526081 - DNA, 1407 bp, Stenotrophomonas maltophilia
atgcagaaagtgcttatcgggatctgttctctggtggctgccgcctatttcccgttcggccaggcctatggcgcgccgaactttaataccctgctggcgctccactccaccaatatggaagagtctacagagatcctgacgatcttcccgtggtacaactacgtggttggccttttcatttttgctctcggcgtgattgcggttcgccgtaagcaggtcgggaaaaaaacatggggtaaaattgaaagcctgtgcctggcctttagcgtagtgacgctttttgttgcgccggtacaaaatctggcctggggcggcgtgtttaagcttaaagataccgggtatccggtgtttcgcttcgttaaagacgtggtagtgaataacgaggaagtgctcgacgagcaggcgcgtatggccgagctttccaccatgaaagatacctggaacgtgctggtggtgaaaccgaagtatcacacctatgtggtggtgatcggtgaaagcgcgcgtcgcgatgcgctcggcgcgtttggcggtcactgggataacacgccgtttgccagctccgtcaacggtacgctgtttaccgattacgtggcggccagcggttcgacgcagaaatctctcggtctgacgctcaaccgtgtcgtggatggaaaaccgcagtttcaggataattttgtcaccctggccaaccgggcaggttttcagacgtggtggttctccaaccaggggcagatcggcgagtatgataccgccattgccagcatcgcgaagcgtgccgacgaggtacagttcctgaaaagcggtgatttcgaagccgataaaaacacaaaagatgaagcgttgctaaaaatgaccgcgcaggtctttgccactcagcgcacccagccgcagctgatcgtcctgcacctgatggggtcacacccgcaggcatgcgatcgtaccgggggaaaatatgcggagtttgtgcaatccaaagagacctcgtgttatctgtacaccatgacgcaaaccgacgatctgctcagcaagctgtacgcgcagctgcgcaacagcggcgatagcttctcgatggtctatttctctgaccacggtctggcgtttaaggagcgcggtaaagaagtgcagtatctggctcacgatgacaagtttcagcagaacttccaggtacagtttatggtgctgtcgagtgatgataaaacgcatcgcatcatcaaagcgcgccgttccgcgaacgatttcctgaaattcttctcacagtggacggggattaaggcgaaagagataaaaaatgattacccgtttatctccgggaagaagggcccaccagtttacattaccaacttcaggttacagaaagttgactataaccatctggggacggatattttcgatattaagagtaagtga

SEQ ID NO: 526082 - DNA, 519 bp, Stenotrophomonas maltophilia
atgaaaaaaattgcatgtctttcagcactggcagctgttctggctgtttccgcaggtaccgctgtagcggcaacttcaactgtaactggtggttacgctcagagcgatatgcagggcgtgatgaacaaaaccaacggtttcaacctgaagtaccgttacgagcaagacaacaacccgctgggtgtgatcggttctttcacttacaccgagaaagatcgtactgaaaatggctcttacaataaaggtcagtactacggcatcaccgcgggtcctgcttaccgcctgaatgactgggcaagcatctacggtgttgtaggtgttggctacggtaaattccagcagaccgaaaaccagggtctgaaccgtactgcaagcaacagcgactacggtttctcctatggcgcaggtatgcagttcaacccaatcgaaaacgttgctctggacttctcctatgagcagagccgtatccgcaacgttgacgttggcacctggatcgcgggcgtaggttaccgcttctaa

SEQ ID NO: 526083 - DNA, 888 bp, Stenotrophomonas maltophilia
atgccaggtttacctcgtaaatcgtcggtctggatgccggtggcagtcatacttatcgcgatgatgtccatacaaagcggcgcgtcgctggcaaaatcgctgtttccgctgattggtgcgcccggcgtcacggcgctgcgtatcgcattaggcaccctgatcctcgtggttgtctttaaaccctggcggctacggtttaaaaaggagcagcgactgcctctgcttttttatgggctggcgctgggagggatgaactacatgttctacctctctattcagactatcccgctggggatcgcggtcgcgcttgaatttaccggcccgctggcggttgccctcttttcttctcgtcgcccggtagactttatctgggtcatactggccgtgctggggctatggttccttctgccgctcggccaaagcgtttcacaaatcgatttgacaggggccgctctggcgctgggcgcaggggcgtgctgggcggtgtatattctcactggtcagcgtgcgggcgaagagcacggccccgcgacggtcgccttaggctcgctgattgccgcggttatctttgtcccgatcggcatggcacaagcaacggactcaatatggcagtggtcaatcctgccggttgggctggcggtcgccattctttccacggcgctgccctactctctggagatgatcgccctgacgcgtctgcctacgcgtatttttggtacgctcatgagcatggagcccgcgctggctgccatctctggaatgatgttcctcggcgaaaccctgacactggtgcagacgctggcgctctgttccattatcgcggcgtcaatgggctctacattgaccatgcgcccggaaccaaaagtacataagattgacctcaactag

SEQ ID NO: 526084 - DNA, 162 bp, Stenotrophomonas maltophilia
atggctgcaaccaagcctgcatttaaccctccgggtaaaaaaggtgacatgattttcagcgcgctggtgaaactggctgcgctgattgtgctattgctgctgggcggcattatcgctgtctcttatacacatctgacgctgccgacgactccttacgtgtag

SEQ ID NO: 526085 - DNA, 1041 bp, Stenotrophomonas maltophilia
atgaaagttatgcgtaccactgtcgcaactgttgtcgccgcgaccttatctctgagcgctttctctgctttcgcagcagcaagcctgactggcgctggtgcaaccttccctgcgccggtgtatgccaaatgggcggatacctaccagaaagagaccggtaacaaggtcaactatcagggtatcggctcctccggtggcgtaaaacaaattaccgcgaataccgttgatttcggcgcatccgacgctccgctgtctgatgagaaactgaatcaggaaggcctgttccagttcccgaccgtgatcggcggcgttgtgctggctgttaacatccctggcctgaaatcaggcgagctggtgctggacggcaaaaccctgggtgatatctacctgggcaaaatcaaaaaatgggatgacgaagccatcaccaaactgaacccgggcgttaagctgccttcgcagaatatcgcggtggttcgtcgtgctgacggctctggtacctctttcgtgttcaccagctacctggcgaaagtgaacgaagagtggaaatctaaagtcggttccggctctaccgttaactggccaaccggtctgggcggtaaaggcaacgacggtatcgctgccttcgtacagcgtctgcctggctctatcggctacgtagagtacgcttacgcgaaacagaacaacctggcttacaccaaactggtttctgctgacggcaaaccggttagcccgaccgaagagaacttcgctaacgccgcaaaaggcgctgactggagcaaatccttcgctcaggacctgaccaaccagaaaggcgacgatgcatggcctatcacgtctaccaccttcattctggtccacaaagagcagaagaagcctgagcagggtgctgaagtgctgaagttcttcgactgggcatacaaaaacggcggcaaacaggcgaatgacctggattacgccagcctgccagacagcgtggttgagcagatccgtgctgcatggaaaaccaacgtgaaagacagcagcggtaaagcgctgtactaa

SEQ ID NO: 526086 - DNA, 1830 bp, Stenotrophomonas maltophilia
atgtgtggaattgttggcgcagttgcgcagcgtgatattgctgaaatccttctcgaaggtttacgtcgtctggaataccgtggttatgactcagccggtctggctgtcgtcgatgcagaaggtcatatgacccgtctgcgtcgtctcggtaaagtgcagatgctggcccaggcggcggaggaacatccgctgcacggtggcaccggtattgcgcatacccgctgggcgactcacggtgagccatctgaaggcaacgcacacccgcatgtgtctgaacacattgtggtggtgcataacggcattatcgaaaaccacgaaccgctgcgtgaagaactgaaagcgcgcggctataccttcgtctctgaaaccgacaccgaagtaattgctcacctggtgcactgggagctggcacagggcggtacactgcgtgatgcggtgctgcgcgctatccctcagctgcgtggtgcttacggtacggtgatcatggattcccgtgacccgtccacgctgctggccgcgcgttccggtagcccgatggtgattggtctgggcatgggtgaaaactttatcgcttccgaccagctggcgctgctgccggttacccgtcgctttatcttcctggaagagggcgacattgccgaggtgacacgtcgcagcgtgaccgtattcgacacgaaaggcgagcaggttaagcgccaggaaatcgaatcaaacctgcaatacgacgcgggcgacaaaggcgcttaccgtcactacatgcagaaagagatctacgaacagccaaacgccattaaaaacactctgaccgggcgcatcagccatggtgaagtggatctgagcgagctgggcgccaatgccaacgaactgctgagcaaagtcgagcacattcagatcgtggcctgcggtacctcttacaactccggtatggtctctcgctactggtttgaatccctggcgggcgtgccgtgcgacgtcgaaatcgcatctgagttccgctatcgtaaatccgctgtgcgccgtaacagcctgatgatcaccctttcccagtctggcgaaacggccgataccctggcggcgctgcgtctgtctaaagagttgggttacctgggttcgctggccatctgtaacgtaccgggctcctcgctggtgcgtgaatccgatctggcgctgatgaccaaagcgggcaccgaaatcggcgtcgcttccaccaaagcgtttaccactcagctgaccgttctgctgatgctggtggcgaagctggcgcgtctgaaaggcgaagatgcttccgttgagcatgacatcgttcacggtctccaggcgctgccgagccgtatcgagcagatgctgtctcaggacaagcgcattgaggcgctggctgaagatttctctgataagcaccacgctctgttcctgggccgtggcgatcagtaccctatcgcgctggaaggcgcgctgaagctgaaagagatctcctacatccacgcggaagcctacgcggcaggcgagctgaaacacggtccgctggcgctgatcgacgcggatatgccggttatcgtggtggcaccgaacaacgaactgctggaaaaactgaaatctaacatcgaagaggtgcgcgcccgtggtggtgtactgtacgtctttgcggataaagatgccggtttcgccagcagcgacaacatgcacatcatcgagatgccgcatgtggaagaggtgattgcgccgatcttctacaccgtaccgctgcaactgctggcttaccacgtcgcgctgatcaaaggcaccgacgttgaccagccgcgaaatctggcgaagtccgttaccgtagaataa

SEQ ID NO: 526087 - DNA, 1371 bp, Stenotrophomonas maltophilia
atgttaaacagtgcgatgagcgtggtgatccttgccgcaggcaaaggtacccgcatgtattccgatctgcctaaagtgctccacacactggcaggaaagccaatggtgcagcatgttattgatgcagctaatgaattaggcgccagccaggtgcatctggtttatggacatggcggcgatctgctgaaaaaaacgctgcgtgacgacaatctcaactgggtgctacaggcagaacagctgggtacgggtcatgcaatgcagcaggctgcacccttcttcgctgatgatgaagacatcctgatgctctacggcgacgtcccgctgatctccgttgaaaccctcactcgcctgcgtgaagccaaaccgcagggtggcattgggttgttaaccgtcgtgctggacgatccaaccggctatggccgcattacgcgtgaaaacggcaaggtaaccgggattgttgagcataaagatgccactgacgaacagcgtcagattcaggagatcaacaccggcatcctgattgcgaacggtgcggatatgaagcgctggctgtccaaactcaataataacaacgcgcagggtgaatactacatcaccgacatcattgcgatggcgtaccaggaagggcgtgagattgctgccgttcatccggcgcgtatcagcgaaacggacggggtaaacaaccgtctacagctgtcacgcctggagcgtatttaccagtccgagcaggcagaaaaactgttgctggcgggcgttatgctgcgcgatccggcgcgtttcgatctgcgtggcacgctgacccacgggcgcgacgttgaaatagatactaacgttatcctggaaggtaacgtcacgctgggcaaccgcgtcaaaatcggcaccggctgtgtgattaaaaacagcgtgatcggtgacgactgcgaaatcagcccgtacagcgtggtagaagatgcgcgtctggattccgcctgtaccatcggcccgtttgcgcgtctgcgcccgggcgctgagctgctggaaggcgctcatgtaggtaacttcgtggaaatgaaaaaagcacgtctcggtaaaggctcgaaagccggtcatctgacctatctgggcgatgcggaaattggcgacaacgtaaacatcggtgcagggacgattacctgtaactatgacggtgccaataagtttaaaaccatcatcggtgatgacgtgtttgtaggttccgatacccagctggtggcgcctgttaccgtgggcaaaggcgtgaccattgccgccgggacaaccgttacgcgcgatgtggccgagaacgagctggtgttaagccgcgttccgcaggtcagtaagcagggctggaaacgcccggtgaagaaaaagtaa

SEQ ID NO: 526088 - DNA, 420 bp, Stenotrophomonas maltophilia; identical to SEQ ID NO: 116961

SEQ ID NO: 526089 - DNA, 1383 bp, Stenotrophomonas maltophilia
atggctactggaaagattgtccaggtaatcggcgccgtggtggacgtcgagttccctcaggacgccgtaccacgcgtgtacgacgcgcttgaggtacaaaatggtaacgagagcctggtgctggaagttcagcagcagctcggcggcggtatcgtgcgtaccatcgccatgggttcttccgacggtctgcgtcgtggtctggaagtgaaagaccttgagcacccgatcgaagtcccggtaggtaaagcaacattgggtcgtatcatgaacgtattgggtcaaccaatcgacatgaaaggcgacatcggtgaagaagagcgttgggctatccaccgcgcggcaccttcctacgaagagctgtccagctctcaggaactgctggaaaccggcatcaaagttatcgacctgatgtgcccgttcgcgaagggcggtaaagttggtctgtttggtggtgcgggtgtaggtaaaaccgtaaacatgatggagctgatccgtaacatcgcgatcgagcactccggttactccgtgtttgcgggtgttggtgaacgtactcgtgagggtaacgacttctaccacgaaatgaccgactccaacgttctggataaagtatccctggtttacggccagatgaacgagccaccaggaaaccgtctgcgcgttgcgctgactggcctgacgatggctgagaagttccgtgacgaaggccgtgacgttctgctgttcgttgataacatctaccgttacaccctggccggtactgaagtatctgcactgctgggtcgtatgccttcagcggtaggttatcagcctacgcttgcggaagagatgggtgttcttcaggaacgtatcacctctaccaaaactggttctatcacctccgttcaggcggtatacgtacctgcggatgacttgactgacccatctccagccaccacctttgctcacttagatgcaaccgtggtactgagccgtcagatcgcgtctctgggtatctacccggccgttgacccgctggactctaccagccgtcagctggatccactggttgttggccaggaacactacgacaccgcgcgtggcgtacagtccctgctgcaacgttaccaggaactgaaagacatcatcgccatcctgggtatggatgaactgtctgaagaagacaaactggtggtagcacgtgcgcgtaagatccagcgcttcctgtcccagccgttcttcgttgcggaagtattcaccggttctccaggtaaatacgtttccctgaaagacaccatccgtggctttaaaggcatcatggaaggcgaatacgatcacctgccagagcaggcgttctacatggttggttccatcgaagaagccgtggaaaaagccaaaaaactttaa

SEQ ID NO: 526090 - DNA, 864 bp, Stenotrophomonas maltophilia
atggccggcgcaaaagagatacgtagtaagatcgcaagcgtccagaacacgcaaaagatcactaaagcgatggagatggtcgccgcttccaaaatgcgtaaatcgcaggatcgcatggcggccagccgtccttatgcagagaccatgcgcaaagtgattggtcaccttgcaaacggtaatctggaatataagcacccttacctggaagaacgcgacgttaagcgcgtgggctacctggtggtgtcgactgaccgtggtctgtgtggcggcttgaacattaacctgttcaaaaaactgctggcggatatgaaaggctggtccgataaaggcgttcagtgcgatctggcactgattggctctaaaggcgtctctttctttaactccgttggtggcaacattgtcgctcaggtgaccggtatgggtgataacccgtccctgtccgaactgatcggcccggttaaagtgatgttgcaggcctacgatgaaggccgtctggacagactgtacgttgtcagcaacaaatttattaacaccatgtctcaggtgcctacgctcactcagatgctgccgttaccggcatcagaagatgacgagctgaaacagaaagcctgggattacctgtatgaacccgatccgaaaccgctgctggataccctgctgcgtcgttacgttgaatctcaggtttatcagggcgttgtagaaaacctggccagcgagcaggccgcacgaatggtggcgatgaaagccgcgaccgataatggcggcagcctgattaaagagctgcagttggtttacaacaaagctcgtcaggccagcattactcaggaactcaccgagatcgtctcgggggccgccgcggtttaa

SEQ ID NO: 526091 - DNA, 1542 bp, Stenotrophomonas maltophilia
atgcaactgaattccaccgaaatcagcgaactgatcaagcagcgcattgctcagttcagtgttgtgagtgaagctcacaacgaaggtactattgtttctgtaagtgacggtgttatccgcatccacggcctggccgattgtatgcagggtgagatgatttccctgccgggtaaccgttacgctatcgcactgaacctggagcgcgactccgtaggtgccgttgtgatgggtccatacgctgaccttgccgaaggcatgaaggttaagtgtactggccgtattctggaagtgccggttggccgtggcctgctgggtcgcgttgttaacaccctgggtgcgccaatcgacggtaaaggtccggttgagcacgatggcttctccccaatcgaagttatcgcaccaggcgttatcgaccgtcagtccgttgatcagccagtgcagacgggttataagtccgttgatgccatgatcccaatcggtcgtggtcagcgtgaactgatcatcggtgaccgtcagaccggtaaaaccgcgatggcaatcgacgccatcatcaaccagcgtgattccggcatcaaatgtgtgtacgtggctatcggccagaaagcgtccaccatttccaacgtggttcgtaaactggaagagcacggcgcactgtctaacaccatcgttgtggtagctaccgcgtctgaatctgctgcactgcaatacctggcaccatacgctggttgcgcaatgggcgaatacttccgtgaccgcggtgaagatgcgctgatcgtatacgatgacctgtctaaacaggctgttgcttatcgtcaggtttccctgctgctccgtcgtccaccaggacgtgaagcattcccgggcgacgtattctacctccactctcgtctgctggagcgtgcttcccgcgttaatgcggaatacgtcgagaacttcaccaaaggtgaagtgaagggtaaaacaggttctctgaccgctctgccgatcattgaaacccaggcgggtgacgtttctgcgttcgttccgaccaacgtaatctccattaccgatggtcagatcttcctggaaaccaacctgtttaactccggtattcgtccggcggttaacccgggtatctccgtatcccgtgtgggtggtgctgctcagaccaagatcatcaagaaactgtccggtggtatccgtaccgcgctggcacagtatcgtgaactggctgcgttctctcagttcgcatccgatctggacgaagcaacccgtaaacagctgagccacggtcagaaagtgaccgagttgctgaagcagaaacagtacgcgccaatgtctgttgctcagcagggcctggtactgttcgcggctgaacgcggttacctcgaagatgtggaactggcgaaaatcggtagcttcgaagccgctctgctggcttacgtcgaccgtgatcacgctccgctgatgcaagagatcaaccagaccggtggctataacgacgaaatcgaaggcaagctgaaagctatcctcgattccttcaaagcaacccaatcctggtaa

SEQ ID NO: 526092 - DNA, 534 bp, Stenotrophomonas maltophilia
atgtctgaatttgttacggtagctcgcccctacgccaaagcagcttttgactttgctgtcgaacaccaaaatgtcgatcgctggcagaatatgctggcgtttgccgctgaggtgacgaaaaacgaacaaatggccgagttgctttctggtgcgttagcgcctgaaaccctcgccgcgtcgtttatcgccgtgtgcggagagcaactggatgccaacggccagaacctgattaaggtgatggcggaaaatggtcgtctccgtgtgctcccggatgttctcgagcagtttgagcacttacgtgcccttagtgaagctaccgctgaagttgaagtaacttccgcgactgaactgagtgatgaacagcttgcgaaaatcaccgccgcgatggaaaaacgtctgtcacgcaaagttaagctgaattgcaaaatcgataagtctgtaatggcaggcgtaatcatccgttcgggtgatatggtcattgatggcagcgtacgcggccgtcttgagcgccttgcagacgtcttgcagtcttaa

SEQ ID NO: 526093 - DNA, 471 bp, Stenotrophomonas maltophilia; identical to SEQ ID NO: 116966

SEQ ID NO: 526094 - DNA, 240 bp, Stenotrophomonas maltophilia; identical to SEQ ID NO: 116967

SEQ ID NO: 526095 - DNA, 816 bp, Stenotrophomonas maltophilia
atggcttcagaaaatatgacgccgcaggattacataggtcaccatctgaataaccttcagctggacctgcgtacattctcgctggtggatccacataaccccccggccaccttctggacgatcaacatcgactccatgttcttctcggtggttttgggtcttctgttcctggccatgttccgcggtgttgctaaacgagcgaccagcggtgttccagggaaattccagacgttcatcgagatgatcatcggcttcgtccatggcagcgtcaaagacatgtaccatggtaagagcaagctgattgctccgctggccctgaccgtgttcgtttgggtcttcctgatgaacctgatggaccttctgcctatcgatttcctgccgtggatcggcgagcatgtcttcggtctgcctgccctgcgcgtggttccgtctgccgacgtgaacatcaccctgtcgatggcgctgggcgtatttatcctgattcttttctacagcatcaaaatgaaaggcgtaagcggctttgtgaaagagcttaccttgcagccgttcaaccactgggcgtttattccggtcaacctgatcctggaaggcgttagcctgctgtccaaacctgtttcactgggtctgcgactgttcggcaacatgtatgcgggtgagctgattttcattctgatcgcgggtcttctgccgtggtggtcacagtggattctgaatgtgccatgggccattttccacatcctgatcattacgctgcaagcctttatcttcatggttctgacgatcgtctatctgtcgatggcgtctgaagagcactga

SEQ ID NO: 526096 - DNA, 381 bp, Stenotrophomonas maltophilia; identical to SEQ ID NO: 116969

SEQ ID NO: 526097 - DNA, 624 bp, Stenotrophomonas maltophilia
gtgctcaataaactctctcgtctgctggaacaggcaggtatttcgctcaccgatcaccagaaaaatcagctggtggcctatgtcgatatgctgaacaaatggaataaagcgtacaacctcacctccgtacgcgatcccaacgagatgctgattcgccatattctcgatagcatcgttgtggcgccgtatcttaccggtgaacgttttatcgacgtgggcaccggtccgggcttgccgggcgttccgttgtctattgttcgaccggagagtcatttcacgctgctggacagtctgggcaagcgcgtacgctttttacgacaggttcagcatgagctgaagctggaaaacatcacgcccgtgcagagcagggtagaggagttcccggcagagccaccgtttgacggcgttatcagccgcgcatttgcctcactcaatgacatggtgagctggtgcaaacacctgccggcgaataagggccgtttttatgcgctgaaaggacaacttccgggggacgaaatagagcagcttccggacggttttgcagtggaatccattgaaaaactccagatccctcagctcgaaggtgagcgtcatctggtgataattaagccaaacacattttaa

SEQ ID NO: 526098 - DNA, 1890 bp, Stenotrophomonas maltophilia
atgttttatcaggatccttttgacgtcatcatcattggcgggggtcacgcaggcactgaggccgcaatggccgcagcgcgaatgggtcagcagaccctgcttttgacacacaatatcgacacgctgggacaaatgtcctgtaatccggcgattggcggcattgggaaaggacacctggtaaaagaagtggatgcacttggcggcctgatggcgaaagcgatcgatcatgcgggcatccagtttaggatactaaacgcgagtaaaggtccggctgttcgcgccacccgtgcacaggcagaccgcgtgctttaccgtcaggctgtgcgcaccgcgctggaaaaccaaccgaacctgatgatcttccagcaggctgtagaagatcttatcgtggaaaacgatcgcgttgttggcgccgtgacccagatgggtctcaagttccgcgcaaaagcggtggtactgacggtcgggacattcctggacggtaaaatccatattggtctggacaactacagcggtggccgtgcgggcgatccgccgtcgattccgctgtctcgtcgtctgcgtgagctgccgctgcgcgtaagccgcctgaaaaccggtacgccgccgcgaattgatgcgcgtaccattgatttcagcgtactggcacagcagcacggtgataacccgatgccggtgttctcgttcatgggcaatgcggcgcaacatccgcagcaggtgccgtgctacatcacgcacaccaatgaaaaaacccatgacgtgatccgcagcaacctcgatcgcagcccaatgtacgccggcgtgatcgaagggatcggcccacgttattgcccgtcgatcgaagataaagtgatgcgctttgccgatcgtaaccagcatcagatcttcctcgaacctgaagggctgacctcgaacgaaatttacccgaacggcatctccaccagcctgccgttcgacgtgcagatgcagattgtgcgttcaatgcaggggatggaaaacgcgaagatcgttcgtcctggctacgctattgagtacgatttcttcgatccgcgtgacctgaagccgacgctggaaagcaaattcattcagggtctgttcttcgcaggccagattaacggcaccaccgggtacgaagaagctgccgcacaagggctgctggccggtctgaacgccgctcgcttctctgccgagaaagagggctgggcaccggcgcgttctcaggcttacctgggcgttctggtcgacgatctctgcacgctggggaccaaagaaccgtaccgcatgtttacttctcgtgcggaatatcgcctgatgttgcgtgaagacaatgccgatctgcgtctgaccgaggtgggccgcgaattgggtctggtggatgacgaacgctgggcgcgcttcaacgagaagctggagcgtatcgaacaggaacgtcagcgcctgaaaaccacctgggtgaatccgcaggcggaaactgctgctgaagtgaacgctcacttaactgcgccgctttcgcgcgaagccagtggtgaagatctgctgcgccgtcctgaagtcacctacgagaatctggtcaaactgaccgcgttcgcaccgggccttgaagacgctgaagcggctgaacaggtcgagattcaggtgaaatacgaaggttacatcgcgcgtcagcaggatgagatcgaaaaacagcagcgcaacgaaaatacgctgctgccggaaatgctggactatcgtcaggtgacggggctttccaacgaagtgatcgctaagctgaacgatcacaaacctgtgtcgattggccaggcctcacgtatctccggtgtcacacctgccgcgatttcgattctgctggtgtggctgaaaaagcagggtatgctgcgccgcagcgcgtaa

SEQ ID NO: 526099 - DNA, 450 bp, Stenotrophomonas maltophilia
atggcggacattactcttatcagcggcagcaccctgggcggtgcggaatatgtagcggaacatctggctgagaagctggaagacgcgggcttttctacacaaacgctgcacggaccgctgctggaagatctcccgactgacggggtctggctgctgatcacctccacgcacggcgcgggcgatctgccggataacctgcaacctttatatgacgaactgctggaacaacagcccgatctgtcaaacgtccggtttggcgctgtggggatcggcagccgtgaatatgacactttctgtggcgccatagagaaagtagaagctgcggtgaccgcctgcggagcaaaacagctgggtgaaacactgaagatcaacatcctcgatcatgatattcccgaagatccagccgagatctggctcgcggaatggaaaaaattactcaaaaacgattaa

SEQ ID NO: 526100 - DNA, 459 bp, Stenotrophomonas maltophilia
atggaaaattatcagatcgacaatctggaccgcggcattctggaagcgctcatggccaacgcacgcaccgcgtatgccgaactggcgaaacaatttggcgtcagcccggggaccattcacgttcgcgtagagaaaatgaagcaggccgggatcatcaccggcgcacgcattgatgtcagcccgaagcaactcggctacgacgtctgctgcttcattggcattattctgaaaagcgccaaagattacccctccgcgctggagaagctgaacgcgctggatgaagtcactgaggcgtactacaccaccgggcactacagcatctttataaaggtcatgtgccgatccatcgacgccctccagcaggtacttatcaacaagatccaaacaatcgatgaaattcagtccaccgaaaccctgatctccctgcaaaacccgatcatgcgtactatccgcccgtga

SEQ ID NO: 526101 - DNA, 276 bp, Stenotrophomonas maltophilia
atgaaccacttcgaactgggcgtctggcagtgttttcacttttacctgtaccgctttttcgcaaccagacaagttatcctgcgtcccgtcacccacgcggctcagaatcggcgcctgcacttcaataaggccaagcttctcttccagctggcgagaaaaatgggatttaacgaaactgatctggcgttgttttgcgatgtaagcggttttcattatttatactcctgcgtcctgttgatactgattaagcaacagaacaggcgcttaattcaataa

SEQ ID NO: 526102 - DNA, 483 bp, Stenotrophomonas maltophilia
atgacgaagaaaaaagcacataaacctggttcggcgaccattgcgctcaacaagcgtgctcgccacgagtatttcatcgaagaagaattcgaggccggccttgcgttgcagggctgggaagtaaaatcgctgcgtgccgggaaagccaacatcggcgacagctacgtgatcctgaaagacggtgaggccttcctgttcggcgcgaactttacgccgctgaccgtcgcctcttcacattacgtttgcgatccaacccgcacccgtaagctgctgctgaacaagcgcgagctggaatccctctacggacgcatcaaccgcgaaggcttcaccgtagttgcgctctctttgtactggaaaaacgcctggtgcaaagtgaaaatcggcgtggcgaaaggtaagaaacagcacgacaagcgtactgacctgaaagcacgcgagtggcagctcgacaaagcacgtatcatgaaaaacgcaggacgttga

SEQ ID NO: 526103 - DNA, 477 bp, Stenotrophomonas maltophilia
atgttattatttgtctgttgtgtgaccatggaaaatgctatgcctcagattagccgtactgcgcttgttccctacagcgcggaacaaatgtatcagttagtgaacgacgttcagtcctatccggaatttattccaggatgcaccggtagtcgggtgctggaatccggcccgacgcagatgactgcggccgtggatgtctccaaagcggggatcagcaaaacgttcaccacgcgcaataccctgacgagcaatcagagtattttgatgcatctggtggatggtccgtttaaaaaactgatgggagggtggaagtttacgccactgagcgctgacgcctgccgcattgagtttcatctggattttgaatttaccaataagctgatcgaactggcgtttggccgaatatttaaagagctggcctcgaatatggttcaggcgttcaccacgcgcgccaaagaggtttacagtgtcgcataa

SEQ ID NO: 526104 - DNA, 288 bp, Stenotrophomonas maltophilia
gtgtcgcataagattgctgttgaggtggtgtatgcgctgccggagaagcagtatttgcagcgcgtgacgcttgaagagggcgccaccgttgaggcggctatccgggcctccggcatccttgaacttcgccgtgatattgacctggcgaagaataaagtcggcatttatagccgtccggttaagctcggtgatgtgctgaaagagggcgacagggttgaaatctatcgtccgctgattgccgacccgaaagagttgcgccgtcagcgagcagagaaatccggtaagtag

SEQ ID NO: 526105 - DNA, 339 bp, Stenotrophomonas maltophilia
atgcgctgtaaaacgctgaccgctgccgcagcggttcttctgatgttgaccgcaggctgttccactctggagaaagtggtttaccgtcctgatatcaaccaggggaactaccttactcctaacgatgtgtccaaaatccgcgtaggtatgacacaacagcaggtcgcttatgccctgggaaccccgatgatgtccgatccgttcggcacaaatacgtggttctatgtattccgccagcagcctggtcatgaagatgtgacccagcaaaccctgacgctgaccttcagcagtgccggcgtgctgaccaacatcgacaacaagcctgccctgaccaaataa

SEQ ID NO: 526106 - DNA, 1662 bp, Stenotrophomonas maltophilia
atgctggcacaactgaccatcagcaactttgccattgttcgtgagcttgagatcgacttccatagtggaatgacggcgattaccggtgaaaccggtgcaggtaaatccattgccattgatgccctcggcttgtgcctcggcggtcgtgcagagggtgatatggtgcgcacaggtgcggcccgtgccgatctctgcgcccgcttctcgttaaaagacacgcctgccgccctgcgctggctggaagcgaaccagctggaagatggacgtgagtgtttacttcgtcgcgtcatcagcagtgacggccgctcccgcggttttatcaatggtacagcggttcccctttcccagcttcgcgagctgggccagctgctcatccagatccatggtcagcacgcgcaccagcagctaatcaaacccgaacagcagaaagccctgctcgatggctacgcgggtgagtgcgcgcttactcaactcatggcggagcactatcgtcagtggcatcaaagctgccgcgaacttgcgcagcatcaacagcaaagccaggagcgtaccgcgcgcgccgagctgctggaatatcagttgaaagagctgaacgaatttaaccctcaggcgggtgaatttgagcaaatcgacgaggagtacaagcgtctggccaacagcggtcagctgctttccatcagccagaatgccctgaacatgctggcggatggcgaagacgtgaatttgcagagccaactatataccgtgcgtcagcttgtgaccgaactgaccggcatggacaataagctttctggcgtactggaaatgctggaagaggccgcaattcagatttcagaagccggggatgagctgcgccactactgtgaacgtctggatctcgacccgaaccgtctgttcgagcttgagcaacgcatctcccgtcagatttcactggcgcgtaagcatcacgttaccccggaagagctgccgaattactatcagtctctgctggaggaacagcagcagctggacgatcaggccgattccctcgaaaccttgtctctggcggttaatctgcatcatcagcaggcgctggaaacggcgaaacggctgcacgacgtgcgacagcactatgctctggagcttagccagcatattaccgacagcatgcatacgctggcgatgccgcatggggtgttcactattgatgttcgctttgaagagcatcacctgacggcggaaggcgcagaccgcgtagaattccgcgtcaccaccaacccgggccagcctttacaggcgatttcgaaagtggcttctggcggtgaactgtcgcgtatcgccctggccattcaggtgattaccgcccgtaaaatggaaaccccggcgttgattttcgatgaagtggatgtgggtatcagcggcccgaccgcggccgttgtcggcaaactgctgcgtcagttgggtgaatcgacgcaggttatgtgtgtgactcacctgccgcaggtcgccggctgtggtcatcaccactttatcgttagcaaggaaaccgatggcgaaatgacggaaacgcacatgaagccgctggataaacgctcacgcttgcaggagctggcacgcctgctggggggcagtgaagtcacccgtaatacgctcgcgaatgcgaaagaactgctggcggcataa

SEQ ID NO: 526107 - DNA, 879 bp, Stenotrophomonas maltophilia
atgaataatcatttcaggtgtattgggatcgtcggccatccgcgtcaccctaccgcattgacgacacatgaaatgttgtatcgctggctgtgtggtaaaggctatgaagtgatggtcgagcagcagatcgcccaagagttgcagcttaaaagcgtcagaaccggcacgctggcggaaattggccagcaggcggatctcgccgtggtggtcggcggcgacggcaatatgctgggcgcggcgcgaacgctggctcgctatgatattaaggttattggtattaaccgtggcaatcttggtttcctgaccgacctcgacccggacaatgcgcaacagcagctggcggacgtgctggaaggtcactatatcagtgaaaaacggtttttacttgaagcccaggtctgccagcaggattgccagaagcgcatcagcaccgctattaacgaggtggttctccaccctggtaaagtggcgcacatgatcgagttcgaagtctatatcgacgaaatcttcgctttctcgcagcggtctgacgggctgattatttcaaccccgacggggtcaactgcctattcgctttcagccggaggcccaatcctgacgccatcgctggatgcgatcaccctggtgccgatgttcccgcatacgctctcggcgcgtccgctggtgataaacggcgacagcaccatccgcctgcgtttttcacatcgccgcagcgacctggagatcagctgcgacagccagattgcgcttcccattcaggaaggagaagatgtcctcattcgccgctgcgattatcacctgaaccttatccatccaaaagattacagttatttcaatacattaagctcaaaactcggctggtcaaaaaaattgttctga

SEQ ID NO: 526108 - DNA, 594 bp, Stenotrophomonas maltophilia
atgagtagtaaagaacagaaaacgcctgaggggcaagcccctgaagaaattatcacggaacagcacgatgaagttgaggcagtagagccagacacgtctgctgagcaggtggacccgcgcgatgaaaaaattgccaatctggaagctcagttggtagaagcgcagaatcgcgaacgcgatggcgtactgcgtatcaaagcggaaatggaaaacctgcgccgtcgtaccgagctggacgttgaaaaggcgcacaaatttgcgctggagaaattcgtcaacgaactgcttccggtgatcgacagcctggatcgcgcgctggaagtggcggataaagctaatccggataacgcggcgatgattgaaggcatcgagctgacgctgaaatccatgctggatgtggtgcgtaagttcggtgttgaagtgattgccgatacggatgtaccgctggatccaaacgttcaccaggccattgcgatggtggaatccgaagacgttgccgcgggtaacgtactgggcgtgatgcagaaagggtataccctgaacggtcgtactattcgcgctgcgatggtgaccgtggcgaaagcgaaagcgtaa

SEQ ID NO: 526109 - DNA, 1242 bp, Stenotrophomonas maltophilia
atggtggtcatttccgcttatttctctggctctgaaaccggcatgatgacgctgaaccgctaccggttacgtcatcgcgccaagcagggtaaccgtgccgcgcgtcgtgtcgaaaagcttctgcgtaagccggaccgtctgattagcctggtgcttatcggtaacaacctggtcaatattctcgcctctgcactgggcaccatcgtcgggatgcgtctgtacggcaatgcaggcgtggcgattgccacaggtgtgctcacgtttgtggtactggtgtttgcggaagtgctacccaaaaccatcgcggcgctttacccggaaaaagtcgcctacccgagcagcttcctgttagcaccgctgcttattctgatgatgccgctggtctggctgctgaatatggtgacacgggtgctgatgcgcatggttggtataaaggcagacgtcaccatcagcagcgcgctcagcaaagacgaactgcgtaccatcgtgaacgaatcccgctcgcagatctcccgtcgcaatcaggacatgctcctgtcggtgctggatctggaaaaggtcagcgttgacgacattatggtgccgcgcaatgaaatcgtcgggattgatattaacgacgactggaaggccattgtccgccagctgacgcactccccgcacgggcgtatcgtcctctatcgcgattctctcgacgatgccatcagcatgctgcgtgtgcgcgaggcctatcgtctgatgactgagaaaaacgagttcaccaaagaggtgatgctgcgcgccgccgacgaaatttactacgtgccggaaggcaccccgctgagcacgcagctggtgaagttccagcgaaacaagaagaaagtcggtctggtggtggatgaatacggcgacatacagggactggtgacggtcgaagatattctggaagagattgtcggggactttaccacgtcaatgtcgccttcccttgcagaagaagtcaccccgcaaaacgacgggtcagtgcttatcgacggcagcgccaacattcgtgaaatcaataaagcgtttaactggcatttgccggaagacgaagcgcggacgatgaacggaatgatcctggaagcgctggaagagatcccggcggcaggcacgcgcgtgcgcattgagcagtatgatattgatattctggacgttcagggcaacatgattaagcaggtgaaggtcctgcccgttaaacctttacgcgaaagtatcgccgagtaa

SEQ ID NO: 526110 - DNA, 867 bp, Stenotrophomonas maltophilia
atgcaacggttggagcaggcgtcacgtaacgttatactgcttctctttcttattaagacaactgtcgacgcctatatgcctgttttcgcactgatcgcccttgttgcctactctgtcagcctcgcgctgatcattcctggcctgctgcaaaaaaacagcggctggcggcgcatggctattctttcggcagtgatcgcactgattagccatgcgtttgcgctggaatcacgcatcattcccggcgacggcagcgtgcaaaatctgagcgtgctgaacgtcggctcgctggtcagcctgatgatctgtacggtcatgaccattgtcgcgtctaaaaatcgtggctggctgctgctgccgatagtctacgcctttgcgctgatcaacctggcgttagccacgttcatgcccaatgagtttattacccatctggaagccacgccggggatgctggtgcatatcggcctgtctctattctcctacgcgacgctgatcatcgccgccctttacgccatgcagctcgcctggatcgactaccagctgaaaaataaaaagctggcgtttaaccatgaaatgccgccgctgatggtgattgagcgtaagatgttccacatcacccaggtcggcgtggttttgctgacgctgacgctgtgcacgggcttgttttatatgaagaacctgttcagcgtggagaatatcgataaagcggtcctctccatcatcgcgtggtttgtctatattgtcctgttatggggccattatcatgaaggctggcgcggtcgtcgcgtggtctggttcaacgttgcgggtgcgggcattctcacgcttgcctattttggtagccgcttcatacagcaatttgctggctaa

SEQ ID NO: 526111 - DNA, 1362 bp, Stenotrophomonas maltophilia
atgtttgataatttaaccgatcgtttgtcgcgcacgctgcgcaacatcagcggccgtggacgcctcaccgaagagaacatcaaggaaacgctgcgcgaagtgcgcatggcgctgctggaagcagacgttgcgttgccggtcgtgcgtgattttatcaaccgcgtgaaagagaaagcggttggtcatgaagttaacaagagcctgactccgggtcaggagttcgtcaaaatcgtccgtaacgagctggtttcggcgatgggcgaagagaaccaggtgcttaacctggcggctcagccaccagccgtcgtgctgatggcgggtctgcaaggtgcgggtaaaaccaccagcgtcggtaagctggggaaattcctgcgcgaaaagcacaagaaaaaagtgctggtggtttcggcggacgtgtatcgcccggcggcgatcaaacagctggaaacgctggccgagcaggttggcgtagacttcttcccgtccgacgtggcgcagaagcctgttgacatcgttaacgcggcgctgaaagaggcgaagctgaaattctacgacgtgctgctggtggataccgccgggcgactgcacgttgacgaagcgatgatggacgaaatcaagcaggttcatgcttctatcaatccggtagagaccctgtttgttgtcgacgccatgaccggtcaggatgcggcgaacaccgcaaaagcgtttaacgaagccctgccgttaaccggcgtggtgctgaccaaagtcgacggcgacgctcgcggcggtgcggcgctgtctattcgtcatatcaccggtaagccaattaagttcctcggcgtgggcgagaaaaccgaagcgctggagccgttccacccggatcgtattgcctcccgtatcctcggcatgggcgacgtgctgtcgctgatcgaagatatcgaaagcaaggttgaccgcgcgcaggctgaaaaactcgccagcaagctgaaaaaaggtgacggtttcgatctgaccgacttccttgagcaactgcgtcagatgaaaaacatgggcggtatggcaagcctgatgggtaaactgccgggtatggggcagatcccggacaacgtcaaatcccagatggatgacaaagtgctggtgcgtatggaggcaatcatcaactcgatgacgctgaaagagcgcgcgaagccagaaatcatcaaaggttcccgcaagcgccgtatcgcagccggttgcggcatgcaggtccaggacgttaaccgccttctgaaacagttcgacgacatgcagcgcatgatgaagaaaatgaagaaaggcggcatggcgaagatgatgcgcggcatgaaaggcatgatgccgcccggttttcctgggcgataa

SEQ ID NO: 526112 - DNA, 225 bp, Stenotrophomonas maltophilia
atggtaactattcgtttagcacgtcacggcgctaaaaagcgtccgttctaccaggttgttgtgactgacagccgtaatgcacgcaacggtcgcttcattgagcgcgttggtttcttcaacccactgggttggccagggcgctactgtttccgatcgcgttgctacgctgatcaaagcagcaaacaaagcagcttaatctgtcacggtggtcatgatgagcaataa

SEQ ID NO: 526113 - DNA, 537 bp, Stenotrophomonas maltophilia
atgagcaataaagcacctgttgaaccgatcgtattgggaaaaatgggttcttgctacggtatccgtggttggctcagagtgttttcctccactgaagacgctgatagcatttttgattaccagccctggtttatccagaaagccggtaagtgggaagaggtcgagctggaaagctggcgtcaccacaatcaggacatcatcatcaagctgaaaggcattgacgatcgagatgccgcgaatgcgctgactaattgtgaaattgtcgtggattcgtcgcagttgccgcaactggaagagggtgactactactggaaagaccttatgggttgccaggtagtgaccactgaaggctacagcctggggaaagtcatcgacatgatggaaaccgggtcaaatgacgttctcgtcattaaggcaaacctgaaagatgcatttggcatcaaggagcggttggtcccgttcctcgatggacaggttatcaagaaagtcgatctcactactcaaaccattgaagtagattgggatcctggtttttaa

SEQ ID NO: 526114 - DNA, 768 bp, Stenotrophomonas maltophilia
atgtggattggcataattagcctgtttcctgaaatgttccgcgcgattaccgattacggggtaactggccgggcagtaaagaatggcctgctgagcatccagagctggagtcctcgtgacttcacgcacgaccggcaccgtaccgtggacgatcgtccttacggcggcggaccggggatgttgatgatggtgcaacccttacgggacgccattcacacagcaaaagccgcggcaggtgaaggcgcgaaggtgatttatctgtcacctcagggacgcaagcttgatcaagcgggcgtgagcgaactggcgacgaatcaaaagctgattctggtctgtggtcgctacgaagggatagatgagcgcgtaattcaaaccgagattgacgaagaatggtctatcggcgattacgttctcagcggtggtgagctaccagcaatgacgctgattgactccgtcgcccggtttattccgggggttctgggccatgaagcttcggcaacggaagattcctttgccgatggattgctggactgtccacactatactcgtcctgaagtgttagaagggatggaagtcccggcagtgttactgtctggaaaccatgccgagatacgtcgctggcgtttgaagcagtcgctgggccgaacctggcttagaagacctgaacttctggaaaacctggctctgactgaagagcaagcaaagttgctggccgagttcaaaactgaacacgcgcaccagcagcatgaacatgatgggaaagcgtaa

SEQ ID NO: 526115 - DNA, 348 bp, Stenotrophomonas maltophilia; identical to SEQ ID NO: 116493

SEQ ID NO: 526116 - DNA, 405 bp, Stenotrophomonas maltophilia
gtggataacgtactgcatcagcatagctggaaacgcgcagcggcattgaccgcgctgtttgcgatcctgctgatcgtcgtggcgccgctgatctccgtctcgctgcaaaaagatcccatgagcgccatgccgggcatgcaccatgacatgagcatgatgtcgatggacgagcatcatggggatatgccgcattccatgccagttgaccatgcggaagcctgcggctactgcgtgctgttagcgcatgtgccgggcgtgatgctggcgcttatcgttctgctcagcgtggtgttgcagcggctgcgcatgaagccgcctcgtcaggcggtcagccactggcactttttcccctggctttaccccgatacccgcgcgccgccgcgtcggtctgctttctccctttaa

SEQ ID NO: 526117 - DNA, 1371 bp, Stenotrophomonas maltophilia
atgactacctgcactccgcgcgcggcatggggaaacctgctgcgtcgcctccatttctatatcgggctgtttgttggtccgtttattttcttcgcagcgttgaccggtacgctgtatgtcgccacgccgcagcttgaaaatgcgctgtaccatcatgcactccacacggatgccgtgggtgaggcgcagcctcttgctgcacaaattgccgcggccgaaaaggccgtagaatcagatctgcgtctgcatgccgttcgtccggggctggaagagggcgaaacgacccgcgtgatgtttgccgacccggcgctgggtccctccgagcatcgggctatttttattgatcccgccagccttgaggttcgaggggatatgaccgtctacggcaccagcgggattttaccgctgcgtcagactatcgattatctgcatacctcgctgatgctgggcaacctcgggcgcctctatagcgagttagccgcctcgtggatgtgggttgctgccctgggcgggatcgcgctgtggttctatacccgaccgaagcgccgtattaacaatcgtttccagaatcgtcgtcgcctgcatgtgatcttaggctggaccttactggcgggaatgctgctgttctcagtcaccgggttaacctggtcacaatgggccggtggcaacgtcgataagctgcgtgcagagatgaactggctgacgccgcaggtaaacaccaccctttccggtgcgccggaaatgatggatgaacacgccgaacatcatggtcatcacggcggaatgtcgatgcctgaaatgcctgttgaactgtcgctttttgacagcgtattgcaggccgcccgccagtcaggaattgatgcgaacaacgttgagatccgtccggcaagcagggtcgaccaggcctggacggtgacggaaatcgatcgccgctggccgacgcaggttgatgccgttgccgtggacccccactctctgaaggtgctggacaggactcgctttggggatttcccgctgatggctaaactcacccgctggggcgtggatttccatatggggatcctgtttggtctggcaaatcagctgctgctcatcgcgtttggcgttgcgctgtgcgtgctgattatctggggatatcggatgtggtggatgcgtcgtcctgcgatgtcagccgcgaacccggtacagacgctctgtcaaagctggctggcattgccgctgtggggaaggggagtgacgttcatgataagcctcctgctggggctggcgttgccggtaatgggcgtcagtctggcggtatttatcgtgattgactggctgcgctggcgagcggcttcaggcgtgtcgctcgccggcacatccgctaaatag

SEQ ID NO: 526118 - DNA, 483 bp, Stenotrophomonas maltophilia
atgttgaagcgatacttcgcgccgttgttactggcatctctggttatgtccgggtgccagacgccggagggtaaattcacaccagagcaaatcgcggccatgaagtcctacggctttaacgaactgaatggcgactggtccctgggcctgtcggataagatcctgtttgataaaaatgacgccagactgcgtccggaaagtgaaacgcagatccagactatggcctcacgtctggcggcaaccggtctgaatcacgcccggatggacggccatacggataactatggcgaagagagctacaacgaagcgctttcgttaaaacgtgccaatgttgtagcggatgcctgggcgaagggcgcgaacatcccgcgcagcaacctcactacgcggggtttaggcaaaaaataccctctcagcagcaactgtactgcgcaagggcgcgctgaaaaccgccgtgttgcggtagttatcagcacgccttaa

SEQ ID NO: 526119 - DNA, 1221 bp, Stenotrophomonas maltophilia
atgaataaggaagtcacaccaacaccgcgtccgacgtttaaaagaacgttgcggcgaatcagcatgataagcgtcattattacgatgacgtttatatggttgctgctgtgtttcgcttccgtggtgacattaaagcaatacgcgcaaaaaaacctcgaactcaccggcgccaccatgagccacagccttgaggcctctctggtgttcaacgatgccgtggcggcaaatgaaacgctggcgaccctcggcaagcaggggcaatttgccgtggcggaagtgctaaatgcacatcataaacggtttgcctggtggtcgtggaacccggcggataataccgacacgctgggcgcgctggtcaaccggtggttgttccctgttcctgtcgcacagcccatcatacataacggtaatgtgattggcgaaattcgtctgaccgcacgagacagcctgattagccactttatctggctctcatttgcggtcctcactggctgcattctttttgcctctaccgtcgcattgaccatcacccgctcgctacatcatggcatggttgttgaaatgcaaaacatcactgacgttgtgcatgacgtccgtaccaaccgcaacttctctcgccgggtaacggaaggccgcattgaagagttccaccagtttggtgaagacttcaacagcctgttggatgaaatggaagagtggcagctcaagctacaggcgaaaaacgctcaactgttgcgtaccgccatgcacgatccgctcacggggcttgcaaaccgcgccgcgtttcgcaacaacattgcggccttaatgaatgacgcttcggcaaagaccaattctgccctgctcttcctggacggtgataacttcaagtttattaacgacacctggggccatgccgcgggcgactgcgtactgatcgaagccgcaaaaaggatggtcgaatttggcgaaaaacgtcatcagtcttaccgtcttggcggcgacgagtttgccatgatcctttatggcgtccacaccgcgcgtgaggtcgaatatatttgcgctgcgctgtcgcagcaatttatccgtccgtttgatctgcgtaacggacacacagcatccatgtcactcagcattggctttgctctggcgtgggaaaatgcctccgtcgaggcattgcttgagcaagccgatcgcaatatgtacctggtcaaaaaccagcgttcgaaaacaataccctga

SEQ ID NO: 526120 - DNA, 1815 bp, Stenotrophomonas maltophilia
atgtgggcggcaaacaaagaaaaatcaaatccgttgtcttcacgccaggaggtagtggcgtcgttgaatgcacttttacaggcgctggacacgcaatttccggcgaaccgttcacgattctcgctgggtgatacctgcgcccattacacagcggatattgcgcagatggagggactttcccgcgcgctgtgggggctgtttccgctgatggcatccggcgaaagcacgccgttcagcgagaagtaccttactgccattaagcttggtaccgacccgcaaagcaccggctactggggtgaaaccggcccgtacgatcagcgtctggtggagatggcggcctacggtctggggctcggtctgctgggagataaactcaccgcgcactttaccgggcgcgaggtgattaacctgcacgcgtggctcaaccaaatcaccgacgcgcagatgccggacagcaactggaactattttgccattatggtccagctcggctttaagcgcgccggcctgccgtacgatcaagccgccattgaccaccgctttgcgctgatggacgcctactatctcggcgacggctggtactccgacggtcctggccgcccgaaagactattacatctccatggctttccatttttacggcctgatttacgccaccctgagtgacgacgaggcgagggcgaaggtgctgcgcgagcgctcgcgtctgttcgcggaagactttatctactggtccgccgccgatggtgcctcggtgccgtttggccgcagcctgacctaccgctttgccatggttgccttctggagcgcggtggccttttctcagctggacgtcttcaccccgggtatcgtgaagggcattgtgctgcggcatctgcgctggtggcagcagcagtcgattgtcgatcgcgacggtattcttaccctggggtttgcgtatccgaacctggcgatgtgcgaggattacaactcccccggttcaccgtactgggcgctgaaaacctacctgatcctggcgctgccggaggcgcatccgttctggcaggccgacgagcagccgctgcccgcgcttgctgaaaaacatgtgatcccgcatgcgcagcagatcctgatgcattcgaaagcttcgcagcacgtcgtcatgctcacggctggtcagctggagctgaataactacgttaacaccgaagcgaaatacaccaaatttgcctactccagccgcttcggattcaccattgagcgtggacgatttggcctgaagcatgccgcctgcgattccatgctgctgctggcggacgaagatgactatttccgcggtcgtcgcgagtgcgaagaggttcgggtggatgaacattacattttctcgcgctggtcgccgtggcgcgacgtgcagattgcgacctggcagatcccgttcggggagtggcacctgcgcctgcaccgcatcaacagcgcgcgcactctgcaaaccgtcgagggcggctttgcggtgatgaaaaccgcccaccaggtgcgcgatcgcggttgttatctgatggctgaaaacggcagcagcgtcattgtcgatctttcgccggtcattcaccgccagccagacagcatcgtcacgccgccgaacagcagcattatgtttgcggagtgcgcttccattccgttgttaaaggccgacctcccgcaaggggaaagctggctctgttgcgccgttctggctggcggaaaacagcccgttgcggcgacgccgcagctgaatataacccatagccgggtcgtcattagcgaacccggaagcgaacgtaagctgtcgttcacattataa

SEQ ID NO: 526121 - DNA, 1266 bp, Stenotrophomonas maltophilia
atgaaaagcacatcgacaactaacagaactgaatattacaaaatcagtagctttatctttctctatttctttacctggtctgccagtattggactgctggcgatctggcttggccagaaagccaatctcagcggctcggtgattggaaccgtttttgcggtgaacgggatattctccgttattcttaaaccgatctacggctatattctcgataagatcggcatgagcaaatacctgctctattttgtggtgatcatgtcggcccttatggcgccgttctttatttacgtataccagccgctgttaatgtctaataccctgctggggattattatcggcgcgctctatttaagctttgcctggtacgcgggtgtggcggcgtgcgaatcgtattccgaccgctttagccgcttaaacggcatggagttcgggcaaattcgcatgtggggttcgctcggctgggcggtggcatcgtccttctccggcctgctgtttaacctctcaccggcgtataactttattctcggcagcgtggcatcggtggtgatgctgatcgtcctgctgagcctgaaagtgaacactaactccattcacgcgggcgaggtgctgacgaaagagaaaatcgccccgtcagacgtttacgccctgctgcgaaaccgcaaattctgggccttctgcctgtacgtggcgggcgtggcgtggatgatgtttatcgccgagcagcagttctcgcgctatttcgtcaccttcttcgatgatattcatgagggcaacgcggtattcggttatctcgggaccgtgcagtcgggcatggaatttgtcatgtatatggtggtcccgctgtttgtgaactttattggcgccaaacgcgggctattaattgtcgggctggtggtcggggcgcgtctgattatttccggcatgtgtgattctcacctgttaatttcagtgcttaagccgctgtacggtctggaaatttgtctcctgctggtgtcggtatttaaatatatcgccgagcatttcgacaagcgcgtcaatgccaccatgtatttactcggctatcaggcaatgctctacgttggcaacgtggtggtctcttcccctgccggctatatgtatgaccgtattggctttgagcacacctatatcatcatgggcgcaacggcgctgacctttacccttatttctgcttttacgttatctgcctgtcagagcaaatggcgcggggctcgtgcgctgaacgtagcagaaacgtcaacacgataa

SEQ ID NO: 526122 - DNA, 1188 bp, Stenotrophomonas maltophilia
atgttaagtcgtatcaaagaagaacgtctgcctgttatcgctgcgcccgttgactcccgcgcattcagcgatgaactgaattcggcgcgcagccacgttctggacctgattagccgtcatttaacggagttcggcgacaaattcccggcggaaacctgccagaacggtttttatccgctgactgacaacgtggagtggaccaccagcttctggaccgggcagctatggctggcatgggagatgagcggcgaggaaaaattccgcgcgatggcggaaaaacacgtgcgctcgtttggcctgcgcatcgccgggcgcaacgacaccaacacccacgatttaggcttcctctacacgctctcctgcgtagccgcgtggcggctgaccggaaaccgcgaggcgcgcggcttctcgctgctggcggcggaagctctgctggaacgcttccacgagaaagcgaagatcatccaggcgtggggcgatctctccgatccggaccaggccgggcggatgatcatcgactgcaacatgaacctgccgctgctctactgggcaacggagcagacgggcgatccgcgctttgccgacgccgcaaaagcgcacgtcatgcaggcggcgacgtacctcattcgtgacgatgcctccacattccacacctactatatggatgtgacaaccggcgcaccgcgctacggcaacacccagcagggctacgccgacgactcctgctggtcacgcgggcaggcgtggggaatttacggcttcctgctgagctatatctataccggcgacgagacgatgatcgccctgtcaaaacggctggcgaactacttcctcaatcgcctgcccgacgactacgtctgccactgggatctggcgctggtgggcaccgacgcgctgcgtgattcttcctcggcggcgattgcggtatgtgggctgctggagttgctgaaacacctgccggtcacggatccggatcgcgagcgctatatggaatgggctaaaggcattatgtcgtcactgacgaaacactatctgatggggagagaagaaaagggcaacgggctgcttaaacactcggtttaccacctcgggagcaacaaaggcgtggatgagtgcgcaagctggggagattacttctacgttgaggcgctggtgcgtttcacccggagctggaaactgtactggtaa

SEQ ID NO: 526123 - DNA, 528 bp, Stenotrophomonas maltophilia
atgaaaatagcttgtcttggctggggttcgttaatctggaaaagcggcgcgttaccggtagccggtgagtggcagaccgacgggccttctttgcccgtcgagttctgtcgggtcagcgatggcggtgaactggcgaccgccatctgtatgaatgcccctgccgtgccggtgctttgggcatggctggaggccacaacgttgagcgtggcctgccgcgctttgcgtgagcgcgaagccattcccgaggatcgctgcgatggtattggctcgctgctaatcaccggacgcgacacgggtatcctgacaacatgggccagggagaaaggtattgaagcgatcatctggaccgggctcccgccgagaagcgcgtcacaggaaggcagggttcctgccgtggacgaagccatcgcttatctcgacggcctcagcggagagacccgcagccatgcgcgggactatatttgccgcgtgcctgcccagcttgatacgccctaccggcgcgtcattaaagacgtgcttggatggtaa

SEQ ID NO: 526124 - DNA, 441 bp, Stenotrophomonas maltophilia
atgggtctttttaatttcgtaaaagaagcaggcgaaaagctgtgggacaatctgaccgatcataagggtcagagcgacaaaatcaccgagcacctcaagaaactcaacattcccggttccgataaggttcaggttgacgtcaccgacggcaaagccagcgtgacgggcgacgggctgacgcaggagcagaaagaaaaaatccaggtcgccgtcggcaacatcgcaggcgtcagcgaggtggagaacaacatcaccgcgacagatgccaaagatgaagctacttactatacggtgaaatccggcgataccctgagcgcgatctctaaaaccgtgtacggcgatgctaaccagtacaacaagatttttgaggctaaccgccctatgctctccagccccgataaaatctatcccggccagacgctgcgtattcctaaagcataa

SEQ ID NO: 526125 - DNA, 315 bp, Stenotrophomonas maltophilia
atgcttaccgttattgctgaaatccgtacgcgtcctggccaacatcaccgccaggcggtgctggatgagttcgcaaagatcatcccgaccgtactgaaagaagaaggctgccacggctacgcgccaatggtggacgccgccaccagcgcaagcttccaggcgaccgcgccagactcgattatcatggttgagcagtgggaaaccgtcgcgcaccttgaagcgcatttgcagaccgcgcatatgaaagcgtggagcgacgcggtgaaaggggacgttctggaaacccatattcgtattctggagcaaggggtttaa

SEQ ID NO: 526126 - DNA, 582 bp, Stenotrophomonas maltophilia
atgagcaacattctgattatcaacggcgcgaaagaatttgcgcactctaaaggccagctcaatgacaccctgaccgaggtcgcggatggtttcctgcgcgacgccggacatgatgttaaggtcgtgcgcgcggacagcgattacgacgtgaaggccgaagtgcagaacttcctgtgggccgacgtggttatctggcagatgccgggctggtggatgggcgcaccgtggaccgtgaaaaaatacatggacgatgtgtttaccgaaggtcacggttcgctgtatgccagcgacggccgcacccgctcagacgcgtctaaaaaatacggttccggcggcctgttgcagggcaagaaatacatgctctccctgacctggaatgccccgcttgaagcgttcaccgagcaagatcagttctttgaaggcgtaggcgtagacggcgcgtatctgccattccacaaggcgaatcagttcctggctatggagccgctgccgacctttatcgtcaatgacgtaattaaaatgccggacgtcccacgctatatcgcagaatatcgcaagcatctcgcggaaatttttgcttaa

SEQ ID NO: 526127 - DNA, 1350 bp, Stenotrophomonas maltophilia
atgaaactgacccaacgcctgagcctgaagctgcgcctgacgctcctctttttgctgctgtccctggcggcctggtttgccgcaagcgtggtggcctggcaccagacgaccgacaagctcgataagctgttcgatacccagcagatgctgtttgccaaacggctgctgacgatggacgtggacgaactccgcgccccggaacgcatgcgcgaggtgccgaaaaaagccaaacacggccatcttgacgacgatgcgctggccttcgcaatcttcaccgcagacggcagcatggtgcttaacgacggtgagaacgggcgcgacataccttatcactaccgccgggacggatttgatgacggtcggttgcaggatgacaacgacgaatggcgtttcctgtggctgacctccccggacgggaaataccgcgtggtggttggccaggagtgggagtaccgacaagatatggcgctggacgtggtcagctcgcagctgacgccgtggctggtggcgctgcccgtaatgcttctgttgctgattgtcctgctgagccgggaattgaaaccgctgaaaaacctggcgcagaccctgcgttcacgctcgccggatgcgaccgatacgctgcccacccacggcgtgccgacggaggttcgcccgctgcttgatgcgcttaaccatcttttcgcccgtacgcaggagatgatggcccgcgagcgccgcttcacctcggatgccgctcatgagttgcgcagcccgcttgccgcgctgaaggtgcaaaccgacgtggcgcagctttcccttgacgatcccggggcgcagtctaaagcgctggggcaattgcatgcgggcatcgaccgcgcctcccggctggtggatcagcttctcaccctgtcgcgcctggattcactggataatcttgatgacgtcgaacccgtgatgatggccgatttgctgcaatccgcggtgctggatatctggcatccggcgcagcaggcgggcattgatattcggctcaacgtcaacgcgcccgaggtgatgcgtcacggacagccgctattgctgagcctgctggcgcgtaacctgctggacaacgccgttcgttatagcccgcgcggcagcgtggtggacgtgacgctgaacacccaaagctttaccgtgcgcgacaacggcccgggcatttcaaccgatgcgctggcgcgtctcggcgagcgcttttatcgtccaccgggccaggacgccaccggcagcggtctggggttgtctattgtgaagcgcatcgcggcgttacacgggatgcgcgtctcgctgggcaatgcgcctgaagggggctttgaggtgaccgtcagctggtag

SEQ ID NO: 526128 - DNA, 660 bp, Stenotrophomonas maltophilia
atgcgcattttactggtagaagacgacaagctcatcggcgatggcatcaaagcgggcttaagcaaaatgggctttaacgtggattggtttaccgacggtaaaaccgggcaggcggccctgtacaccgcgccgtacgatgccgtggtgctggacctgacgctgccggaaatcgacgggcttgagatcctgcgcgcctggcgcgaaagcggtaagagcgaaccggtgctgatcctcaccgcgcgggatgcgctgaatcagcgcgtcgaagggttacgcctgggggcggatgattacctgtgtaagccgttcgcgctgattgaagtggcagcccgcctcgaagcgctggtgcgccgcagccacgggcaggcgcgcagcgagctgcgtcacggcaaggtcacgctcgatccggcaagtctcgtcgccacgctggagggcgaaacgctggtgctcaaacccaaagagttcgccctgctggaactgctgatgcgcaacgcgggccgcgtgctgccgcgcaaggccatcgaagagaaactctacaactgggatgatgacgtctccagcaacgccgtcgaagtccacgttcatcatttacgccgcaagctcggcagcgaatttatccgcaccgtgcacggcatcggttataccctgggtgacgcatga

SEQ ID NO: 526129 - DNA, 402 bp, Stenotrophomonas maltophilia
atgaaaaaatacgctgcaattgctgccatcatgatgatgaccactgcccctgtttttgctgcacagggtggcttctctggcccatctgcgacacagacccagacgcaaacccagcagggtggctttgtcgataataacgccaacctcactaccgcggctaaagtcaaagatatgaaggacgacagctgggtgaagctgcgcggtaatattaccgagcgcctgtccgatgaccgttacaccttccgcgatgaaagcggcacggtggtggtggagatcgaccacaagcgctggaacggcgtgacggtgacgccacaggataaagtcgaactccagggtaaaatcgataaagactggaacgagtttgaaatcgacgtgaagcaggttatcaagctgaacaaataa

SEQ ID NO: 526130 - DNA, 2259 bp, Stenotrophomonas maltophilia
atgagcgatatggcagagcgcctcgcgctacatgaattcacggaaaacgcctacctgaactactccatgtacgtcatcatggacagggcgttgccgtttatcggggatggcctgaagcccgttcagcgccgcatcgtctatgcgatgtccgaactggggctgaatgcgaccgccaagttcaagaaatccgcccgtaccgtcggtgacgtgctggggaaataccatccgcacggtgacagcgcctgctatgaagcgatggtgctgatggcccagccgttctcttaccgctatccgctggtggatggtcaggggaactggggggcgccggacgatccgaaatccttcgcggcgatgcgttataccgaatcccgtctgtctaaatatgccgaagtgctgttgggcgaactggggcagggtacggtcgactgggtgccaaacttcgacggtacgatgcaggagccgaaaatgctgcctgcgcgtctgccgaacatcctgctgaacggcacgaccggtatcgccgtgggcatggcgacggacattccgccgcacaacctgcgtgaagtggcgaaagcggccatcaccctgattgagcagccaaaaacctcgctggacgatctgctggatatcgtgcaggggccggactatccgaccgaagccgagatcatcacctcgcgtgcggaaatccgtaaaatctaccagaacggccgcggctccgtgcgcatgcgcgcggtatggaccaaagaggatggcgccgtggtgatcaccgcgctgccgcaccaggtctccggcgcgaaggtgctggagcagattgcctcccagatgcgcaataaaaagctgccgatggtggacgacctgcgcgacgaatcggaccacgaaaacccgacccgtctggtgatcgtgccgcgctctaaccgcgtggatatggagcaggtgatgaaccacctgttcgccactaccgatctggaaaaaagctaccgcatcaacctgaacatgattggtctggacggtcgtccggcggtgaaaaacctgctggagatcctcaccgaatggctggccttccgccgcgatacggtgcgccgccgtctgaaccatcgcctggagaaagtgcttaagcgcctgcatatcctcgaaggtttgctggtggcgttcctcaacattgacgaagtgattgagatcattcgtaccgaggacgaacctaagcctgccctgatgtcgcgctttggcatcagcgaaacccaggccgaagcgatcctcgaactgaagctgcgccatctcgctaagctggaagagatgaagatccgcggcgagcagaacgagctggaaaaagagcgcgatcagcttcaggcgattctggcgtccgagcgcaagatgaacaccctgctgaagaaagagttgcaggccgatgccgacgcctttggcgacgaccgtcgttctccgctgcatgagcgcgaagaagcgaaggcgatgaacgagcacgacatgctgccgtccgagccggtgaccatcgtgctttcccagagcggctgggtgcgtagcgccaaaggccacgatatcgacgcgccgggtctgagctacaaatccggtgacagcttcaaggcggcggtgaagggcaagagcaaccagccggtggcgtttatcgactccacgggccgcagctacgccattgatccgatcacgctgccatccgcgcgcgggcagggcgaaccgctgacgggcaagctgacgctgccgccgggcgccacggttgaccatatgctgatggaagccgacgatcaaaaactgctgatggcgtctgatgctggctacggctttatctgcacctttaacgatctggtatcgcgtaaccgcgccggtaaagcgctgatcagtctgccggataacgcccacgtcatgccgccgctgatcatcgagaacgaaagcgatatgctgctggcgatcaccgctgccggacgcatgctgatgttcccggtcagcgatctgccggagctgtcgaaagggaagggcaacaagatcatcagtatcccgtcagcggaagcggcaaaaggcgaagatagcctggcgcatctcttcctgctgccgccgcagagcacgctgaccattcatgtcggcaaacgtaagatcaaactgcgtccggaagagttgcagaaggtggttggcgagcgcggacgtcgcggctcactgatgcgtggcctgcagcgcatcgaccgcgtggagatcgactcgccggcgcgcagcaaagcggacgacagcgaagagtaa

SEQ ID NO: 526131 - DNA, 738 bp, Stenotrophomonas maltophilia
atgctatacattgttcgtcttattcttaccgttatttactgcattctggtctgtattttcggatcgatttattgcctgttcagcccgcgtaacccaaaacatgtcgcgacgttcgggcacatgtttggtcgccttgcgccattgttcggcctgaaggttgaaaagcgtctgcctgaaggggcggagaatttcggtaacgccatctatatcgctaaccatcagaacaactacgatatggtgacggcctcaaatattgttattccgccgaccgtaaccgtcgggaaaaagagcctgctgtggatcccgcttttcggccaactgtactggctcaccggtaacttgctgattgaccgcaacaaccgtgcgaaagcgcatggcaccattgcggaagtggtggatcagtttaaaaagcgccggatctcaatctggatgttcccggaagggacgcgcagccgcggtcgcggcctgctgccgttcaagaccggcgcgtttcatgctgcaattgcggcaggcgttccaattattcccgtgtgcgtttccaatacatcgaataagattaatcttaaccgtttgaaaaacggactggtcattgtcgaaatgctaccgccggtggatacctccaaatacggtaaagaccaggtgcgcgagctggccacgcactgccgcgagctgatggctcagcacattgcacagctcgataaagaagttgcagagcgagaagccgccggtaagatttaa

SEQ ID NO: 526132 - DNA, 1413 bp, Stenotrophomonas maltophilia
atgtcactcagtcggcgtcagtttattcaggcttcgggtatcgccctttgtgcgggtgcgatgccgcggacagccagcgccgccgggcagcaacagccgctgcctattccgccgttgattgaatcccgtcgcggacagccgctattcctcacgcttcagcgtagccactggtcctttacccagggaacgcgcgcgcaggtatggggcattaacggacgctacctcgggccgaccattcgcgtgtggaatggggatgacgtcaagctcatctacagtaaccggacgacggaaaatgtcgcaatgaccgtcagtgggttgcaggtgccggggccgctgatgggcggcgcggcgcgcatgatgtcgccgaatgccgactgggcgcccgtcctcccgattcgtcagagcgcggcgacattgtggtatcacgccaacaccccgaaccgcaccgcccagcaggtctataacggcctggccgggatgtggctgattgaagatgaggtcagtaaaacgctgccgatcccgaatcactacggtgttgatgatttcccgatcattattcaggacaagcgtctggataacttcggtacgccggagtacagcgagccgggcagcggtggctttgtgggcgatacgctgctggttaacggcgcgcaaagcccgtatgtcgaagtgtctcgtggctgggtgcgtctgcgtctgttgaatgcctctaactcgcgccgctacctgctgcaaatgagcgacggccgcgccctgcatgtgatttcaggcgatcaggggttattacctgcgccggtgtcggtgaaacagctggcgcttgcgccgggcgaacgtcgtgaattcctcgtggatatgaccaacggggatgaagtgtccgtgacctgcggcgaagcggcaagcattgttgaccgcattcgcggcttctttgaaccgtcgagcgttctggtctccacgctggtgctgacgctgcgcccgaccggcctgttgccgctggtgaccgacagtctgccgatgcgcctgctgccgcaggaaattgtgaccggccctgcagtacgcagtcgcgatatcagccttggcgacgatccgggcatcaacggcgcgctgtgggacgtaaaccgtattgatatcaccgcccagcagggaacctgggagcgctggaccgtccgctcggagatgccgcagtcgttccatattgaaggggtgtcattcctgatccgcaacgtcaacggggcgatgccgttcccggaagacaggggctggaaagataccgtttgggtggatgggcaggtagaactgctcgtctactatggacagccgtcatggccgcacttcccgttcctgttccacagccagacgctggagatgatggacagggggtcggtagggcagatgctggtgaatccggcaccgtaa

SEQ ID NO: 526133 - DNA, 705 bp, Stenotrophomonas maltophilia
atgcgccacttccaccagcggacgctcgccgttgccgaagatcagcatgtcggctttcgaatccaccagcaccgaacggcgcacggtgtcagaccagtagtcgtagtgcgcggtgcggcgcaggctcgcctcgatgccgcccaggatcaccggcacgtctttccatgcttctttgcatcgctgggtgtagacgagggtcgcgcgatcgggacgtttacccgccacgttatctgccgtataagcgtcgtcatgacgcagcttacggtccgcggtatagcggttgatcatcgagtccatgttgcccgcggtcacgccaaagaacaggttaggtttacccagacgcataaagtcgtctttgctgttccagtcaggctgagaaataatccccacgcggaaaccctgagcttccagcatacggccgcagatcgccatgccaaagctcgggtgatcgacatacgcatcacccgtcaccagaatgatatcgcagctgtcccagcccagttgatccatctcttcccgggacatcggcaggaacggcgccggtccaaagcaggctgcccagtactggggccaggagaagaggtcgcgatccggctggatcagggaaattgcgctcataatgcttccgaagaaaaaatagacaaaaggagcgggattatacgctggtttatcgggggaaatgaaggggtatttattgcccggtga

SEQ ID NO: 526134 - DNA, 501 bp, Stenotrophomonas maltophilia
atggggtacctcgaatcaaaccgtaccgggttcactgtcactgcatctgccagaaatgtgggaatgtcaggttataaccgcgttgcgccgcagtgggctattcactatagcctcgcgtataccagctggagccagttccaggagctgaaagccaccggcagcaacggccagacgctgttctataaagacgaaagcttccacgatgcttaccgtatcgcacttggtacgacctattatatggatgacaactggacgttccgtaccggcgtggcatttgatgacagtccggtaccggcagataagcgttctatctccattccggatcaggaccgtttctgggtaagtgcgggggcaacctacgcgttcaacgagaatgcctctatcgacgcgggcgtgtcgtacatgcatggacagaaagtgaccttccaggaaggcccttacgagtttacctctgaaggtaaagcctggctgtttggtaccaacttcaactacgcgttctaa

SEQ ID NO: 526135 - DNA, 753 bp, Stenotrophomonas maltophilia
atgaagcttcggctgtcggcgcttgcgctgggcgtaacgatgcttgtgggctgcgccagctctggcgagcaaacgggacgctccgatcctctcgaaggatttaaccgttcaatgtacaactttaactataatgtgctggatccatatctggttcgtccggttgccgtggcatggcgtgactacgttccgcagccagcgcgtaacgggctgagcaactttaccagtaacctggaagagccagcggtgatggtgaactacttcctccagggcgacccgtatcaggggatggtgcatttcacccgtttcttcctgaactctctgctgggtatgggcggcttaatagatgtcgcaggcatggcgaacccgaaattacagcgtgaacagccgcatcgtttcggcagtacactggggcattatggcgtaggttatgggccgtatgtgcacctgccattctacggcagctttaccgtgcgtgatgatggcggcgatatggtggatacgctgtatccggtgctgtcatggctcacctggccgctgtcgattggtaaatggaccgtggaagggattgaaacgcgtgcgcaactgctggactctgacggtctgctgcgtcagtcttccgatccgtacatcatggtccgcgaggcctatttccagaaccatgactttattgccaacggcggtaagctgaagccggaagataatccgaacgcgaaagccatcgagaacgaattaaaagatatcgattcggaataa

SEQ ID NO: 526136 - DNA, 861 bp, Stenotrophomonas maltophilia
atgaaagatattaacgaagaaaaaattggcgagaacaatgaggaacatgagattgaaagtgaggagaaagaccggggagaagagatagaagtcgatgaggatcgcctgccgtcgcgtgccatggccattcatgagcatattcgccaggatggcgaaaaggagatggagcgtgacgcaatggccctgctgtggtcggccatcgcagccggtctgtcgatgggtgcctctctgctcgccaaaggtatatttcacgttcaactggaaggcgtgccgggcggttttttgctggagaatttaggctacacgttcggctttattatcgtcattatggcgcgacagcagcttttcacggagaacaccgtcactgccgtactgcccgtcatgcaaaatccgacccttggtaattttggtttactgatgcgcctgtggagcgtcgtgctgctggggaacctgatcggtacgggcgttgcagcctgggccttcgagtatatgccaatctttgatgaaccgacccgcgacgcattcgtgaagattggcatggatgtaatgaaaaatacgccggttgaaatgttctctaatgccattatctccggctggatcatcgccactatggtctggatgttcccgtcagcgggcagcgcgaaaatcgtggtgattatcctgatgacctggcttatcgcactcgccgataccacgcacattgttgtcgggaccgttgaaatcctttatctggtatttaacggcacactccactggagcgccatgcgcaaatccgtaacgacatgtccaacaagcgtaaggccgaacttaaggctcaggaaaaaaaggataaaactgccgaaaaatcggcgtgaacggtga

SEQ ID NO: 526137 - DNA, 660 bp, Stenotrophomonas maltophilia
atggcgctgcttgaaaccggtatggcctggttctggccagacgagcgtgtccgtaaatggtttgacgttgaaggtctggataacctcaaacatgcccagatgcaaaaacgcggcgtgatggttgtgggtgtgcattttatgtcgcttgagctgggcggccgcgttatgggtctttgtcagccgatgatggcaacctatcgcccgcataacagcgcactgatggaatgggtacaaacgcggggccgcatgcgttcaaataaggcgatgatcagccgtaacaatctgcgcggtatggttggcgccctgaaaaaaggtgaagccgtctggtttgccccggaccaggactacggccctaaaggcagcagctttgcccctttctttgcggttaaagatgtcgctacgacgaacggtacctttgtgatttcacttctctctggcgcctcgatgttaacggtgaccatggtcagaaaagcggataagtcaggctatcgtctgcatatctcaccggagatggcgaactatcctgaggatgagagtgaagccgcgacctttatcaataaggtgattgagtttgagattatgcgagcacctgagcagtatctgtggatgcaccgccgctttaaaacccgccctctgggcgaagcctcactttatatctaa

SEQ ID NO: 526138 - DNA, 1236 bp, Stenotrophomonas maltophilia
atggctgaattcagtcctgaacgccgttttacgcgtatcgatcgtctccccccttatgttttcaatatcactgctgaactgaaaatggctgcgcgtcggcgcggtgaagacattatcgatttcagtatgggtaaccctgacggcccaacgccgccgcatatcgttgagaaactctgcacagttgcccagcgtcccgatacccatgggtattcaacctcacgcggcattccacgcttgcgtcgggcgatctcccgctggtatcaggatcgttatcaggtggatatcgaccctgaaagcgaagcgattgtgaccattggctccaaagaggggctggcccacctgatgctggcgacgctcgatcacggcgataccgtcctggtgccgaatccgagctacccaattcatatttatggggcggtgattgctggcgcgcaggtgcgttctgtcccactggtggaaggcgtcgacttcttcaacgagctggaacgggcgattcgtgaaagctatccgaagccgaaaatgatgatcctcggtttcccgtccaacccaacggcacaatgcgtcgaactcgaattctttgagaaagtggtcgcgctggctaagcgttacgacgtgctggtggtacacgatctcgcctatgctgatatcgtttatgatggctggaaagcgccgtcaattatgcaggtaccgggtgcccgtgatgtggcggttgagtttttcaccctgtcgaaaagctacaacatggcgggctggcgaattggatttatggtgggaaacaaaacgctggtgagcgccctggcgcgtattaaaagttaccatgactatggtacgtttacgccattgcaggtcgcggccatcgcggcgctggaaggggatcagcagtgcgtgcttgatattgccgcccagtacaagcgccgccgtgatgtgctggtaaaagggcttcacgaagcgggctggatggttgaaatgcctaaagcttccatgtacgtctgggcgaaaatccccgagccgtatgcggcgatgggatctctggaatttgccaaaaaactgcttcaggacgcgaaggtttgcgtttctccaggcattggctttggtgactacggtgacacgcatgtgcgtttcgcgctgatcgaaaacagcgaccgtatccgtcaggctgtgcgggggattaaaagcatgttccgcgcggatggcctgctcgcagtgaagagcgtcgtggaacaacccgagtcgtaa

SEQ ID NO: 526139 - DNA, 1698 bp, Stenotrophomonas maltophilia
gtgcacgaaatcttcaatatgctcctggcggtgttcgaccgcgcggcattaatgctgatctgtctctttttccttatccgcatccgcttgtttcgcgaactgttgcataaatctgcccactcgccaaaagagctgctggccgttacgtttatcttttcgatgtttgccctgttcagcacctggtccggcgtgccggtagaaggctcgctggtgaacgtgcgcatcatcgccgtcatgtcgggcgggatcctctttggtccctgggtcgggattatcacaggcattatcgccggcacacatcgatacctgattgatattggcggcgtgacggcagtcccctgctttatcaccagcattattgccggggtactctccggctggattaaccgcaaaatcccaaaaaaacagcactggcgtgcgggtataatcgcggggatggtctgcgaaacgctgaccatgatcctggtcgtcgtctgggcaccgaccactgcgctggggctggatatcgtctcgaagatcggtattccgatgatcctcgggagcgtctgtataggctttatcgtgctgctggtgcaaagcgtggaaggcgaaaaagaggccagcgccgcgcgtcaggcgaagctggcactggatattgccaacaaaacgctgccgcttttccgacacgttaacaccgaatctttacgtcaggtttgcgatatcatccgccgggatattcacgccgatgcggtcgccatcaccaatattgaccacgtgctggcctatgttggcgtcggtgagcacaattatcgcgacagcgacgataccatcagcccgaccaccagacaggcgattaactacggaaaaatcatcattaaaaacaatgatgaagcccaccggacgccagagatccactcaatgctggtgatcccgctgtgggaaaaaggcgtggtcacggggacgctgaaaatttactactgccatgcgcaccaaatcacctcctcgctccaggagatggcgattggcctgtcgcagattatctccacccaactcgaagtttcgcgtgcggagcagttgcgcgagatggcaaataaggcagagctgcgtgccctgcaaagcaagatcaatccccatttcctgtttaacgcgctgaacgctatctcctcttccattcgtcttaatccggataccgcgcggcagctgatttttaatctgtcgcgctatctgcgctacaacattgagttaaaagacgacgagcagatcgacatcaaaaaagagctgtatcaaatcaaggattacatcgcgattgagcaggcacgctttggcgataagctgacggtcatttacgatattgatgaagaggtcaactgcgtgatcccaagcctgctgatccagccgctggtggaaaacgccattgttcacggcattcagccgtgtaaaggaaaaggcgtggtcacgattagcgtgacggaaagcggtaaccgcgtgcgaatcgccgtgcgcgataccggacacggcatcgatccaaaagtgatcgagcgcgtcgaatcaaacgaaatgccgggaaataaaatcggactgctgaacgtgcaccaccgggtcaagctgctgtacggtgacgggctgcacattcaccgccttgagccgggcaccgagattgctttttatgttccgaacgaacgaacgcccgttaatgcccccatatccttgttgccgtag

SEQ ID NO: 526140 - DNA, 732 bp, Stenotrophomonas maltophilia
atgaaagtcatcatcgtagaagatgaaattctggctcagcaggagttgagctggcttatcaaaacccacagccagatggagattgttggctgttttgaggatggcctggacgtgctgaaatttttgcagcataaccgggtcgacgcgatttttctcgatattaatattccgtctctggacggcgttctgctggcgcaaaatatcaatcagttcgcccacaagccgtttattgtgtttgtcaccgcgtggaaagagcatgccgtggaagccttcgagctggaggcgtttgactatattctcaagccgtatcaggagtcgcgtattatcagcatgctgcataagctggaagccgcatggcagcagcagtcgctgcccgccagtgccaatccggtagcgcgggaaaacgacaccattaatctggtcaaggacgaacggatcatcgtcacgcctgtcgacgatatttactatgctgaagcgcacgaaaaaatgacgtttgtctatacgcggcgtgaggcctacgtaatggcgatgaacatcaccgaattttgcaacaaactcccggcagcgcacttcttccgctgccaccgctcgttctgcgtcaacctgaacaagatccgcgagatcgaaccctggtttaataacacctatattttgcggctgaaggatctggattttcaggtgccggtaagccgcagcagagtgaaagcgttccgccagctcatgcacctgtag

SEQ ID NO: 526141 - DNA, 966 bp, Stenotrophomonas maltophilia
atgacaaagtatgctttggtaggtgatgtaggcggcaccaacgcgcgccttgccctgtgcgatgtaaacagcggtgaaatttctcaggcgaaaacctattcagggctggattacccaagcctggaagcggtagttcgcgtctatcttgaagagcataaagtgagcgttgaagacggttgtatcgccatcgcctgtccgatcactggcgactgggtggcgatgaccaaccacacgtgggccttttcaattgccgaaatgcggaaaaacctcggcttctcgcaccttgaaattatcaacgatttcactgcggtttccatggctatcccaatgcttaaacctgagcatctgattcagttcggcggtacggccccggttgaaggcaaacccattgctgtttacggcgccggaaccggtctgggggtggcgcacctggttcacgtcgacaaacgctgggtcagcctgccgggtgagggcggtcacgtggattttgcgccgaacagcgaagaagagggcattattcttgaggagctacgcgccgaaattggtcacgtgtcggccgagcgcgtgctttctggcccgggtctggtgaacctgtatcgggcgattgtaaaatcagacggacgtctgccggaaaatctgcagcctaaagatgtgaccgaacgcgcgctggccgacagctgtattgactgccgtcgtgctttgtcgttgttctgcgtcattatggggcgtttcggcggcaacctggccctgaatctcggcacctttggcggggtctatattgcgggcgggatcgtgccgcgcttcctcgatttctttaccgcctccggtttccgtggtggctttgaagacaaaggccgcttcaaaagttacgtgcaggacattccggtttacctgattgtccacgacaatccgggcttgcttggctccggggcgcatctgcgtcaggtacttggccagatcctctga

SEQ ID NO: 526142 - DNA, 789 bp, Stenotrophomonas maltophilia
atgctgttattggctgtcccggcgctaattattggcgtagcgtcgagcctggtgctcatcgtcgtcatgaaagtagcggcagtgctgcaaacgattttatggaccgcgctgccggttaaacttggcatcagcactgactcgccagggtggatcatgatgatgctgaccctgaccggaattgccgtaggtctggtgatccgctatagcccgggccatgccgggccggacccggcactggaacccttgattggtgcgccagtatctccctcggctctgccggggcttgttatcgcgctgattatcggtcttgcgggcggcgtaagcctcgggcctgaacatcccattatggcggttaatatcgcgctggcggtctttctgggagcgcgtcttttcccgcgcgttggcgcgctggactggacgattctggcttccgccggtaccatcggggcactgtttggtaccccaatagcggctgcgctcatcttttcgcaaacgctcagcagcgacaatgatgtgccgctgtgggataaactctttgcgccattgatggccgccgcagcaggggccctcacgaccagcctgtttttccatcctcatttttcactccccatcccccactatggccagatgcaactcaccgatattgtcagcggtgccgtcgtcgtcgcgatagccattgcgctgggaatgatcgcagtgtggtgtcttccgcgcctgcatcgtctgatgcacaggctgaagcatccggtgctgattctgggtatgggcggttttattctgggcgtttag

SEQ ID NO: 526143 - DNA, 378 bp, Stenotrophomonas maltophilia
atgcagcagctggccttcagccaggtttttggcgtctccgattatctgctgttcgcgctggtaaaactggcggcgctggtgatcgctgcggcctgtggtttccggggaggacggatcttgccggcggtatttgttggcgtcgcgctggggctgatgctgcatgagcacgtcgacgctgtccctgcggcgattaccgtctcctgctccattctggggctggtactggtggtaacgcgcgatgcatggctgagtctgtttatggcggccgttgtggtgccggataccacgcttctgccgctcctttgtatcgtgatgttgcccgcctggctcctgctggcgggcaaaccgatgttgatggcatggcgaaacgacaggtaa

SEQ ID NO: 526144 - DNA, 1656 bp, Stenotrophomonas maltophilia
atgcgtaccccctattgcgtcgccgattacctgctggaccgactaacagattgcggtgccgatcatctgtttggcgtgccgggcgactataacctgcagtttctcgaccatgtgatagacagcccggacatctgctgggtgggctgtgccaacgagctgaacgcgtcttacgccgcagacggctatgcccgctgtaagggatttgccgcactcctgacgactttcggcgttggggagttaagcgccatgaacggtgtggcgggcagctttgccgaacatgtccccgtgctccatattgtgggggctccgggtatggcggcgcagcagcgaggagagttactgcaccacaccttaggcgacggcgagttccgccatttctaccacatgagcgaacccatcaccgttgcacaggcggtgcttaccgaacaaaacgcctgctatgaaattgacagagtcctgaccaccatgctgcgggagcgccgtccgggctacctgatgctgcccgccgatgtggcgaaaaaagccgctacgccccctgtaagcgctctcactcttaactccgcaccggccgattcagcctgcatgcaagcgttccgtgaggctgccgaaaagcgtttgtcaacgagcaaacgcaccgcgctgttagcggacttcctggtgctgcgccacggtttgcgcgcggcccttcagacgtgggtgaaagaggtgccgatggcacacgccaccatgctgatgggcaagggcatttttgacgaacgacagagcggtttttatggcacctacagcggatcggcgagcgccgcggcggtcaaagaggcaatcgagggggctgatacggtgctgtgcattggcacgcgctttaccgatacgctcacagccgggtttacccaccagctgacgccagatcagacgatagaggttcagccccacgcgtcccgcgtcggcgacgtctggtttacgggtatcccgatgagggaggccattgaaacgctgacagcgctgtgtaaaacgcatgtgtgtgatacgcgagctccatctgatcacagctcttctttccccactatcgaaggggcgctgactcaggagagcttctggcgtaccctgcaaacgtttattcgccccggagacattattctggccgaccaggggacgtctgctttcggcgctatcgatttgcgtttaccggcagacgtgaactttatcgtccagccgctttggggatcgatcggctacacgctcgcggcggcgtttggcgcgcaaacagcgtgtccgaaccgacgcgtgattgtcctgacgggtgacggtgccgcgcagttgaccattcaggagctgggatcgatgctgcgcgacaagcagcgcccgattattctggtgcttaacaacgagggatacacggttgagagagccatccacgggccggagcagcgctataacgatattgccctctggaactggacgcagatcccgcaggcgctgagcctggcgccagaggcagaatgctggcgcgtcagcgaagcggaaacactggcggaggtgctggataaagtagcacaccacgagcgactatcgctgatcgaggtgatgctgccgaaagccgatattccgccgctgctgagcgcgctgaccaaagcgctggaggcgcgcaataacgcctga

SEQ ID NO: 526145 - DNA, 321 bp, Stenotrophomonas maltophilia
atgggttatcaacctgacaaaaatcgttaccagacaatgcaatatcgccgctgtggacaaagcggcctcaagcttcccgccatctcgctggggctttggcataattttggcgacgcgacgctgctcgaaaacagccgtcaacttttacagcgcgccttcgatttgggtattactcattttgaccttgccaataattacggcccacctcctggttcagccgaacgcaacttcggacgcatcctgcaggaggatttcctgccctggcgcgatgagctaatcatctccaccaaagcgggctacaccatgtgggacgggccttaa

SEQ ID NO: 526146 - DNA, 621 bp, Stenotrophomonas maltophilia
atggggctggagtacgttgatatcttctatcaccaccgccccgatccacaaacgccgctacgtgaaacgatgaaagcgcttgaccatgtggtgcgccagggcaaagcgctgtacatcggcctgtccaactacccggcagaactggcgcggcaggcgattgaaatactggaggatctgggtacgccctgtctaatccaccagccgaagtactccatgtttgaacgtgcgcctgaagaggggttgctggacgtgttgcagcaaaaaggggtgggatgtatccccttctctcccctggcgggcggacagttgaccgatcgctatctgaacggcatcccggcggattctcgcgcagcaagcggcagtaagttccttaatccggaccagatcaccgacaaaaagctggaaaaggtacgcaagctgaatgcgctggcggaaaaacgggggcaaaagctttcgcaaatggcactggcctggatcctgcgccacgatgcggtgacatcagtgctcatcggcgcaagcaaaaccggacaaattgaagatgctgcaggcatgcttgaaaatcgtcatttctccgcagaagagctgaagacgatagaagcgatcctgtccagttcagattaa

SEQ ID NO: 526147 - DNA, 348 bp, Stenotrophomonas maltophilia
atgttcaggtcactgattcttgcagcggtactactggcttcggccccgctggtcgccaatgcgggcgaaatcaccctgttgccatcgattaaattacaaattggcgatcgtgatgactacggcagatactgggacggtggctactggcgcgaccgtgactactggcaccgacattatgagtggcgtaaaaaccgctggtggaaacacgataacggctatcaccgtggctgggataagcgtaaggcctacgagcgcggctaccgcgaaggctggaacgatcgtgacgaccgccgtggcggcagggggcacggaaaaggcagaggccatggtcacggccatcaccattaa

SEQ ID NO: 526148 - DNA, 1239 bp, Stenotrophomonas maltophilia
atgacgaatagtcgcgtagagagtagcagcggcagggcggcacgcaagctgcggttcgcattaatgggacctgcattcattgccgcgattggctacatcgatccgggtaattttgcgaccaatattcaggccggggccagtttcggctataagctgctgtgggttgtggtgtgggccaacctgatggcgatgctgattcagatgctttccgcgaagttgggtattgccaccgggaaaaacctggcggagcaaatccgcgatcactatccgcgtccggcggtatggttttactgggtccaggcggaaattatcgccatggccaccgatctcgccgagtttatcggggcggcgatcggctttaagcttattctgggcgtctccctgctacagggcgccgtgctgaccggtatcgccacgttccttattttgatgctccagaggcggggacaaaaaccgctggagaaagtcatcggcggcctgctgctgttcgtcgctgccgcctatattgttgagctgattttctcccagccgaatctggtgcagttgacgaaagggatggtgatcccgtcgttacccacctctgaagccgtatttctggccgccggggtgctgggggcgaccattatgccgcacgtaatttatctgcactcttctttaacccaaaatctgcacggcgggacgagtaaagagcgctactccgcctcgaaatgggatgtggcaattgcgatgaccattgccggatttgtgaatctggcgatgatggcgactgccgccgccgcgtttcactttaacgggcataccggggttgccgatctcgaccaggcgtacctgacgctggagccgttgctgagccatgccgctgccactatttttggtttaagcctggttgctgcgggactttcctctacggttgtggggacactggccgggcaggtggtgatgcaggggttcgtacgtttccatattccactgtgggttcgccgttcggtaacgatgctgccttcctttattgtaattctgatggggctggatccgacccgcattctggtgatgagtcaggtgctgctgagtttcggtattgcgctggcgctggtgccgctactgatattcaccagcaacaaatcgctgatgggcgatctggtgaattcgacgtgggtgaaacgcgccgggtgggccattgtggtcgtggtggtggcgttaaacatgtggttgctgataggcacagccgcaggcctgtaa

SEQ ID NO: 526149 - DNA, 825 bp, Stenotrophomonas maltophilia
atgcctacctggaaccgtgaaacactgacgatcagggctatacaatcagtattgaaacaggattatacacactgggaactcattattatcgatgatttctcatcgtcatttgataaacttcagacttatatcgccgatctgaatgacccgcgcattacctacatccgcaatgaatttaattccggagcctgtgccgtccggaatcaggcgatacgaatggccaagggatatctgataacgggtctggatgatgatgatgaatggctgccgacacgcctgtcctcctttcttgcctgccaacataaacttcaacagcacagcttcttatacgctgatgattacctttgcgacagcaccggatacaagcaccttaatgaattacaggtttaccctaaacctccctataaaaagaacctgtttgataagcggaatattatcggcaaccagatgcttactttaaccagccggatgcagcaggttctgtttgatgaacacctgaccgccgctcaggattatgatgcattctaccggttggctgaaacctatggcgatcctttcaaactggacgtgataactcaggtgctatatgtcaatcacggtgaggtccgcatcacctgctcaggacgtaagttttcaggttatctggatttttaccggaagcacaaagcaaaattagacgtatcgagtaaaaaatatcagcttttcaccctgtactacattcgcaacaaaaggatgcgaccacaaacgctaatgaatctgatgacattacgcaatctgaaacgctatctgatgatgtattccagcttccggaacaggaagttctaa

SEQ ID NO: 526150 - DNA, 621 bp, Stenotrophomonas maltophilia
atgagtcagtttttctatatccatccggataacccacagctacgtctgattaaccaggctgtggaaatcgtccgtaaaggtggcgttattgtctacccaaccgattctggctacgcgctgggctgtaaaatcgaggataaaggggcgatggagcgcatctgtcgcatccgccagctgccggacggccacaactttaccctaatgtgtcgcgatctctctgagctgtcgacctatgcgtatgtcgacaacgtggcctttcgcctgatcaaaaacaacacgccgggaaactacaccttcattctgaaagggacaaaagaggtgccgcgtcgtctgttgcaggaaaaacgtaaaaccatcggcatgcgcgtgccgtcgaacccgattgcccaggcgctgctggaaaccctcggcgagccgatgctgtctacctcgctgatgctgccgggcagtgagtttaccgagtccgacccggaagagatcaaagatcgtctggagaaagtggtggagctgattattcatggcggctatctaggccagcaaccgaccaccgtggtggatctcaccgaagacgcgccagaagtgattcgtgaaggcgtgggcgatgttaagcctttcttgtaa

SEQ ID NO: 526151 - DNA, 894 bp, Stenotrophomonas maltophilia
atgggaagtgctttgagcgataccacctacgccgtaatttatgatttacacagccatacgcaggcttcagatggcctgctgacgcccgaagccctggtccatcgcgccgttgaaatgcgtgtcggcacgctggcaataaccgatcacgacacaacagacgccatccccgccgcgcgcgccgagattgcccgaagcgggctggcgctaaatctggtgcccggggtcgagatctccacgctctgggaaaaccacgaaattcatatcgttggcctgaatattgatacagaacatccggcaatgtgcgcatttttgcaagaacaaaaagcacgacgcaatcaacgcgcggagttgataggcgaacgtcttgagaaggcgcatatccccggtgcgctggaaggtgcgcgcaagctggcgaacggtggggcggtcacgcgcggccatttcgcccgttttctggttgacgccggtaaagcgacgaccatggcgaatgtgtttaaaaagtatctggcccgcgggaaaaccggatacgttcctccccagtggtgtacaataaaacaagctattgatgtgattcatcattctggtggtaaggccgtattggcccatccggggcggtataatctttctgctaaatggctgaaaaggctgctggcccactttgccgaatccggcggtgaggcgatggaagttgcccagtgtcagcaggcacccaatgagcgttcgcagctcgcgacctacgcccgtcagtttggcctgcttgggtcacagggttcagatttccatcagccctgcgcgtggattgaactggggcgcaagctctggttacccgctggcgttgagcccgtctggcagctctgggaacagccacagcaaattgaagagagggaagtatga

SEQ ID NO: 526152 - DNA, 1563 bp, Stenotrophomonas maltophilia
atgcaaacagccaaaccccacctcgaactgttgacctgcgagacggcctatcgccataaccctaccgcgctctttcatcaggtgtgcggtgcacgtcctgcgacgctgctgctggaatctgctgatatcgacagcaaggacgatctcaaaagcctgctgctggttgacagcgcgctgcgcattaccgcagcgggtgacactgtcactattaaggcgttatccgagaatggtgcgtcgctgctgccgctgctggatgcggctctgccttcaggcattgaaaatgagcgtcatccggacctgcgaattctgcatttcccgccggtaagccagttgctggatgaagatgcccgcctctgctcactctccgttttcgacgccttccgcctgctgcaaaatctggtcaatgtgccggaagatgagcgcgaagcaatgttctttggcgggctgtttgcttacgacctggttgctggctttgaagatttaccggaaaccgagcagggtaaccgctgcccggactactgcttctacctggccgaaaccctgctggtgatcgaccatcagaaaaaatacacccgcatccaggccagcctgttcacgccgtccgtgtctgagaaaaaccgacttgggcagcgcatcgcccaactgcaacagcagatgtcagaagcaccgcccgcgctcccggtgcagcgtgttgaaaagatgacctgcgaggtgagtcagaccgacgatcagtacggcgcggtggtgcgtcagatgcaaaaagcgattcgtgccggggagattttccaggtggtgccgtcccgtcgcttttcactgccctgcccgtcgccgctggcggcttacgatgtgctgaaaaagagcaacccaagcccgtacatgttctttatgcaggacaatgatttcaccctgttcggcgcgtcaccggaaagcgccctcaagtacgacgccaccagccgccagattgagatctacccgatagcgggaacccgtccacgcggccgtcgtgccgatggctccctggaccgcgatctcgacagccgcatcgaactggaaatgcgtaccgaccacaaagagctctccgaacacctgatgctggttgacctggcacgtaacgacctggcgcgtatttgtacgccgggcagccgctatgtggcagacctgaccaaagtcgaccgctactccttcgtcatgcatctggtatcccgcgtggtgggtgagctgcgccacgacctcgacgtcctgcacgcctaccgcgcctgcatgaacatgggcacgttgagcggcgcgccgaaagtccgcgccatgcagctgattgccgaagctgaaggccgccgtcgcggcagctacggtggcgcggtgggctatttcaccgctcacggtgacctcgatacctgcatcgtgattcgctccgcctacgttgaggacggcattgctaccgtccaggccggggccgggattgtgctggattctgttccgcagtcggaagccgacgaaacccgcagtaaagcgcgcgcggtactgcgcgccattgctaccgcacaccatgcacaggagattttctga

SEQ ID NO: 526153 - DNA, 1017 bp, Stenotrophomonas maltophilia
atggctgacattctgctgctcgataatatcgactcctttacctacaacctggcagatcagctgcgtgcgaatgggcacaatgtcgttatctatcgcaaccacgttccggcccagacgctgattgaccgtctggcgaccatgcaaaacccggtgctgatgctctccccggggccaggcgcaccgagcgaagcgggctgtatgcctgagctgttgacccgtatgcgcggcaagctgccgattatcggcatctgcctcggccaccaggcgattgtcgaagcctacggtggttacgtgggtcaggcgggggagatcctgcatggtaaagcgtcaagcattgaacatgacggtcaggcgatgtttgccggtctgccgaacccgcttccggtagcgcgttaccactcgctggtcggcagcaatattccggccgggctgacgattaacgcctcgtttgaagggatggtgatggcggtgcgtcacgatgcggatcgcgtctgcgggatgcagttccacccggaatctatcctgacgtctaacggcgcgcgcctgctggagcaaacgctcaactgggcgctgcaaaagctggagcagaccaacaccctgcaaccgattctggaaaaactgtatcaggcccagaccctgagccagcaggagagccaccagcttttctccgccgttgtgcgcggcgagctgaagcctgagcagctggccgctgcgctggtgagcatgaaagtgcgcggcgaaagcccgcaggagatcgccggtgcggcaaccgcgctgctggaaaatgctgccccgttcccgcgcccggactatccgtttgccgatatcgttgggaccggtggcgacggcagcaacagcatcaatatttcgaccgccagcgcctttgtggcctgtttgcgccgaagtatcacaccggtttccgccacgcgatgccggttcgccagcagcttaaaacccggacactgtttaatgtgctcggtccactcattaacccggcgcacccgccgctggcgctga

SEQ ID NO: 526154 - DNA, 474 bp, Stenotrophomonas maltophilia
gtgctcggtccactcattaacccggcgcacccgccgctggcgctgattggcgtttacagtccggagctggtcctgccgattgcggagacgctgcgcgtcctcggttaccaacgcgccgccgtggtacacagcggcgggatggatgaagtttccctgcatgcgcccacgctggtggccgaactgaataacggcgaagtgctgaactatcagcttgaggccgctgatttcgagttgaccccgtaccatcaggacgccctggcgggcggcacgccggaagaaaaccgtgacattctcacgcgcttattacaaggtaaaggtgaggccgcccatgaggccgccgtggcggccaacgtagccatgctgatgcgtttacatggcgaggaagatctgaaagccaacgcccaaaaagttctggacgtactgcgctccggtgcagcttacgatcgcgttaccgcacttgcggcaagagggtaa

SEQ ID NO: 526155 - DNA, 1212 bp, Stenotrophomonas maltophilia
  misc_feature (403)..(412): n is a, c, g, or t
atgacgacattacttaacccgtattttggtgagtttggtgggatgtacgtcccacaaatcctgatgcccgcgctgcgccagctggaagaagcgttcgtgagcgcgcagaaagatccggcgtttcaggcggagtttactgacctgctgaaaaactacgccggtcgtccgacggcactgaccaaatgccgcaacctgaccgaaggcaccagaaccacgctctaccttaaacgtgaagatctgctgcacggcggcgcgcataaaactaatcaggtgcttggccaggctctgctcgccaaacgtatgggtaaaaccgaaattatcgccgaaaccggcgcgggccagcacggcgtggcctctgccctcgccagcgccctgctcggcctgaagtgccgcatctatatgnnnnnnnnnntctatatgggggcgaaagacgtggaacgccagtcgcctaacgtgttccgtatgcgtctgatgggggcggaagtgatccctgtgcacagcggttctgccacgctgaaagatgcctgtaatgaagcgctgcgcgactggtctggcagctacgaaaccgcccactatatgctcggtaccgcggcaggcccacacccgttcccgaccatcgtgcgtgaattccagcgcatgatcggagaagagactaaagcgcagatcctcgaaaaagagggtcgcctgccggatgcggtgatcgcctgcgttggcggcggatctaacgccatcggcatgtttgccgattttatcgacgaaaccagcgttgggctgattggcgttgagcctgccggccacggcattgaaacgggtgagcacggtgcgccgctgaagcatggccgcgtggggatctatttcggcatgaaggccccgatgatgcagaccgatgaagggcagattgaggagtcttactcaatttcagccgggctggatttcccgtccgtagggccgcagcacgcgttcctcaacagcaccggccgcgcggattatgtctccatcactgatgacgaagcgctggaggccttcaaaacgctgtgtcgcaatgaagggatcatcccggcgctggagtcttcccacgcgctggcacacgcgctgaaaatgatgaaggaaaacccggaaaaagagcaactgctggtggtaaacctttccggtcgcggtgacaaagatattttcaccgttcacgatattctgaaagcacgaggggaaatctga

SEQ ID NO: 526156 - DNA, 810 bp, Stenotrophomonas maltophilia
atggaacgctacgacaacgcatttgcacaactgaaagcccgccaggaaggcgctttcgttcccttcgtgacgctgggcgaccccggtccggagctgtcgctgaagattatcgataccctgattgacgccggtgccgacgcgctggagttggggattccgttctccgatccgctggcggatggcccgaccatccagaacgcgacgcttcgcgcgtttgctgcgggcgtgacgccgggccagtgcttcgaaatgctggcggcgatccgccagaagcacccgaccattccgatcggcctgctaatgtacgccaacctggtgttcagccgcggtattgatgcgttttacgcagagtgcgcccgcgtgggcgttgactccgtgctggtggctgacgtgcccgttgaagagtctgcgccgttccgtcaggcggcgatgcgccacaacgtcgcgccgattttcatctgtccaccgaatgccgatgacgctctgttgcgccagattgcctcttacggacggggttacacctacctgctctcccgtgcgggcgtcaccggtgcggaaaacaaagccgcgcttccgctgcatcatctggtggagaagctggcagaataccatgctgcgccgccgcttcagggctttgggatttcctctccggatcaggttactgcggcgattgacgcgaaagccgccggggccatttccggttcggctatcgtgaaaatcatcgagaagaacgtggataagccagatcagatgctggctgagttacacgcattcgtcacatccatgaaagcggccacacacaaggcgtaa

SEQ ID NO: 526157 - DNA, 1212 bp, Stenotrophomonas maltophilia
atgtcctggcattccttcaaacagacttacctggttaagttctggtcacctgttccggccgttatcgcggcaggcattctctctacctattatttcggtattaccggcaccttctgggctgttacgggcgagtttacccgctggggtgggcagctattacagctggcaggcgttcatgccgaagagtggggttacttcaaactgatccatcttgagggctcaccgctgacccgcatcgacggaatgatgatcattggcatgtttggcggatgttttgcggccgcgctgtgggccaacaacgttaagttgcgcatgccgaaaagccgcatccgcattatgcaggccgtggtcggcggtatcattgccgggtttggcgcccgcctggcgatgggctgtaatctggccgcgttctttaccggtattccgcagttctcgctgcatgcctggttctttgccgtcgccaccgccattggctcatatttcggtgcaaagttcaccctgctgccactgttccgcattccggtgaaaatgacgaaagttagcgctgcatctccgttaacgcaaaaacccgatcaggcgcgtcgtcgcttccgcctcggtatgctggtcttttttgctatggttgcctgggcgatttgcacggcgatgaatcagcccaaactcggtctggccatgctgttcggcgtcggctttggtctgctgattgaacgcgcgcagatctgctttacctccgcgtttcgcgatatgtggatcaccggacgaaccatgatggcgaaggcgatcattgccggtatggccgtgagcgcgatcggcatcttcagctacgttcagctcggcgtggaaccgaaaatcatgtgggcgggcccaaatgcggtcattggcgggctgctgtttggttttggcatcgtgctggcgggcgggtgtgaaaccggctggatgtatcgcgctgtggaaggccaggtgcattactggtgggtgggtctgggtaacgtgattggctctacccttctggcctgctactgggatgacgtctctccggtgctggcaacaaactgggacaaggtcaacctgctgaaaacctttggtccactcgggggactcctggtgacctacgccctgctgcttatcgccttcttactggttgttgcacaagagaagcgcttcttccgacgcgtcaccgtcaaaactgaaactcaggagaatgccgcatga

SEQ ID NO: 526158 - DNA, 234 bp, Stenotrophomonas maltophilia
atgaaagagatcgtgcctgattatcgtctcgatatggtgggtgaaccttgcccttacccggccgtcgccacgcttgaagcgctaccgcagctaaagaaaggtgaaattctggaagtggtgagcgattgcccccagtcgatcaataacattccgcttgatgccaaaaatcacggctataccgtgctagatatccagcaggacggaccaaccattcgttatttaattcagaagtga

SEQ ID NO: 526159 - DNA, 633 bp, Stenotrophomonas maltophilia
atgaaaaaattagcggtggcagcccttatcttaagcagtctctctggcggcgcgtacgcgcatgaagcaggtgaattctttattcgtgccggttcggcaacggtgcgtccaacggaaggttccgacaatgtactgggtatgggcgggtttaacgttagcaataacacccagttaggcctgacattcacgtatatggctacggataacattggcgttgagcttctggccgccacgccattccgtcaccgcgtcggtttagggccgaccggggacattgctacggtgcaccatttaccaccaaccctgatggcgcagtggtacttcggcgattccagcagcaagttacgcccttatattggtgcaggcgttaactacaccaccttctttgatgagaaatttaacgataccggtaaagaggctgggctatccgatctcagcctgaaagactcatggggcatggcggggcaggttggtctggattatctgattaaccgtgactggctgatcaacgcctcggtctggtatatggacattgatacggacgtgcgctttaaagctggcggccagcagcaaagtatcaatacccgtctggatccgtgggtatttatgttctcagcaggctatcgtttctga

SEQ ID NO: 526160 - DNA, 405 bp, Stenotrophomonas maltophilia
atgagtgatcataacccgtgcatgacgtgcggagcctgttgtgcgtattttcgagtctctttctactgggctgaagccagcgatggcggcggcaccgttccggttgatctcactgaacccttgacccctttcctgcgttgcatgcgcggcaccaaccaaaaacagagccgctgtgtggcactgcaaggtgaaccaggggtatccacccgctgttccatttacgcggatcgccccagcccgtgccgcactttcgcgatgtcgggagaggatggacaggtcaatgaggcatgcaatcgcgcccgcgcccgctatggattaccgccgctttacaaagatatgcttttccatacaagccttgatgctgccaccagcgtgttatccggtgtacaattgccggctaattaa

SEQ ID NO: 526161 - DNA, 777 bp, Stenotrophomonas maltophilia
  misc_feature (718)..(727): n is a, c, g, or t
atgtctatcacggcgaagtctgtctaccgtgacacgggaaattttttccgcaatcagttcgttacttttttactgatcgcgttgttgtgcgccttcattacggtggtgctgggtcatgcgttctcacccagtgatgaacagattgcctcgctgagccagggggatcatcttgcaggcagcgcagggttatttgaccttgtgcagaatatgacgccagagcaacagcaaatcttgctgcgtgcatctgcggcatctaccttctcggggctgatcggcaacgccattctggcgggtggcgtgttggtgatgatccagctggtgtctgccggccaacgcgtcagcgcgttacgtgccatcggggccagtgctccggtgctgccgaaactgtttatcctcatcttcctgactacgctgctggtccagatggggataatgttggttgtcgttccgggcgtgctgctggctatcgtgctttcatttgcgccagtaatggttgtgcaggacaaaatgggtattttcaccgccatgcgcagcagtataaggctcgcgtgggcgaatatgcgtctggtcgccccggccgttatcagctggttgctggccaagactctactgttgctgtttgcgccgaattttgcggtattaacgccaaacgtcggcgcggttgtcgccaatacgctgagcaatctgatttcagctgtactgctggtctatttgttcnnnnnnnnnnttgttccgcctgtacatgttaattcgtcagtaaccgggatcgcagaatga

SEQ ID NO: 526162 - DNA, 540 bp, Stenotrophomonas maltophilia
atgaagcagtttcttgattttttaccgctgatcgtatttttcgctttttataagctgtacgacatctatgccggcacgctggcgctgattgtggcaacggctgtggtgctgatttacagctgggttcgctatcgcaaagttgaaaagatggcgctcatcactttcctgatggtggcggtgtttggtggtctgacgttgttcttccacaatgatgaatttatcaaatggaaggtcacagtgatttacggcctgtttgcgggcgcgctgctcatcagccagtgggtgatgaagaagccgctgatccagcgcatgctggggaaagaactgacgctgccgcaggctgtgtgggggcgtctgaatatcgcctgggcgctattttttattctgtgtggtctggcgaatatctatatcgcattctggctgccgcagaatatctgggtcaacttcaaggtgtttggcctgacggcgctgacccttatcttcaccctgctcagcggcgtttatatttatcgccacatgccgcaggatgacaagcactga

SEQ ID NO: 526163 - DNA, 1092 bp, Stenotrophomonas maltophilia
atggtgagaacgtacggatctcgccctgcgccaacggtactgccaaaacaggtagtgaaatctaaaacggcacaggtgccggatgaacctactcccggcaaggacggtaaaacctatgccgggcagcttcagaagatgaccaaagcagaacgctggcaggcgcgtaaggatctgattgcgaaggggagcaatagcctttatccggatgcccagatcgccgcgaaacgtctggcagcgaataatatcgcggtggaaaaagcgaagcttgcggaaaatatttataagaccgtgaacccgctggaaaccacaccgggcgtgccggagggatggacagatatcagtaatgacgatgcgctgttaggaaagttcgggctgaacaaatccatgctctttgacgatgatacgtcccccaattttctggcgcgcgtctatcaaccgaagccggaagtgtttggtgcagatatgaaccccacgctggtattcaggggatcgcgcgagcctggtttcgcctctctgtctgagaatgtctcctctctactgaccaaaggggaactggcgccggtggtaaacggggctgactggtcgaataacttctcacagggcatgggtatggcttcagattattataaaaaggccgtgagtatcggtaaggagctggcaaggtcagggcagaatattgatattgccggtcattcccttggcggtggtctcgcctctgcaacctctatgggcagcgggaaagcggggtggacgtttaacgccgccggcctcaatgccggaaccgtagaaaaatacggcggtaagatattaggcagtacggataatatccaggcgtatcgggttgaaggtgaactgctgacgaagattcaggaagttaacccctgggaagatctgaaaacgatgaaagggcatgtcccttcgtggatcctcaaagaggaaatctctgcgctgagccctaatgctgccggaataccccatgatcttcccggtggaaccggaagcgcgctggaccgccacggaattaatcaagcgattgattgcatagagcaacagaaggatgaggatatttcgataatcgggagtcgattgtga

SEQ ID NO: 526164 - DNA, 375 bp, Stenotrophomonas maltophilia
  misc_feature (343)..(352): n is a, c, g, or t
atgtataacatcaagtttgtctatctgttccacgagaacgtctcgccagcgctgtttgcgaaaataatccgcccgtccgttgccggacagtggattatgtcggttcatgaccattcgctgcgctcgctcttcacgcgctacgatctgctgcgcacgatcaccggtgcgaatccttatcagtccgggcgcgatacccgcacgctgatcgcgcaggatttagagatgggcagagtggttgctattgacgaaagttttcgtgactggtcatcagtaacggaaattttttatatcaacgccaaagggcaactccaggctgcctcgctggtcggcctgggctggtatnnnnnnnnnntatccggtgagtacgattgttga

SEQ ID NO: 526165 - DNA, 1434 bp, Stenotrophomonas maltophilia
atgacggataatgataacaatcggactgtcccaaacgcgctcccggtcgggtaccgtttcaatgagtttgagataaaagaggtgattggcggcggcggattcggcatcgtctatcgcgcctgggatcaccagctcgaacgcactatcgctatcaaagagtttatgccttcctccctcgccgtgcgcggcgaggatatgacgctggtactgcgcagcgagcgcttcggcaaagcgttttctgccggtctgaacagcttcattcaggaagcccgcctgctggcgcgctttaaccacccgaacctgctgcacgtgctgcgcttctgggtgcaaaacgacacggcctatatggggacgctgttttacagcggcaccacgctgtcgcgtctgcgcgaagagaaaccggagctgattaacgaggcgtggatccgccgcatgctgccaatgctcttcggcgccatcaaaacgatccacgatgagggctacctgcaccgcgacatctcgctggataacattcagattcaggataacggtctgccggtgctgcttgatttcggatcggcgcgccgcaccatcggtaatctctcggatgagacggaaaccatgctgcgtccgggttttgcgcttatcgagcagtataccgacgacaatgaaagcgagcaggggccgtggacggatatctacgcgctcggcgccgtattgcgcacccttatcgttggctctccgccaccggtcagcgtggtgcgttcgattcaggacacctgcaaaccactggtggagctgatgccgcaggggtattccattccgctgcttcaggccatcgacaaggcgctggcgctgcatatggaagaccgtccgcaatccatcgaagagtttgcggcgctgatcgagatgcccgtcgccggtatcgacgaggtgctgaccgcgaagaagaccggcacgatgctggtgccggtggaagaggagacatctgcttccgcgctggactggcgacgttacaagcttccggggctggtggccgcgggcgtgctggttggggtggttgccggtgcgatgctgttcggcggcggcagccaggaaacgccagcgcagacggcgcaaacccctgccgtgagccctccggctgaaacctccgccgcagcggaaaccagaccggcaacggccgacgtgagcgagccggtagcgccacctgctacggcgcagcagagtgcgtcgcctgtcgacgccagcccggtcgcgctggtctatatccgcatgcttgatggcgagacgctgaaggtgaacggcgagccgaaagcgctgcgtccggggaataacggttacgcatcgctgaaactgcctgcaggcgagacccgcattgaactggaaggcaatggaagaacgcgtacccagacgctggatattgcgaagccaggcacctggctggtgaatccgtaa

SEQ ID NO: 526166 - DNA, 2622 bp, Stenotrophomonas maltophilia
  misc_feature (2298)..(2307): n is a, c, g, or t
atgtcagaaattagccgtgccgtgcttttcggcaaactggatacgctgttatttacctctctggaaagcgcgactgccttctgtaagctgcgcggcaacccgtacgttgagctggtgcactggctgcatcagctgatgcagcagcaggatggcgatctgcaacaggtcatccgtcacttcgcccttgatgaacagcagctgacgcgcgatatcgtggcggcgctggatgccctgccgcgtggcgcgagttccgtctctgatctttccgagcatatcgacagcgccgtcgagcgcgcatgggtctacggctcgctgaagtttggcgtcagccgcatccgcggcggccatttgttgatcggcatactgaaaacgtggaatctggctaacgtgctgaaaagtatttcggcgcagttcacccgtcttaacgtcgaggtgctgatcgagcagttcgacgctatttgcgccagcagcaaagagagccagcaggccgccgccgctgcggacgcagctgccggggcagtaccggctgcgcagggcacgctggcgcagtatggtcaggatctgacggcgcgcgcccgggatgggaaaattgacccggtggtggggcgcgatgaagagatccgccagatggtcgatattctgatgcgtcgtcgccagaacaaccccctgctgaccggggaagctggcgtcgggaaaacggcagtggtggaagggctggcgctgcgtatcgctgacggcgacgtgcctgagccgctgcaaaacgttcagctgtggctgctggatatcggcatgcttcaggccggagcgggcatgaaaggggaatttgaggcgcgcctccaggcgctgattaacgaggtgcagtccagcgccacgccgattattctgtttatcgatgagatccacaccctgattggcgctggcggccagcagggtaccggtgatgccgctaacctactcaaacctgtcctggcgcgtgggcaactgcgcaccatcggcgcgaccacctgggcggaatacaaaaaatacattgagaaagatccggcgctgacccgccgtttccagaccgtacaggttcacgagccggatgaagcgaaagctgtattgatgctgcgcagcaccgtgtcgccgctggaaactcatcatcaggttttactcctcgacgaagcggtcagcgcggcggtgaaactgtcgcatcgctatattcctgcgcgtcagctgccggataaagcggtggcgctgctggataccgcctgcgcgcgcgtggccgtcagccagagcgcgccgcctgcccagctggaagactgcctgcgtcatctggcggccctggacgtggagctggagattgccgaacgtgaagcgcgcgtgggggcgggcgatccggcgcgcgtggcgacattaagcgccgaacgtgacgcgttcgaaacccaacgcgaggccctggctcgtcgctgggaagaagagcgcacgcgggtgcaggaaattatccgtctgcgtgccgcactgtttgcggcgagtgatgaggatacggctgaactgcgcggccagctggcagaacagcagcaggcgctgaagaccttacagggtgacgaaccgctgctgtttgccgcggtcgatgaaaacgtggtggctgcggtggtttcggactggaccgggatcccgctgggccggatggtgaaaaatgagatcgacgcggtgctgaacctggctgatacgctgaaccagcgggttattggtcagcgtcacggtctggatctgattgccagtcgggtaaaaacctcgcgggcgaagcttgacgatccgaacaaaccggtcggcgtatttatgctctgcgggccgtccggcgtgggcaaaaccgaaaccgcgctggcgctggcggagtcgctttacggcggcgagcagaacgtcattaccatcaacatgagtgaattccaggaagcgcacaccgtttcgacgttaaaaggtgcgcctccgggctatgtgggctatggtgaaggcggcgtcttaaccgaggccgtgcgccgccgtccctacagcgtggtgctgctggacgaaattgaaaaagcgcacccggacgtgcacgagatcttcttccaagtcttcgacaagggctggatggaggacggcgaagggcgtcacattgatttccgtaacaccattattattctgacctctaatgtcggtaccgagctgatcgcagccatgtgcgccgacccggaactgatgccggatcctgatgcgttaagtggcgccctgcgccagcctctactggaggtgttcccacctgcgctgctgggccgnnnnnnnnnnctggtggtgccgtattaccctctgaacgacgagatgctggggcagattgtgcgtcttcagctcaggcgcattcagcgtcgtctggaagagaatcacaatattatttctgaatttgacgacagcgtggtcgaacagattgttcagcgctgtaccgaggttgagtcgggcgggcgtatggtggatgcgattctgaccaatacgttgctgcctcagatgagccagattttacttaccgccagccgcagcgacgagcagtaccgacgtctgcatgtcacctgcgagcagggcgagttccactgtcagtttgccgcgtaa

SEQ ID NO: 526167 - DNA, 1044 bp, Stenotrophomonas maltophilia
atgagtgaagttgcccctgcaacgctgcgcgtgcatcgcctgacgccgctgcccgatgcgttctggcgcggagtgcgcgagacgccgtggcgctacgatctgtttcagctgttaagacgtattgatgcccagggcggagaacgttacccgctggggcgcgcgccgctgcctaaatttgagccgctgcgtattggtcagcagccttcaatggggtttgcgccgtcaacggttgccgaggtccggcagcgggaagagaacggactgcatgaggtttccattctgagcttcggcctgtttggtcctaacggcccactgccggtgcacatgaccgagtatgcccgcgagcgtattcatcatcatcaggatcacagcctcagcgcgtttgccgacctctttcaccaccgcctgacgctgctgttttaccgcgcctgggcggacgcgcagcctgccgtttcactggatcgcgacgacaacaggcgcttcgaagggtatcttgcatcgctgattggcatgggtcagcccggccagatgtcgaaaggcagcctgagcccgcatgcccgctttactcacgccggtcacctgacccgccatgggcgggacccggaagggctggagaagatcctgcgcaactatttcaacattccggtcaggttggtggccaatgtaccgcagtggatgccgctctcaacgcgggagcaggcacagctgggtgaggggcgtcgcctgccgcgcatgggggagtccgcttttctcggcattgcggtacgcgacgtgcagcataaatttcgtcttgagattggcccgttgagcgcagacgaatacaaccgttttctgccgggtgaagggtgggtcaccgagctgcgcgactgggtgcgacagtacgccggggtggaatttgaatgggaaacacgggtgatcctgcgcgccgatgcggtgcagggcaccacgctcggcagcgccgggcgattagggtacaacacctggctgggccttcagcctcagcctgttccgcgtggcgatctggtgtatcgcgcagagcgataa

SEQ ID NO: 526168 - DNA, 1872 bp, Stenotrophomonas maltophilia
atggaaagcaaactgctcgaatattacaaccgtgaactggcctatctgcgcgagatgggcgcggagttcgccgaacgctacccaaaagtggcggggcggctcggcatgcgcggcatcgaagtggcggatccgtacatagagcgcctgatggaaggtttcgccttcctgacctcccgcgtgcagatgaaaatggacgccgaatttccacgcttttcacagcgtatgctggagatgattgcgccaaattacctggcgcctacgccgtcgatggcgatcgctgagattcagcccgacagcagccgcggcgacctgagcaaaggctttattgtgccgcgcggcaccatgatggacagcctggcgctgaaaaaaaccggcgttacgtgcagctataccacggcgcacgaggtcaacctgctgccgttaaaaattgagcggatcgagctgggcggcgttcccgccgatctgccgctggcccagctcggcctgggccagcgggggatcagcagcgccttacggatccgcattgcctgcgatggcccgcagcatcttgggcacctggattttgaccgcctggagttcttcttaagcggcccggacatcgaggcgctgaagctgctggagctggtgatggagcaccacgcgggtattgtctgccagacggtcagcaagcagccccagcgccagctgctgtcgtctgacgccctgcgtcaggaaggctttgatgcggatcaggcgctgctcccggacgatctgcgtaacttcgacggctatcgcctgttgcaggagtactttgcgttcccggcgcgttttcgcttcatcagcctgagcgggctgggcaagctgatccagcgctgcgaagacgaaaaagcgtttgatatcttcgttctgctcgacaagagcgacgatcagctggagcgcgtggtggaagccagccacatggcgctgcactgtacgccggtgatcaacctgttcccgaaagtggcggcccggcagaagctgagcgaaagccagcatgaataccatctggtggtggataacatccgcccgctggattatgaaatttatgctgtgaaaaaaatctatgccagcgcggatggtcagcgggacgaccagacgtttcgtccgttctggagtacctggagcggagacgcgggcaactacggcgcctatttttccctgcgccgtgaacagcgcgtcctctctgaacacgcgctgcgctacggcacccgtacgggctatatcggctcggaggtcttcgtctcgctggtggatgcgcagcacgcgccgtggcaggagaatttgcgctacatttccgccgaggtgctgtgtaccagccgcgacctgccgctgatgctccagcaggagcttgggcagtttattatggccgactccatgccggtgaaggcgttaaccctgcgtaaaggcccgacgccgccgcgtccggcgctggcggaagggttcagtacctggcggctcatcagccagctgcaaatgaactacctcagcctgatggacagcgaaaacgaagagggcgctgccgcgctgcgtcagctgttagggctgtacgctaacctcgccgagacgccggttgcccgtcaggtggatggcgttcgtcactgcgtgctggagccggtgcaccgccgcgtgccggaacccggcccggtggtgttcgcccgcgggatcggcatcaccttgacggtggacgaacgcgccttttccggtgccagcccgtggcttttcggcagcgtgctggaacgcctttttgcccgcctggtctccatcaacagctttacggagttcacgctcaagagccagcagcgcggcgaaattggctactgggcgccgcgcatgggtaaaagggcgctggtatga

SEQ ID NO: 526169 - DNA, 564 bp, Stenotrophomonas maltophilia
atgagtaatcccgctggcgaaggcgatctgctgcgcagcggctggcaggcccgcagcaggcaggagaaagtgggggcgcgcgacaaaatgcagccgtcactgctggatcgcctgacggataacgatccggaaaaaaaacgcgagtccgccaacagtaatctgattacccacgccgcgctgcgtcgtaacgtcctgcgggatttacagtggttgtttaacaccattaaccacgatgcctccagcgatctgagtggtctgacgcaggtgagccgttctgtcgttaactttggcgtcgcgccgctggcggggaaaagaatgtccgatatcgaatggcacgacattcagcgcaagctcaccgaagcgattattaactttgaaccgcggatcctgccgcaggggcttcaggttcgctgcgtgtccgatacctcctcattagatctgcacaacgtgctgtctatcgaaatcaaaggccgcctgtggtgcgtaccgtatccgctggagtttctctttcgcaccgacgtcgatcttgagaacggccattttgaactgaaggatgcggggtaa

SEQ ID NO: 526170 - DNA, 813 bp, Stenotrophomonas maltophilia
atgaatacgctttatcaacgtctggcgggtgagtcgattagcgacgcgctgcttcgcctggaagccgaaatcaaagctcgtccggcggatgccgatctgcgcgctgcgtttgtgcagtttctgatcctcagcggcaactgggcgcgcgccctgacccagctgaaaagctggctggcgctgaagccgcaggcaaaaccaaccgtgacgctgctggagcaggccattcagggtgaacagcagcgggcgcgcgtgttcgcgggagaggtacgaccggcaatgcccgaggcgcagtggccgtggctgaccacgttagcccaggcgcttaccgaaagcgcagggcatgcgcaaacgctgcgcctggcggcactcgaacaggccccggcaagccgcgggcaggtcacgctggagaatgaagagagccacacctttgaatggctgatggacggcgatgcccgtctggggccggtgtgtgaaaccctggtcaacggccgctatttctgggtgccgttctgcgccatcgacacgatccgttttcaggctccggccagcgtgaccgatctggtgtggcgtcatgcgttggtccgcctcacggacggcaccgagcaggtgtgtcagatcccggcgcgttatccgtttgctgacggagcgccagacagcgttaagctggggcgcaccaccgagtggcttccactcgacgatgacggcaccctgtatgaaggcatggggcagaaagcctggctgagcgagcaaagcgaaagcccgctgctcaccctgagcctggtgacgttcgccgcggattgcgcggatgagtaa

SEQ ID NO: 526171 - DNA, 987 bp, Stenotrophomonas maltophilia
atgaaactttggctatcgggtttggctcttctgacggtggcgaccaccgcacaggctgaaaacttccgcatcgtgcagtctcctgcgcagaagctggatatctggatcgacaacattaaagataatacgccgcaaagctggtgtaaggcggacgtggcgctgcgtatcgtggcgaacggcaagaaagaggtttcggtgctggaaaacttcgtaccgcgccttggctcgctgctggagcatcagtgtagcaaactgaataccctgaactggacgcttaacgatccggaaggcacggcgcttgcccggggcacagcggctaaagcgcaggactgggcgctggtggtgaaacagcaggaaacggcggcggcaacgaccaccacctcaggcgcgctgctaccgcctgaccagaatccggagacgcacaccgtggcggcagatcgtacgccatggcaggagttcacccttcaggacggttgccacctgcgcaccttctgggagggcggttcctccgcgccagcgctgtttattcccgattccgacaccactcgctgcggcaacggcagctggctcagcggccacaccgtggtgacgcagaatcgtaacgggacgcagaaagcgattccggtcacctacattcacggcttcccggtgatgggactgaacaacgcggtcgatcctgaaaaggcgctgatcacctccgtcaacaaagagcgcatggtcttcagcaccccgaacagcgatcagagctggatgatcctgccgtacgacagcaccctgaacggctggaagagcaacggcacggtggcggtggaaatcacccgtgagatcgccagcgacgacgccagactccaggcgcgtatcgcagaggtgaagaagatctggagcgcatggattacaccgggcgcggagctgaacgttgttctgattgacacgctgcgtccgcagctacgcgatccggctgtgggcgcctggcgcgcggcgaattaa

SEQ ID NO: 526172 - DNA, 798 bp, Stenotrophomonas maltophilia
atgaatatcgcaacggcttctctctcccgccaggggacgcgcgccagcaaccaggatcagacgggagaaaccatcggggaacgttcagcctgctttgtcgtctgcgacggcattgcgggcctgccgggcggcgaggtggccgctgagctggcccgcaatagcattatttcccgctttgatggcgacaagcacctgaatgcgcagcatattcgtgactacgtccaaacggcgaaccgcaccatcctcagcgaacaacaggccgtgcaggactatcgccggatgggcaccacgctggtcagcctgtttatcgacagggattaccgtctggcttactgggcgcacgccggagacagccgcctgtacctgtttcgccgcggctggctgtggcacgtcaccaccgaccacagcctggtgcagcagatgaaagatgccgggcatcagaccgacgatctcaacagcaacctcctgtatctggcgctgggtattgagaatggcggaccggaagcgagctacagcgatgtcgtgcaggttgaagacggtgatgcgtttttactctgcaccgacggtttctggcacggcgtcagcgaagagcagatgaaacagtcgctgcacatggtcaatacgccacaagagtggctgaccttgatgaaccaaatcattcaaaagaatgctgaacaggagggcaaagctcaggataactataccgccgtggcggtgtggatgggcaaccctcaggacaccactttgctgcatacgctctctgacgcagcacaatttcttccctgcggaactgattag

SEQ ID NO: 526173 - DNA, 1776 bp, Stenotrophomonas maltophilia
atgcgattcacgattatttctacgaaacccggtcatcagccgccgcaaagcagctgtgatttttatgccccgggcggcaccattgggcgcggtacggataacaatctggtgctgccggacaatgaccgcaccatctcgcgtttgcaggccatcgttcacgtcgacgccagtggcgaatgccgcgtcacgaaccgcggcagcgttacccgcgtggtactgaatgatatcccgctggagcgtgggcgtcaggttgagcttcaggacggggatattctcggtattgatgattatcgcattgaagtcagcgaactcattcatgacacccagcccgtaagccgcatggcggccagcatgcaacaggcgcgcccagcggcgacacctgctccggcgccacaaccgaaaccggccagcgccgcgcctcgcggaaaagctgaacctacggccgtgccgtcggaaatctgggacagcctgatgcaggagttctccatctccgacagcatctccagcaatcgggcaaagccacagcccgcggcctcccacgacccgttctcccagcctgcggccccggagcggaatgccgaagacccgctggcgatgttcaacgatgccgatccgtcgcttgaacgtaaaaacgtggacccggacacgctgttcagcgatgaagcgttgtttaaaaaagagagcatctttgacgatgtcaccccttcaacgctcgtacagccggacgaaagcaaacctgcccagccaaaggaagaggcgtcggacgaactcgatccgttagccctgtttggcgggtcggcgagcgcacctgccgcgcgtcacgatgaccccctcggcctgatgggcggcgcgccgttaacccatccggatgaaatcgtggcagataagccggagccaaagcctgaagcgcaagccgcacaggaagaggatgcgcttgccagctcaccgctgttcgatccggaaccgactgaaccacaggacgcgccgcgcgcggaagaggagcccgcgcgtcccgattacgctggcttcaccatgccaacaccgcaggccgtggcgcgcagcaacgcgcaggcgccgaaaggccgcctgcgtatcgacccggttaaaaacgctgcatcgcctgccgcctccgcgcagaccggcgagcggggcgatgtgcttcagggcgaactgctggaggcgctgctggagggcatgggcctgagcgaaatgcagccggtgccgcagtttgaccgggaaaatatgcgtcagctggggcagatcctgggcatgttctcgcaggggaccgtggcgctgctctcctcgcgctccatcctcaagcgcggggtaaaggccgatatgaccatggtgctcgacgatgccaacaacccgttcaagctgctgccaaccggtaaaacggtcctgatacagatgttcggcacgccgatgccgggctttatgccgccgaccaaatcggtgcgtgatgcactgatcgatcttcaggcgcaccagctggggatgatctccggtatccgcgccattatcgccgctatgctgcaatcctttaacccggaacagctggaagagcaggcgaagcagaacgggatgacgtcgcgcctggcgctgccgggcagccgtaaagccgcgctgtgggattatttcgttcgcagctatggcgagacggcgggcgagatcgaggacgacttccataccctgtttggcgaagccttcctccatgcctatgacatggaggtcaatcagtacaaagactcacaaagcggatccgaagaaaaatga

SEQ ID NO: 526174 - DNA, 423 bp, Stenotrophomonas maltophilia
atgtcatctttatgcctggcaaatataacgttattgtttcttgtgcttttatttattaacgttgtaatcatggatgtttacagttcttggttttttaaaaaacacgagtcagattataagtggcttctctctgaatatcgccaaaaaggctacgatctcgatctggtgacaaattacgtatctttttttggctcgctggcgaactatcaaaaaataatctggtttgttcgtcttcgcaaaggcgtgaagatgaaattcaccaaagacagaaatgttcaggatgatgcctataaattcgttcaggctttaccggaagagagaatcggctggatattaaaacttcatcgacgctataaagttcaggccttactttttacgctatggctgcttatcggcattattttcctgaatgtagtcaaatag

SEQ ID NO: 526175 - DNA, 1176 bp, Stenotrophomonas maltophilia
atgaaaacacgactcctcctgtgcgctggcttattagctgcctccagtgcccatgccagcgccctctatttttatgaagctggtaccgaagataccgcgcttgccggagcagggcaggcggctcgtgcgcaggatgcctctacaattatgaccaacccggctggcatgacgcgcttaccggatcatattgtcacaggtgggttacaggttatggatggctccatcgacaaccagctggataacgatgcccatcaaagccccggcgatgtgatgaaaaccatcccgaatgccagcgccttttatagccagaaggtgaccgataatctttatgccggggtcgggctttacggtaattacggcctggggatcgattacggcagctggatgggcgacaggctgattaaaaagagtaccatggtagccatgacgctcagcccctcgctggcctataagcttaacgaccgtctttcgattggcgcgtccgccaacgttaactacggttacttctcgctgactcgcagcgttaacgatgatgactaccggcgacgcgatgaagacctggccatgagctatcggcttgggctgctgatgcagctaactgaccagacccgagccggtattacctggaacagcgaaacggactacagcttcaatattgacggcaacgcgcgtctacagaacggcacctacgacctgccggtgtcagcacaaatcagcgcgccgcagcaaattatgctcagccttgtgcatgacattaacccgcagtggtcggttatgggcgatctcggctggcaggactggagccagttcggcgcgccgcaaatcgtcgtcggggaccagcagcttaacaacgtcagccgcctgaaggacacgtggcacggtgcggtgggcgtgcagtatcgtccaacgcctcagtggcgactgaatgccggtgtggcgttcgatagctcgccgtatgaaagccagagcgatgtggccttaaccttacctaccggcgatgagtggcgatttggtacgggagcccagtatcagatcaccccggccagcaatattggtattgccgtgtcgtatcttcatatgcagtcgtcgcatgtgaaatcgccggtggcgtttgccggaagttacgaccatccttatctttggtttgccagcgtcaactacagctatcagttttga

SEQ ID NO: 526176 - DNA, 630 bp, Stenotrophomonas maltophilia
atgcatattttaccgcctgttcgacccgaaaaatccatcgaacgactgaccgctatccttgagccgatagcggagaaagtgcacgttgttccacgtaagcgactcacctggttacggaaggggaaacagcagatgtacctctttctggaaggggagctgtccctgctgcggacatcggatggactggtggtcgtgaccgtttacgagccgcatttgtttggtattgctgagatgatccagcctacgcaaggccattttctccgtgcggaaagggagtcgaccattttacgtctcgatgcggacaaggcggccgagttattccgtgccgagggcgtctgggaggatgtcgcagcgctgctctcataccatacggcctatttgatattccgtgatgcgcaggtactccagcagcgtacctattccgttattcgtaaccaccttcaggaaatgattttgctcccggaggagacgcgtttgcgtaccacgatactggaatatattcaggatcgtacgctgctttctcgcagtagtatactcaatgtattatccgcccttaaacagggagaatatatctcctttaagcgcggtgggtatttgcttgaagtcagacacttacctgaatcattctag

SEQ ID NO: 526177 - DNA, 612 bp, Stenotrophomonas maltophilia
atgaaaaagacagttctcgctttgattatggttaatgcgtttaccgccacttccgcgttcgccgccgctgatgcgggcacctggtatggcggagcgaaattcggctggtcacactattttgataccaatatgggttcaaaagcgtttgataacaataattccgaccacttcgattttgaccatgataatgtcggtgggggtgtttatacgggttaccagattaccccatggcttgcggtagaaggcggttatgattatttaggcaacatgcagatcaagggtcagcatggcgcaggggcgcaaatgaagacgcagggtctgcaaatgtcactgaaggccagctatgccttgaccaatgactgggatatctacggccgtgccggtgcgatgggctatcgcgctgaatccgatgtaagtggtcacaatcgttttgaaaccggtgtgcgcccgcttgcagctgtgggtactgaatacgccttcaataaaaactgggctggccgcctggaatatcagtgggtaagcaatgtgggtaatgcaaaccagatcggtgtgagcagcgacctgagttccgtcaccgcagggcttagctatcgctttggtcagtacgactga

SEQ ID NO: 526178 - DNA, 399 bp, Stenotrophomonas maltophilia
atgaagagcctgccgttctttttcgctatattaagtctgagcacattaacagcatgtagctctccaccaccagacaacgttgaaaagattaatcatctgcaaattccgctggtattaccgggggaaaaaccgccgcaggcacagatatctcatatcgcgtctctttatcaggaaaataaacagcagatcgataacttaacgcgcagcgtaaaatcacagtatcttcaggacactaccgcaaaagaaatttttgttgcggacagcgctgttcaacgcgtttacgcctcgctgaccaaactggaacagttagatatggttaatcagcaatacctgaaagacaataatgtcacgggcctgcaaaatattcatattatgcttgaaccgttattcgccagctga

SEQ ID NO: 526179 - DNA, 1983 bp, Stenotrophomonas maltophilia; identical to SEQ ID NO: 119295

SEQ ID NO: 526180 - DNA, 885 bp, Stenotrophomonas maltophilia
atgagtgataatgaacaacgtacgaacgcttacccaacgccacctttcccggagcagccccagacgccaccgggcctggcctctgaaatggaccctgttcccgatcacggcgagacaagctacaaagggcatggccggcttaccggtaagaaggcgctaattaccggtggcgattctggcatcggacgcgcggtagccattgcctatgcccgcgaaggggcagatgtcgccattaactatttgccggaagaggaagaagacgctgcggaagtgatcgccctgattaaagcggaaggacggaatgccgtcgcgcttccgggcgatgtgcgggacgaaactttttgtcagaacctggtggaacaggccgtcggaaaactgggcgggctggacatcctggtgaataacgcaggccgccagcagtaccgtgagacgctggaagaactgaccacggaagattttgacgcgacctttaaaaccaacgtctatgcgcctttctggatcacaaaggcggcgttgcgccacatgaaagctcccgcttccatcattaatacctcatctgtacaggcggtaaaaccgagcgccgtactgcttgactatgcgcagaccaaagcctgtctcgcggtgtttaccaaagcgctggcgaaacagctgggtccgaaagggatccgcgtgaacgcggtagcgcccggaccttactggaccgtgctccagcccagcggtgggcagccacaggaaaaagtgaaacattttggcgagagtacccctctgggacgcccgggacagcccgtggagatcgcaccgctgtatgtcactctggcctcggatgagtgttcatacacctccgggcaggtctggtgttctgacggcggcgacggcgtcatctag

SEQ ID NO: 526181 - DNA, 390 bp, Stenotrophomonas maltophilia
atgaaattatcagtgatttcagctttgttaatattaattatcccttccgcatgggcagataataacggcgggttacaaaagggtgaagcgccgccaccgccgcacgccctggacagtggttatcgtggtaccgatgatgcgcgcattatgaccattactcaggcgaaagagatgcatgatggcgcctctatttcactgcgtggcaatcttattgatggcaacggcgataaatacgtattccaggataaaaccgggaaaatcgacgttattatcccgaaagccgtatttgatgacagaaccgtggaacctgacaacatgatcagtattagcggctcgctcgataaaaaatcatccccacccgtagtgcgggtcagccacttgcaaaaataa

SEQ ID NO: 526182 - DNA, 504 bp, Stenotrophomonas maltophilia
atggaaccaaaaaatgaaaaagtgcctgggataaaagagagttatcgtttactgacgtttgagtatgcatttcgtcaggtgggttttattgtactgttaggtattatcgtggccgcattagccggcctgttttccagcggtgcggttagcgacgtggagagaacaaacgaagcaaaatccctgaacctgagctatgagcgcttcggccgccgccagaccgaatcgcggatgacgctgacgtttccggtgacgtctgagggtaaatatattctcagcctgaccagcgaaagcagcgacgtatatgagccgggcagcgtctggccgcagccggacagcatgtatagccgggggaataccctgtttctcgtttacgacaatctgaaacagagcgataagttcaccgtcctgctgttcatcacgccgacaaaagcagggaaatggacaaacagcatccgcgtaaacaacgggccagatatccgcttctggcagtttatttacccctag

SEQ ID NO: 526183 - DNA, 447 bp, Stenotrophomonas maltophilia
atggacatggtttttcgtgccctggcaatatacctgtttctggtgatcgtgtttaaagtcgccggacggcgcgccctgctgcaaatgaccagctttgaccttattttgctcttaattatcagtgaggcgacacagcaggcgctactgggcgaagatttttccgtcaccggtgcgatgattacaataacaacgctggtggtggtggatattatttttggcctgattaaaaaatattcttcttctgttgagaatgttcttgatggcaccccggtgatattggtagagaatggtattcccattgcggataaactgaaaaaagtcgatgtatcctgcgatgatatattggtttcagcacggcagaaccacggcataacggaattaaaggatattaagtacgcgatccttgagcgtaacggccatatttcaattattcctgaagaaaattaa

SEQ ID NO: 526184 - DNA, 519 bp, Stenotrophomonas maltophilia
atgagcaaccttattcacgataataatacgaccatcagcgagctgacgaaaaagcttgccacgacgctcacagaaagaggactgcgtctaaccacggcggagtcctgcaccggcggtaatctcgcggttgcgctttgtgccgaagagaacacggcggaattttatgacgttggcatggtggtgttcagcgatgcggcgaaggagaggatcctcggcgtgcggcacgaaacgattgagcgcttcaccgccgtcagtgaacaaacggttactgagatggccgctaaaattcgcgatattgccgaggcggatattggtgttgccatcagcggctatgcgggaccggaaggcggagacgatggcacggcagccggtacggtctgcttcggctggaatattcgcggacagacggaaacccgcaccgtgctgttttccggtgaatgtcaggatgtggtggaaaaagcggtgcgttattcgctgtctgaactgatcgaaatactctccgggtgggataacgtctga

SEQ ID NO: 526185 - DNA, 987 bp, Stenotrophomonas maltophilia
atggctgttatcgttattaccggcggtacggcgggcgtggggaaagccacggcgctgcactttgctaaagcgggctacgatgtaggcattattgcccgcgatgagcagagcctgcgctccacagaagaggagttgcgccgtttctggatcaacgcgtgtgccgttcaggccgacgtggcggacagcaaggcggtgaccgatgctgctaacgaaattgaataccggcttggagccatcgatgtttgggtgaataacgccatgggcgggatgctggcgccgtttcgcaccatgtccccggaggagtttcgccgcgtcaccgaggtgacctatctgggctatgttaacggcacccgcgccgcgctggagttaatgacccctcgcgatcgtggaacgattattcaggttggctccgcgctggcctaccgttccattcccttgcagtcagcctactgtggggcgaaggccgcgatccgcggatttaccgatgccgtacgcaccgagctgatgcatgaaaacagccgggtgcagatcgcaatggtacagatgccgggcctcaatacgccgcagttcgagtgggcgaggaataaatttgcctgggcgatgcgcccggtcccccccgtttttcagccggaagtggccgccagcgctatttttaaggtggcgcagaaaccggtgcgggagctatgggtgggcagcagcaccgtccagtcgattgtcgggcagtttcttttccccggttttctggaccggctgatggttaaaaaggcctgggaagggcagatgaccgatacgctaaatgcggatgaccgtctggactatctggatcagccggttaacgatctgcataaaatccacgggcatttcaccgacgaagcaaaagagcgcgccaccagcgttacctccggcatgccggggaaagtgctgctcggctccctcgccgttacgggcgcgatcgtggcgcgtctgctgctctcgcggagacgataa

SEQ ID NO: 526186 - DNA, 1626 bp, Stenotrophomonas maltophilia
atggcaggctggcatacacgcgccattatttaccagattgataccgccctgttttacgatcttaacggcgatggttgtggcgacatcgccgggatcgccgcgaagttgcgctacatccgccggatgggcgcgacggttatctggatcaccccgttttacctcaccccttttctcgatgaaggctatgacgtaagcgaccatttgcaggtcgatccccgcttcggcaagctcaacgatatcatcgcctttattgaacaggcgcgggagctggggatgaaggtcattattgagctgctgatccagcacacctcggatgcgcatccctggtttcagcaagcccgccgcaacccgcagtcaccctaccgtgactattatctctggtctgacacggacgaggacgatacgccaccgatgttccccggcgtggaaaagagcgtctggacatgggacgacgcagcggggcaatactaccggcatatgttttatcaccacgagccggatctcaatctggcctccccggcggtgctgaaggaggttgagaacatcatcatcttctggctaaagctcggggtgtcgggctttcgcctggatgcagcgtcgcacctgacaaaacaggccgggcgtggagatgaaaaacgcggcctgtggatcctggagcatctgcgccgtcttatcgaacagcgcaatccggacgcgatcctgctcggcgaagtcgacgtggaggtcgacgcctacaaagattattttggtcagaatgaccggctcaacctggtgctgaatttctggctcaataagtacttttacgtcagccttgcagagaagagcgcacgaccgctgcgcaacgcggtgaaaaagatgattgtgccgccggactcctgctgcttcgccaactggctgcgcaatcatgatgagctggatctggaagggataggcaaaaaagcgaagcagaccgtcattgatgccttcgcccctgatgaagagatgagcgtgtatcagcgagggatccgccgccgtctggcgccgatgcttaagggcgatcgaaagcggctggccttttgccatgcggtcttgttttcgctgccgggcgtaccggtcatgcgctacggggatgaaattggaatgggcgatgatttagatctggaggagcgttacgccgtacgcaccccaatgcagtgggccggatcgcagggcggcggtttctcagatgccgacccggaaacctttatcgccccaatgattgaccatggtccgtaccgctatcaaaaaatcaacgtggcggattcgctgttgcaccgcaactccctcctgcactgcattatcgatatcgccaatacgcgctcggagtttcctgagatcggcgtcgcgccgtttcgtcttattactatcgacaacgatgcggtactggggatctattacgaaaccgacacgcgcagcattctgaccttcgttaacttcagcgataagcccgttaattttaccgccagagggatccggcatgcgacctggaccgcatgcctggcggacaaacgctacgacgacgcgctggtatgcggcaaaaccgtcgcgcttaacctcagcggctatggctaccgctggttctggaccgatcgtaccgcactgcgctga

SEQ ID NO: 526187 - DNA, 1011 bp, Stenotrophomonas maltophilia
atgggcgtcgatatcccggtcatctggtttgccattattgtcttcgccacgctgatgtacatcatcatggacggtttcgatcttggtatcggcatgctgttcagctttgtgggcgatgccaaagaacgcgacgtgatggtgaacagcgtcgcaccggtctgggacggaaatgaaacctggctggttctcggcggcgcagggttgttcggcgcgtttccgctggcctacgcggtgattatcgatgccctgaccatcccgctcacggccatgctgatcgggcttattttccgcggcgtggcatttgagtttcgctttaaggcgaccccttcccaccgcaaattctgggactattcttttgctggcggttccctgctggcaaccttcagccaagggatcgtggtcggcgcgatgatcaacggctttgacgtggaagggcgacgctttgtgggctcctcgctggactggttaaccccgtttaacctgttctgcgggctgggtttgattgtcgcctataccctgctggctaccacatggctgatcatgaaaagcgaaggcgcgctgcaaaaccggatgcgtgagctgacccggcacgtgctgctggcactgatcgccgttattgcggtggtgagtatctggaccccgctcggctggcagtttgtcgccgagcgctggtttacactgcctaacttcttctggttcctgccggttccggttctggtggcggtattcagcctgtggatctggcggctgacgcgcaatcccgacagccatgcccgtccgttcctgttaacgctgggtctgatcttcctcggctttagcggcctgggcatcagcctgtggccacacattattccgccgcacatcaccctgtgggaagccgccgcgccgcctgccagccagctgtttatgctgatcggcacgctgttaatcatcccggtgatcctggtttacaccgcctggagctactacgtcttccggggcaaagtgtctgataccgaaggttatcactaa

SEQ ID NO: 526188 - DNA, 1404 bp, Stenotrophomonas maltophilia
atgttcgagcttgatgcgtttcatctggccaggatacagttcgcctttaccgtctctttccatattctctttccggcaatcaccatcgggcttgcgagctatctggtggttctcgagggcatgtggcttcgcacaaaaaatgatgtctggcgctcgctttaccatttctggctgaaaattttcgccgttaactttggtatgggcgtggtttccgggctggtaatggcttaccagtttgggactaactggagcggattttcccagttcgcaggcagcataaccggccctctgctcacttatgaagtcttaaccgccttcttcctcgaagccggatttctgggcgtgatgttgttcggctggaacaaggtcggccccggcctgcacttctttgccacctgcatggtagctctgggcacgctgatgtccaccttctggatcctcgcctccaacagctggatgcacaccccgcagggcttcagtattcagaacggtcaggtcattcccgaagactggctggccattatttttaactcctcattcccttaccgtctgatccatatgtccatcgccgccttcctgtgcagcgccttgtttgtgggcgcgtccggggcatggcatctgctgcgcggcaacgacacgcccgctattcgcaaaatgttctctatggccatgtggatggcgctgctggtcgcgcccatccaggcagtcgttggggatatgcacggcctgaatacgcttgagcatcagcctgccaaaatcgccgcgattgaaggccactgggaaaatccgcccggcgaggctaccccgctgctgctgttcggcgtaccggatatggaggaggagcgcaccaaatacgggcttgaaattccggcgctcggcagcctgatcctgacgcacagcctggataaacaggtcccggcgctgaaagatttcccgaaagaggaccgcccgaactcgctcatcgtcttctggtctttccgcattatggtcggcatggggctgctgatgattacgcttggtgtgctgagcgtctggctgcgctatcgccgccggctctatcactcgcgaccattccactggtttgccctttgcatggggccagccggactgcttgcgctgctcgccgggtgggtcaccaccgaagtgggccgccagccgtgggtcgtctacggctatctgcgcacgatagatgcggtgtctctgcacagcacgttgcagatgagcatcagcctgctggcctttatcgtggtctactgttcggtatttggcgtgggttatgtgtatctcgcccggttgataaagaaagggccgcagcctgtcggcacgctaacgtctaatacgtcgggcacccctgcccgtccgctgtccgccgccgagtctgttccggaagaggagaagatctga

SEQ ID NO: 526189 - DNA, 873 bp, Stenotrophomonas maltophilia
atgtttcgacacgtaaaacagctgcaatacacggtacgcctagccgaaccgaatccgggtctggctaatcttctgcttgagcagtttggcgggccacagggcgaacttgccgcggcatgtcgttactttacgcaaggattgagcgacgacgatcccggtcgtaaagatatgctgatggatatcgcgaccgaggagttaagtcacctggaaattatcggcaccctggtgggtatgcttaataagggtgcgaaaggtgaactggcggaaggcgttgaaaatgaagcggagctgtaccggtccatgaccgaaaacggcaacgacagtcatatcacttccctgctctacgggggcggtactccgctcactaactccgcaggcgtaccgtggacggcggcgtacgtggataccattggcgaacccaccgcggatctgcgctctaacattgcggccgaggcgcgcgccaaaattatctacgaacggcttattaacgtaacggacgatccaggtgttaaagatgcgctggcgtttttaatgacgcgtgaggcagcacaccagctttcgtttgagaaggcgctccagtcgatccgtaacaacttcccaccgggtaaattgcctccaatcgaagagtacaccaacaagtactacaatatgtctgaggggggagaagttcgcggaagctggaacagcgacaagcatttcgactacgtggaatctcctcagccagcggtcgatggcggtgacggcggcgcaagcgtaacgctcacaacagagcaggctacgctggtcaaagcaatgtgcgcacgtacgaaatccgatcctaaagccgatccgcttaccggtgccgagcttggcgcgggtaagaaaaaaccgtaa

SEQ ID NO: 526190 - DNA, 507 bp, Stenotrophomonas maltophilia
atgaatcatgtagaacactaccatgattggctacgcgatgcccatgcgatggaaaagcaagccgaatccatgctggaatcaatggccagccgtattgataattatcccgacttacgtgcacgaattgaacaacacgttaatgaaactaaacaccaaattaccgtgctggaagaaattctcgaccgcaataatatttcccgttcggtcataaaagattccatgagcaaaatggcggcgctcggccagtccattggcggcatgttcccttccgacgaaattgttaaaggctccatcagcggctacgtttttgagcagtttgaaattgcctgctacacctctctgctggccgcggccaaacaagcgggcgataccgcctccattccagccattgaatccattctggaagaagagcgccagatggcggactggctgattcaacatattccacagacgacggaacagttcctgctgcgctccgacgcggacggcgttgaagcgaaaaaataa

SEQ ID NO: 526191 - DNA, 498 bp, Stenotrophomonas maltophilia
atgaatatgaaaactgttgaagatgtatttattcacctgttatccgatacctacagcgctgagaagcagctgacccgcgcgctaagcaagttagcccgtgccgcatcaagcgagaagctgagcgctgccttcacggctcaccttgaggagacgcagggacagatcgaacgtatcgatcagattattgagcaggaatctggcctcaagctgaagcgcatgaaatgcgttgcaatggaaggcttaattgaagaagccaacgaagttattgagagcactgagaaaaacgaagtgcgtgacgctgcattaattgccgccgcacagaaagtcgaacactacgaaattgccagctatggcaccctggccaccctggctgaacaattaggctataaaaaagccgttaaacttcttgcagaaacgctggaagaagaaaaagaaaccgatctcaaattaaccgatctggctgtcggcaatattaatcaaaaagcccagaaaggataa

SEQ ID NO: 526192 - DNA, 228 bp, Stenotrophomonas maltophilia
atgagcgttaacagtatctacaagtgctctttctgcggagttacagaacagcaggcaaaacggattattgctaaaggtggaaaagacgaggcggccatttgcgctgactgcgttgttcagtgcgttagtgtatttgctaacctggcttcgatttcggcacttgaagagcgcgcgatgattgaatccgcccctattcagggcggagagattacaaaaatcagcctttaa

SEQ ID NO: 526193 - DNA, 360 bp, Stenotrophomonas maltophilia
atgacgaacacacagaacgtcaccgagttacaaccacgcatgacccggaagcagctgatcgatgcagcgcgtaaggccgcccctctccttccgccagcttatcgcggaattatgaccgaactggctaaccgcctggactatacaagcgtagcgctttgcgaagcgatggcgcagcgtaaacaacttgctcttcagaacgctactctgcgtgaagatgtcgcaagctgggccaaagagtgtgaccgcattgttgaacgctacacgaagaccagaaccaatatgcatttactggaagcccagcgagaattgcgtgagctgtcacccatcgtcatttcccaaaataacgaggtggctctctga

SEQ ID NO: 526194 - DNA, 828 bp, Stenotrophomonas maltophilia
atggctaactcattcaagcaaatgacacgtgacgggaccatcaagcgcaccgataccgggatgttcatcagccttgaccaaatccatgtgcgtgaaggtttcaacaaacgcgaagatgatgaacgtacccgccaggcagatgatgacctcttcaactatctgatgaacggtggatccgttcccccgctggaggttatcgcccgtgatgaaggtggagtgtgggttgttgaaggccaccgtcggcgtcgctgctatgcgcgctgtgcagaagctggtaagccagtagaccgcatccacatcatgccgttcaacggtagcgatgttcagcgcctggcgcgcatcatgaccagtaacaaccagctcccgctatccgatatggaacaggcagctgttattcaggagctacataacgccttcaaccagaccaccagcgagatagcaaaactgatcaacaagtctgtccctactgtcgaaaagcttctgcttcttagcacagccaatcacgacgttcagaaagaagttaagtccgggaccgtgtctgtagatgtggccgttgaccgagtaaaagagtttggcgaaaaggccggtgaggttcttcagaaggataaagcttctgctgctgccaaaggtaagaagaaagtcacccgcagcgttatagcgccagaaattagcattaagaaagcgcgtcgccttgtagagctgatcagcctggcgggtataagcgacacaggtgttatctatctcgaaggattggtccatgcagaagtcgtggaaatcatcgacgagcacaaagctatcgccgttcagcgtcatggagcagcatcatga

SEQ ID NO: 526195 - DNA, 690 bp, Stenotrophomonas maltophilia
atgattacccttaccaaagaatggctactgaagacaatcgcggagcttgaagaagagcgcgatgcgacgcccggagcagtaaacgaagatgcagcacgggcgcttgctgcgatgaagctggcgctggcatcgctcgaagcggagcctgtgtgcgtcatcgaccagtccaatcttgattatctcaaatctggctccgatgcagacgtatggcctgcgtccagagcagagatgggtgatgtgcttctgtatcgctccgccacgccagcgccggtatctgtgcctgatgccattcattcccagggtgagaaatccgttggcaatgattactacgctcttggctggaacgcctgccgcgccgccatgcttcagggtgccgaacctgtaacgacggcttacaagttcccagatgatttcgacttcgaccgcttcaacgatgtcgtgtggctggaggccgtggcaagcaatccgcacatgcattcactgactacatcgacgatcgctatggtgacgcttgagctcaataagcgattggaggctggcaactctccggtgattccggatggttgggttctggtgccggttgagccgacggcggagatgtacgatgcaggtgaccgacagcttgcaacaaaacaggtgtgggatgcgatgattgcagcagcgccgcggcaggaggctgacaatggctaa

SEQ ID NO: 526196 - DNA, 282 bp, Stenotrophomonas maltophilia; identical to SEQ ID NO: 166799

SEQ ID NO: 526197 - DNA, 270 bp, Stenotrophomonas maltophilia
atggtgagtaaactcaaacagcggcgcctgcgccgccttaaagccgacgtggcatggtggcgcgaagaagcggaatacagtaaccgccgcattctcgaactggccggagaaatcgacaggctcaaaaagctggttatccgggttcctatgccagtacttatttcaaaggagatggccaaccagctttataacaacgaaacggaaagatgtcgtacctgcaatgatggcctccgtggtgggtgctcatcatgcattttctataaaagatag

SEQ ID NO: 526198 - DNA, 1143 bp, Stenotrophomonas maltophilia
atggcagctcgccccagaaaacataatgtcaaaatacccaacctttactgtaagttagataagcgtacctcaaaaatttattggcaatatcgccaccctgtaacaggttcatttattggattcggaacagatgatgaagcggcaaaagctgctgcaatcgagatgaaccgtataaccgcagaacaagaaactcagcaatcttatgctctgattgatatggcaatgaagagcccagggaaaaaggatcaaggtatacgtgtttctgagtggattaaaaaatacatcgaaattcagatggaaaggttgcgtgacggtgagataaaaaaccctactgtaaaatacagacgattatgttctcagattctcgcagatagagtgccaaaccttcgcctgaaggatgttgatacaagactcattgcaaaaattattgatgaatataaggcagagggaaagcacagaatgggccaactgataagaagcgtactaaacgacgtgttcaaagaggcgcagcatgctggcgaggttgatcctggctacaacccagccttagctgtaaaaaatccaatagccaaagtaaaacgaagcagacttagcattgaacaatggaaattgatttttgaaagcgcaggctctttgccgccttgcgctcaaaattctatgcttttggctttagtcactgggcaaaggataggtgacatagtcgaaatgaagtttagtgacatttgggataatcaccttcatgttacccaaaataaaaccggaatgaagttagctatccctttaaatttaaggtgcgatgcaatcgggttgactctggctgatgttattagtaagtgtcgcgatagagtagtgagtccttatctgatccaccatgttaaacatcacgcctacggtaaagcgggatctcacgttcccgaaaaaacaatatcaagatattttaaggaggcaagagataaagcaaatattacctggcctaaggattgcactgccctcccgccgtttcatgaacagcgctcgctttcatcaagaacatacaaagctcagggtatagatgtcaaaactcttttagggcataaaacagaagcaatgagcgtaatgtatggagatgaccgtggtctagaatggaaaaaagttgtgatttag

SEQ ID NO: 526199 - DNA, 501 bp, Stenotrophomonas maltophilia
atgtctgatgacgtgaccgggacgacaacccatcagcagctaatcagcttattaaccgagcaggaggcgcgctttcgtgtggtggcgcatgaggccgtagggaaatgcgaagcggtcagtgaaattcgcgggaccgatctccgccagggagcaaaagcgctggtctgtaaggtaaaaggcaacggcgttaagaaacatattctggcaatcctcgccgccgatcggcaggccgatctgagcctgctggccagccatttcggagggcttaaggcatctctcgccagtccggccgaagtggatgcgcttaccggctgcgttttcggcgccattccccccttcagctttcacccggatctgacgcttgtcgccgatccgttgctgtttgagcgctttgacgagatcgcctttaacgccggtctgctggaaaaatcggtgattatggatacccaggactatctgcgtatcgcccgtcctgaactggtgtcgttccgtaaacaataa

SEQ ID NO: 526200 - DNA, 1332 bp, Stenotrophomonas maltophilia
atgaccgagataattacccgtaaagaaaaaatcagttatgggttaggcgatatggcgagccatattgggctggataacgtcattatttttctgacgttttactatacggacgtggtggggttacctgccgcattcgtgggcactatgtttcttctggcgagaaccgccgatgccataattgatccggcgatgggctatatcgcagacaggacgcgtacccgctggggaaaattccgcccctggatgctgtggctggcgctgccctttggcgcaagctgtctgctgacctacgccgtgccggcgtcgctcgacctgcacggtaaaatgattttcgccaccgtcagctataccctgatgatgctgatgtataccgcaatcaatattccctattgctccatgggcgcggtaattacgcccgacaacgatgcgcgaatttcccttcagtcttatcgctttttccttgccacgttgggtggcgcgttgtcgacattctttatgatgccgctggcagagtttttaggcggcgacgataaattactgggctaccgctgggcgatggccattatggcgaccgtcgcggtgatcatgttctggatctgcttcgcgaatacgcgtgaacgtattaaggctcccgccacccacaataattatcttgcggaactacgggatttattacgaaacgaccaatggcgcgttgtcgccgtcctggtattaaccaatattggttttggcgttattcgccttggcgcaatgatgtatttcgtcacttattatctcggtagcgcaagctattttatgtggatgctcggggcgcatattctcgggaaagccgcaggcagcgcgctggccaaacgtctgacgcagaacgtcagcaaagtgcagatgtttggatattgttccgtactggcgggggtactcagcatcgccctgttctttgcgcctaagtcggtgcttattctggtgcccatgacgtttatcgtctccaccctttaccaggccaccaccacgctaatgtgggtgatgatggcggatgtcgccgattacggcgaatggaaacagggcaaacgcatggacggcgtgatcttctccaccttcctcgccgtactcaagctggggatggcgatcagcggcgcgattgttggctggacgctgggcttaagcggctatgttgccaatgccccggaacaaactaccacggccatgtactgcatcatcgccctcttcaccgtcgtacctggcatcttgtcgctctgcgcgtttgccacgctgcgctggtacaagctcgacgacagcacaatgcaatccatccatctcgccaaacaccctgtttag

SEQ ID NO: 526201 - DNA, 2037 bp, Stenotrophomonas maltophilia
atgagtgagctgattcaacattccaactgtatcgaatggcgttttgaacaccagatcctgcgcatcgaaccctggggagaaaacagtcttcgcgtcagggccacctgctccccggcatttgatgacgccttacaggcactgttacccgccaccccttgccaggccgagattgtcgccgaagcggaaagcctgacgctgcgcaacggcaatattaccgcgaccctgaaccttaaaggtcagttggccttctacaatcagcgcggcgaactgctgctggaggagatgtggcgccagcgttcaacggtgggtatcggtgccagcgagaagagtcaggataaatatgtcagcgctctgaagctggatggccgcgaatttaaaccgctgatgggcggcaaatatcagctcaccgtccggtttgaatcgcgtccggatgaacgcatctatggcatgggtcagtatcaacagccgtggctggatctgaaaggctgtacgctggagctggctcagcgaaactcccaggccagcgtgccctttatgcagtccagccttggctatggcctgctgtggaacaacccggcgattggtgaagccagctttgcaaaaaatcagacggaatggcgcgcccgcgtcacaggagagatggactactggatcaccgccgctgacacggtggcggatatcacccgccagtatgtgaaagccaccggtactccgccccccgccccggcgtttatcagcgggctgtggcagtgcaaattgcgataccgcacccagcaggaggtgctggaggttgcgcgggagtatcgccgccgtaatctgccgctgtcggtgatggtcatcgactttttccactggccgaatcagggcacctggtgcttcgaccccgtagactggcccgatcctgaaggcatggtcgacgagctgcgcgaaatgggtattgcgctgatggtgtcggtgtggccaacggtagaggcgcgcagccccctctacccgctgatgaaagccaaaggctggcttgtcagcagtgagcgcggcgtgcaggtcaacctcgattttatgggcaataccaccttctttgatgcgacccatcctgaggcgcggaaattcgtctgggatacggtgaagaaaaattactacgacatgggcattaagctgttctggctggacgaagcggagccggaataccgcgcctatgattttgacaactatcgctaccacgccggtccggtactggaagtgggcaatcgctacccgcgtgactttgcgcagggcttttacgatgggctccaggcaaacggcgaaaccgacattgttaacctggtacgctgcgcctgggcaggcagccaacgcttcggcgtgctggcgtggtcgggtgatgtccactcctcgttccatgcttttcgcaatcaactcgccgcaggactgaatatggggctggcggggatcccatggtggacgaccgatatcggcggcttccagggagggaacgttaacgacccggcgttccatgaattgctgatccgttggttccagtgggcggtgtttacaccggtactgcgcatgcacggctatcgcgaaccgcagatccaacctccggagcgctaccgtgacggtattcctcagtgtaacagcggttcgcctaatgagctgtggagttacggagaagagaattacgccatcatgcagcactggcttaccgtgcgcgaaaccctgcgcccgtatattgacgcgttgtaccggcaggctcatctgcacggagacccgctcatgcgtccgctgttctggcactatccgaaggataagcagagctgggcgtgtgaagatcagtatttgtttggtgaagatcttctggtggcgccggttatgcaggccggtcagcgtgagcgcgatgtctggctgccgacgggcaatagctggatcgccctcaacggtgagcgctacgccggtggggagcatatccgggtgcctgcggcgctggaaaccatcccggtgtttatccgcgaagggagtccgcttatccagcaactggtggactga

SEQ ID NO: 526202 - DNA, 447 bp, Stenotrophomonas maltophilia
atgttcgaccctacactactcatacttctggccctggctgctctgggttttgtcagccacaataccaccgtcgcgatttccattctggtcctgatcatcgttcgcgtcacaccgttgaacaccttcttcccgtggatagaaaaacaggggcttaccatcgggatcattattttgaccatcggtgtgatggccccgattgccagcggaacgctaccggcctcaacgctgctgcactcctttgtgaactggaaatcgctggtggcgattgcagtgggcgtttttgtctcatggcttggcgggcgcggcgtgacgctgatgagcagccagccttctctggtggccgggctgctggtgggcaccgtgttaggcgtggcgctgtttcgtggcgtgccggttggcccgctgattgctgccggactggtttcgctgtttatcgggaagtcgtag

SEQ ID NO: 526203 - DNA, 792 bp, Stenotrophomonas maltophilia
atgtatggactgggactcgacggctacgatcccgatagccagcacgacgcggcggtggcctttcgcatccgcgtggtggcacaagaacagtacattccgctgcatcagcaccgcaaagggcagctgattatggcgctgggaggagcgatcacctgtgaagtagagaacgcgatgctgatggtgccgccccagtatgcggtgtggataccgggtcaaacgccgcacagcaacaaggcgacgcccggcgcgcagctctgcctgctgtttattgaacccggtgcgctcgaattaccgacgcgtacctgtacgttgaaaatatcgcccctggtgcgggagctggtgctggcgctcgcggacaggtcacaggaggaactgcctcttcccgctaccggaaggctggttgacgtcctgtttgatgaactgcccctgcaaccgcaggagcatctccagctgccggtatctccgcatccgaaaattcgtctgatgagtgagaccatggcaaacgaacctgccgcctggcagacgctggcgcagtgggccagccactttgccatgagcgagcgcaatctggcgcggctggtggtgaaagagaccggcttaagctttcgccgctggcgacaccagctccagctgattgtcgcattgcagtttttgatcggcggaaagtcggtccagcaggcggcgcaggcgctggggtatgactccaccaccgcctttatcaccatgttcaaaaaaggactgggacagacgcccgcccgctatatcgccagcctgactacgacttcccgataa

SEQ ID NO: 526204 - DNA, 1188 bp, Stenotrophomonas maltophilia
atgactactgctattcaaccttccgggaaacagggcgcgctgctggttgcaggcatcctgatgatcgccacgacgctgcgcgtcacctttaccggggtcgcccccctgctcgacaccatccgacaggactatggcttaagcacggcgcaaaccggcctgctcacaacgctgcctctgctggccttcgcctttatctctccccttgccgcaggcgtcgcccggcgcctgggcatggagcgcagcctttttatcgctctgctgctgatttgcatcgggattggcgtacgttcgctgccgtcggcctcgctgctgtttatcggtacggcgatcgtgggctgtgggattgcgctgggcaatgtcctgttacccggattaatcaaacgtgattttccgggccaggtcgcaaaactgacgggggcttattcgctgacgatgggggccgccgctgccgcagggtcggcgctgatcgtcccgctgtcgctggggagtggtggctggcacggggcgctgttgatgctgatgttcttcccgctggtggcgctgctgctgtggttaccgcaatggcgccagaggccggccgccaccctgaccggtgcgggcgcgttgcacaatcgggcaatctggcgctccgcactcgcctggcaggtgacgctttttctgggcattaactcgctgatttactacgtcattatcggctggttacccgcgattttacttagccacggctacagcgaaacgcaggctggctccatgcacggacttctccagctggcaaccgctgttcccggtctcgccattccgctgatcctgcaccgtcttaacgatcagcgtggcatagccgggcttgtcgctctgatgtgcgccgtcagtgcggccgggttctggttcgcgccggggctggccgtcgtctggacgctggtgtttggctttggatccggcgccaccatgatcctcggcctgacgtttatcggactgcgcgccagctcggcccatcaggccgccgcgctctccggcatggcacagtcgattggctatctgctggcggcctgtggcccaccgctgatggggaaaattcacgataccgccggagactggcgcattccgctgctggcctgcgcgctggctgcggtagtgatggccctgtgcggcatgctggccgggcgtgaccgggagatcacaccccgctga

SEQ ID NO: 526205 - DNA, 708 bp, Stenotrophomonas maltophilia
atggaactctccccggttaaaacgacgctgcgcattgcgctggttggtgattacaatcccgatgttattgcgcaccaggcgatcccgctggcgattgacgacgccgctgcggttctggatctcaccgctgattatgactggctcgccacgcctgagctgaccaaccccgaagacctggtcgggtacgatgccatctggctggtaccggcaagcccgtataaaaacaccgaggcggcgtttattgccgcgcgttacgcgcgtgaaaacagcatcccttttctcggcacctgcggcgggttccagcatgcgctgattgagtatgcccgtaatgtgctgggctggcacgatgcaggccatgccgaaaccgataccgaggggaggatggtgattgcgccgctggcctgctcgctggtggaaaaaaccgacgcgattgagctgcggaacaacacgctgattgccaaagcgtacggcaagccggaaattcaggaaggttatcactgcaattacggcgtctcgtctgagtttgccagccagcttgagcggggcgacatgcgcgtaacgggctgggacgagcagggcgagatccgcgcggcagagctgctgacccatcctttctttgtcatcaccctgttccagcatgagcgggctgcgcttcaagggcgcccggtggtgctggtacaggccatgctgcgggcggcgcagggataa

SEQ ID NO: 526206 - DNA, 345 bp, Stenotrophomonas maltophilia
atgattcaatgtaagcgcgtatatgaacaggcaacgtcagacgatggttaccgggtgctggtagacagactctggccgcgagggataaaaaagaccgacctcgcctgtgatgagtggtgtaaagcgctaacgccgtccagcgaactgcggaaagcctttcacagtgaaacgatcgatttcaccgcgttcagtgaagcctatcgtaaagagctggcgcagcagcaggatgaaggcaaacgcctggcggccctcgcccgacagcagaccgtgacgctactctatggggcgaaaaatacggagcagaatcacgcgcgggtactggcggactggctgcgtgaactgtga

SEQ ID NO: 526207 - DNA, 306 bp, Stenotrophomonas maltophilia
atgtttcagttaaaaccgggcagcatggcgataattgtgggtgcgcgtacgacggcgggccgtcgaaatatcggtaaatccgtggagctgtttggcctttgtcagccgggccagcgttttgtgaacccggttaacggcgtcatgacgcaattacctgatacatcagcgcgtgcgctgtggctggtcaccggtgatgtttacgcctttgataatcagcacggttttgcgtttgttcgcccggaacatttgatgccgcttactcccgacgagatgccacacaacgtggatgagctggcaatcggttaa

SEQ ID NO: 526208 - DNA, 255 bp, Stenotrophomonas maltophilia
atgaaatatcttctcctggcgctggttttaccgctggccgcatgctcaacaaagacacctcctcctgatgcgcctcaaccgccgcacgctattggtatggcaaatccggcgtcagtgtactgtctggagaaagggggagagcaaatccctgtacaaagcccgcagggcgtacgtaccgagtgcaaattgccaggcggggaagtgatcgatgaatgggatctctatcgccgcgatcacccgcaaccgaccagatga

SEQ ID NO: 526209 - DNA, 1029 bp, Stenotrophomonas maltophilia
atgtcagatatcattcttgcccgtgtttcagaaaccctctccaccgagcaatctctcgacagtctggtgcgtcagctactggaaatgctggaaattgtgacggatatggaatcaacctacctgaccaaaatcgatatcaacgcgcgtttgcagcacattttatatgcccgtaacagcaaacaaatgcagatcccggaagggttcagcgtgccctgggacgaaacgctctgtaagcgcgccatggatagcgacaccttgttcagtaacgaggtgcccgaccgctggccggagtgtgaagcggcaaaagcactgggtattacaacctatatgagcgtgccggttcacctggctgacggttctctgtacggcacgctttgcgctgccagcaccgcacagaaacagttcagcgagcgtggcgagcaggtgatcaggctctttgccgggttaattggtcagtacattcagaaagagtcgcttgtgcttcagcttcgtgaagcaaatgcggcgctcattgcccactcttacaccgacgcccttaccggcctgccgaatcgtcgcgccatttttgaaaaccttaccaccctgttctcactggcgcgccatcttaaccgcaacgtcatgattgcctttattgacctcgatgatttcaagcgaatcaatgatcagtacggtcatgaagcgggcgatcggttcctcgttcaggtcggcaatcgactgactcaccagcaaacgcaggacgaaattatcggccggctcggcggcgatgaatttctggttgccagcctgagtcacagcgatgatggcgacgccagcacagaggtcaacgctatcaaaacccgcctcaacggccgtatcgcgggtgaatatgggttaggtaatgtcactattctctatcccggtgcaagctatggcgtcgttattgttgatcctcactgcacagatgaagatagtgccctgcgcaccgcagacctcgcgatgtatcaggataaaaaaggaaaaaacaaaacaggctttgtcgcgttagattaa

SEQ ID NO: 526210 - DNA, 495 bp, Stenotrophomonas maltophilia
atgagtcttctgaaagatattcaaatattcatcgctgataatcctggtttaacgaacaaacagatcgcagcttcaatgcctcaatacgacgttcacgctgttcagcgcggtgtatgccatctggtcaaactgaatcgcgcaacccgccagcataacggcaagtgctaccagtattttgccaaagcgccgggtggtgacgttagcgaggggcgttctgcaataaaaattaaccgggcagatacaccagctgtatcagaacaggaagaagctctgaatccggctgtgaccacaatgatggataaagctcaaggcctgtttgaaaaagggctctaccagcgggcagccacggttctgatggatgccttcaatcgctctaagaacgaagagcagcggatgaagatactgattgagcgtcagcgttgcctgagcatggcgccgaaagtgaaagcaccctctgatgcatggtgtctggctggccgagcgaggaatgtctga

SEQ ID NO: 526211 - DNA, 333 bp, Stenotrophomonas maltophilia
  misc_feature (285)..(294): n is a, c, g, or t
atgaaatattcactgatttatgccgaccctgcgtgggaatacgggaacaccatcagcaatggcgctgcaaataaccattacggcacgatgaagcttatcgacatgaagcgcctcgcggtttgggacctggctgccgaggatgctgttctggctatgtggttcaccggtacacacacccgagaggctatcgagctggctgaagcatggggctttaaagtacgcacgatgaagggttttacctgggttaagttcaatccactggcagagctgcacataaacaaagcnnnnnnnnnngccgtgtggaggatttttacgacttccttgacctgctga

SEQ ID NO: 526212 - DNA, 324 bp, Stenotrophomonas maltophilia
atgaaacctgaattaacgcagcgtcagaatgaagtgtttgaagctatcaaggttcatatcgaaaaggctggcttcccccctacgatgctggagcttgccggattaattggctgcgcatcaccgaacgctgctgtagcgcacgtgaagtcacttaagaaaaaaggatacatcactgttgctcctggcgctgccaggggcattaccgtcatcaaaacggaatgggatgcagatccagtaacgatcatcaaagacctgctatccggcggagacaaggccagagataacgctgttgaatggctgaaaaaacagggagtgacgttatga

SEQ ID NO: 526213 - DNA, 390 bp, Stenotrophomonas maltophilia
atgaaactggtgctcccgttcccaccgagcgtaaacacatactggcgagccccgaataaggggccattaaagggccgccatttgatcagcgctaaaggcagggcatatcaaagcgcggcctgtgtcgccattgtcgagcagcttcgcttccttccaaagccatcaacagccccggctgccgtcgaaattatgctgtacccaccagacgaacgccgccgcgacatcgacaactacaacaaggctctgtttgatgcgcttacgcacgctggaatttgggaggatgacagccaggtgcagagaatgctggtggagtgggggccgaaggtaccgggtggacgtgtagaaatatcgatcaagaaacatgaacctcaggcgggtgcagccgcctga

SEQ ID NO: 526214 - DNA, 726 bp, Stenotrophomonas maltophilia
atgaatcagatgaacatcaccgtaacgtgtcctacgcaccatgccgccgcgataggtcagcagataacgatgtccagtcgtgaaattgcgaagctggtcgattcccgtcacagcaatgtctgcgtaaccattgagcgactgatgaaatccggcgttattggggggtatgctgcaatgcagtacacccatcctcagaaccagcagacttaccattactacgaagttaacaagcgagacagctatgtgatcgtcgcgcagctgtgcccggagtttactgcccgtctggttgatcgctggcaggaactggagagcggggccgggatggttgttccccaaacactccctgaagcgctccggctcgccgctgatcttgctgaacagaagcaacgtctgagtgaagaactggcaattgccgcaccgaaggctgaatttgttgatcgctacggcaaagccaccgggtcaatgacattccggcaggttgccaagctccttaacgccaaagaacccgagttcgcgatgttcctcattgagaatggcatcatgtaccgcctgaaccgcgtgcttactccgaagagtaaacacatcgaagcaggccgatttgaagttaagaccgggaccaccaaccagacaaactatgcgttcaatcagtctcgtttcactgcgaaaggggtgcgctggataggtggactttgggcagagtatgtcgctaaggggcaaaatgcgtga

SEQ ID NO: 526215 - DNA, 582 bp, Stenotrophomonas maltophilia
atgcagaacctggtaaaatggctgctggaaagggtaaatattgatttaggtttcagccctgaccacactctttcgcttcctgagttctgctggtggatggtacgtaacgatctggctgaccttgttcctgaatcggtggcgagtaaagcactcagaatcaagccagaacaacacaggtcagtgatgagggaaagcgacattgtcccgtcattaccggctacgcaaatctttcaggagaaggcaaaaaagatagtagcggtgaaggtcgatcctgaaacgccggaatctttcatgctgaggccaaagcgccgacgttgggaaaacgagaaatacacccgctgggtgaagtcgcagcagtgctgttgctgtaataacccggcagacgacccccaccacctgataggccacgggcagggtggaatgggtaccaaagcgcatgacctgtttgtgataccgctgtgcagagcgcatcacgacgagttacacgctgatcccgtggcatttgaagcgaaatacggcgaccagttaacgctgctgtttcggtttttagatcgtgcgctggcaatcggcgtactggcgtaa

SEQ ID NO: 526216 - DNA, 579 bp, Stenotrophomonas maltophilia
atgatcaatccttcagaagtaggcaaatccggcgagttggttcgccttcgcactctcgaaagtatctgggtacagggaaagctccgcatgtggggccgctggtcttatatcggtggtggctcgggcggaaacatgttcaaccagctgctggcatccgggaaaataaccaaatccgccatcaacgatgcgctgcggcgcatgaagaaatccggcatcaccaaacccgagctggaagcatacctgcgtgaaattctcgacagtaaaaacaaaactggcctggcgttctgctcagacgaggaggggctaatgattgacggcgttattgcagcggtattgatgaacgaagaataccgtgggatgtatggcgtgatcgttgatcgtcatcgtctgcgtaaaagcaaactccagatggctaaagaacttaattcaaaacaccccggctggacccttattacatgccgtcgtcgcattgatacatgggtaagtcttgcagaatcgatcctttatgcaccactttgtgaggcgttcgacacaaatagcgacagatttaagttgcagagtgagcaggaaagtgcttaa

SEQ ID NO: 526217 - DNA, 333 bp, Stenotrophomonas maltophilia
atgcagcagattaaaaaccataaaatacctcttgatggcacaaaccccacagatttgaatgccttaaaagatattatcgaatctaattcgtatatgttcgaagagtatcttcttactgattttggtggagatgcgagatactcggtcgttgatggttcttttgaaatcacggcgatagccgaaggatttttcgaatacacagccgagataaatttctacgcgggatgcgcaaacatgaacgacaccagttctgttaacgggactatggagttcgaaatcgaagatggaaatatcatcatcgagttggatgaaactgtttgggatgtcagataa

SEQ ID NO: 526218 - DNA, 390 bp, Stenotrophomonas maltophilia
atgtccgatccattaaccggcaccggcgctgttctcggcggcggcctgctgggtttagtcctgtacggcgtctttactcatacagattttggtgtggtgttcggggcgtttggtggtgcggtgttctacgtcgcgacagccacaaacctgtcccgcgcccgactggcagcatatttcctgacgtcgtttatcgttggggtgcttggggcgggacttattggctcactgctaaatgcagcttcgcactatgaaaaaccgctggatgcactgggtgcagtgattctgtctgccctgtgtataaaaatcctcacttatcttaacaaccaggacctgaacaacgtgttcaagtttttctcgcggctacgtgggggagggggaaatggtaattga

SEQ ID NO: 526219 - DNA, 279 bp, Stenotrophomonas maltophilia
atggtaattgacccgtcagcattctttaatgcgtttatctgtgcggccatagttatcgtgctgatgttttaccagcgacatggcgcccggcatcgcccctttatttctgtcctagcgtatataaccgtgctggtttacgccgcgatccccttgcagttcatcttcggcctttatcgtgattccagttggctggtggtggtcgcaaacattcttatcttcgccgccatcctgaaggttcgtggaaatatggcgcggttggttgatcgtctgaggcactaa

SEQ ID NO: 526220 - DNA, 630 bp, Stenotrophomonas maltophilia
atgaaccaaacacaatttcagagggcggctggtatcagcgccgggttatctgcgcgctggtttccgcatatcgacgccgccatgaaggaatacggcatcatcgcaccgcttgatcaggctatgtttattgcccagatggggcacgaaagcaccagatttacccggctggtggaaaacctgaattacgcggctgaaaacctggtaccgacgttcggtagccaccgcatcacgcaacagcaggccgccgcacttggcagaacggcaacgcaaccggcaaaccagaaagcgatcgccaatctggtatacggtggtgagtggggaaaagcacaccttggcaatcaggttgccggtgatggctggaaatatcgcggtcgcgggctaaaacagattaccggcctgagcaactatcgcagttgtggccacgcgttgaaactagacctggttactcacccggagttgcttgaagaggatgaatacgccgcgcgctcagctgcttggttttatgcctcccgcggttgcctgctccattccggcgatgttgagcgcgttacgctgcttatcaatggcggcagaaacgggctggataaacgccgcacgctgtttaacctggcgaaatccgttctggtgtga

SEQ ID NO: 526221 - DNA, 219 bp, Stenotrophomonas maltophilia
atgtacagcagactgttaaccatatgcctggcgacgatgttgatcgcgagctgcgggacaactggacccgtaagggttgaggtagtggacacggcttgcgactgggttaaacccatttacggcaccgctcatgactgggatgttctggaccgccagacgaagaaagacatcctggcgcataacaaagcgtggcaggctaactgccagaaacaggagtga

SEQ ID NO: 526222 - DNA, 300 bp, Stenotrophomonas maltophilia; identical to SEQ ID NO: 142799

SEQ ID NO: 526223 - DNA, 195 bp, Stenotrophomonas maltophilia; identical to SEQ ID NO: 142800

SEQ ID NO: 526224 - DNA, 228 bp, Stenotrophomonas maltophilia
atgttaacagtaaaagtgatgtcgccgggcggcggcgaagagattcattgcgggttgagtgtagggttcaatccggggcagcagagcatcgcggtatcgggaatggacaaaaatgtattcctgaaacccggcgaggtcgcctatgtgatgaaccagaatggaaagacggtatctcgttacgagcatattgccagtcaggaagcactgcataacgcggtggattcgtag

SEQ ID NO: 526225 - DNA, 1428 bp, Stenotrophomonas maltophilia
  misc_feature (1358)..(1367): n is a, c, g, or t
atgcaggtcactattgatggtgtcccgtatgtgcctgcctgcgcttcagcgtcacggattggcattgccatttcgacacatcagcgcgcagacgttttaaaacgttctctcgaacagcatctgaggcacctgccagccggcgcgctggtagtggtagtcgatgatggttcaaaacctgccgcagtagtgcctgacggcgtgcagctgcttcgccatgaaacatcactcggcattgttgcatcgaagaacgccagtttaaccgcgctaatggacgccgggtgcgaacatcttttcctttgggacgatgacgcctggcccatcgctgataactggcacttgccttacatcgaatcacctgagccacacctggcttaccagtttctcgatctggcagggacgaataagttgaatgatatggcggttctgtaccgggatgataagcacatcgcttacaccgggcagcgcggcgtgatgctgtattaccaccgtagcgctatcgagaaggttggcggtttcgatcgggtatacggtcgcggcatgtacgagcatcccgatctggcgctgcgcattcacaacgccgggttatcgacctgggcgttcgctgatgtggtcggctctgaaaagctgattcactccatggatgagcatgaagaggggacgcgctctattccccggcctgaccgtgaagcactggtgaaacgaaacgtcggaatattcaacgcccggcgggatagtggttataccggattcgcttcatatagtaccaatccgaatctggtgattacgacgctgcttacgagtcagccagacccacagcggggcggaaaaatgaaacccgacccgcgggctcttcaggtttgggcggactcaatatccggcgcgttgccgattgtcctggctgacgaattaaaagagtcgccaactggtgctgatctggttgaagtcccgctggtggacatgagcccttactttgctcgctggcttcacatctatcagtttcttcgtgcgcaccctgagtatcaccttgtctggtgtacggacggtactgacgttgaaatgttgcgagagccctgggcagaaatggagccgggtaaaatttacgttggctcagagcacaagacgtatgccgacgaatggatgaaggcaaatcaccacggcaaagcgtatagcgatttcattcagcagtatcgtgatgaaccactgctgaatgctgggctgcttggtggcagccgtgaagacgtaatggagtttgctcaccggatcatccgacagcattacctgattgaaagccaccgtttctggaagatggagacagaacccgccacgctggtggacatgggcgctttcggtatggcagnnnnnnnnnntggcagcaaaatctttcggagatcgcatcgttaccggcccgcgcatccataccgtttttaa

SEQ ID NO: 526226 - DNA, 591 bp, Stenotrophomonas maltophilia; identical to SEQ ID NO: 129352

SEQ ID NO: 526227 - DNA, 369 bp, Stenotrophomonas maltophilia
atgtctaagctaacaacgttaaagccacgcctgaaagccattgatacgcgacgcataaagccgatctacggtgagcagcgccgcataagtggaagtgcaagggtgagtttgaagcgacgtatctatgcgcgtgacaatggtcgctgctgtatgtgtaatcgggttgttgatttgactgacagtgaactcgaccaccgtattgcgcttcagttcggaggcgataactcggagcacaacctgtggacgctctgcactgaatgtcacgcaggtaagtctgcacgtgaagttgccaccggtcagcctgatgagcaggccctgaagcatgaggtgcctgaaggcgatcaggcatcaggatttgtagggctttga

SEQ ID NO: 526228 - DNA, 495 bp, Stenotrophomonas maltophilia
atgttaacagcgcagaagcggaaatatgctctcgcgctgatgtccgggatgtctcagaaggatgcggcaataaaggcgggatattctgaaaaatccgcgcgttccaaggggtcgcagcttgctaaagacccggaggtcatcgcgtttattgagcggaaaaaacgagaaaaagttgaggtggatgacgaacctgcgtatcgcaggaatgtttataccccagcagtaaacacgcctgaagaaaaacgacctcctgcggcatcgtccgccggtgagtatgaagaccctctcgacttcctgaaatcggttatgaacaacgttggttacgaaatcgaaaccaggaaagatgctgcgaaggccatgctgccttatatgcatcagaagaaaggagagggcggtaagaaggatgcaaaagctgaggctgccaaaaaagcggccaataagtttgccattcagcagccgccgaaactggtggttaacaatcgcgggaatacataa

SEQ ID NO: 526229 - DNA, 1659 bp, Stenotrophomonas maltophilia
atgccggaatggacaacagcctgccctgactgggcggagcgcctgaagaaaggccagtctattattcctgcaccgatttacccggagcaggctgaaatagccctgaacgttttcaggcaactgaaaatcgttgatgctccaggatcgccaactttcggtgagtcctgcgcacagtgggttttcgatctcgttgccgcgctgttcggctcctatgatgccgaaaccggccgcagacacattacagaagtgtttgtactgatccccaaaaaaaactccaagtctacgctggccgccgggataatgatgacggccttgctgctcaactggcgtcaggctgccgggtacaccatcatcgccccgactgtagaggtggcgacaaacgcctttaacccggcgcgcgatatggtaaagcgggatgatgatctggatgacctctgtcaggtgcagacacacatcaggaccatcacccacaggggaacggacacgacgctgaaagtggtggccgccgaccccaacaccgtttcggggattaaatctgtcggcacgctcattgacgagttgtggctttttggtaagcaacataactccgaagatatgctgcgtgaggcagtcggtggcatggcatcacgacctgaaggctttgtgatgtacacaaccacgcagtccaacgaaccgccagctggcgtgtttaagaaaaagttacagtacgcccgtgacgttcgcgacggaaaaattcacgacccgcattttcttccggtgatatttgagcatccaccggaaatggttgccagcggagagcatcttcttctggataacctcgcgatggttaaccccaacctgggttactccgttgacgagcagtttctttaccgcgaatacaacaaggcgaaagaggccggggaagaagacttccgtggctttatgtccaagcacgccaacgttgaaatcggtctcgccctgcgcgctgacagatgggcaggggcggatttctgggagcaacaggcaaggcgcgtcacttttgacgatattctgcgccgctctgaggtggtcacagttggtattgatggcggtggtctcgatgaccttcttggcctggccgttatcgggcgcgatcgccagactcgcgaatggttatgctggtgccatgcatgggcgcataccatcgccctggaaagacgaaagagcgaaatttcaaaattaaaggattttgtgagggccggtgacctgacgatcgttaagcgggtgggcgaagatgttgagcaggttgcagagtatgtcagccggatttatgaagccgaactgctggacaaaatcgggattgacccttctgaggtcgggcaaattcttgatgcgctcagtgaggcaggcattcctgatgaggctgtaaccggggtcagccagggctggaaactcggcggcgccattaagactactgagcgaaagctggctgaaggtgttctgcttcatggtggtcagcttctgatggcatggtgcgtaggcaacgcccgtgcggagccgaaaggcaacgccatactcatcaccaaacaggccagcgggaaggggaaaattgaccctcttatggccacattcaacgccgttacgttaatggctcttaaccccgaaccggtcaaaaaagactaccaggtatttttcgtttaa

SEQ ID NO: 526230 - DNA, 591 bp, Stenotrophomonas maltophilia
atgacgcttaaacgcgcctgcaccctcatgacggtgaagtcggtaaatgaggatgagcggattattaccggcatcgcctcaacaccgtctcccgatcgtgacggtgacattatggagccggagggggcgaaattccgcagcgatacgccgttcctctggcagcacgaccgctctcagcctattggcacctgcacgccaaaaatggtgaaagaggggttgcagatcacagcaaagctcgtgaaaccaacccctgacatgccatcccagttaatcgcacgtcttgatgaggcgtgggcttcgattaaggcggggctggtacgcggcctgtcgattgggttccgcccaattgagtattccttcctggatgaaggcggtattcgctttttgtcctgggacctgcttgaggtctcggcggtgaccattccggccaatgccgaatgctccatccagaccgttaaatctttcgatcgccagtttctcgccgcgtcaggcaatgagaaaccggtagtgaaaacttctaaaaccgctggcgctacagcacccaaaaccaaacatttcgatgaatatcgcagaacaaatcaagagctttga

SEQ ID NO: 526231 - DNA, 1368 bp, Stenotrophomonas maltophilia
atgaatatcgcagaacaaatcaagagctttgaagcgaagcgtgcagcgctggccgcatcacttgatgaagtgatgtcaaaggcggctgaagagggacgcaccctggacgctgaagaagaagagagctacgacaacacatccgcagaaattaaatcagttgatgcgcacctcaaacgactgcgcgacatggaaagcaatctggtatcgactgcaaaaccggtatctaaagctgctggtggcgaattcaccaccgtgaagacaaacgcgccggggatcattcgcgttgagcaaaatctggagaaaggtatcgcctttgcccgttttgccaaggcactggcggcggcaaacggcagccgttctgaagcgctggaaattgcacgtaagcagtacccggatgatgcgaaacttcaccatgtgctgaaagccgctgttggtgctggcacaacgaccgatcctcagtgggctggtgcgctggtggagtatcaggaatacgcaaatgattttgttgaattcctccgcccgcagaccattatcggtcgtttcggtcagggtggtattcctgccctgcgtcaggtcccgttcaacattcgcattccggcacaaacttccggcggatctgcaagctgggtaggtcagggtaaggccaagccgctgaccaaattcgactttgagtccatcacgttcagcttcgccaaagtcgcagccattgcggtgctgaccgatgagctgatccgattctccaatccggcagctgatgcactggtgcgtaatgcgctggcagaagcggtcattgcacgcctggatacggacttcattaacccggcgaaagccgaagttgctaacgtctctccggcctcaattaccaacggtattgtggctgttccatcaaccggcgatccggatgcagatgctgaagcggcattcgctcagtttgtctccaataacctccagccaactggcggcgtgtggatcatgtccagcaccaacgcgttggcgctgtccatgaagaaaaatgctctgggccagaaaatgtatccggaaatgaccctgcttggcggcacattccaggggcttccggctatcgtttcgcagtacgccggaagcaatcttaccctgctgaacgcgccggatatttatctggctgacgacggtggtgtggcagtggatatgtcacgtgaagcctctctggaaatggaaagcgatcctactggcgacagcgtcagcccaaccggaacggagctggtttccatgttccagacgaacagcgtggctatccgtgccgagcgctggatcaactggaagcgtcgccgcacggcagcggtggcggttatttctggtgtgaactacggctctaaccagggaagctaa

SEQ ID NO: 526232 - DNA, 132 bp, Stenotrophomonas maltophilia
atggagaacatcgctggtatcaccccgcagagtgtcgcggataagatgatagttctcccaggtctgttgcatttcgggagaatgagacaactcatcgagcagctcactatccagcatttcaccatccattaa

SEQ ID NO: 526233 - DNA, 576 bp, Stenotrophomonas maltophilia
  misc_feature (450)..(450): n is a, c, g, or t
atgagcgagcagttaacggaccaggtcctggttgaacgggtccagaagggagatcagaaagcttttaacctactggtggtgcgctaccagcataaggtagcgagtctggtttcccgctatgtaccgtcaggcgatgttcctgatgtggtacaagagtcttttattaaggcctatcgcgcgctggattcattccggggggatagtgctttttatacctggctgtatcgtattgcagtcaatacggctaagaattatttggttgctcaggggcgtcgtccgccttcaagtgatgttgacgctatcgatgcagaaaacttcgaaagtggcggcgcgctgaaagaaatttcgaaccctgagaacttaatgttgtcagaagaactgagacaaatcgtttttcgcacgatcgagtcgctcccggaagatttacgcatggcaattacgttacggganctggatggcctaagctatgaagagatagccgccatcatggattgtccggtcggcacggttcgttcacgaattttccgtgcgcgagaagccattgataataaagttcaaccgcttatcaggcgttga

SEQ ID NO: 526234 - DNA, 1620 bp, Stenotrophomonas maltophilia
atgaatacaacgcctgaactccattgtgatgtactgattatcggcagcggtgctgctggcctctccctcgcgctgcgcctggcggaacatcagaacgtaatcgtgctgagtaaagggccgatgagcgaaggttccaccttctatgcacaaggcggtattgccgccgtgtttgatgaaacggacagcattgcctcacacgtagaagacactctgattgccggtgccgggatcgtggatgagcatgccgcagagtttgtcgccagcaatgcccgccactgcgtgcaatggcttatcgaccagggcgtgctgtttgatactcaggttcagcctaatggtgaagagagctatcatctgacccgtgaaggcgggcacagccatcgccgtattctgcacgctgctgatgcaacaggaaaagcggttgaaaccacattggtcagcaaagccctcagccatcccaatattcgggtgctggagcgcagtaacgccgtcgacctgattatttccgataaaattggcctgcccggcacgcgccgtgttgtcggcgcatgggtgtggaatcggaataaagagaaggtggaaacctgccaggctaaagccgttgtgctggcgaccggcggcgcctccaaggtttaccagtacacgactaacccggatatcgcctccggagacggtatcgccatggcctggcgcgcaggctgccgcgtagcgaatatggagtttaatcagttccatcctaccgccctgttccacccgcaggcacgtaacttcctgttaactgaagcgttgcgcggcgaaggcgcgtatctcaagcgaccggacggttccaggtttatgccggacttcgacccccgaggtgaacttgccccgcgggatatcgtggcccgcgccattgaccacgagatgaagcggcttggcgtggactgtatgtatctggacattagccataaaccggcagactttattcgccagcacttcccgatgatttatgaaaagctgctgagtctgggtatcgatttaacccgcgatccggtgccgattgtgcctgctgcccactatacctgtggcggggtgatagttgacgatcatggtcgtaccgacgtggatggtttgtatgcgatcggcgaggtcagttacaccggcctgcatggtgcgaatcgcatggcatcaaactcattgctggagtgtcttgtgtatgggtggtcggctgcggaagatataaccaaacgcatgccctatgcacgtccaacaacgcacctgccagcatgggatgaaagtcgggtagagaacccggacgaactggttgttatccagcataactggcacgagctgcggcttctcatgtgggattatgtcgggattgtacgcacaacgaagcgtctggaacgcgcgttacgccgcatcatgatgttgcagcaggaaattgatgaatattacgccaacttccgcgtttccaataatctgctggagctgcgcaaccttgtgcaggttgccgagctgattgtacgctgtgcgatgatgcgcaaagagagtcgtggcctgcattatacgctggactatcccgacccgctggaaacgtccggcccgtcggtgttgacgccgcaggttcacataaacagataa

SEQ ID NO: 526235 - DNA, 738 bp, Stenotrophomonas maltophilia
atgtctcaactcaaagcgcagttgcgccgcgatggttttacgtttaaacaattttttgtggcgcacgatcgttgcgcaatgaaagtcggtacagacggtattttactgggtgcatgggcccctgtcgcaggtgtaaaacgcattctggatattggtacgggcagcggacttcaggcgctgatgctggcgcagcgtaccgaagaacacgtcacgatcgacgccgttgagcttgatcctcaggcggcccagcaggcaagcgaaaacgctgccgattctccgtgggcagaacggatcagggtggaatgtgccgatgtcctgacctgggcaccggagcagactgcgcgttacgatttgatcgtcagcaatccgccgtatttcacgccaggtgtggagtgtggaacgccggaacgcgagcaggcacgttacaccggctcgctcgatcacaaggcgctactgaccagcgcggcggaactcatctcggaagagggatttttctgcgtggtcttgcccgaaagcacgggtaacaccttcattgagatcgctcgggatatcggctggagtttgcgtcttcgtaccgatatttcggatacggaaggtcgcttaccgcaccgtgtgttgctggcgctctcgccgaaagagggggagtgctttaccgacaggatggttattcgcgggccagaccagcgttattccgaagattacactgccctgacccaggccttttatctgtttatgtga

SEQ ID NO: 526236 - DNA, 1329 bp, Stenotrophomonas maltophilia
atgactgtaacgactttttccgaacttgaactcgatgaaagcctgctcaatgctcttgagagtaaaggctttacacgcccgaccgccattcaggccgcggccattccgcctgcgcttgagggccgcgatgtgctcggttctgcgccaaccggcacggggaagacagcagcctacttgctgcctgtgttgcagcatttgctcgattttccgcgtaaaaaatcagggccgccgcgcattttgatcctgaccccgacccgtgaactggcgatgcaggttgccgaacacgcgcgtgagctggcggcgaacacccatctggatatcgcgaccatcaccggcggcgtagcgtatatgaaccacgccgaagtgttcagcgaaaaccaggatatcgttgtcgcgacgacaggccgtctgctgcaatacataaaagaagagaacttcgactgccgggcggtggaaacgctgattctcgatgaagctgaccgcatgctggacatgggctttgcccaggatatcgaacacatcgcgggtgaaacgcgctggcgtaaccagacaatgctgttctcggcaacccttgaaggggatgccattaaagatttcgccgaacgtctgctggaagatccggtggaagtgtccgctacgccatcgacgcgtgagcgtaagaagatccatcagtggtactaccgcgcagataaccttgagcataaggttgagttgctgaaacatctgctgaagcaggaagaagcaacccgtaccatcgtcttcgtacgtaaacgtgagcgagtgcatgagctggcagaaatgctgcgcaacgctggcatcaacaactgctatctcgaaggtgaaatggcacaggttaagcgtaccgaagggattaagcgcctgaccgatggtcgcgtgaatgtgctggttgcaaccgacgttgccgcgcgcgggatcgacatcccggacgtaagccatgtgatcaactttgatatgccgcgcagcggtgatacttacctgcaccgtattggtcgtaccggccgtgcgggccgcaaagggattgctatttctctggtagaagcacacgaccatctgctgctccaaaaaattggccgctacgttgatgagccgctaaaagctcgtgtgattgacgaacttcgtccgacgacacgtgcaccgagtgaaaaaatgacgggtaaaccgtccaagaaagcgctcgcgaaacgtgctgagagaaaagagaaagaaaaagagaagccgcgcgtgaagcagcgccaccgcgataccaaaaatattggtaagcgccgtaagccaagttctgctgcgccagagacaaaaactgaagagtaa

SEQ ID NO: 526237 - DNA, 384 bp, Stenotrophomonas maltophilia
atgattacaggtatccagattactaaagctgcaaatgacgatctgctgaactctttctggctgctggacagcgagaaaaacgaagcgcgctgtgtagtagcgaaagcaggttttgcggaagacgaaatcgttccggtgagcaaactgggcgaaattgaataccgtgaaattccaatgcaagtgcaaccagaagtgcgcgtggaaggtggtcagcacctgaacgttaacgtcctgcgtcgtgaaacgctgatggatgctgttgagaacccagaaaaatacccgcagctgaccatccgtgtgtctggctatgcggtgcgtttcaactctctgactccggaacagcagcgcgacgttatcgcccgtacctttactgaaagcctgtaa

SEQ ID NO: 526238 - DNA, 690 bp, Stenotrophomonas maltophilia
atgacaacacctttaacctggcatgacgtgctggcagaagagaagcagcagccctattttattaataccctcagtaccgttgcggctgaacggcaggccggccagacaatttatccaccgcagaaagatgtatttaacgcctttcgctacaccgaactgagcgacgtgaaggtggttatactggggcaggatccgtaccatggtcccgggcaggctcacggactggcattttccgtgcgtccgggcgtggccattcccccttctctgctgaatatgtataaagagctggaaggaacgattccgggtttcacccgccctaatcacggttatctggaaagctgggcgcgccagggcgtgctgttgctgaataccgtattaaccgtccgggcgggtcaggcacactcccacgccagtctgggatgggaaacctttaccgataaggttatcagcctgatcaatgagcatcgtgaaggcgtcgtgtttttactctggggttcacatgcccaaaagaaaggggcgattatcgatcgtcagcgccatcacgtactgaaagcaccgcacccgtcgccgctgtctgcgcatcgcggtttctttggcagtaaccattttgttctgacgaatgagtggctggaaaagcgtggcgaaaagccgattgactggatgcctgtgttaccggcagagagtgagtag

SEQ ID NO: 526239 - DNA, 1086 bp, Stenotrophomonas maltophilia
atgaacgacgaaatgaaaaacaaaagcggcaaggtcaaagtgatgtatgtccgcagtgatgatgactctgataaacgcacccaaaatccgcgtaccggaaaaggtggcgggcgtccggcgtcttctcgtgcagacggtggccgtcgccccgcccgcgatgacagaaataaccgcggcgatgaccgcaaacgtgatgaccgtaagcgtgacgatcgcaaacgcgatgattttgtccgcgacggtggatcgccatggcgtaccgtttctcgcgcgcccggtgaagaggcgaccgaaaaagccgatcacggcggtatcagcggaaaaagctttatcgatccggaagtgctgcgtcgtcagcgtgcggaagaaacccgtgtatatggcgagaacgcctgtcaggccctgttccagagccgcccggagtgtatcgttcgcgcatggtttatccagagcgtgaccccgcgctttaaagaagcgctgcgctggatggcggcgaaccgtaaagcctaccacgtggttgacgatgccgagctgacaaaagcgtccgggactgaacaccacggcggcgtctgcttcctgatcaaaaaacgtaacggcaccaccgtgcagcagtgggtcagccaggcggatgccgatgactgtgtgctggcgctggaagatgtgggtaacccgcataacctgggcgctatgatgcgtagctgcgcgcactttggcgtgaaaggcgttctgttgcaggatgccgcgctgctggaatccggtgcggcaatccgtaccgcggaaggcggtgctgagcatgttcagccgatcaccggcgacagcgtgctggaggcccttgagcaattccgtaacgcgggctacaccattgtcaccacctcaagccgtgccgctacgccgctgtttaaagcgacgttgccgcgcaaaatggtgctggtgttaggtcaggagcgcgatggtctgtctgatgcggcactctccagcgctgacatgagcgtttctatcgacggcactggcaacgttgaaagcctgaacgtatccgttgcgaccggcgtgctgctggccgaatggtggcgtcagaacaaggcataa

SEQ ID NO: 526240 - DNA, 420 bp, Stenotrophomonas maltophilia
atgaataccgtatgtgccaactgtcaggctttaaaccgcattccggacgatcggatggatgacggtgcgaaatgcgggcgttgtggccacgaattatttgatggcgatgtcattaacgcgacgggtgctacgctggacaaactcctcaaggacgatctgccggttgtggtcgatttctgggcaccgtggtgcggcccctgccgtaactttgcgcccatcttcgaagacgtggctgaagagcgcagcgggaaaatgcgttttgttaaagtgaataccgaagcggaacgtgaactcagcgcccgttttcgcattcgcagcattccaaccattatgattttcaaaaatggggaagtgatcgacatgctcaatggtgcagtaccgaaggcgcctttcgacagctggttaaacgaatccctgtaa

SEQ ID NO: 526241 - DNA, 699 bp, Stenotrophomonas maltophilia
atgactgataacgctgtacttcaattacgcgccgagcgccttgcgcgcgcaacccgcccttttctggcccgaggcaatcgtattcgccgctgccagcgctgccttttaccgctgaaagtgtgtctgtgcgaaacgcttacaccgagcgaggcgaaaagccgcttttgtctggtcatgttcgataccgaaccgatgaagcccagcaacacggggcgtttgatcgccgatattctgcccaataccgcagcgtttcagtggtcgcgcactgagccacctcaggctctgcttgacctggtggcaaacccggactatcagcccatggtcgttttcccggcatcatatgcaggcgaacaacgccaggtgcttacggcgccaccatccggtaagccgccgctgtttattatgctcgacggcacctggaccgaagcaagaaagatgtttcgcaaaagcccttatcttgatgcgctgccggtgatctccgtcgatctgtcgcgcgtttcggcctatcgcttacgagaagcgcatgccgagggtcaatattgcaccgctgaagtcgccattgcgctactggatctggcgggcgatacccaggcggccagcgcattaagctcccacttctcctgcttccgcgaacgttatctggcaggaaaaaccgttcataagggtagcgtcacagcaacagagacagaaagcgtttaa

SEQ ID NO: 526242 - DNA, 2331 bp, Stenotrophomonas maltophilia
  misc_feature (1895)..(1904): n is a, c, g, or t
atgagccagagagggttagaagcgctactccgtccgaaatccattgccgttattggcgcctcgatgaaaccggaccgcgcagggtatctgatgatgcgtaacctgctggctggcgggtttaacggcccggtcatgcccgttacgcccgcttataaagcggtacagggggtgctggcgtggccggacgtgcaaagtttaccgtttgttcccgacctcgccgtgctctgtacgcatgcgaaacgaaacctcgaattgcttgagtcgctcggtcagaaaggctgtaaaacctgcattattctttcctcgcctcctgaacagcagcccgaactgctggcctgcgccagccgctaccagatgcgcattcttggtccaaatagcctcggtctgcttgcgccctggcaagggctgaatgccagtttttccccggttccgatccgtaaaggcaaactggcctttatttcacagtcggcagcggtatccaataccatcctcgactgggcgcagcagcgtgagatgggcttttcctatttcatcgccctcggcgacagcctggacattgacgtcgatgagctgctggatttcctggcgcgtgacagcaaaaccagcgctatcctgctctaccttgaacacctgagtgacgcccgtcgttttgtgtcggcatcgcgtagcgcatcgcgtaataaaccgattctggtcatcaaaagcgggcgcagccccgcggctcagcgcctgctgcaatcccattccgggatggatcccgcatgggatgcagcgatccagcgcgccggtttactgcgggtacaggatacgcacgagcttttttccgccgtcgaaacgttgagccacatgcgtcccctgcgcggtgaaaagctgatgattgtcagcaacggagccgctcccgccgccctggcgctggacgagctctggctacgcaacggcaagctggccacgctgggtgaagagacgctccagcgcctgcgggacgcgttaccgggaagcgttgttcccgataatcccctcgatttgcgcgatgatgccagcagcgatcgttacattaaggcgatcacgattttgctggatagccaggactttgatgcgctgatgattatccattcgcccagcgcggttgcgccaggcagcgaaagtgcacgaacgctgattgaggctgtccgaaaccatccgcgcggcaaatacgtcaccctgctgaccaactggtgcggcgagttctcctcgcaggaagcgcgacgtctgtttagtgaagccgggttgccaacctaccgtacgccagagggcaccataaccgcgtttatgcatatggttgagtaccgccgcaaccagaagcagctgcgtgaaacgcctgccctaccgggcaacctcacagcaaattcggtggacgtacacagtttattgcaacaggccatcgaagagggcgccacttcgcttgatacgcatgaagtgcaacccattcttggcagctatgggatgcaaacactgccgacctggattgccggtgacagcgctgaggcggtacatatcgctgagcagattggctatccggtcgcgctgaagctgcgctcccccgatattccgcacaaatcggatgttcagggcgtcatgctgtatctgcgcaccgcgacagaagtacaacaggccgcggatgccattatcgatcgcgttaaaatgacgtggccacaggcccggatccacggcctgctggtgcagagcatggctaaccgagcaggtgcgcaggagctgcgcgtggtcgtcgaacacgatccggtttttggtccactcattatgctgggtgacggcggcgttgaatggcggccagaagaacaagcggctgtcgcgcttccacctctaaacatgaacctggcgcgttatttggttattcnnnnnnnnnngacgaaagaagatttgtactatcgctatttcagcgaaattaatgaatttacccacgacgatttagccaatatgacccagatcgactacgatcgagaaatggcgattgtggcggtccgccgttccgcagagggagaagagatcctcggcgtgacgcgtgccatttccgacccggataacgtggatgcggagtttgccgtactggtgcgttccgatcttaaaggtttgggtttgggcagacggctgctcgaaaaactcattggttatacgcgcgatcacggattgtcacggctcaatggcattactatgccaaataatcggggtatggtgaccctggcgcggaagctcggttttgacgttgatatccagctggatgaaggcattgtctctttgtccctcagcctgacttcgacggataaacaagagtaa

SEQ ID NO: 526243 - DNA, 1356 bp, Stenotrophomonas maltophilia
atgttgtcaaaatttaagcgtaataaacatcaacaacaccttgctcaactaccgaagatttctcagtcagttgatgatgtagagttcttttatgctcccgctcatttccgggagacgcttcttgaaaagattgccagcgctacgcgacgtatttgcattgtggcgctctatcttgaacaagatgaaggtgggcgtgcgatcctgaacgcgctctatgaagcgaaacgtcagcgtccggaactggatgttcgcgtgctggttgactggcaccgtgctcagcgtggccgtattggtgcggctgcctcgaataccaatgctgactggtattgccgcatggcccaggaaaatccgggtattgatatcccggtatatggcgtaccggtgaatacccgtgaagcgcttggcgttcttcattttaaaggatttatcattgatgacagcgtcctttatagcggcgccagtctgaatgatgtgtatctccatcagctcgataaataccgttacgatcgctaccatcttatccgtaatccgcagatgaccgacatcatgttcaactgggttgataaaaacctggttcatggccggggtgtgcaccgtcttgacgatcctcatcgcccgaaaagcccggaaatcaaaaacgacgttcgctccttccgccaggagctgcgcgatgcggtttatcgtttccagggtgatgccaataatgaagaactgtccgttacgcctctggtaggcctgggtaaatccagcctcctgaacaagactatcttccatttgatgccgtgcgcggagcataagctcaccatctgcaccccgtacttcaaccttcccgccgttctggtgcgtaatatcattcagttgctgcgtgatggtaaaaaggtggaaatcattgtcggggataaaacggcaaacgactttttcattccggaagatcagcctttcaagatcatcggcgcactgccttatctctatgagattaacctgcgccgctttctgagccgtttacagtactatgtgaacacggaccagctcgtcgtgcgcctctggaaagatgaagataacagttatcatctcaaaggaatgtgggttgatgacgagtggatgctgctgaccggtaataacctgaacccacgcgcctggcgtctggatttggaaaacgccattcttattcacgatcctcagcatgcgttagccgcgaaacgcgatcgtgagctggagcttatacgcacgcataccacagtggttcgtcattatcgcgatctgcaaagcatcgctgattacccggtgaaagttcgcaagctgattcgccgtctacgtcggatccgtatcgatcgcctcatcagccgcattctgtaa

SEQ ID NO: 526244 - DNA, 324 bp, Stenotrophomonas maltophilia
atgcgtacgccttgcctgataatccctcttttgctgacaggttgcagccatatggctaatgataactggtcgggtcaggataaagctcagcactttctggcgtctgcaatgatgtccgctgcgggtaatgagtatgcgctgcaccagggatatagccgggatcgaagtgccacaataggcctgatgttctccatcagcctgggggcatcaaaagaactttgggatagccgcccctcgggaagtggctggagctggaaagattttgcctgggacgtagccggggcaacaaccggctacgccgtctggcagatggcgcattattaa

SEQ ID NO: 526245 - DNA, 762 bp, Stenotrophomonas maltophilia
gtggtgatccttcaacagatccttagcgatgaagatttacgcgcctggggctggcgcattccgtttgccctgggggcagccctggcggttgtggcgctgtggctacgccgtcagcttgatgaaacctcccgacaggaggtcagggcgctgaaagaagctggttcgatgaaagggctgtggcgtaaccgcaaagcatttttgatggtattaggctttaccgccgcaggctcgctaagcttctataccttcaccacctatatgcaaaaatatctggtcaacactacgggcatgcatgcaaacgttgcgagtgtcgtcatgacggtggcgttactggtctttatgctcatccagccgattgtcggcgcgctgtcggacaaaattggtcgccgtacctccatgctgatctttggcggcatgctcaccctgggtaccgttccgcttttgacggcgctacagcatacaacctctccgtatgccgctttcgctttaatcatggtggcgctcattattatcagtttttacacggcaatcagtggcattttgaaagcggaaatgtttcccgcacaggtgagggcgctgggcgtaggcctctcttatgcggttgcaaacgccctgttcggcggttcggcagagtatgtcgcgttatcccttaagtcatggggcagtgaaacgaccttcttctggtatgtcaccgttatgggggcgctggcgtttattgtctcgctgatgctgcatcgcaaaggaaaaggtatccgcctttaa

SEQ ID NO: 526246 - DNA, 591 bp, Stenotrophomonas maltophilia
  misc_feature (538)..(547): n is a, c, g, or t
atgacagaaaccgtagccagtgcagatacggataacaccaatttggcaggtaaggatactcgccgtcgggtttgggcaatcgttggggcctcatcaggaaaccttgtagagtggtttgacttttacgtctattcattttgttcactctactttgcgcatatctttttcccgtcagggaacaccacaactcagcttttgcaaaccgcaggcgtttttgccgccgggttcctgatgcgccctatcggtggatggctcttcggcaggatcgcggacaggaaagggcgcaagacatccatgctcatctctgtatgcatgatgtgcgtcggctcgctggtgattgcctgcctgcccggttatgagactatcggaacatgggcaccggcgttgttgttgctggcacgtctgttccaggggctatccgtcggtggcgaatatggcaccagtgcgacatacatgagcgaagtggctgttgaagggcgcaaaggtttctatgcatcattccagtatgtaaccctcattggcggacagctactggcgnnnnnnnnnnctactggcgttactggttgtggtgatccttcaacagatccttag

SEQ ID NO: 526247 - DNA, 354 bp, Stenotrophomonas maltophilia
atggtcgagccttataaaagcgaaatccttccacactggcgttttaaaaattctgaagtcgcagcgcgttcggcacaagagatatacgctctctttgaagagtaccgcagtaaaaacgattttgtaggcatggatatggcgcgtaaattcatacaaatgggctatacccgcgcccggcgatacgcgaatcataagggcggtaaaaagtatgatgcggaacgacaagtcaaacccctcgatcacgatccagtgaaagcagaagcagccgcagtcttcaaaaagtggtgggataaaattcgtgcagacgaagattacttgcagcgaaaaaaggcccaccagcagtcctggggataa

SEQ ID NO: 526248 - DNA, 1053 bp, Stenotrophomonas maltophilia
gtgcaactggaacgaattcgtaaaagtttcgatggcaaagatgtcatttccgatcttaatctgaccatcaatgacggtgagtttctcacgctgcttggcccctccggctgcggcaaaaccaccgtcctgcgccttattgccgggctggaaagcgtcgataacggccatatccatcttgagaaccaggacattacccagcttcctgccgaagatcgccacgtcaataccgtctttcagagctatgccctgttcccgcacatgaccgtgtttgagaacgtggcgtttggcctgcggatgcaaaaaacacccgccagcgagatcccgccgcgcgttaccgaagccctgcgcatggtgcagctggaggcattcgcccagcgcaagccgcatcaactttctggtggtcagcagcagcgtgtggctattgcccgcgccgtggtcaacaaaccacgcctgctcctgctggatgaatccctctccgcgctggactacaagctgcgcaagcagatgcagaacgagctgaaagcgcttcagcgtaagctcggcatcacgttcgtgtttgtcactcacgatcaggaagaagccctgactatgtcagaccgtatcgtggtgatgcgtgagggcaagattgagcaggacggcacgccgcgtgaaatttacgaggaggaaatcaatattttcaacgccacggtgattgagcgtctggacgagcagcgcgtgctcgcccacgtggaaggccgcgaatgcaacatcacggtgaactttgccgtggaaaagggacaaaggctcaacgttctgctgcgcccggaagatcttcgcgtcgatgagatccacgacacggctgacgccgaaggtctgatcggttacgttcgcgaacgcaactacaaagggatgaccctcgaatccgttgtggaactggaaaacggcaaagtggtgatggttagtgagttcttcaacgaggacgatccggacttcgaccactcgctggatcagaagatggtcatcaactgggtagaaagctgggaggttgtactggctgatgaagaacacaagtaa

SEQ ID NO: 526249 - DNA, 1224 bp, Stenotrophomonas maltophilia
atggataaactacttgagcgtttcttacattacgtttcgctggatacccaatctaagccgggggtccgacaggtgccaagtaccgaaggccagtggaagctgctaaatctgctgaaagagcagctggatgccatggggctggttgatgtcacgctcagtgaaaaagggaccgtgatgggaacgctgccggccaacgttgagggagatatcccggcgattggctttatttctcatgttgatacctcacctgattttagcggtaaacacgttaatccgcagattgttgaaaactaccgcggcggagatattgcgctgggcattggcgacgaagtgctgtcgccggtgatgttccctgtactgcatcagctgctggggcagacgttaatcaccaccgacggcaaaaccttgctgggggccgatgacaaagcgggtatcgccgagatcatgacggcgctggcggtgctgaagggcaaaaatatcccacatggcgatatccgcgtggccttcacgccggatgaagaggtaggaaaaggcgcgaaacattttgacgttgaggcgtttaacgctcagtgggcctacaccgtcgacggtggcggcgtgggtgaacttgagtatgaaaactttaacgcggcatcggtgacgatcaaaatcgtcgggaataacgtgcacccgggctctgcgaaaggggtgatggtgaatgcgctgtcgctggctgcgcgtattcatgcggaagttcctgccgaagagagcccggagatgacggaagggtatgagggtttttatcatctgaccagcatcaaggggaacgtggacagcgcgcagatgcactatatcgtccgcgattttgaccgcaaagcctttgaagcgcgcaagcgtaagatgatggagatcgcgaaaaaggtcggcaaggggctgcacccggattgctatattgagctcatcatcgaagacagctattacaatatgcgcgagaaggtgatggagcatccgcacattcttgatatcgcccaacaggcgatgcgcgattgtgatatcgagccggtgatgaaaccgatccgtggtggaaccgatggttcgcagctgtcatttatgggcctgccgtgcccgaacctgtttaccggtggatataactaccacggcaagcatgagttcgtgacgctggaagggatggaaaaagcggtgcaggtgattgtgcggatagcagagttaaccgcgaagcggtaa

SEQ ID NO: 526250 - DNA, 492 bp, Stenotrophomonas maltophilia
atgtcaaactaccgccgccactacatccccggtgggacctggtttttcaccgtcaatctgcaaaaccgccagagcgatttacttacccgctacatcgacagcctgcgttccgctaccgccacggttaagcatgcgaagcccttcaccattaacgcctgggttatcctgcctgaacatatgcactgtatctggaccttaccggaaggggacagtgacttttcagcgcgctggcgcgacatcaaaaaaatgtttagccgcaacattgagatgcgccacgtctggcaaccgcgtttctgggaacacaccattcgcaatgaacaggattatcggcggcatatggattacgtctacatcaatccgctgaagcatggctatgtcgggaaagtcgtcgactggccctattcaacgtttcatcgggacgtgcgggaggggttatatccggcagactgggcgggtgagattgaggattttgcggcgggggagcggaagtaa

SEQ ID NO: 526251 - DNA, 1122 bp, Stenotrophomonas maltophilia
atggattatcaattaacgcttaactggcccgaatttattgaacgttactggcaaaaacgcccggtcgttcttaaacgcgggatcagcaattttatcgaccctatttctcctgacgaactcgctggtctggcgatggaaaacgaggtagacagccgtctggtgagccatcaggacgggaaatggcaggtcagccacggtccctttgaaagctacgatcacctggccgaaagcaactggtctttactggtgcaggcggtcaacaactggcacgaacccaccgcagccttgatgcgtcccttccgcgccctcccagactggcgaatggacgatctgatgatctccttctctgttcccggtggcggcgtgggtccgcatcttgatcagtacgacgtgtttatcattcagggtacaggtcgccgtcgctggcgagtgggcgaaaaagtgccaatgaagcagcactgtccgcacccggatctgcttcaggttgatccgtttgaagggatcattgatgaagagctggagccaggcgacattctgtatatcccgccaggcttcccgcatgaaggttattcccttgaaaactcgctaaactattcggttggtttccgcgcgccaagcggccgcgagatgatcagcggattcgctgactatgttttacagcgcgagctgggcagccatcgttacagcgatccggatgttccggcgcgtgagcacccggccgatattctgccagaggagctggataagctgcgcggtatgatgctggatctgatcaacgaaccggagcacttcagacagtggtttggcgagtttatcagccagtcgcgtcacgaactggacgtcgcaccgccagagccgccgtatcaggcagatgaaatttatgatgccctccagcagggcgataagctggttcgtctgggcggattacgtgtattgcgcattggcgaagaggtattcgtcaacggcgagcgcctggactctccacaccgtccggcactggaagcgattgccagccatatggtgctgtctgcggatacctttggcgacgcgctggacgatccctccttcctcgccatgctggccgcgctggttaacagcgggtactggttttttgaggactga

SEQ ID NO: 526252 - DNA, 1464 bp, Stenotrophomonas maltophilia
atgaaagggattttgcgccatattttacccctttcactgcgggttcgctttctgctggcaaccgccgccgtcgtgctcgtgctgtccctctcttacggaatggtggcgttggtcgggtacagcgtaagcttcgataaaaccaccttccgcctgcttcgcggcgaaagtaatctgttctataccctggcgaaatgggagaacaaccaaatcaccgtcgagatgccggaaaacctgaaccagcagagcccaacgctggcactcatttacgatgaaaaaggaaaattgctgtgggcgcagcgcgacgtcccctggctgaaaaagcgcatccgtccggaatggcttaaaaccaatggttttcacgaaatagaagccgacctcaactctaccagcatcctgctgcgtgacgatcgggcgttacagaacaagctcaatgagatccgcgctgaagatgacgacacggagatgacccactcggtggccatcaacctgtatcccgccactctgaacatgccgcagctgaccattgtggtgatcgataccataccggttgagctaaaacgttcgtatatggtctggaactggttcgtgtacgttctggctgccaacctgctgctggtgatccctctcctgtgggttgctgcgtggtggagcctccgcccgattgaatcccttgccaaagaggtgcgcgagctggaggaacatcaccgcgagaagcttaacccggaaactacgcgcgaactgaccagcctggtgcgcaacctcaaccgcctgctgaaaagcgaacgtgaacgttacgacaagtatcgcacgacgctcaccgatcttacgcacagcctgaaaaccccgctggcagtgatgcaaagtacactgcgttcaatgcgcagttcgaaaatgagcgtggatgacgccgagccggtaatgctggagcaaatcagccgtatttcacagcagattggttattacctgcaccgcgcgagcatgcgttccggaagcgccttattgagccgtgaactgcacccggtagccccgctgctggataacctcacctctgcgctgaacaaggtttaccagcgtaaaggggtaaacatcagtctggatatctcaccggaaataagctttgttggcgagaagaatgactttatggaagtgatgggtaatctgctcgataacgcctgcaaatattgtctggagtttgtcgaggtgtccgcgcgcgtaacggataacgaactgcatattatcgttgaggatgatggtcctggcattccccataataaacgcgaagtggtattcgatcgcggtcagcgcgccgatacgctgcgcccgggccagggtgtcggattatccgtcgcccgggaaattgtcgatcagtacgagggcaagattgaaaccggcgaaagtctgctgggcggtgcccgtatggaagtcatttttggccgccaacagcccgtattgaacgatagttaa

SEQ ID NO: 526253 - DNA, 675 bp, Stenotrophomonas maltophilia
atgatgcgcgtactggttgttgaggataacgcattgctacgtcatcacctgaaagttcaacttcaggagatgggtcatcaggtggacgatgctgaagacgcaaaagaggccgattattatctcaatgaacacctgccggacatcgccattgtcgatttagggctgccggatgaagacggattatctcttatccgccgctggcgtagccatgacgtttccctgccggtactggtgctgactgctcgcgaaggctggcaggacaaggttgaagtgttgagcgcaggcgcagatgactacgtgaccaaacccttccatattgaagaagtcgccgcgcgtatgcaggcgctgctgcgccgcaacagcgggctggcgtcacaggtgatctctctgccgccgttccaggtggatctctcccgccgcgaattttcaataaatgatgaagtaatcaagctgaccgcattcgaatacaccatcatggaaacgctgatccgtaacaacggtaaagtggtgagcaaagattccctgatgcttcagctttatccggatgccgaactgcgcgaaagccacaccattgacgtgctgatgggccgcctgcgcaaaaaaattcaggcacagtacccgcacgacgtgattaccaccgtgcgtggtcagggctacctgttcgaattacgctaa

SEQ ID NO: 526254 - DNA, 393 bp, Stenotrophomonas maltophilia
atggaatggaaggttgttgagactattgcgagcccggaaagtggaaccatcttttgcaaagttgaaacacaatatggcctgaattatatcctttggctaaaaggggattattacgttcgtgccggtgaaatcatcaccacctcaaaccagggtatcctgattaacgatcggcggcgtagggtatggatagcgcaggcaatgccctatacatcaataggctggatggggttcaaacagaaaaacgcgtgtccaggtaaccggcaggagatggatcggccatgcacggttgagaccccgtgccagttcaggctgtgcccgttcggcttaaaacgatatattccggaaagttattccacggcgaaaaataacaaccagcctgacaacaggttgtaa

SEQ ID NO: 526255 - DNA, 1371 bp, Stenotrophomonas maltophilia
atggaattatcctcactgaccgccgtatcccctgtcgatggacgctacggcgataaagtcagcgcgctgcgcgggatcttcagcgaatatggcctgctgaagttccgtgttcaggttgaagtgcgctggctgcaaaagctggccgcccagacagcaatcaaggaagttcctgcttttgacgcaaaggcaaacgattaccttgataaaatcgttgctgagttcagcgaagaagatgccgcgcgtattaaaaccatcgaacgcaccaccaaccacgacgtgaaagcggttgaatacttcctgaaagagaaagtggcaagcgtccctgccctgcacgcggtatctgaatttattcacttcgcctgtacctctgaagatattaacaacctgtctcacgcgctgatgctctctaccgcacgcaaagaggtggtactcccttactggcgtaaaatcatcgatgcggtgaaagcgctgtccgtggagtaccgcgatattccgctgttgtcccgtactcacggccagccagcaaccccatccaccatgggtaaagagatggcgaacgtggcgtaccgcatggaacgccagtatcgtcagctggagcaggttgagatcctcggcaaaatcaacggcgcggtgggtaactacaacgcccacattgcggcgtacccggaagtggactggcaccagttcagtgaagagttcgtgacgtctctggggatccagtggaacccgtacaccacccagattgagccgcacgactacatcgctgagctgtttgactgcattgcgcgcttcaacaccatcctgatcgacttcgatcgtgacgtctggggctacatcgccctgaaccacttcaagcagaagactatcgccggggaaatcggttcgtccaccatgccgcacaaagtgaacccaatcgacttcgaaaactccgaaggtaacctgggcctggcgaatgccgtgttgcagcatatggcgagtaagctgccggtctcccgctggcagcgcgacctgactgactccacggtgctgcgtaacctgggcgtgggtattggctacgcgctgatcgcctaccagtccaccctgaagggtgtgagcaagctggaggtgaaccgcgaccgtctgctggacgagctggatcacaactgggaagtgctggcggagccgattcagaccgtgatgcgtcgttatggcatcgaaaaaccgtacgagaaactcaaagaactgacccgcggtaaacgcgttgatgctgagggtatgaaacagtttatcgatggtctggcgctgcccgaagaagaaaaagcgcgcctgaaagagatgaccccggcaaactatattggccgcgccattactatggttgacgagctgaagtaa

SEQ ID NO: 526256 - DNA, 630 bp, Stenotrophomonas maltophilia
gtggcgaagaactattacgacatcaccctggcgctggcgggaatttgccagtcagcccgtctggtgcaacagctggcgcatcagggtcattgcgacgctgatgccctgcacgtttcactcaacagcgttatcgatcttaacccaggctccacgctgggcgtctttggcggcagtgaaaccaatcttcgtctcggtcttgaaaccctgctcggcgtgctcaacgccagcaaccgtcaggggttgaacgcggaactgacccgctacaccttaagcctgatggtgctggaacgtaagctgaacgcggcgaaaggcgcaatgaataccctgggcgatcgcatcgccgggctacagcgccagctcgaccactttgacctccagtctgagaccctgctgagcgcgatggccggtatctacgtcgacgtaattagcccgctcggcccgcgtattcaggtcaccggttcgcctgccgtattgcaaagcccacaggtacaggcgaaggtacgcgcttcgctgctggcaggcatccgtgccgccgtgctgtggcaacaggtcggcggtggccgcctacagctcatgttttctcgtcatcgcctgacgactcaggcaaaacaaattcttgctcattgttaa

SEQ ID NO: 526257 - DNA, 1170 bp, Stenotrophomonas maltophilia
atggtgggggggcgtgatagaatatgccgccttgaagttcaatgtcgtgagtattccatgtcagataacagccagaaaaaagtgatcgtcggcatgtccggcggtgtcgattcctccgtttccgcctacctgttgcagcaacagggctataaggtggagggcctgttcatgaagaactgggaggaagacgatggcgaggaatactgcactgccgctgcggatctcgccgatgcgcaggccgtgtgcgataagctcggcatcgaactgcacactgttaactttgccgcagaatactgggacaacgtttttgaactcttccttgaagagtacaaagcgggccgtacgccaaacccggatatcctgtgtaacaaagagatcaaattcaaagccttcctggaattcgccgcggaagacctgggcgcagactacattgcgaccggccactacgtgcgtcgcgcggatgtgaatggtaaaagccagctgctgcgcggtctggatggcaataaagatcagagctacttcctctacacgctgagccatgaacagattgcccaaagtctgttcccggtcggcgagctggaaaagccggaagtacgcaagattgctgaagatctggatctgatcaccgcgaagaaaaaagactccaccggtatctgttttatcggcgagcgtaaattccgcgagttcctggggcgctacctgcctgcacagccgggcaaaatcgtcaccgttgacggtgatgagattggtcagcaccaggggctgatgtaccacactctcggccagcgtaaaggtctgggtatcggcggcaccaaagagggcagcgaagatccgtggtacgtggtcgacaaagatgtcgaaaacaatattctggtggtggctcagggtcacgaccatccgcgcctgatgtccgttggacttatcgcgcaacagctgcactgggtcgatcgcgagccgctgaaaggcacgctgcgctgcactgtgaaaacgcgctaccgccagacggacatcccttgcaccgtcaccgcactggatgacgatcgcattgacgtgcgtttcgacgagccggtttccgccgttacccctggccaatctgctgttttctacagcggcgaaatttgcctcggcggtgggatcattgaacagcgcctgccgctgcctgctgtttaa

SEQ ID NO: 526258 - DNA, 474 bp, Stenotrophomonas maltophilia
atgtttaaaccccatgttacggtcgcctgcgtggtccacgcgcaggggaaattcctggtggtggaagagaccatcaacggcaaagcgctttggaatcagccagccgggcatcttgaagccaacgaaaccttattgcaggcagcgaaacgcgagctctgggaagagacgggtatccgcgccgaaccgcagcactttatccgtatgcatcagtggatagcgcctgaccagacacctttcctgcgcttcttattcgccgttgagcttaacgaaacgtgcgccactgaaccgcacgacgacgatatcgatcgctgcctgtgggtgaccgcagacgagatcatgagcgcgccaaacctgcgctcgccgctggttgcggaaagcatccgctgctggcagtctgcggctcgcctgccgctggatgtcattgcagaatttaactggccgtttacagagggtgtcaatggtgggggggcgtga

SEQ ID NO: 526259 - DNA, 552 bp, Stenotrophomonas maltophilia
atgcggcaattgataacgcctgaaaataccatgacgaaaacttcttttagaaaacaccgggttgagcgattcagctcacgacaagccaccagaagaacgccagaaccccagccaacgcgggtcatactgttcaataaaccctacgatgtattgccgcagtttaccgacgaggccgggcgcagcacgctgaaggattttatcaccggaaaaatttactatgtgcaggttgaaggcgagccggacgacgcgtcgctggcaaagctgcgcaacggcgtaacgctgaacgatggtcctaccctgccagctggtattgagcgcgtgaatgaacccgagtggctgtggccgcgcaacccgccgattcgtgagcgcaaatcgattcccaccagctggcttaaaatcaccctttatgaaggccgcaaccgacaggtcaggcgcatgactgcgcatgtgggcttccctaccctgcgactcattcgctacgccatgggcagctacacgctggactcgctggctaacggggaatggcgggatgttacccctaaggagaactga

SEQ ID NO: 526260 - DNA, 1251 bp, Stenotrophomonas maltophilia
atggaaagcaaagtagttgttccggcggaaggtaaaaagatcaccctgcaaaacggcaagattaacgttcctcacaacccgattatcccgttcatcgaaggtgacggtatcggtgtagacgttaccccggcaatgctgaaagtggttgatgccgctgttgagaaagcctacaaaggcgagcgtaaaatttcctggatggaaatttacaccggtgaaaaatcgactcaagtttatggccaggacgtctggctgccagccgaaacgctggacctgatccgcgactatcgcgttgctatcaaaggccctctgaccacgccagttggcggcggcattcgctccctgaacgtggcgctgcgtcaggaactggatctgtatgtgtgtctgcgtccggtgcgttactaccagggcactccaagcccggttaagcacccggaactgaccgacatggtcatcttccgtgaaaactctgaagacatctacgccggtatcgaatggaaagcggattctgctgatgcagaaaaagtgattaaattcctgcgcgaagagatgggcgtgaagaaaattcgcttccctgagcattgcggcatcggcatcaagccgtgctccgaagaagggaccaagcgtctggtgcgtgccgccatcgaatacgctatcaccaacgatcgtgactctgtgaccctggttcacaaaggcaatatcatgaagttcaccgaaggcgcgttcaaagactggggctaccagctggcgaccgaagagttcggcggtgaactgatcgacggcggcccatggcagaaaattaaaaacccgaacaccggtaaagagatcatcattaaagatgtgatcgccgatgcgttcctgcaacagatcctgctgcgtcctgctgagtatgatgtgatcgcctgtatgaacctgaacggcgactacatctccgatgcgctggcagcgcaggtcggtggtatcggtatcgccccgggcgcgaacatcggtgacgagtgcgccctgtttgaagcaactcacggtactgcaccgaaatatgcaggccaggacaaagtcaacccaggctcaatcattctgtccgcagagatgatgctgcgtcatatggaatggttcgaagccgcagacctgattgttaagggtatggaaggcgcgattaacgcgaaaaccgtcacctatgactttgaacgtctgatggaaggcgctaaactgctgaaatgctcagagtttggcgacgcgattatcgcgaacatgtaa

SEQ ID NO: 526261 - DNA, 246 bp, Stenotrophomonas maltophilia
atgacccatgatatcccgctcaagtattatgacatcgtcgacgagtatgcgactgaaacggcaaaaccgccagaagaggcggagcgtacgccactggcacactattttcagctgctgctcactcgcttatacaacaatgaggaaatcagtgaagaggcgcagcgggagatggctgtccaggcggagatagatgaagcgcgcattgacgatattgcgaacttcctgaatcaatggggcaatgaataa

SEQ ID NO: 526262 - DNA, 1476 bp, Stenotrophomonas maltophilia
  misc_feature (801)..(810): n is a, c, g, or t
atgaacaaggccattgccgttgctatcatctcaacctttatggtcgtcctgtcgctgtatgcggttaacgccattatcgttgagcagcaaaaggaccggcagagggagatctcccacacgctcttacgctattccgaagacttgacgcaaaatatcgccagtacgcttaaaaatacctccgcgaagggatgcgataacgccagcctgaacgtctaccgtaatttaaagatgcagagtctctatttcgccgatgtggggtttattgaaaatgggaaaatcacctgcaccgcattttggggcaagctggcaaatcccatcgcccttccctctgagcttcacaacaccctgaacggattcagtctggcgcaattttcacagaaagatttttttgtaggcaatgcgacaatttataaccatcttattatcttcacatcacgttcagcctacgataaattctctccggtcaccgccaactattcacttcgttctaccacgaaagatttcgaccgaaccttttttaccgttacctcacctacagaaaaccttagccgcttgtcgtcactgttattcacgcagaccgtgacgcagtgcagcacgcgctgggatttgtgcgttaccgtcacccaccacaatgccggactggcatcgctctcccgcgtagtgatggtgctcctgtgcctgtttttatactttatctgggtatccctgacgctgttttctcttcgactttatgaagatcgactttctcttgagcgaacgctggtcaaggcggtgatagcgaatactatcagcgttcatttnnnnnnnnnngtcggggttgaagtcttatcaagatggcaggataacaatcacaaagaggtttctcctgagctgtttatcccgttaataaaaaaaattggtctgtataacgtttattatcagaacatgataaagaaatccctggcggaaattgccgggctggcggccgaacatcagttaatgatttcactgaacgttggccggacggaaattgaagacggcaaatttctggcggtattacgtcatgcatgcttagagaacgctattcccttatcgttaatcaaagttgagttatccgagaatggcgtttccacctcggccatccttgaagagttttgtgaggatcttaaatcggcaggcgtcaaaatttcaatagacgattttggcgtgcaaaactctaatctggcaaggctgtccaatctcaaatatgacgaaatcaaagtggataagtcgttagtggatggcatcaacgagcattataaacaggatatcctggtgatctttagcgacgcgctcgctaaactgcacaaaaccctggtgtttgagggagtcgaaagcgaaacgcaatatcagttcatcgcgcagagataccccgatgccctcgtgcaaggctggtacttttcaaaatcactaacccggcacgacctcgccagcctgctggcttactcagcgcgatga

SEQ ID NO: 526263 - DNA, 564 bp, Stenotrophomonas maltophilia
atgtccttgattaacaccaaaattaaacctttcaaaaaccaggcgttcaaaaacggtgagttcatcgaagttactgagaaagataccgaaggccgctggagcgtgttcttcttctatccggctgacttcaccttcgtttgcccgaccgaactgggcgacgtggcagaccactacgaagaactgcaaaagctgggcgtagacgtttactctgtttctaccgatacccacttcacccacaaagcgtggcacagcagctctgaaactatcgcgaaaatcaaatacgcgatgatcggcgacccgactggcgccctgacccgtaacttcgacaacatgcgtgaagatgaaggcctggctgaccgtgcgaccttcgttgttgacccgcagggcattatccaggctatcgaagttaccgctgaaggtatcggccgtgatgcatctgacctgctgcgcaaagtgaaggcggctcagtacgttgcttctcacccaggcgaagtgtgcccggcgaaatggaaagaaggcgaagcgacgctggcgccatctctggacctggtcggcaagatctaa

SEQ ID NO: 526264 - DNA, 1566 bp, Stenotrophomonas maltophilia
atgctcgacactaacatgaaaacccagctcaaggcctaccttgagaaactgaccaaacctgttgagctgattgccacgctggacgacagcgcgaaatcggcagaaatcaaagcgctgctgacagagattgctgagctgtcgccgaaagtgaccttcaaagaagacaacacgctggcagtccgtaagccttctttcctgatcgccaacccagggtctgaccaggggccgcgtttcgcgggttctccgctggggcacgaatttacgtccctggtgctggcgctgctgtggaccggtggtcatccgtcaaaagaagcgcaggcgctgctggagcagatccgcgatatcgacggtgattttgagtttgaaacctattactcgctctcctgccacaactgcccggacgtggtgcaggcgctgaacctgatgtcagtgctcaacccacgcattaagcacacggcgattgacggcggtacgttccagaacgaaatcaccgagcgcaacgtgatgggcgttccggcggtttacctgaatggtcaggagttcggccaggggcgtatgacgctgaccgaaatcgtcgccaaagtggataccggcgcagaaaaacgtgcggcggaagagttgaaccaacgtgatgcgtacgacgtgctgattgttggctccggcccggcgggcgcggcggcagcggtttactccgcacgtaaagggatccgtaccggtctgatgggcgagcgtttcggtggtcaggttctggataccgtagacattgaaaactacatttccgtgccgaaaaccgaaggccagaagctggccggggcgttgaaagcgcacgtcagcgactacgacgtggatgtcattgacagccagagcgccagcaaactggttccggcagcggtcgagggtggtttgcaccagattgaaacggcgtccggcgcggtgctgaaggcgcgcagcgtgatcattgccactggcgcgaaatggcgcaacatgaacgtgccgggcgaagatcagtatcgcaccaaaggcgtgacctattgcccgcactgtgacggcccgctgttcaaaggtaaacgcgtagcggtgatcggcggcggtaactccggcgtggaagcggctatcgacctggcggggattgttgaacacgttaccctgctggagttcgcccctgagatgaaagcggaccaggtgttacaggataaagtacgtagcctgaataacgtcgacattgtgctcaatgcccagacgacagaagtgaaaggcgacggcagcaaagtgaccggtctggaataccgtgaccgcgtgagtggcgatatccacagcgtagcgctggcggggatctttgttcagattggcctgctgccaaacaccacctggctggaaggcgcaattgagcgcaaccgcatgggcgagatcatcatcgatgcgaaatgcgaaaccagcgtgaagggcgtatttgcggcgggcgactgcaccaccgtgccgtacaagcagatcatcatcgctaccggtgaaggtgcgaaagcctcgctgagctcgtttgattacctgatccgcaccaaaactgcataa

SEQ ID NO: 526265 - DNA, 429 bp, Stenotrophomonas maltophilia
atgtatcaaacaatcattatgccggttgatgttttcgaaatggaactgagtgataaggctgtacgtcacgcggaatttctcgcgcagcaggacggagttattcatcttctgcatgttttaccgggctctgccagcctgagcctgcatcgtttcgctgctgatgtgcgtcgttttgaagagcatttacagcatgaagccgagacgcgcctgcaaaccatggtcgggcacttcagcatcgatccttcccgcataaaaacccacgtccggttcggtagcgtgcgtgacgccgttaatgaactggccgcggagctgaacgcagacgtggtggtgattggttcgcgcaacccgtctattaccacgcacctgctggggtcgaacgcctccagcgtgatccgccacacccacattccggtgatggtcgtcagataa

SEQ ID NO: 526266 - DNA, 1239 bp, Stenotrophomonas maltophilia
atgaaagctctcacctatcacggtccacatcatgttcgggtcgataatgtccccgatccgggcatcgaacagcctgacgatatcatcctgcgcgtaacagccacggcgatctgtggttccgatttgcatctttatcgcggaaaaattcccaaggtccagcacggcgatatctttggtcatgaatttatgggcgaggtggtggagtgcgggagcgaagtgaagaacgtgcagaaaggtgaccgggtggtgatcccgtttgtgattgcctgcggtgactgtttcttttgccagatgcaacagtacgcggcctgcgaaaacacgaaccgcgggcagggcgcggcgctgaacaaaaagcaaattcccgcccctgccgcgctgtttggctacagccatctttacggcggcgtgccgggcggacaggcggagtatgtgcgcgtgccgaaaggcaacgtggggccgtttaaagtgcctcagctgctgtcagacgacaaagcgcttttcctgtcagatattctgcctaccgcctggcaggcggcgaaaaatgcgcagatccagaaaggctccagcgtcgccgtattcggggccgggccggtggggttgctgaccattgcctgcgcgcggcttctcggcgcagagcagatttttgtggttgaccatcatccctatcgactgcggtttgcccaggagcgctacggcgcgatcccgattaactttgatgacgataacgacgcggcggagaaaatcattgagcaaacggccgggcagcgcggggtggatgcggtgattgatgccgtcgggtttgaggccaaaggcagcacgacggaaacgatcctcagtaacctgaaaattgaaggcagcagcggcaaagccctgcgccagtgcattgctgcggtgcgacgcggcggcgtggtcagcgtgccgggcgtgtacgccggtttcatccatggcttcctgtttggcgatgccttcgataaagggctgagctttaagatggggcagacgcacgtccacgcctggctgggagagctgctgccgcttatcgaaaaagggttgcttacaccggaagatattgtgacccactatcttccgctggctgatgcggagcgcgcctataagatcttcgaaaaacgggaggaggagtgccgcaaggtgatcctggtgcctggcgcagacaccccggaggctgcgcagcagaaagtgaagggactggtgaatgccttccccggcggcgttgtgtga

SEQ ID NO: 526267 - DNA, 411 bp, Stenotrophomonas maltophilia
atgtccagacctacgattatcatcaatgaactcgacgcagaacgtattgaccgactgttggagaaaccagaattcgcctcgctgccggttgccgatgcgctgaacgaagagctagaccgggcgcaaatgtgtacgcctgagaccatgccgcatgatgtggtcaccatgaacagccaggtgaagttccgcaacctgaccaccggggaggaactcacccgtacgctggtctatccggcgcagatgaccgacagcagcatgcagctttcggtgctggcacccgtgggcgcggcgctgcttggactgcccacgggcgatactatccactgggaactcccgggcggcgcctcagcccatctggaagtgcttgagctgctctaccagcccgaagccgctggcgattacctgcgttaa

SEQ ID NO: 526268 - DNA, 627 bp, Stenotrophomonas maltophilia
atgtacttttaccaaccgtctcaggggcacggcctgccgcacgacccgctgaacgccattatcggtccgcgtccgattggctggatttcatcctgtgataaggccggtcaactgaaccttgccccgtacagcttctttaactgctttaactatcgcccaccgatcattggtttttccagcaacggctggaaggatagcgtgcggaatattaccgaaacggaagagtttgtctggaacctcgcaacgcgcgagctggctgaggcgatgaatgaaacctccgccacactccctcatggcgaggatgaatttacctttgccggcctgacgcccgtagccagccagcttgtgcgctcgccgcgcgtggcggaaagcccggtgaatttcgagtgtcgattgtcacagtgcattcagttgaccggcgcggatgggacaccgattgatacctggctggtgctcggcgaagtggtgggcgtccatatcgctgagagtttgctggaagaggggatttaccagaccgcgaaagcgcagcccattctgcgtgcgggtggaccgtccgcctactacggcatcagcgacagccatcgcttcgatctggtacgcccggatgcgcgcaggaacaatcagtaa

SEQ ID NO: 526269 - DNA, 810 bp, Stenotrophomonas maltophilia
atgttcaggaaggatatcgttatcccgtctggcgcagtagcgcttgcactctgtgtcttctcaattcaggcagatccgcttaagccaacccagtatggcgatttcgatcgctacgttctggctctttcctggcaaacgggattttgccagagtatggtcgaacgcaaccgtgacgaaccggaagagtgtcgcctgcaaaaagagagcagcaacaaaaccgattttctgaccgtccacggcttatggccagcgctgccgaaatctattgccgctcgcggagtggatgaacgccgctggatgcgcttcggctgtgccactcgtccggttccgaatatgccggaagcaaaagccagccgcaaatgtgacgccgcagagaccggactatcgctaacgggcgcggcgaagctgaacagcgtgatgcccggcgcgggcggcaactcctgccttgaacgttatgaatacgcgaaacacggcgtctgctttggttttgatcccgacgcttacttcggcaccatggtgcgcatgaaccaggaagtgaaaaatagtgcggttgggaaatttctggcggaaaactatggcaaaaccgtccgtcgtagcgactttgatgtagccgtggccaaaagctgggggaaacagaacgtaaaagcgttcaagcttacctgccatggcaatccggcttatctgaccgagatgcagatctcgctaaaatccagcaccattaacaactcgctctcagccagcacctttgcgccacagccgcatccgggcaactgcggcaaacagtttgttatcgataaagctggttactga

SEQ ID NO: 526270 - DNA, 1368 bp, Stenotrophomonas maltophilia
atgcttacttttctcgaactcctcattggagtcgtggtcattgtcggtgtagcacgctacatcattaaaggttactcagccaccggcgtgctatttgtcggcggcctgacgctgctgatcattagcgcgctaatgggtcatcaggttttacccgccagcgaagccagcaccggatataccgctaccgatattgtggaatatataaaaattctgctgatgagccgcggcggcgacctgggcatgatgatcatgatgctctgcggatttgctgcctatatgacccatatcggcgcgaatgatatggtggtgaagctggcttctaagccgctgcaatatattaactccccctatctgctgatggtcgcggcttatttcctggcctgtctgatgtcattagccgtttcctcagcaacgggccttggcgtgctgttaatggcgacgttattcccggtaatggttaacgtcgggatcagccgtggcgcagcggcggctatttgcgcctctccggcggcgattattctctcccctacttccggtgacgtggtgctggccgcgaaagccgcggaaatgtcgctgattgacttcgccttcaaaaccacactgccaatctccatcaccgctattctcggcatgggcgtggcgcatttcttctggcaacgctacctcgataagaaagagaacgtcagccatgagatgatggacgtcagtgaaatcaccactaccgccccggcgttttattccatcctgcccttcacgccgattattggcgtgcttatttttgacggcaaatggggccctcagctgcacatcatcactatcctggtgatctgtatgctgctggcggccatcctggaatttgttcgaggctttaatacccagaaggtgttcacgggtcttgaagtcgccttccgcggcatggcggatgccttcgcgggcgtggtgatgctgctggttgccgcaggggtgtttgctcaggggctgagcaccatcggctttatccagagcctgatctctatcgccacctcgttcggctcggccagcattatcctgatgctggtgctggtggtactgaccatgctggcggcgatgactaccggctccggtaacgcgccgttctatgcgtttgttgagatgatccctaagctggcacactcctccggcatcaacccggcttacctgtccattccgatgctccaggcctccaacctgggtcgtaccatttctccggtatcgggcgtggtggttgcggttgcagggatggcaaaaatctctccgtttgaagtggtaaaacgcacgtcagtgccggtgctggttggcctgattatcgttattatcgccaccgaagtgctggttcccggcgctgcctaa

SEQ ID NO: 526271 - DNA, 402 bp, Stenotrophomonas maltophilia
atgcacgccagctggacgtatcgcctgcgctttatcaaaaaacatctgctgatgtttttgctggcgtttggctggctgttaatccagagtcaggtggccgtcgcctcccatcaatgttcaatggatttgcgcggtgaggtggccaccatccagcatatggatatgatggcggaaccggggccgcattatgctgccggtgcttcaccgctgtgtgaaaaacattgtgtgccggatcaggtacaaaaagatcctgcccagccgcatctggtggcgctgcctgccgccatgaccctgaccttaacgacgccagagtgttcatctgcaagccattctgcgtggtctgttacccctcctgctgtggggccgccggcaacgatccgctattgccggtttcgggagtaa

SEQ ID NO: 526272 - DNA, 294 bp, Stenotrophomonas maltophilia
atgcgtaccctattcctttccgcgctggttggcgcgtccatctctttcgcttcttataccgttcaggcaaaccagacctggcagggccgcggcgtggttcagtcgatctctgacaatgccgtcatgctccgtcacgaggccataccggaactaaaatggccagcgatgaccatgccgtttactttatctgccggcaccacgctgaatggcgccaaaccgggggatgaggtgaccttcacgcttgagcgtgcgggtgacggtttccagattatctcgctgacgccagcgcgctaa

SEQ ID NO: 526273 - DNA, 1257 bp, Stenotrophomonas maltophilia
atgaaacaacacacactgagtctgtggctcggtggggtgttgttcggcctgttaacctccgccgcgcaggcggagccgtggacgctcgaacacaccctgaccgaagcccagcgctactcggcagaactctccgccagccgtaacgaagcgcaggcgctggatgcgatggcggattccgccacgcaattacctgatccaaaactgaaattcggtattgaaaacgtgccggtacagggcagcaacgatcggcggcttacgcgcgaagggatgaccatgcagaaggttggcatcatgcaaagctacgtcagctcagagaagcgggaacgtaaagcacagacttttcaggcgcaggcgcgaagcgtgctggcaaaatccgaggccgtacgtgccgcgcttcagcgtgataccgcccaggcctggctggatctggcgctggcacagcaggcgctgaaaacggccagaacgctggtccgtgaaacggaacgccagcggggcgtgcagaaggcgagcgtcggggcgggaggcgcaacgccggacagcgtactggccctgcaaatgatcctcagcgccatgcgcgacaaagagacgctggcgcagcgggatgtgcagctggcgcaaagccgtctgctggagctaacagggcacgctattacggcggttcgcggtccgctgccgcgctatcagcgccttcctgccgatgaaaaaacgttgcaggaggggattgccagacacccggaagtggaggccgcgcgacgtgaagcagagaccgcgaaagcgcgttcagcgcaatctgccgtggcagcgatacccgatgtggatgtggaggtctattacgcccaccgcgccgaaggctatgacgatatggctggcgtgatgttcagcgtggatctgcctttgttccagtcaaaacgtcaggacaaggattacgccgccgatgtttcccgctcaatgcaggcggtggatcaactgacgctgctcaaacgcgaacacattgcccaggtgcaaacgctggtggcgcagtatcaggctgcgcaaacggtgtggcagcgtcagcgggatgaggtactaccgttgcagcgacaacggctggcggtgctgacggcgcaatatcgttctggacagtcggcgcttccggccctgctggaggcgcgtcgtggcgtactggatacggaactggcggcgaaccaggcggagcgcgaaatggcgcgaacctgggctgccgtgaactggctgatcccgcaggagctggcgcaatga

SEQ ID NO: 526274 - DNA, 1200 bp, Stenotrophomonas maltophilia
atgaaaaaaacaacgttaatggcgattgccatcacgatagctgtcgctggcggctattttgtcggacagaagcagacgcatcagccggatgcggcttcacaaccctcagaacgcaaggtgctttactggtacgaccccatggtgcccggtcagcgcttcgataagccgggtaaatccccttttatggatatggatctggtcccacgctacgccgatgaagcgcaggcggcgtcaggcgtggccatcagcactcaacagcagcaaaacctggggatgaaaaccgccaacgttgagatgcgccagctggtttcgccgttctcggcctttgccacggttgcaacggatgaacgtaacgtctcggtgttgtcagccccggccaatggcgtggtgtcaaaattgtttgttaatgcgccgcagcagcaggtaaaagccggagaggcgctggcgcaactgtggatcccgcagtggaccgccgcccagcaggagtatctcgcggttcgtcagcttggcgatgccgcattgacccgcgccgcacgcgagcggctggcgttgcagtttatgccagaagaggtcattcgtttgctggagcgtagcggtaagccgcagaccacgctcattctgcgcaccaaccgggcgggctatgtggtgaagctggacgtgcgggaaggggcgcaaatcaccgcaacggcgccgctgtttgagatcgccagcctcgatccggtctggctggtggtcgactacccgcaaacgcaggcgcagtctctggcggtgggcagcaaggtggtagcaacctcagaaagctggccgggggagcagttccacggcacggtcagcgaattgctgccgcagatggaggcggccacgcgaaccctgaaagcccgtatcgtgctggaaaattccgcacataagctgaagccgggcatgtacctctccgtcaggtgtgcggaagagctgaaaggcccgccggtgctggcggtgccggaagaagcggtgattaacagcggagagtctgcgcgtctgctgctggctaccggggacggttattttcagcctgtgacggtgaaaaccggcctgacggcgcagggctggacggcgatcctgtccggggtcaaagagggcgataaggtggtgacgtccgggcaattcctgattgattccgaagccagcctgcgtagcgtgatgccggaggtgacgccatga

SEQ ID NO: 526275 - DNA, 3105 bp, Stenotrophomonas maltophilia
  misc_feature (1953)..(1962): n is a, c, g, or t
atgattgccgctgtgattcgcgcctcgttgcgtaaccgcctgctggtgatcctggccgcgctgatgatggccagctggggctggtgggcggtgcagcgcgcgccgctggacgcgttgcccgatctgtctgatgtgcaggtcattatcaaagcgagttaccccgggaaagcgccgcaggtgattgaagatcaggtgacctggccgctgacaacctctatgttgtctgtgccgggcgccaaaaccgtgcgcggtttttcaatgtttggtgacgcttatgtgtatgtgctgtttgaggatggcaccgatctctactgggcgcgatcccgggtgctggaatatttaagccaggtacaggcgcagtttccgccgggtgtgaaggtgtcgctggggccggatgcgacgggcgtcggctggatctacgaatatgcgctgatcgaccgtagtggaaaacacagcctggcagatctgcgggcccttcaggactggacgcttaagttcgagcttaagacggtaccgaatgtatctgaagtggcaagcattggcggaatggtgcgtcagtatcagatcgtggcggacccggcgaaaatgcgcgcgctgaatattacccacagccagctatccggcgcggtgcaggccgccaataaagagagcggcggcgccctgctggagatgggcgaagcggagtatatggtgcggacaacgggctatttgcgctcgctggaggattttcgcaatgtggtgatcgccacccgcgatggcgtacctgtcctgctgaaagatgtcgccaccattggcattggcccggagatccgccggggcgtggcggagcttaacggtgaaggggaggttgctggcggcgtaatcgtgatgcgctacgggcagaacgcgctggaaacccttcgcgcggtaaaagcgaaactgagcgagctgcaaaaaacgctgccgcagggcgtcgagattgttccggtctacgatcgctccacgctgattgaggagtcggtcaaaacgctgacgcacaagctgctcgaagagtttgccgtggtggtactggtgtgcgcgctgttcctgttccacctgcgttccgcgctggtggcgatggtttctctgccgctggggatcctcggggcttttgtggtgatgcactatcagggcattaacgcgaatatgatgtcgctcggcgggatcgccattgccatcggagcgatggtggatgcggcaattgtcatgattgaaaatatgcacaaggtgctggagcagtggcggcatgataatccggacaaggagcccgcgccgggagagtactggcgtctggcggaaaaggcggcggttgaagtgggaccggcgctgttttgcagcctgttaatcatcacgctgtcatttataccggtattttcgctggaagcgcaggaggggcgaatgttctcgccgctggcgttcaccaaaacctggtcgatggccgtggccgccgggcttgggatcacccttgtaccggtgctaatgggcttctttattcgcgggaaaatcccggatgagaaggcaaacccaataaaccgcctcctgatccgcctgtatgagccgttgcttgataaggtactgaccttcccgaaaacgaccctggcactggcatgtctgctgctgatcgccacgctctggccgctgagccgcctggggagtgagtttatgccgccgctggatgaaggggatttactctatatgccctccacgctgccggggatctctgctcgcgaggcatcgcggctgcttcagcagacggaccgcttgatcaaaagcgtaccggaggtggcgagcgtgtttggcaaagctggtcgggcggagtcggcaaccgatcccgcgccattaaccatgctggaaacaactatccactttaagccccgcgagcagtggcggcctggaatgacgccgcaaaagctggtggaggagctcgataaaacnnnnnnnnnnaatgtgtgggtgccccctgtccgtaaccgtctggacatgctggcaaccgggatcaaaagcccggtcggcattaaggtgaacggcaataatattgccgacattgagcgcgtggcccggcagattgagcaggtggtgaaggacgttcctggcgtctcctcggcgctggcggagcgactggaaggcgggcgctacgtggatattcgtatcgaccggcaaaaagccgcgcgctacggcgtttccgtcgatgaactgcaaagcctggtctccacgctggtcgggggcgataacattggtgaggtgatccagggacgcgagcggtaccccatcaacctgcgttatccccgcgatttgcgtgataacgtcgacacgttgcgggtgttgccggtagtaaccgccagcggtagccaggtggcgctgggggaactggccgatatcgtcgtgacggaaggcccaccgatgctaaaaagtgaaaacgcgcgcctttccagctggatctacgtggacttacgcgggcgcgatctgaagtccgccgtagatgaaatgcaaaaacgggtggaggagaaggtggtattgccgcagggcgtatctctctcctggtccgggcagtttgaatatctggaacgggcgaccgcgacgcttaaaatagtcttacctgtcacgctgatgattatattcgtccttttatggttaaccttcaggcggatatcaaatgtcctgataataatggggacattgcctttcgcgcttattggtggggtgtggttattatggctgcttgaatataatttgtctgtggcgggggccgttggctttatcgccctttccggggtggcagcagaattcggcgtaattatggttctatatttgaatcatgcgcttgataaatatcacaggcttgagccagaagggggaaatacggtgctattgcgtgcgatccacgaaggtgccgtgctgcgcgtgcgtccgaaggtgatgacggtcgccacgattatggcgggactgctgcccatcatgtggggcaatgggagtggctcggaggtgatgcaacgtattgctgcaccgatgattggtggcatggttactgcaccgttattgtcgatgttagttattcccgcactctacaaattgttacatcaacgttaa

SEQ ID NO: 526276 - DNA, 1041 bp, Stenotrophomonas maltophilia
atggtttccacacacatcggcttcccgactgaaacggtcattgtttttattgcgctttcagtcggtgccatctttattgacctgtttatgcaccgtgatgacaagccaatctcgcttaagagtgcggcgctctggtccgtattctgggttgtggttgcgatggcatttgccggtttcctctatatccaccacggtgctgaggttgccagtctgtttgtcacgggttatgcgctggagaaagtgctgtcggtcgacaacctgttcgtcatgatggccatcttctcctggttcgccgttccggatcgttatcgccaccgtgttctctactgggggatcattggtgccattgtcttcaggggcatctttgtcgccatcggtacgagcctgctgagtctggggccgtacgttgaagttgtcttcgctattatcgttgcctggacggcggtcatgatgcttaaaagcggtgatgacgatgatgaaattgaggattactcccagcatctggcttaccgcatggttaaacgcttcttccctatctggccgaagctcagagggcatgccttcctgcttaaccagaaggaagtggatgccgaactggcgaaaccagaaaacagcgatgtcaccattggccgtggtaaaaaagcggcgctatatgcgaccccgctgttcctgtgtgtggctgtggttgaactctcggacgtaatgttcgcgtttgactcggtaccggcaatcattgccgtcagtcgtgaaccgcttatcgtctatagtgccatgatgtttgctatcctgggcctgcgtactctgtattttgtccttgaggcactgaaacagtacctggttcatctggagaaggccgttatcgtgctgctgttcttcatcgcggcaaaactcggcctgaatgcgaccgatcacatctggcatcatggttacagcattgcggctacaaccagcctgtatgttgtactgggtgtactggcgctgggcattctcgcaagcgtcatgttcccgggcaaacctgaatctgaggaaaaggggagttaa

SEQ ID NO: 526277 - DNA, 456 bp, Stenotrophomonas maltophilia
atgagctttttcgacaaggtaaaaggtgccattaactctggccgggacgaactgacccgccaggttggtcgtttcaaaaacaaaaaatttatgcacggcaccgttgctgtatgtgcccgtattgccgtatcgagtgacggcgtgagttcggaagaaaagcagaaaatgatgggctttcttcgctcttcagaagagctgaaggtattcgataccaatgaggtgatcgagttcttcaataaactggtttcaagcttcgatttcgatgttgaaatcggcaagggcgaaaccatgaaatacatcctggcgttgaaagatcagcctgaggccgctcagctggccttacgtgttggtattgccgttgcaaaaagtgacggtaacttcgatcaggacgagaaactggcctcccgcgagatcgctatcgcgttgggcttcgacccggctgaatttggcctctga

SEQ ID NO: 526278 - DNA, 1158 bp, Stenotrophomonas maltophilia
atgaacctgacgccggggggcaatgcccccgttccagcccaggagttgcgggtccggatcacctcgggcggccaggtggatgcttcggcgtttcgcctgtatgccgacgggaaggtgcagggtgatgcggacatggtgttctatggtcagccacgtaacgatgatggtaccgtcagcctggtcagtgaaggccagtactcaacctttactgtcgcgctcaaccggctgaaacctgatgtccaaaaaattgcgttcaccgtgacctgtgacggtgggcagacggtgtccggtcttcgtaatctttccatcgacgtggagcaaggggctaccggcctggttagcggcagtgtcgaactgagcggccgtcaggaagcagccttaattctgggtgaattttaccgtcgtaataatgactggaaattccgctttgttgcgcaggggttcaacggtggacttaaaccgctggcagagcatttcggcgtaaatattgccgacgaacctgctcccgcagccccgactcctccggttgtaacccctccgccagttgagacaaaaatcagcctgagcaaggtatcgctgacaaaagagaagcctgcaatcagcctgaccaaacgggataacttcggtgaaatccggatcaacctgaactggcaccggggcagcggcaaatccggctttgcaggcatgttcggctccaaaggaatcgacctggatctgggggcctttgttgagcttcaggacgggtataaatcggtcattcaggcgctcggtaatgcattcggtgattatcgcgatgaaccgtatgttcagctcaagggagatgaccggacgggtgatgtatcagacggcgagtggctgcatatcaatggccgggaatggaagcatatccgtgaagtgctgatttacgcctttatttatgaaggtattcccagctgggacaagactgatggtgtggtcaccattcatgtgccggatcagcctcccattgagacccgcctcaccgaaggtgaaaaccgtcgcacattgtgcgccattgccagactcgtaaatgaaaacggcgcgattaaagtcgagcgtatcaaccagtacttcaaaggccaggacgaaatggaccgggcatttggctggggatttcgctggagcgccggttctaaataa

SEQ ID NO: 526279 - DNA, 582 bp, Stenotrophomonas maltophilia
atggtttcattagttaagaaccagacggtatcactcagcaaagaatcatctgcattaagccagcttcatttcggtctcggttgggatccggttaagaaaaaaggtcttcttggaggattgtttggaggcaacgactcaatcgatctcgatgctggctgcgtattaatggacagcaccggtaaaacaattgacaccatctggttccgcaaactggaatccacctgcggcgctgttgtgcacagtggcgataacctgaccggtgagggtgacggtgacgatgaagtgattaaggtcaacctctcccgactgcctgcaaacgttgaatacctggcgtttacggtaaacagcttccgtggtcagtcgttcaatgacgtcgaaaacgcgttctgccgcgttgtcgatcaaaccggcaaagagctggctcgctacaagctgactgagcagggctcacataccgggatcgttatttcttcgctgcaccgtaataacggcaactgggactttaccgcccttggccatgcctgtcgcggccgcacaattgacgatatgcactccgatatcgtttcagcggttatccgctaa

SEQ ID NO: 526280 - DNA, 1059 bp, Stenotrophomonas maltophilia
atgaacaagaaaatttggtttatggaaggtttatcctcccagcgagatattattcagggggtaaaatcatttgcacaaaaaaataattttgccattaccgtttttgcctcccaccgtaacgaaagaaatgaaatcctttccgttgccgattattctttgactgaacctgaagatcctcaaaaacgtctccagtttattcaggaaaccattcagacctacggcatccaccatattcatactggccgtaacagccagtggtttgaagaacaccgttcagccattgaatcgaccggtgccacccttactaccggtgcaacgagcgtcgactggttaactctggctgacgaaaaagttacttttgctcagtttatggagcaaaagggactcccggttgtaccatcctggagggtgaatacgctggcagaattaaagacacacctcgcgtccccgccgttcactgacagcccggtatgcgtgaagccggtgacgggtatctatggcatgggattctggcgctttgatgacagtgcttcgcctatggccgtctttaatcatcccgaacatcgtctggtcagtccgcaacagtatattgcagcagcatcagctgctgagtcgtttaaaccccttgttttgatgccgtacctgccaggcccggaattttccgtcgatatcctcgcggataagggcgaaatactcgcagccgtgggacgccgtaaggaaggggctatccagtatctggtaaacgaaggtagcgcctgggaactggcgtgtgactgcgcccgggttatgaaggccgacgggctggtgaatgttcagacgcgaaacgatgtgaatggcaacccggtgctgcttgaaaccaacatgcgtccgtcagggggggtgggttatacccttcacagcggggtgaaccttcctgggttatttgctgcctttaagctcggtctgatgtctgaagatatggtgcgccagagcgctaaaaacaccttttctccggttgcggtgagagccattacggatgtaattgcatacccggaatcactctctaaccttttgaattaa

SEQ ID NO: 526281 - DNA, 1143 bp, Stenotrophomonas maltophilia
atgtctgataacctcgaagatatgatttatcgccgtaccctctcatgcggtacgattcaggtaatccgcgatcagggtgaagtttcgctcgatgacctgtttgatatcgctgaaagacgtaacccgaaacgcgcctttctgtttgtcagcaaagtactcggcaggcacattcccgtgccaccctcagtcatgcggcaggcctacagacagcttgccagccagttcccctcaacgctgacagggcccgtactgtttatcggtatggctgaaaccgccgttgggcttggggccggtgtgtttgatgaagtgcgccaccagcatcgtgaatctgtatatctgacctctacccgtcacccggttgatggcacgttgctttgcgagttcaaggaagaacacagccacgccactgatcatctgatctatctgccagatgatgaagagaaaagacgtcgtgttaccaacgcgcgaacgctggttttgattgatgacgaggcaaccaccggtaatacctttattaacctgctttctgccctgcgtaataccggcaagcttcaacatattgaacaggttatcgccgttacgcttaccgactggagtggcaaagccttgtccgagcgcagcaccttacccgtcacttctgtttctcttgtaagcggtcagtggggatggaccacattaccagatgcaccggtcccggacatgccgaaagtcaacgtaacttcacgcggagaatgggacatccaggggaaacagtcatggggtcgactggggatgctcgcacctgcggccgatctcggccatgaggtttccgtccgcaaaggggagcgtgttctggttctcgggacaggggaattcgtctgggagccgttcctgcttgcagaacggctcgaagctgccggggcaaaggcattttacggttcgaccacccgctcccctatcgccgttggttatgccattgagtccgccatttcctttacggataactacgggctgggcatccccaattttgtctataacgtcgcccaccagcagtttgaccgcattcttgtgtgtactgagacacccgcagaaagtattgacgcgcagcttcttaaggcgctggctgaggttgcgcccgtcgtggagattgttacctatgaataa

SEQ ID NO: 526282 - DNA, 774 bp, Stenotrophomonas maltophilia
atgaataaacccgttgttctgagcgaccttgacgacacgctctttcagacccgtcgtaaaatggtggacgagctggccctggagccattccgtaccggtgccgttgatcgtaccctgaatccacgaagctttatgacggaagaacagtccatgttagtggactggcttctggagcaggctgaactcattcccgttaccgcacggggaactgaagaaatcagccgcgtacggatccctttccactcctgggcaatcaccacgcacggggccgtcattctcacgcctgaaggcaaccccgacgaggagtggaaggcccatatgctcggccagctggctccctatcaggaaaagctgacatcgatgcagcgactgataactgaaatgatggacgcaaaagggattaatgcctgggcaagactgaacttcgaatacggtgaaacggcggtttatatggtgatgaaacaccgcgacagcacccgccttgacgagctcaatgccattgcagatgagatagaaacggtgtttccgaccgagggcttctacatccaccgcaacagtaataacgtggcctggctacccaccccggttgagaaagggctggccgtcagctggctgcttgaaaaacttcgagctgaacgcggcgttttccccgtaattggtctgggcgacagcctgagcgatcatcgttttatgaaactgtgcagctggtttggcatcccgcgtcagagtcagtttgcagatgccatttcacagcgaatttttggagaaaattaa

SEQ ID NO: 526283 - DNA, 1080 bp, Stenotrophomonas maltophilia
atgcagccacatgaaacatttaccggctcataccagcccggtgacgtggaatttctgctaaagccggttgtcattgagatgacgccggttgatcaaaaagaagagctgattcagtccgggaagaaacattattcagacatgctcagccaggagccagcaccaacacaatggcatcttgatttgtttcaccgggcgctggatcggggcgcagagaggcttgcaaaagaagtcacacagctcgctatttctctggccgaacgcttcggtgatgagcccattgtactggccagtcttgtcagagctggcgtaccgctcggcgttatgctgcaccaggccctgcgtgacatggggaaaacctcatggcattacggcatcagcatcatccgggatcgtggaattgacggtgcagcactcgacgtcattgaagagcggcatggtaccagcggtattgtctttgttgacggatggacaggtaaaggcgcaattaccggagagcttgtacgcgcactgaaagatcgcccgggctatcctgagcagccgcgactggttgtcctggccgatccctgtggctgttcctggcttgcagcaagtgatgatgactggctcattccttttggcatcatgggtgcgccggtatcaggtctgatctcccggtcagtatggtcctctgaaggattacatgggtgcatggtttgcgagcatctcagtgaattcgaatgcagccggatgtttgtcgataccgtcgctcatttccgtaagaagttaacaccgacatccctcgctcccctgagctggaatacggagtcagcccggatcttatggcagacaagttgcgacgttatcgcgttcctggccgatgaatttaaagtggacagcgtcaatcgtattaaacccggtattgctgaagcaacccgggctgtattgcgtcgggtaccggaccatatatttgtgcgttctattgacgacccggacgttgccttgcttgtagggcttgctcgtgaaaagggaatagttgttacagaaatggggggaaccctcggccagtatcgggctgtaaccattatcaagaaggtactctga

SEQ ID NO: 526284 - DNA, 957 bp, Stenotrophomonas maltophilia
atgaaaaatcgtctttctccctggaatctgggagccacgctatacatgcctgcaacacgggaagatattgctgatgccgtcctgcatgggaaaatcccgggtttgcgctctctggtaatttgccttgaggatgctgtcagtgaagcagacatccccatcgccctcaaaaatctggagcacctgctgcacgagctcagtaacagcatgcgtagcctgggtaaaaatgactggcctctggtgttcattcgcccccggcatgccgacatgggcagatggttaaaagcgcattatgatctttccgctgtcgacgggtttgtgttgccgaaatttaccctcagttcgttagctgaatggtgggatatcatgggcgggactcacctgtgcatgatgccaacgctggaaacagaagacgtctttgacgtggttcagatgcgcgagctggccacccgtctggtggaacatccctgccacgaccgcattattgcgcttcgaatcggcggcaacgatcttatgaacgttgtgtcgcttcgccgtccccgggacctgacgctgtatgacagcccgatgggctacgtcatcaaaatgctcgtttcggtcttcggcccgcgtgattttgccctgaccgcgcccgtatgtgagcatattgacgatcatgccgtaatggccagagagctggctcttgatatggcacatgggcttgttgggaaaacggccattcacccgggtcagatagaggtcattcaaaacgcgctgatggtcactcagggtgagcattctgacgctctgcggatcctgaactctacccaggccgtgtttaagtcgcagggagcaatgtgtgaacccgccacacatcgccgctgggcggctggcattctggacagagctagtttttatgggttacagaacgagcaaagcgctgatggaatcagattacttaccgtgacccagcatcattaa

SEQ ID NO: 526285 - DNA, 1209 bp, Stenotrophomonas maltophilia
atggggttcaggttcagaaagtcgatcaacattattcctggtgttcgcctcaacctgagtaacggtgcaccgagcctgagtgtcgggccgagaggtgcttccgtttcttttggaagccgggggacctatgccaatctgggcttgcccggtaccgggctgagttaccgtacccggcttgaccgggccgcgcgttccggaggtgggaaccggacggctaccgacccggggctcagacaggcgcttgagcaggaagccgctgatctcatgtcagcggtgaccgcaatccgtaatattcacgagctgacgccggatcccaaaacaggcatcagctgggcagagctggaagcagtatacctgcataacagaacgtcgccttttcaggttccggcaccggtgcgtccagaaaagccagactatcttgcattgccggaaaagcctgccgagagcgaaggcattagttttctgggtaaatggtttgaatcggaatcagctaaagctgagcgccacgccgaaaatcttcgccggtggcagcaggagctgattgatgtggagcgtgagaatacccttcgacagcaccggtaccagcaacaacggacggcctgggccgaacagtatgcaaactggaagtttgaggctgaagaacatgaaaaacggctcgccacggctcaggcagatgcccggcagcagttccggacagacgccgcgtttttcgaatcatacctggcgggtgtgctggcagaaactgaatggccgcgtgaaacgcttgttgcatttgaagtaaagccggagctatcagcagtcctgctggatgttgatttagctgagattgaagatttccctgataagatttacggcgttaatgcccggggcacggagctgacggaaaaagccatgacgcaaaaagccgtacgcgaaaactatgcccgccacgtccatggctgcttgttccgcctggtcggtatcgttttacatacgctaccgttcgacaacgtgattgtgtcaggctttacgcaacgggtcagtaagcggaccggctatctggaggatgagtatatcctgtcctgcaaatgcagtcgcagccagatgtcgtcagtaaattttgcaggcttagaacacattgatccggttgaagcgttaggcgatcaaccggttattcgaaagatgagcagtaccttcatttttcagcctattgaaccactaaccctttaa

SEQ ID NO: 526286 - DNA, 468 bp, Stenotrophomonas maltophilia
atgcaattaaataccagacaggcccggatttttaagcttgccaacttactgggcaccggcaagcccgtttccgctgccgacattataaccagtctggaatgctcagagccgacattaacccgggcactcaaagagctacgcgagtcatattctgcggagatcaaatacagcaaggcaggtcattcataccatctcgttaatccgggccagctggataaaaagacccttcgccggatgaatgaagcgctcgcacagaatgctgaactgaaaaccggtgagtccacagggaaggtcgtactcgataaggataaaaaaacagccgtgtcattatcgctacgcatgcggattttaagaaaaattgaccgtctggctgcgctgagtggctcgacccgaagtgaagcggtagagaagctggctctgcactccgttgatgaactgataaaagaatacagcgctaaaaagtcctga

SEQ ID NO: 526287 - DNA, 594 bp, Stenotrophomonas maltophilia
atgcacggagagcctatcgaagcggttaagaatggcgttcagacgctgcttaccacgctgaaacaggatccgtatgcactcgaaacggcttacgtgtcagtgatcacctttgattcttcagcccgacaggcagtccccctgacagacctcctgagtttccagatgccagcactaacagccagcggcaccacctctcttggcgaagcgcttaccctgacggccagctccattgccaaagaagtacagaaaacgacggctgacactaaaggtgactggcgtccccttgtattcctgatgacggatggaagtccgaatgatgactggcgtaaaggcctaaatgactttaaagcggccagaaccggcgttgttgtggcatgtgcagccgggcatgatgccgataccagcgtcctcaaagaaatcactgaaatcgtggttcagctcgatacagctgacagttcgacgattaaagctttctttaaatgggtcagtgcgagcatttcggtaggcagtcagaaagtggagtccagcaaaaaagaagtgatcggtcttgaagacctgccaccaccgccgccagaagtaaacgtggtcttataa

SEQ ID NO: 526288 - DNA, 483 bp, Stenotrophomonas maltophilia
gtgatcgctttcctgtgtaattcagccggaaaggtgaccgatctcggcaatgtggaaaatggtaaaccaacgcttgtgaatggcgatatcatctttttcaacagccttcgccataagtcaggaaatatctggctgacgggcgataaccgaaccggagccggtgacggtgacgatgagcaaattattgtgcgcctgaattcccttgacgctcagtacgagaaaattgtgttcatcgttcagatctacaatggtgaaaagctccagcagcactttggtaaagttcagaatgccttcatccgggcagtagatgcccgtaatattgaaatggcacgattcgatctttctggcggacccgccttcgccagccagcgctccatggtttttgccgagctgatacgcgaggctacaggctggaaactcagggcaattggtgagccttcagaatcagattcgtttgtctcgcacctgaggaattacatgtga

SEQ ID NO: 526289 - DNA, 639 bp, Stenotrophomonas maltophilia; identical to SEQ ID NO: 376183

SEQ ID NO: 526290 - DNA, 1041 bp, Stenotrophomonas maltophilia
atgagacgccttcccgtgttttttgtcctggactgttcagagtccatgattggtgaaaacctgaaaaaaatgactgatggtctgcaaatgatcgtcggagatttaagaaaggatccacacgcacttgaaacagcctgggtttcggtaatcgcatttgccggtgtagcccgtacgattgtacctcttcacgaaattgcctcgttctaccctccccgccttcccgttggcggcggtacgagccttggggccgcattgcgtgagctgaccgtacaaattgatacccaggtcagaaaaaccactcatgaggctaaaggcgactggaaacccgtcgtgtatctccttaccgacggacgtccgactgacgacacaaccgcagaagtgaagcgctggaaggatcactacgcgagtaaagtgaatctcattgccgttggcctggggccgtcagcggacctgaataccctgcggcaactgacagagaatgtcatgctgttcaccgagtctcaggaaggggactttacccgcttcatcaaatggatcacagcctcggttacggcgcacagccgcagcgtcggagacgacaaacaacctgagctcagccagactgaatacatagtccggctggccaaggacgagccagtaaaagcgtacgacgaaaactgcgttacgcttaccggccgttgcagcaagacccgtcgtccgtatctgatgaagtatgaacggccaccagcaaggatttccgggctcgatttcaacctgaacctgaacaactttaatattgccggatgctatcccattgatgaggactattttgcgtggtcagatgccaccgctaccgatttgcaggtaaacacaagcgaactgcatggtgtaccgggttgcccccactgtggtaatgccagtgcgtttgccatgtgctcatgcgggaagttgctctgcattgatggccccgatgacgtgatctgcccatggtgtgaaaaaggtctttcattcagcaatgatggcggaaacactaacttcgacgtaaacagagggagaggttga

SEQ ID NO: 526291 - DNA, 228 bp, Stenotrophomonas maltophilia
atgccaagaaaagccaggcccgaagaagccgaaacactctggcacgtccgtaacgaagcgatgcgccatggctgtaaaatctgttacgacgcagaagtgattgcgcgctggacgtcagaaaagatgcctgaacattaccgtacctccaggtcgatttcgtgttattggcctgcccatgcaggagctgaactgctcccaaatggagctacggtttacgaagttcaatag

SEQ ID NO: 526292 - DNA, 549 bp, Stenotrophomonas maltophilia
atgacgatacccacgcttacgacagaacgcttattacttaaaccccttgttgccgccgatgccgtccagatccagcaacgctatccgcgctggaaaattgtccgctatatggtggcttcagtcccctggccctacccggaaaacggtgcagaaaattatgtcaacaacgttgcactgcccgacatggccaaaggaattgcgtggttctggacgattcgccgtcgcgaagcgcctgacgaactgatggggttgatttgcctgtatgacgtggaggacaacaacagggggttctggctcgcgccggaatttcagggccagggatatatgcgtgaggcgagtatcgcggcaacggattactggttcaatacgcttaacaaagcggtgttacgcgcgccgaaagcggcggccaacagccgctcccgacgtatttcagacagcagcggcatgcgactcatcaggacagagaagaaagcctatgtcagcggcctgctggattcggagctgtgggaaatcacccgcgacgagtggaatgcccgtcaggtcagctga

SEQ ID NO: 526293 - DNA, 915 bp, Stenotrophomonas maltophilia
atgattgttcgtcctcaacagcactggctgcaactgatttttgtctggcatggttcggtacttcccaaaatttatacccgactgctgcttaacttcctgctttccatcgccgtgattgtcatgctgccgtggtacacctcgctgggtatccgctttaccgtcgcgccgttcagcattctgggcgtggctatcgccatcttcctgggatttcgcaataacgcctgttattcgcgctacgttgaggcacgtctgctttgggggcagttgatgatagcggcgcgctcgctgtttcgcgaggtaaaaaacaccttgccggatgataaacatcttggagagtttgtccgcctgcaaatcgcgtttgctaactgtctgcgtatgacactgcgcagagaaaccaatgccgatcagctgtcccgctatctggctccagacgatttacgcaaagtgatggatgccaactcgccggcgaaccgtatcctgctgatcatgggggagtggctggccgtacggcggcgcagcgggcacctttcagacatcctgtttcacagccttaacaaccgcctgaacgatatgtccatcgtgctggcaggctgtgagcgtatcgccaatacgccagtcccgtttgcctatacgctgatcctgcaccgaacggtgtatttgttctgcatcatgctgccgtttgcgctggttgttgatctgcattacatgacgccctttgtctctgcgctgatttcctacacttttatctcgcttgatacgctggcggaagagctggaagatccgtttgggacggaagataacgatctgccgctggacgccatctgcaacatgatggagcgcgatctgttgcagatgaacgatgaagagaacatccctgaaaggctaatgccggataagcattatcagctgacctga

SEQ ID NO: 526294 - DNA, 1452 bp, Stenotrophomonas maltophilia
gtgaacacactcaaccgtcgtgatttccccggtgcgcgctaccctgaacgtatcatccagtttggcgaaggtaacttcctccgcgcgttcgttgactggcaaatcgacctcttaaacgagcataccgatctcaatgcaggtgtggtgattgtgcggccgatccagagtgattttccgccgtcgctgagcacccaggatggtctgtataccacgattattcgtggtctgaatgaggagggggatgcggtaagcgatgcgcgtcttattcgttccgtgaatcgtgaaatcagcgtctacagccagtacgatgaatttctgaaactcgcccataacccggagatgcggtttgtcttctccaataccacggaggcggggatcggctatcacgcgggcgataagtttgacgatgcgccagcagtcagctatccggccaaactgacgcgtctgctgttcgaacgctttacccactttaacggggctgcggataaaggctggatcatcattccttgtgagcttatcgactataacggcgatgccctgcgtgaactggtgctgcgttatgcacaggagtgggcgctgccagcggcattcattgcgtggctgaataacgctaacaccttctgctcgacgctggttgaccgcattgttaccggctttccgcgtgatgaggtggcagagctggaagccgggctgggctatcacgacagcttcctcgacacggcagaacatttctacctgtttgttattcaggggccaaaatcactttcagctgaattgtgcctggataaatacccgctcaacgtcctgattgttgacgatatcaaaccttataaagagcgtaaggtggcgatcctcaacggcgcacacacggcgctggttccggtcgcttttcaggccgggctggatacggtaggggaagccatgaacgacggggagatttgcgcgttcgtagagaaggctatttatgaagagattattccggtcctggatctgccgcgcgatgagctgcactccttcgccagtgccgtaacggggcgttttcgtaatccgtacattaagcatcagctgctgtcgattgcactgaacgggatgaccaagtaccgcacccgcattctgccgcaactgctggcagggcagaaggcgaccggtgaactgccagcacgtctgacctttgccctggcggcgctgattgcattttaccgtgccgagcgcaacggtgagcgctatccggtgcaggacgatgcgcactggcttgaacgttaccagcagctgtggacgcaacatcacgacaaacaagtcactacccgtgaactggtatcgtcggtgttaagcgtgagcgagcactgggaacaggatctcactctggtgaacggactggtagaccaggttgcgcaggatctggaagcaattttaagcaaaggcatgcgcgaggcggtgaaaccgctctgctaa

SEQ ID NO: 526295 - DNA, 528 bp, Stenotrophomonas maltophilia
atgaactctcccatgctgattaaacctctctcccgacaggacatcctcacccacattgatgccctgagcgatatcctcgtcaactgtgtaaacggcggcgcctccgtcagctttatgctgcctttttctcccgagaaagcccaaaccttctggctcggcgtcgcagacagcgtcgggcgcgacgagcgtaccgtcctgggctgttttgacgcagagcaggggctggttggcacggtccagctgatcaccgaccagccggaaaaccagccgcaccgcgcagatgtcgcgaaacttctggtacatgagaaggcgcgccgtaaaggtgcggcaatggcgctgatggaagtcctggaggcggttgcgcgtgaaaaagcgcttacggtgctggtgcttgatacctcgaccggcagcggcgcggagacattttatcagagagcgggctggcaaaaggcgggggagatcccacgctacgccctgatgccgaacggggacatgacggcgacctcggtgttctataaatttctttga

SEQ ID NO: 526296 - DNA, 924 bp, Stenotrophomonas maltophilia
  misc_feature (97)..(106): n is a, c, g, or t
atgcgctgcgcgagtccggtctgcttgagatcgacaattatcccgcgtttgatcgtctcacgcggctggcaacacgctttttcagggtgccgctggnnnnnnnnnncgctggtggatgaccacgctgcgatcgtgaaatctgccgacggccgggcactcgccagccagcctcgcgatctcttgttttgtggtcatacgatcctgggtgacgcgccgctggtggtggctgacacgctgctggacgaacgctttgcggataatccgcaggtggcgggagatccgggcgtgcgcttttatgccggtttcccgctgcgtttacgtgacggggcgtgcgtaggatcgttgtgtctcattgattacgcaccgcgtgagtttaccgcggcggattccgccgtactggccgatctcagcgcgctggcagaagatgaatttgcagccgttagcgccgccacgaccgatgaactcacgggcctgtttaaccgacgcgggtttaaccagtttgcgcagtttgcactgtcggtttcgcagcgtagggcagaaccgttaacgcttggctggctggatctggaccatttcaaaaccattaacgatcgcttcgggcatcaggagggcgacaaggccctgaaagcgatggccgccctgatgcgctcctcattccgcgaggccgatatgctggtgcgtttcgggggagatgagttcgcggtgctgtttgcggataccgatgagcctggcgcctggatcgccatgcagtatcttgtcgaacaaacggagaagtataacgcgcgtcagctgcatccctggtcgttacagttctcctgggggctgagcgagttcgatcatcaccgcaacgatatgcaggcatggttaaaacacgcggatgcgcaaatgtacgccatgaagcggcaacatcacggcgaaaaatga

SEQ ID NO: 526297 - DNA, 363 bp, Stenotrophomonas maltophilia
atgtccacgttagatcctctgttcacgcgcctggctcgctccacgtttcgttcacgatttcatttagggatgaaagagcgacaatactgctgggataagggcgcggacactatcgataagcatgccgctgattttgtcgccgcgcggctggcgcctgcacacccggtgaatgacggtaagcagacgccgatgcgcggccatccggtttttatcgcccagcatgccacggcaacctgctgtcggggctgtctggctaagtggcatgctatcccgcagggcgtgccgctgagtgcgcagcagcaacagtatatcgtcaacgtgatccatcattggctggtcattgaggtaaatcgtgcctcctga

SEQ ID NO: 526298 - DNA, 927 bp, Stenotrophomonas maltophilia
gtggctgcggtcatccataatgagatgctggacgagattctggcgcaggttcgtccgttactggggcagggtaaggttgccgattacattcccgcgctggcctcgatcagcggtaataagctcggcatcgccatttgtactgtcgacgggcagcgttttcaggcgggagatgcactggagcgcttttcaattcagtcgatctcaaaagtgcttagcctcgttgccgccatgcgccagtatgacgagcaggagatctggcagcgggtgggcaaagatccctccggtcagcccttcaactcccttctccagcttgaaatcgaacagggtaagccgcgtaacccgtttatcaacgccggggcgctggtggtgtgcgatatgctgcaaagccgtctgagcgcgccgcgccagcgtatgctccagattgtgcggcagctttccggcgtgcaggacatcgcctacgatccggtggtagcgcgctctgagtttgaacactctgcacgtaacgccgccatcgcctggctgatgaagtccttcggcaactttcataatgatgtcgccacggttctgcaaaactattttcattactgcgccctgaagatgaactgcgttgaactggcgcagacttttctgtttctggcgcatcagggccatgccccgcatctgggggaggacgttgtctccccgatgcaggcccggcagatcaacgccttaatggcaaccagcggaatgtatcagaacgccggggagtttgcctggcgcgtggggctgccggctaaatccggcgttggcggcggcgttgtggccattgttccgcacgagatggcgattgccgtctggagcccggaactggacgagaccggcaactcactggcgggcgtcgcggcgctggaacagctgaccaaacgccttggacggtccgtatactga

SEQ ID NO: 526299 - DNA, 1590 bp, Stenotrophomonas maltophilia
atgaacctaacgcaaatttttcgtcgtcttgcgcagcgcttttttcctcgtcagtttggcctgctgaccggcatcttttgtattatcggccttttctccgccctgcaactttcatcctccttcctgcttaccgcttccctgaatcaagcccagcgtaacgaacagcgcaatcagctggcctggcagcaacagagcagattggatcaggcgcgtatttcgctgcttgcggcgagcgatctgctcaaccgctccggggtgtactttatgcaggataaagagaccggttcggaagggagctggcatagcctgatggacgaggcgcaaaaatccctggcggcgtctcagcaggcatggcaagcctggctcgcgcttaatcctccgcaggacgaggggcttgttaatagctatcagctgttcttcggtgccattagcgagcaggcggaagggctggtgaaaaccaacagcatcgacctctttttcgccgtacccgcccaggcgtttcagaccgattttaatgacaactttgcacgttatcagcaacggagtgagaagcaggcgatacaggggcgtcagtcgctcatggaacaactctcaggcctgcaacggctgttcctgtttgcgccgctggtgctgctggctattgccattgccgtctggtttgcaatggcgaaatgggtgatatcccctctacgccgtctgattgtccatattaaccagcttgcggcaggggatttgtcgggaataccccctgacgttgtgcgttttaaccgtgaaatcagccagctcagcggcagtattaccgccatgcagcgcgggctccagcagctggtgactcaggtcagcgaggccacgacctctatggtcgaaaatatcgggtcacttgcgcaggggaaccagaagctttatcagcagtccacgcgacaggccaaagagctggaggaagttaccgcgcatatcgccgatctcgaaacccacgttgaggggaacacgggttatgcaaaactcgcccgctcgcgcgcggatgaagcccgacaggctgccgtcggcggggagcaaatgatgacagcggtaaatggctcaatgcagacgatcgtcgaccgatcctcagagatgcgtgggatcgtcgccatgatcgacagcgtggcgtttcagaccaatattctggccctcaacgctgccattgaagccgcccatgcgggagaacaggggcgcgggttcgcggtggtcgcacgtgaagtggggctgctggccagaaaaagcagtcactctacgcaaaccatccagtcgctaattaaccactcgctacagggcattgaagaaggttctcaggtggtaaaccgtctggaagaaaatctccagcaggtcaccgggttggtggccaatctgagtagcctgctgaatgatatttcgctggccactctaaatcagggggaaagcattcatcagatgacgcgccaacttcaggcgctgaatcaggtatcgcgtcagacagatgtgctggttagcgaagcgtcgaatgcctctgagcgcctgcatcgggagtcagatcttttgttgcaggccgtctcgcgttttcgtctccctgcctga

SEQ ID NO: 526300 - DNA, 1383 bp, Stenotrophomonas maltophilia
atgacgtattcatctgctacccatgcccactctgtcaacccggctaccggcgaaacgctggctgcttacccgtgggcaacgtccggtgacgttgaacgtgccattgcgcaggcggataccggttttcgtcagtggcgacacgaaagcgtggcgcaccgggcgcaaaaactccgcgatctgggtgcggcgctgcgtagccgtgcggaagagatggcgcagactatctcccgggagatgggcaagcccattgggcaggcgcgtgcggaggtggctaagtccgccagcctttgcgactggtacgctgaatacggcccggcaatgctgcgcccggaatctacccaggtcgacaatgcggtgattgagtaccgtccgctggggcctattctggcggtgatgccgtggaacttcccgctctggcaggtgctgcgcggtgcggtgccgatcctgctggcagggaacagctatctgcttaaacatgcgccaaatgtgctcggctcggcggagcttatcgggaaggtgttcgcggatgccggtttcccggaggggatctttggctgggtgaacgcgacaaatgacggcgtcagccatgcgattaacgatcggcgtatcgcggcggtgaccgtaaccggcagcgttcgggctggtgcggcaattggcgcgcaggcgggcgcggcgctgaagaaatgcgtgctggagctgggcggctccgatccgtttatcgttctgaatgatgccgatctggatctggctgtcaacgcggccgtggccggacgttatcagaataccggacaagtttgcgcggcggcgaaacgctttattgtggaagcgggcgtggcggacacctttacccaacgctttgttgacgcggtcaaggcgctgaaaatgggcgcaccggatgaggaagataactatattggcccgatggcgcgatttgatcttcgcgatgaactgcatcagcaggtacaggctacgctggcggaaggggcgaccctgctgctcggcggcgagaagcttgccgggaccggtaacttttatgcgccaaccgtactcggcgacgtcaccccacagatgacggccttccgtcaggagctgtttggcccggtggctgcgattaccgtcgccaatgatgcgtcgcacgcgttgcagctggctaacgacagcgactttggcttatcagcgacggtctttaccgcgaacgatgcgctggctgaaaccttctctcgcgagctggagtgcggcggagtctttatcaatggctacagcgcaagcgatgcgcgcgttgcgtttggcggagtgaagaagagcggcttcgggcgagagctttcacatttcggtctgcatgagttctgtaacgttcagacggtctggaaggatcgcgtgtaa

SEQ ID NO: 526301 - DNA, 879 bp, Stenotrophomonas maltophilia
atggacttaacacagcttgagatgtttaacgccgtcgcactgaccggcagcattacccaggcggcgcagaaggtacaccgggtgccgtcaaacctcaccacccgcatccgacagcttgaagcggatctcggtgtggagctgtttattcgcgagaatcagcgcctgcggctttcccccgccgggcacaattttttgcgctacagcaagcagatcctggcgctggtcgacgaagcgcgaatggtcgtcgccggggatgaaccgcagggattattctcgctcggcgcgctggaaagtaccgccgccgtacgcattccggaaagtctggcgcggtttaatcaacgctatccgcgcattcagtttgcgttatccaccgggccttccggtacgatgattgacggcgtgcttgaggggacgctcagcgccgcctttgtcgacgggccgctctcacaccccgaactggaaggaatgccggtttaccgggaagagatgatgctggtcaccccggcgggtcacgcggaagtgtcaaaagccacgcaggtgagcggtagcgaggtttatgcctttcgcgccaactgttcctaccggcgtcatctggaaagctggtttcatgctgaccgcgtaacgccgggaaggatccacgagatggagtcctaccacgggatgctcgcctgcgtgattgccggggcaggcattgcgctgatgccccgctccatgctggagagcatgccggggcatcatcaggtggcggcgtggccgctggcggaaaactggcgctggctcaccacctggctggtgtggcgacgcggggcgatgacccgccagcttgaggcgtttatagggctgctaaacgaacgtcagccaccagtgtcttctccataa

SEQ ID NO: 526302 - DNA, 483 bp, Stenotrophomonas maltophilia
atgtattctattaccgctgaatccgcccatcatccagatattctcgccctgattacggcgctggaccgttatcaaagcgttctctatcccgcggaaagtaatcatctgctggatttaaccgaactgccggacgactcgctgatcctgatgattattcgtgacactcagcttaacgctgtcgggtgtggcgctgttgttttgaacggggacgggaccggggaaatgaaacgggtctatattgatccaacccatcgcgggcaacggctgggtgataaattactggcggcgctggaatatgaagccctcagccgctgctgccacaccgtccggctggagacggggatcaaacaacatgccgccattcgtctgtatcaacagtgtggatacgaacggcgccccgcgtttgccccctacaacgaggatccgctgagcctgtttatggagaagacactggtggctgacgttcgtttagcagccctataa

SEQ ID NO: 526303 - DNA, 813 bp, Stenotrophomonas maltophilia
atgcaggaaattgatttttatctggtggatgccttcagcggcagggcgttcggcggcaatgcggcggcggtgtgtccgctggaagcgtggctgccggatgagacgctgctgaagatggcgaagcagcataatcagtcagagacggcgttctttgtccgaacggataacgggtttgaactgcgctggtttaccacgcaggatgaaattaacctctgcggccacgcaaccctcgcggcttctcacgttattttcgaatacctggattatccacatacggaaatcaccttcaccacgcgctttgtcggcgaactgacggtacaacgcagcggcgactggctgacgcttaatttcccggcgtggtcaaccgaggttgtcgatactccacccccagtgctgttcagctcgctgggcattaacgcggcaaaagaggtgcgtgcagggcgcgattacatggtggtgctcgacagccagcggcaggtggaggcgctgacgccggatatcacagccatgcttccgctggggaaaatggtctgcgttacggcgccgggggatgagtatgatttcgtcagccgtttcttctgcccgggggaaggggtaccggaggatccggtgacgggatcagcgcacagcatgctgatcccgtactggagcgaaaagcttggaaaaacgcagatgtcggcccgccaggtctccttgcgcggcggggatctgcgctgcgagctgaaaggcgaccgcgtgctgattggcgggcaggccacgctgtatatgaaggggaaaattttccttcgtctccaggattacggtcatcattaa

SEQ ID NO: 526304 - DNA, 789 bp, Stenotrophomonas maltophilia
atgcaggagattgatttttatctggtagatgcgttcagcgagtcctcctttggcggcaacccggcggcggtgtgcccgctcgacgcgtggctgccggatgagacgttactgcggatggcacaacagcataaccagtcggaaaccgcgttttttgtgtgcaccaaaggggggattgagctgcgctggttcaccacgctcaccgaggttaatctgtgtggtcacgcgacgcttgccgcggcgtatgttctgtttaacgaactggattatccggactcacgccttcattttgacaccgcttctggtcgcctgaccgtcagccgtgaaggtgactggatgacgctggacttcccggcctgcccgacgcaggcacagacgccgccaccggagatgctcgccgcactcggtatcagccactacgtcgaggcgcgaaaaggccgcgcctgggtgctggtactggagagccgcgagcaagtggaagccattaatccggatttctccgccatgacgccgggggagcataaagtggccgtcaccgcccgggacgagggggaatacgactttgtcagtcgtttcttctcgccgggcgtggccgtgccggaagatcctgtcaccggctccgcgcacaccatgctgatcccttactggagtgaacagcttggcaaaacacagatgtttgcccgtcaggtttctgcccgtggtggcgacgtacgctgcgaactggaaggcgaccgcgtgcggatgggcgggcaggcggcgctgtatctgaagggcacagtatttctgcgctga

SEQ ID NO: 526305 - DNA, 1197 bp, Stenotrophomonas maltophilia
atgacaacacacacggtttcccgcagggtcgcgtggctacgcgtggtcacgctcgccatcgcagcgtttattttcaacaccacggaatttgttccggttgggctgctgtccgacattgcagccagcttccatatggaaacggcacaggttggcattatgctgaccatctatgcatgggtggtagcgctgatgtcgctgccgtttatgctgctgaccagccagatggaacgtcgtaagctgctgattgggctgtttgtggtgttcatagccagccatgtgctgtcatttatggcatggaactttacggtgctggtgatcagccgcgtcggcatcgcgtttgcccatgccgttttctggtcgatcaccgcatcgctcgccattcgtctcgccccggcggggaaacgcgcccaggcgttgagcctgattgccaccggaacggcgctggcgatggtgttaggcctgccgatcgggcgcattgtgggtcaatacttcggctggcgcaccaccttctttgccatcggcatgggggcgctgatcaccctggtgtgtctgatcaaactgctgccaaaactgcccagcgaacactccggctcgctgaaaagtctgcctctgctgatgcgtcgaccggcgctgatgagcatctatctgctgaccgtgattgtggtgaccgcccattacacggcctacagctatattgagccgtttgttcaggttgtggcgggctttagcgctaacttcgccaccgttctgctgctgatcctgggcggcgcggggattatcggcagcatcctgttcgggaagctgggcaataagcacgcgtctgcgcttgtaagcagtgcgattggcctgctgctggcgtgcctgctgttactgatgcctgcggcaggcagcgagagtcatctggcgatcctcagtctgttctggggcgtggcgatcatgattattggtctgggaatgcaggtcaaagtgctggccctggccccggacgccacggacgtggcaatgtcgctgttctcgggaatttttaatctgggaattggggccggtgcgctggtgggaaatcagatcagcctgtatgtatcgatgtcggccattggctatctcggggcgattcccgcgctgattgcgctgatctggtcggtgcttatcttccgtaaatggccggtcgcgatggaagaacagaccagccacggttga

SEQ ID NO: 526306 - DNA, 3525 bp, Stenotrophomonas maltophilia
atgcaaactattgacggcaatggtgcagtcgcgtctgttgcgtttcgcaccagcgaagttatcgccatctaccccatcaccccaagctccacgatggctgaacaggctgacgcctgggctggtaatggggttaaaaacgtctggggcgatgtcccgcgggttgttgagatgcagtccgaagccggcgccattgccaccgtgcatggtgcgttgcagaccggtgccctgtcgacctcgttcacctcgtctcaggggctgctgttgatgatccccacgctttacaagctggcaggacaattaacgccgtttgtcctgcacgtcgccgcacgtactgtagccacacacgcgctctctatttttggcgaccactcagacgtgatggccgtgcgtcagaccggctgcgctatgctctgcgccagcagcgtgcaggaagcacaggacttcgcgctgatttcgcatatcgccacgctgaaaagtcgagtgccatttattcatttcttcgatggttttcgcacctctcacgagatcaataaaatcgttccgctgccggatgacaccatactgaacctgctgccgcaggctgacattgatgcccatcgcgctcgggccctcaatccggaacatccggtgatccggggtacctctgccaacccggatacctatttccagtcccgcgaggcgacaaacccgtggtacaacgcggtatatgagcacgtcgaacaggcgatggacgattttgccgctgcgacgggtcgcgcatataagccatttgaatattacggtcatccgcaggccgagcgcgtaatcggcctgatgggctccgccatcggcacctgcgaagaggtggtcgatgagcttcttacgcgtggtgaaaaagttggcgtgctaaaagttcgcctctaccgtccattctctgcgaaacatctgctcgcagccctgccggaaagcgcgcgtgccgtggcggtacttgaccgcaccaaagagcctggcgcgcaggctgaacccctttaccttgatgtaatgaccgctctggctgaggcatttaatcacggtgagcgcgaaacgctgccgcgcgtcattggcgggcgttatggtttgtcttccaaagagttcgggccggagtgcgtcctggccgtatttgctgaactgcgcgaggcaaaaccgaagccgcgctttacggtcggcatttatgatgacgtgactaacctttctctccctttgccggaaaacaccctgccctcgaatgcgaaactggaagcgctgttctacggtctgggcagcgacggcagcgtctcggcgaccaagaacaacatcaaaattatcggtaactccacgccgtggtatgcgcaagggtatttcgtctacgattccaaaaaagcgggcgggttgaccgtctcgcacctgcgcgtcagcgaacatccaatccgctcggcatacctgatttctcaggcggattttgttggctgtcatcagctccagtttatcgataaataccagatggccgagcgcctgaagcccggcggtattttcctgatcaacaccccgtatagcgccgatgaggtctgggcacgactgccccaggaagtccaggcggtgctaaaccagaaacaggcgcgcctgtatgtcattaacgccgcgaagatcgcccgcgagtgcggcctggccgcgcgtatcaatacggttatgcagatggcgttcttccacctgaccaatattctgccgggcgacagcgcgctgatggagctccagggggcgatagccaaaagctacagcagcaaaggtcaggagctggttgagcgcaactggcaggcgctggcgctggcccgcgagtcgctgttcgaggtgccgttgcagccggtcaataccagcagcccgaaccggccgccagtggtgtctgacgctgccccggatttcgtcaaaaccgttacggcggcgatgcttgccgggttgggcgacactcttcccgtctctgcgcttccgcctgatggcacctggccgatgggcacgacccgctgggaaaaacgcaacattgccgaagcgatccctatctggaaagaagagctgtgcacccagtgcaaccactgcgtggcggcctgcccgcactcggccattcgcgccaaagtggtgtcgccagaagcgatggcggacgcaccggaaagtctgcactcgctggatgtaaaatcccgtgatatgcgtggccagaaatatgttcttcaggtggcaccagaggactgtaccggctgtaacctgtgcgtcgaggtgtgcccggcgaaagatcgtcaggatccctcaatcaaagccattaatatgatgtcgcgtctggaacatgttgaagaagagaaagtgaattatgacttcttcctcgacctgcccgaaatcgatcgcaacaagctggaacgcattgacattcgtacctcgcagctcatcacccccctcttcgagtactccggggcgtgttccggatgcggtgaaacgccgtacatcaaactgcttacccagctttacggcgaccggatgctgattgccaacgcgacaggctgctcgtcaatctatggggggaacttgccgtccacgccttataccaccgacgcgtatggccgcggcccggcttgggcaaactcgctatttgaggataacgcagaatttggtctgggattccgcctgacggtcgatcagcaccgcgcccgcgtaatgcgtctgctggaacagtttgccgataaaatcccggcagagctgaatgacgccctgcatgcggaggccacgcctgacgttcgtcgcgcacaggttgctgaactgcgccacgcgcttcagggtgttgaaggggctgaacaactgctgaccgatgctgacgcgctggttgaaaaatctatctggctgatcggtggcgacggatgggcctacgatattggtttcggtggtcttgatcacgtcctgagcctcaccgaaaacgttaacattctggtgcttgatactcagtgttattccaacaccggcggacaggcctcgaaagcaacgccactgggtgcggtcacgaaatttggtgagcatggcaaacgtaaggcgcgtaaagatttgggcgtcagcatgatgatgtatggacacgtctacgtcgcgcagatttcgctgggcgcgcagcttaaccagacggtgaaagccattcaggaagcggaagcgtatcctggcccgtcgctgatcatcgcctacagcccgtgtgaggagcatggctacgatctggcgcttagccacgaccagatgcgtcagcttaccgcaaccggcttctggccgctgtaccgctttgacccgcgccgtgccgatgaaggaaaattaccgctggcgctggattcccgtccgccttcagacgcccttgccgaaaccttacttcaggagcagcgtttccgcaggctgaacgctcaacaaccagaagtagcagagcagctatggagggacgcggcagcggatcttcagaagcgttatgacttccttgcacagctggcggggaaagcggaaaaatcaaccagcgaataa

SEQ ID NO: 526307 - DNA, 438 bp, Stenotrophomonas maltophilia
atgaaaaagctcgcggcagtaagtttaatcagcctcgcactggctggatgcgttaatcccggtaaagcctccgttcagaccgatcagttagagaatcaccgtttcgtgctggaaaacgttgatggcaaagcggttaagggcctgaaaacgcagcctgaaattcggttcagcgcgcagcccagtatcagcctgattaacaacattgccgtctccggcacaatgtgcaacggcttcaacggccagggaaaattgtccgaaggagagttgacggtcaaaacgctggcaatgacgcggaaactctgcaccgagccgcagcttaatgaactggatcagaccctcgccgatatgctacgcacaggcgctcaggtagacctgaccgaaggccagttaacgctggcgacagccaataagtctttaatgtttaagcgagttgaataa

SEQ ID NO: 526308 - DNA, 129 bp, Stenotrophomonas maltophilia
atgcaacaaccagtatggaaacgtttgatgtggcttgccatcatctggggcggcagcgtcctggcactggcctgcgtaagtatgctctttaaaatgctgatggccgcagccggatttaaatcgcactaa

SEQ ID NO: 526309 - DNA, 1011 bp, Stenotrophomonas maltophilia
atgggtatcgatctttccattatctggttcgtgattatcgttttcgccacgttgatgtatatcgtgatggacggttttgatctggggataggcatactgtttccggtaacgccgaatgcggacgatcgcgacgtaatggtcaacagcgtggctcccgtctgggacggcaacgaaacctggctggtgcttggcggtgcggccctgtttggcgcctttcctctcgcctatgcggtgatcatcgacgcgctaaccattccactgacaataatgctgatcgggcttatatttcgtggcgtcgccttcgaatttcgcttcaaagcgactccggcgcaccgcccgttctgggataaggcttttattggcgggtcaattgtggcggccttcagccagggcatcaccgtcggcgcggtcatccacggattcagcgtcaccggtcgcgcttacagcggtggtccgtttgactggtttaccgcgttcaatcttttctgcggtgcgggtcttgtggtggcttacgcactgttaggatcaacgtggctggtaatgaaaagtgaaaatgccctgcaacagcggatgcgtcaggtatcgaaagtgcttctgctcctgcttcaggtattcattgcggtaatcagtatatggacccctctcgcccaaccagccattgctgcgcgctggtttacgctgccgaatctgttttatctgctgcccgttcctgcgctggttgcgatcctgagtctgtgccagtggcgctgcctgaacgatcctgcgagccatactctgccgtttatcatgacgttagggctggtttttcttggctttagcgggcttgggatcagcatctggccgcatatcatcccgccggacattaccctctggcaggccgctgcgccagcccaaagccagggcttcatgctggtgggcgcactgttgatcattcctgtgattctggtctacaccttctggagttattacgtttttcgcggaaaagtacagcatggggagggttatcactga

SEQ ID NO: 526310 - DNA, 1395 bp, Stenotrophomonas maltophilia
atgtttggtccagatgcgtttcatcttgcgcgaatacagttcgcctttaccgtatcctttcatattatttttccggcaataaccattggcctggcgagctatctcgccgtgctggaagggctgtggctgaaaacaaaaaaccccgtctggcgttcgctgtaccatttctggtcgaagatcttcgccgtcaactttgggatgggagtggtctccggcctggtgatggcttatcagtttggcaccaactggagcgggttttcgcagtttgcgggcagcattaccggccctctgctgacctatgaagtgctcaccgcgttcttcctcgaggcggggttcctcggggtaatgttgtttggctggaataaggtcgggccggggctgcacttcttttcgacctgcatggtggcactggggaccctcatgtctacgttctggatcctctcgtcaaacagctggatgcatacaccgcaagggtatgaaatcatcaacggtcaggtcgttccggtggactggtttgccgtggtgattaacccctccttcccttaccgcctgctgcacatgtcgatagcggcatttctcagcagtgcactgtttgtcggagcctccgcggcctggcatttgctgcgcggaaacaacacgcctgccattcgcaccatgttctccatggcgttgtggatgacgttgatcgtagcccctgttcaggcactggtgggtgatatgcacgggcttaataccttaaaacaccagcccgcgaaaatagccgccattgaaggccactgggagaattcgccgggtgagcctactccactgctgctgtttggctggccggatatggatcaggaacggacccgttttagccttgaaattcccgctctcggcagccttatcctgacccacagtttcgataaacaggttccggcattgaaggagttcccaaaagacgatcgcccgaacgccaccattgtcttttggtctttccgaatcatggccggtttagggatgttgatgctcttcctgggcatggtggcggtctggctgcgttacaaacagcgcctctacacctcacgttccttcctgtggtttgccctgctgatggggccgtccgggctgatcgcgatcctcgccggatgggtaacaacggaggtcggccgccagccctgggtcgtctatgggctacagcgtacgaaggatgcggtttccgcacatggcgatctgcacatgagcatcagcttgctggccttcttcatggtttataccgcggtgttcggcgtgggttacagctatatggtgcgtctgattaaaaaagggccgcagccttatgaatccttcgcgtctgaatccgatggccgccctgctcgtccgctttctgccgtcaccactgaattcaaggagtaa

SEQ ID NO: 526311 - DNA, 189 bp, Stenotrophomonas maltophilia
atgacttcttatatccatttccgctgcccatgctgtcatggctcgcagtaccgcacctcagcttttgatgtgtctgacaaaaatccgttcggcgcaaaatgcattttctgcaaatcgtcgatgatcacgctcgaccacctggccgcagcgcgttctgctcagaatcacattactgagtatcgcaagtaa

SEQ ID NO: 526312 - DNA, 1314 bp, Stenotrophomonas maltophilia
atgagtttcatgaccgtgggccacgcgtatcagatgctggaaagtcaggggcgcattgttgccagaccgcagtcaggctattacgttgccgcccgtccgaccacacaccagccagcaccgcccgcgcaggtgatgcgcgatgaagtagttgacatcaacacctatatcttcgacgtgctacaggccagccgcgacccctccgttgtcccttttgcctcggcatttcccgatccgcgcctattcccgcttcagcaactcaaccgctcgctggctaatgtcagtaaaacggccacggccatgagcgtgattgaaaacctgccgccgggtaacgtcgacttacgtcatgccattgcccgtcgctacgctcagcaggggatgaatatctccccggatgaaattgtgatcaccgcgggcgcgcttgaggcgctcaacctcagtttgcaggctgtgactgaaccaggggactgggttatcgttgaaaatccctgtttttatggcgcactccaggcgcttgaacgtctgaaactgaaagcgctgtcggttgccactgacgtgcgtgagggcatcgatctcagtgcccttgagcaggcgttaaaagattatccggtgaaagcctgctggctgatgaccaacagtcagaacccgctcggcttcacgctgagtgcagagaagaaagctcagctggtggccttactcacccggcataacgtcacgctgattgaagacgatgtttacagcgaactctactttggccgcgaaaagccgctcccggcaaaggcctgggataagcaggatatgacgttgcactgctcctcattctccaagtgtctggtggccggtttccgtattggctgggtggcggcgggaaaacatgcgcgccgtattcagcagttgcagctgatgagtacgttatccaccagctctcccatgcagctggcgctggtggattacctggcgaccaaacgttacgacgcccaccttcgtcgcctgcgacgcacgcttgctgaacgcaaacagcaggcctggcaatcgcttttgcgccatatgcctgctggtgtcaaaatccatcacaacgacagcggctattttttatggctggaactgcctgaacagctggatgcggggcggttgagtgagaaggcattaacccatcaaatcagcattgcgcccggtaagatgttttccacctccaatatctggacaccgtttttccgtttcaatacctcatggggctggggcgagcgggaggagcaggcggtcgtccagctggcggggttaatccgcgaaatgatgctgcacccagtcacaccttga

SEQ ID NO: 526313 - DNA, 1425 bp, Stenotrophomonas maltophilia
atgcaaaatcaattgctgattaatggtgaactggtgaccggcgaaggtgagaagcaggcggtttataatcctgccacgggtgaagtgctgctggagatggctgaagcgtcggcagcacaggtggacgctgccgtccaggctgccgatcgcgcgttcacagagtggggacaaacgacgccgaaaacgcgcgccgaatgtctgttgaaactggctgatgtgatagaagccaacgctgacgcgttcgcaaaactggagtcccttaactgcgggaaaccgctgcactgcgtccagggggatgagatcccggccgtggtcgatgtgtttcgcttctttgcaggagccgctcgctgcctgaacgggctggctgccggagaatatctcgaaggacatacctcgatgatccgccgcgacccggttggcgttgtcgcctctattgccccctggaactatcctctgatgatggcggcgtggaagctggcgcccgcgctggcggcgggaaactgtgtcgtcatcaagccatctgaaattaccccgttgacggcgctgaagctggcggaactggcgaaagatatcttcccgccaggcgtgctgaacgtgctgtttggtcgcggcaaaaccgtaggagatccgctgaccggtcacgaaaaagtccgtatggtttctctcactggctctattgccaccggagaacatattatcgggcataccgcatcttcagtgaaacgtacccatatggaattgggcggaaaagccccggtcattgtctttgacgatgcagatttggatgccgtggttgaaggcgtgcgcacgtttggtttctacaatgccggtcaggattgcaccgcagcctgtcgtatctatgcccagaaggggatttaccccgcgctggtcgaaaagctgggcgcagccgttgccagcctgaaaatgggcgcgccggacgatgcgtcaacggagctgggaccgctcagctccgcagcgcatctttcccgcgttagtgctgccgtggatgaagccaaagccctcggacatatccgcgtcgtcaccggtggcagtaaaaaagagggggcaggatattacttccagccaacgctgctggccggggcgaagcaggaagatgcgatcgtccagcgagaagtgtttggcccggtggtcagcgtgacagaatttgaggatgaagcgcaggtgctgaactgggctaacgattcgcaatacggcctggcctcgtccgtctggacaaaagacgtcggacgcgcccatcgcctcagcgcacggttacagtatggctgcacctgggtcaatacccattttatgctggtgagcgaaatgccgcacggcgggatgaagttatccggttacggaaaagatatgtcggtctacggacttgaggattacacggtagtccgacatgtcatgtttaaacactaa

SEQ ID NO: 526314 - DNA, 183 bp, Stenotrophomonas maltophilia
atgggtaaggctacctataccgtgaccgtcaccaacaacagcaatggcgtgtcagtggattatgaaacagaagcgccaatggagctgttgatcccggacgtcgcggcagatgtcgtgaaggatctggtgaacaccgttcgcgcctacgatacggaaaatgaacacgaggtatgtggctggtaa

SEQ ID NO: 526315 - DNA, 354 bp, Stenotrophomonas maltophilia
atgttacgtattcctgaaaactttgttcatacccgctcgacgccgttctggaataaagagaccgccccaaaagcgctttttacccatcacaacaccaaagccggcgtgtacggtcggctatccgtcatgcagggtgcggtgcgttactttggctttgccgatggcgacgccaccgagcccgatctggaagtggttattgaggccggttcttttggcatctccccaccgcaaaaatggcaccgcattgagcctctgaccgacgacacctattttaatatcgactttttcgcggatcctgccgtcacgctcagcggtgcgggcatcggtaaagtggtcaacacgcataaggagtaa

SEQ ID NO: 526316 - DNA, 327 bp, Stenotrophomonas maltophilia
atgctacgcattccgcagagttgcattcacacccgttccacgcctttctggaacaaagaaacggccccagctggcatttttaaacgtcaccttgatacgggcacgcgtccgggcgtttaccctcgcctgtcggtgatgcgtggcgcagtgcgttatctgggctatgctgatgaatttatacctgagcctgacagcgagctcgtcattgaagcgggtcgtttcggcgttttcccgccagagagatggcaccacattgaggtgatgaccgacgacaccctgttcaatattgaattctttgttgaacctgaggtgcttaaatccctttaa

SEQ ID NO: 526317 - DNA, 174 bp, Stenotrophomonas maltophilia
atgacgttgtatcaaaagatgttggtgttctacgcaatcatggcctccatctgcgcattaatcacctggttcctgtctaaagatcgtaaacgtattcgcctgttgagcgcattcctggtgggttccacctggccgatgagctttcctgttgccctgttgatctctcttttctga

SEQ ID NO: 526318 - DNA, 759 bp, Stenotrophomonas maltophilia
atgaacagtttctattcgcagcaagcaggctgcactgtgcgctggcaggatcttcccggtttcggtgacccggttgtgtttatccacgggttgggctgtgcatcgtcgtatgaatatcctcgtattgtctgtgatacccgtttcggggggcgcagagccattctgatcgatctccccggtagcggttacagtgacaaacctgacaactaccgttatcgcacaagtgaacaggcgcaggtggtggttgaactgttagaccatctcggcctggatagtctttggctctatggtcatagcatgggggggagtatcgcgatcgaaacggcaacgctgctaaagtcacgcgttaaaggcctgatagtgtctgaacccaattttcatgcgggtggcgggatgttcagccgggcaattgcggcccaaacggaacaacattttctggaacagggctatgatgacatgctgcgggcggaaacgacggcgtggtctggaagccttcaaagcaatgccccctgggccgtctggcgcggcgcaacgagcttggtcaagggcgttaaacccgactgggaacacctgtttttgtcattgagctgcccggtcatgttagtttttggtgagtggtccctgcctgatgaagattttaatcgcctgcaacaaaaaggcgttgctgtaaaaattatccctgatgcgggccattcaatgtcctgggaaaacccgtcagcgttggctcaggctttgtctggcttcataaacggatcatga

SEQ ID NO: 526319 - DNA, 1401 bp, Stenotrophomonas maltophilia
gtggacagttttggtctgccgtgtgaaggtttccttactcacggggcctttaccgtgccggaaacgcaggaaacattgcttcatccggtaaataacggcgagttgcttaatgccattagcctgcccgtcgatgtgctggcctgcctgacccgcgaagtggtgctgcccgttgaaaactgcgttctggataacgtagatattattgatattccggccatttctgaggaaaacacgtcgctgatgacgcaggcaaaatgcctgtggctgctggagcattatcgtcagcacatacagccggatgtcctggttatctgcaatgcgacggcccaccaccagcagacggcaaaaacggccaggctcctgcaaaactgggtcaaagagacgcagccggtggaagagtccgcgttgccgggcctggtctgggccattacccctcacgatgcgcggtttaccacaaagcagaatctggacgaagcggtgcaacagttgctgggccagccgggtctgcgctggggcacgctccaggcgctcgatacccacagcatgcagcgggtaattgaatggctgtcgcaggctacccttccagcacagcgccagaagcgtctccacgcgctgaaaaggctgttgcaacagtctctttcgacgctgatgcgcgcatacgtcgccccactcactcaggagccaggcgcagggcgggcagaggccgaaaaaatggtccgaacgctgcaaggcagcgccgctcgtcatggtgaactgcttgaaggacttctcccgccgttaaatgcgtttgagacgctgctgacggttcaccagccccgtgaggaacaggtcaacggcctgtttaacgacgttatcgatctgtttgcggaagagacgccggaatatccaggcacgttgcagaccaaagacaaggcgcgactggcccataacgtgtgggttaaccatcttcgtcagtggagtcgcaacgacgcggccgccgcccgtctgggcctggacccagaggtattgcagcaaattgcggatgtgctgatcgttaccagctaccggctggatctgccgctgcaactgcaacgtattgcagaaacagataaaagcagtgctgcgcagctgcatgccgcgacaggcaatttcgttagctggcttggctatgaactgacgcccgtttctgaacggcctgcaagccggatccgcaaaggtcagccaatttttgtgacgccagttgtgagctgcgcttcaccccggcttacccgacttggcgagcagcctgttcacgcggcgacagcctatgtttatgactggctggttgcgctctacacccgcgcgattgagaatgtggattatcagtgcccgtatgacattaagcctgctgcgcggaaagccttgtctgccttgctgtcttaa

SEQ ID NO: 526320 - DNA, 324 bp, Stenotrophomonas maltophilia
atgcatagcgctctggtttttgaaaaggagttcgacagttccagcccttacttatacaaggctgtagcaaaaggccaaacgctaaaaagtgccgagtttaagtggtacaaaatcaatgatgctggtcaagaggtcgaatacttcaacatgttccttgagaacgttaaagtggtctcaatatgcccggtgatgcatgacgtaaaaaatccagcaatggaaaaacataatcatttagaaaatatttccctccgttacgagaagatcacatggcgacactgtgacggtaatatcatctttgctgattcctggaatgacagatcatga

SEQ ID NO: 526321 - DNA, 228 bp, Stenotrophomonas maltophilia; identical to SEQ ID NO: 118815

SEQ ID NO: 526322 - DNA, 1710 bp, Stenotrophomonas maltophilia
atgagcactttactcactgcacaatctttacgtgttgatacggcgtttggcacgctgttcgactccctctcctttacgctgaaaaaaggcgaccgtattggcctgctgggcgacaacggctgcggcaaaagtacgttgctgaaggtgttggacggcacagactcccctgctgccggaaccgtcgcattggccggatactgtctgatggcgcgcgttgagcaacacctgccagaagccatttatcccctgaccatgctggatgccgtgctggcgcaactgcccgcgactgaacgcgagagtctgcactggaaagctgaaacgctgctggcgggtatgggctttacaccgcaggacatggccttaacgtcggcaacgctgagcggcgggcagcatacgcgtctcctgctggcgcgggcgctgatcggcgatccagatctgttactgctggacgaaccgagtaaccacctcgatttgccgaccctgctctggctggaacagtttttacagaactggtccggcagctttgtgctggtctcacacgacaggcaactattggatgccgtcaccaacggcagctggatcctgcgcgataagatgttgcactacttcgcccttccctgcaccgccgcgcgtcaggcgctggtagccaaagacgaaagtgatgcgctgcggcataaggcggagcaaaaggagattgaccgcgtaaccgccagtgccagacggctggccacctggggcaaggtctacgataacgaagatctggcccgcaaagccaaacagatggaaaagcaggtcgaacggcttaaggagagtcagacagagctcaccgcaggcagtccgtggacattaaccctgcgcggtgacgccctgcgggcagaccggctactggagatggaaaacctaagcgtagcgcctgagcctggcctgtctgagctgtttcacgtcgacattgcgcggcttagaagtggcgatcgcgtggctatcgtcgggcgtaatggctgcggcaaatcatcactgatgaagcttatctggcggcatttttcaggtgaaccttcagaggctggcctgaaacttcatcctcgcgtgtcgccaggctattacgatcagacgctgaatcagctttcggaggaggcaacaatctttgacgcgctggagcctttcgcgccagatccgcagacccgtaaaatggccctcatcagtgccgggttcccgtgggcgcgtcacgggcaaaaagtcagtacgctgagcggtggggaacgttcgcgcctgctgttcatcggcctgacgcttgctcgctatagccttctgatgctggatgagccaaccaaccacctggacatggaaggcaaagaggcgctggcggaaacactgcaacagtttgaaggcggagtgctgctggtgagccacgatcgtcagttaattagccagagctgtaaccgctactggctgattgaggacggcaggcttagcgaatggcacgatgcggaggcggtgtttgagcgcctgcgtgcgggcaccggtccggtggtgcctggggcatcgaagactgcatcgaaggcaccaccttcagcgtctgacgatctgctcgaacgcctggttgccctggaaacgctgctggaagaggatttggcgcgcaagccaaaacaccaaaaaccgcagttgcaggcgcaatggcgaagagagattgaggagatagaagcccaactataa

SEQ ID NO: 526323 - DNA, 1011 bp, Stenotrophomonas maltophilia
atgaaggctgctgttgtcactcaggatcatcaggttaacgttacagagaaaaccttacgcgcgctcaaacatggtgaagcgctgctgaagatggagtgctgtggcgtttgccataccgatctccatgttaaaaatggcgattttggcgacaagaccggggtgatcctcggccatgaagggattggtattgtcaaagagattggtccgggcgtcacgtcactgaaagttggcgatcgtgcaagcgtggcgtggttcttcgaaggctgtggccactgtgaatattgtaataccggcaacgaaactctgtgccgtgacgtaaaaaacgcgggttactccgtcgacggcggcatggcagaagagtgcatcgtgaccgcggattacgcggttaaagtcccggaggggctggactctgcggcggccagcagcatcacctgcgctggggtcaccacctacaaagcggtaaaagtctctgagatcaaacccggccagtggattgcgatctatggccttggcggtctgggcaacctcgcactgcaatacgccaaaaatgtctttaatgcgaaagttatcgccattgacgtgaatgacgagcagttgaagctcgctgccagcatgggcgcagacttaaccgtgaactcccgcagtgaagatgcggcaaaagtgattcaggagaaaaccggcggcgcacatgcggcagtggtgacggcggtagcgaaagcggccttcaactctgctgttgacgcggttcgcgccggaggccgcgtggtggctgttggcctgccgccggaagcgatgagcctggatattccacgtctggtcctggatgggattcaggtggtgggctctctggtgggtactcgtcaggatctgctcgaagccttccagtttgcggctgaaggtaaggtggttccgaaagtcacgatgcgcccactggaagatatcaacgccatctttaaagagatggaacagggccagatccgtggccgtatggtgattgatttacgttcttaa

SEQ ID NO: 526324 - DNA, 510 bp, Stenotrophomonas maltophilia
atggcgttttacagttctggtgtggaatatggcattcatagcctgatgtgtatggtggatgcaaaaggcaatgagcgtgagatgagcgtccgggagatggcggccttgcagggcgtaccgtacgactatcttgggaagattttcactcgtttgtcacgcgcggggctggttatcagcaccgaaggcaaggggggtggattccggctggcgcgtccggcagagctgatcagcgtgctggacgtggcgcacgccatcgacggcgataagaatatgttcgaatgtcgggaagtgcgtcagcgcctggcggtatttgatgaaacgccaccggcctgggtctgtgacggaccgtgcggggtgcgatcggttatggacagcgcgcagcagcggatggaagaggagttaggacgccataccatcctggatctggcgcggaagatgtatcgaaaagcgccggacacgttccagatcgaggttcaggagtggatttccgatcgccgttcgtctacgtga

SEQ ID NO: 526325 - DNA, 1203 bp, Stenotrophomonas maltophilia
atgaaaaagcagattttaattgtgggtagtgggttttccggtatgtgggctgcggtcagcgccgcgcgtctttctgctctggaaggtaataatagcctcagcattgccgtgctggccccggtgccggaactgcgcgttcgtccacgtttttatgaagagaacgtgtcgacgatggtcgcgccactgaccgaactgtttgctgagctgggtattgcctttatttcgggcgaagcacaacatattgatacctcatctaaaaccgttttgtatcgcgattcaaacggcgccattgccgaagtcaactgggaacgtctgatcctcgcaaccggtagccagactaaacgtccgccgattgccggtctgactgaatacgcatttgatatcgaccaactcgactccgccaggctgttcgagcaacatcttgattcgctggtttcgcgcccctccaccccagaacgcaataccgtggtcgtgtgtggcggcggttttaccggcattgagctggcaacggaactccctgctcgtcttcgcacccgcttcggcaccgatacaaagactaaagtgatcgtagttgaaagaggtccaaccattggcgggcgttacagcgaggcgctgcgtaacaccattgaagaagcaagcaacgcgctggacgttgaatggcgtttaaacagtgaaattgaagctattgatgccagcggcgtgacgctgaaaaatggagagcgcattgccagcgcgactgtagtgtggacggcaggggtagaagctaaccccctcagcctgcaaattgacggggaacgcgacactcagggacgccttatcgtcaccgacacgttgcaggtccctgcgcatccggaggtttacgcgacgggtgatatggctcacgccaaaacggacgatgcgggcaacacggcactgatgacctgccagcacgcgatccagctggggaaattcgccggacataacgcagctgccagcctgttaaatctggagccgtacccttaccgtcaggtgaattacgtcacctgtctggatctgggtggctggggcgcggtgtacaccgagggctgggaacagcgtgttaaatccgtgcgcgaggaaggcaaaaagatcaaagtcgccatcaccaacgaactgatttacccgccagcagcagacaaagctgtcgcatttgccgccgctgacccgctggcgaaattcgtgtag

SEQ ID NO: 526326 - DNA, 1176 bp, Stenotrophomonas maltophilia
atgaaaaaaacaattttttcgttagcactggctacctttggcctggggatggctgaatttggcattatgggcgtgctgacagaactggctcatgatacgggcatttcgattccctccgccggaaatatgatttcgttttacgcttttggcgtagtgatcggcgcgccgattgtggcgctgttctccagtaaattttcgctgaaaacaacgctgctgtttctggtggcgatgtgcgtcgtcggtaacgcgctctttaccttctctgacacctacatagggctggcggcggggcgcttaatctctggtttcccgcatggcgcgattttcggtgtgggggcgataatcctgtcaaaaattgcgccaccgggtaaggtgacggttgctgtagcagggatgattgccgggatgaccgttgccaatttgcttggcgtcccgctcgggacgtggctgggacatgaatttaactggcgctacaccttctttttgattgccgtctttgatgcgctggtgatcctctctgttctgctgtgggtgccagacattcacgacacgacaaccacccggctgacagaacaattccacttcttgaaaaaaccggaaccgtggctaatttttgccgcaacgatgtttggcaatgccggggtgtttgcctggtttagcttcgtgaagccgtttatggtcaacgtgtcaggcttttccgagggcgtcatgaccgcgatcatgatgctgatggggctgggcatggtgctgggtaatgtcttcagcggcaagctgtcgtcgcgctttagcccgctgcgcattgctgccaccaccgacatggtgattgtggcttcgctgctgttactgttcgcgtttggcgagcttaaaacagcttcactggtaatgggatttgtttgctgcgccgggctgtttgcgctctctgcgccgctgcaaatactgctgctgcaaaatgcgaaaggcggcgaaatgctgggggccgcaggcgggcaaatggcgtttaacctcggcagcgcaataggcgcgtatttcggtggaatgatgattacgctcggctttagctggagctatgtcacgcttccggcagcgatcttatccttctcagcaatgacctctctgttgatgtacggttttttatgtgccaaaaagcgtcaggccaacgcaggagcgctggcctga

SEQ ID NO: 526327 - DNA, 696 bp, Stenotrophomonas maltophilia
gtggtcgccaaagggttaaaggtctgtattgtttttgaagggcgagacggcgccggtaaaggcggcgccatcaaagccatcaccgaacgcgtcagcccccgggtgtttcgcgttgttgcgttaccggcccccaccgataaagagaaaagtcagctctattttcagcgttacgttccccatctgccctctgccggtgaaatcgtcatttttgaccggagctggtacaaccgcgcaggcgtggaaagagtaatgggtttctgtaccgaagagcaggccgacaaatttcttgatggaacgccggtgatggaaaaagcgatggtcgatgccgggatcatattgttgaaatactggcttgaagtaacgccaaaagagcaggaacgccgcctgcgcgatcgcattaatgatggtcgcaagatctggaagctgtctccaatggacataaaatctttcaatctgtgggatgaatataccctcgcccgtgatgcgatgtttaaagcgaccgacaccgcctgggcgccgtggtttgtggcgcgctcagaagataaaaaacgggttcggttgaatattatttcgcatctgctttcacagatcccctataaagaaattcacgttgacaaggtggatttaccgaaacgcaagatcggcaaagtgaagccaacaaaatatcccttccggtatattgcagagcggttttga

SEQ ID NO: 526328 - DNA, 657 bp, Stenotrophomonas maltophilia
atgagtaagtcgaaaatgatagtgcgcacaaaatttgtcgatcgcgcctgtcactggacggtggtcatctgcttcttcctggtggcggtatccggcatttcgttcttcttcccgacgctacagtggctaacggaaaccttcgggacaccgcagatggggcgcattctgcatccgttcttcggcgtactgattttcgtggtgctgatgtttatgtttgtacgtttcgttcatcacaacatccctgacaagcaggatattccgtggctaaaaggcattgttgaggttctgaaaggcaacgagcataaagtcgcgaaggtgggcaaatataacgccgggcagaagatgatgttctggaccatcatgagcatgatttttgtgctgctggtgaccggggtgatcatctggcgtccgtattttgcgcactatttcccgattcaggtggtgcgttatgcgctgctgatccacgcgacctcggccattattctgatccacgccattctgatccatatgtatatggcattctgggtgaaaggatcgattaaaggcatgattgaagggaaggtgagccgccgctgggcgcagaagcaccatccgcgctggtaccgcgacgttgagcgtcttgaagcgcaaaaagagagttcggaagggttgaagtaa

SEQ ID NO: 526329 - DNA, 885 bp, Stenotrophomonas maltophilia
atggcgatggaaacacaagacattattaaacgctccgcgaccaacccgataacgcccgcgcctcgcgcgcgggactacaaggcagaagtcgccaagctgatcgatgtctcctcctgcgtgggctgtaaggcctgccaggtggcctgctcggagtggaacgatatccgcgacgaggtggggcactgcgttggcgtttacgataacccggctgatctgagcgccaagtcctggacggtgatgcgctttagcgaaaccgaccagaacggcaagcttgagtggctaatccgtaaagacggctgtatgcactgtgaagatccgggctgcctgaaggcatgcccgtctgcgggtgcaattattcagtacgccaacgggatcgtcgacttccagcaggataactgtatcggctgcggctactgcatcgcaggctgtccgtttaatatcccgcgcctcaataaagaagataaccgggtctataaatgcacgctgtgtgtcgatcgcgtcagcgtcggacaggagcctgcctgcgtgaagacctgtcctaccggggctatccacttcggcaccaaaaaagagatgctggaagtggcgcagcagcgggtggataagctcaaagcgcgcggctatgacaaggccgggatttataacccgcagggcgtgggcggtacgcacgtcatgtatgttctgcaccacaatgaccagccggagctgtatcacaatctgccgaaggatccggcgatcgatacctcaatcaacctctggaaaggggcgcttaagccgctctcagcggcgggctttatcgccacctttgccgggctgatttatcactacatcggtatcgggccgaataaagaggtggatgacgacgaggaggagcatcatgagtaa

SEQ ID NO: 526330 - DNA, 2412 bp, Stenotrophomonas maltophilia
atgaccaaccactgggttgatatcaaaaacgcaaacgtcgtggtggtgatgggcggtaacgccgctgaagcccatccggtgggattccgctgggcgatggaagcgaaaaacaacaacgatgcgacgctgattgtcgtcgatccacgctttacgcgtacggcatcggtggctgatatttatgcgccgatacgctccggtacggatattacgttcctttccggcgtgctgttgtacctgatcgaaaacaataagattaacgcggaatacgttaagcattacaccaatgccggcctgctggtgcgggaagatttcgccttcgaagatggcctgttcagcggctatgacgcagagaaacgtcagtacgataaatcgtcctggaactatcaattcgacgaaaacggctacgcgaaacgcgatgagaccctgaccgatccgcgctgcgtgtggaacttgctgaaacagcatgtttcccgttatacgccagacgtggtggaaaacatctgcggtacgccgaaagcagacttcctgaaagtatgtgaagtgctggcctccaccagtgccgccgacagaacaaccaccttcctgtacgcgctgggctggacgcagcataccgtgggcgcgcagaacatccgtaccatggcgatgatccagctgctgctcggcaacatggggatggccggtggcggcgtgaacgccctgcgcggacactccaacattcagggcttaaccgatctcggcctgctgtcgaccagcctgccgggttacctgaccctgccgtcggagaagcagaccgactggcaaagctggcttgacgccaatacgccaaaagcgacgcgtccggaccaggtgaactactggagtaactatccgaagtttgccgtcagtctgatgaaatcgttctacggcgatgcggcgcagaaagagaatgactggggctttgagtggttgccgaaatgggatcaggcttacgatgtcatcaagtatttcaacatgatggataagggcgacgtcacggggtatatctgccagggctttaacccggtggcgtcattcccggataaaaacaaagtcgttcgcagcctgagcaagctgaagtacatggtggttatcgatccgctggtcaccgaaacgtctacgttctggcagaaccacggcgagtctaacgatgtcgatccggcatccattcagactgaggtgttccgcctgccatcgacctgctttgcggaagaggacggttctattgccaactctggccgctggctacagtggcactggaaaggtcaggatgcgccgggtgaagcgcgtaatgacggcgaaattctggccggtatttaccatcgtctgcgcgagatgtaccgcaccgaaggcggcaaaggcgcagagccgctgctgaagatgagctggaactacaagcagccggatcatcctgagtctgaagaggtggcaaaagagaacaacggcgtggcgctggccgatctgtacgatgccaacggcaatctggtggcgaagaaaggccagttgctcaatagcttcgcgctgttgcgtgacgacggcaccacggcctcgtcatgctggatctacaccggcagctggacggagcagggtaatcagatggcgaaccgtgataacgccgatccgtcaggcctgggcaacacgctgggctgggcatgggcgtggccgttgaaccgccgcgtactgtacaaccgtgcctccgcagacgtgaacggtaagccgtgggatccgaaacgcatgctgatcgagtggaacggcacgaagtggacggggaacgatatcccggacttcaacaccgccgcgccggacagcaacaccgggccgtttatcatgcagccggaagggttggggcgtctgtttgccatcgacaagctggcggaagggccgttcccggaacattacgagccgatggaaacgccgctcggcactaacccgctgcacccgaacgtggtctccagcccggtagtgcgtatctatgaagatgacgtgatgcgtttaggtaaaaaggacaagttcccgtatgtcggaactacctaccgcctgactgagcatttccatacctggaccaaacatgcgcggcttaacgccatcgcgcagccggaacagtttgtggagataagcgaaacgctggcgaaggcgaaaggcattgccaatggcgatcgcgtgacggtgagcagcaagcgcggctttattcgcgcggtagcggtggtcacccgtcgtctgcaaagtctgaacgtacacggccagcaggtagaaaccgtcggtatcccgctgcactggggctttgaaggggtggcgcagaaaggctacatcgccaataccctgacgccaaacgtcggcgattccaactcgcaaacgccggagtataaagcgtttttggtcaacatcgagaaagcgtaa

SEQ ID NO: 526331 - DNA, 588 bp, Stenotrophomonas maltophilia
atggacgtcagccgcagacaattttttaaaatctgcgcgggcggtatggccggaacaacagccgcaatgctgggattcgctcccaaaatggcgctggctcaggcacgcaactataaactgctgcgcgcgaaagagatccgtaacacctgcacatactgctccgtgggttgtgggctattaatgtatagcctgggtgatggcgcgaagaacgccaaagaagcgatttatcatattgaaggggacccggaccatccggtgagccgcggggcgctttgcccgaaaggggcggggctgctggactacgtccacagtgaaaaccgtctgcgctatccggaatatcgtgcgccgggctctgataaatggcagcgcatctcctgggacgaggccttctcacgtattgcaaaactgatgaaagcggatcgcgacgccaactttattgaaaagaacgagcagggcgttacggtaaaccgctggacctccaccgggatgctgtgtgcgtctgcggcaagtaatgagaccggcatgctgacgcaaaaatttgtgcgctccctcggcatgctggcggttgataaccaggcgcgcgtctga

SEQ ID NO: 526332 - DNA, 879 bp, Stenotrophomonas maltophilia
atggacagaaaaagagcaacgctgattggcctggtggccatactgctgtggagcaccatggtgggtctcatccgcagcgtcagtgagggacttggcccggtggggggcgcagcgatgatctacaccgtcagcggattattgtgtctggcgacggtaggtttccctgatattaaacggttttcgaaaggctatctcactgcgggcagcgtcctgtttgtcagctatgaaatgtgccttgccctgtcgcttggctttgccgcgacgcgctcgcaggcaattgaggtgggcatggtcaattatctctggccaagcctgacgattgtgttcgccattttgttcaacggtcaaaaatccaccctgtgggtgatccccggcttagcgatctccctgctgggcgtgggctgggtcttaggcggcgaaaacgggctgcacgttcacgacatcatgctaaacatcgtttccagcccgctgagctacgggctggcatttaccggtgcctttatctgggccgcctactgcaccgtcaccagcaggtatgccagagggcaaaatggcattactcttttcgtcctgctgaccgccctgagcctgtgggtcaaatatgccgtcagcgatcagcccgaaatggtattcagcgtgccggtagtcgtgaaactgttgatgtgtggtgttgcccttggctttggctacgccgcctggaacattgggatcctccacggtaacgtcacggtgcttgcggccgtctcctacttcaccccggtactctctgccgcgctggcggctattatgctgagctctccgctttcattctcattctggcaaggggcattaatggtttgcgcaggatcattactttgctggtatgccacccgcaaatag

SEQ ID NO: 526333 - DNA, 210 bp, Stenotrophomonas maltophilia; identical to SEQ ID NO: 491571

SEQ ID NO: 526334 - DNA, 1071 bp, Stenotrophomonas maltophilia
atgcaaaaagacgcgctgaacaacgtacatatcactgacgaacaggtgttaatcaccccggatcaactgaaggcggaattcccgctgagcgtcgcgcaggaagctcagattgagcactctcgccagaccatttctgacattatcgcaggccgcgatccgcgcctgctggtggtatgtggtccttgctccattcacgatcctgaaaccgccattgagtacgctcgtcgatttaaagcattagcggaggaggtcagcgatagcctctatctggtgatgcgcgtctattttgaaaagccacgtacaacggttggctggaaagggttgattaacgatccgcacatggatggctcgtttgatgtggaagcgggcctgaagattgcgcgtcgcctgctggtggagctggtcagcatggggctgccgctggcaaccgaagcgctggatccgaacagcccgcagtacctcggcgatctgtttagctggtctgcgattggggcgcgcaccaccgagtcacaaacccaccgcgagatggcgtctggcctgtctatgccggttggttttaaaaacggtaccgacggcagcctggccacggcgattaacgccatgcgcgccgccgctatgccccatcgttttgtcgggatcaaccaggcgggccaggtatgcctgctgcaaacgcagggcaatccggacgggcatgtgatcctgcgcggtggtaaagcgccaaactacagcccggcggatgtcgcgcagtgtgaaaaagagatggaacaggcgggactgcgtccggcgctgatggtagattgcagtcatggtaattcgaataaagattaccgtcgccagcctgcggttgcagaatctgtgattgcacagattaaagatggtaaccgttcaattatcggcctgatgattgaaagtaatattcatgaaggcaatcagtcatcggaacagccgcgtagcgcgatgaagcccggcgtctcggtcacggatgcttgcatcagctgggaaaccactgatgcgctactgcgtgagatccacaaagatttgaacggccagctggcgacgcgtctggcataa

SEQ ID NO: 526335 - DNA, 1122 bp, Stenotrophomonas maltophilia
atggttgctgaattgaccgcattacgcgatcaaattgatgaagtggataaggcgttgctggacctgctggcgcgccgcatggcactggttgctgaggtcggcgaagttaaaagcaaatacggcctgccaatttacgttccggagcgtgaggcctctatgctcgcctcccgccgtaaagaggcacaggcgctgggcgtttcaccggacttaattgaagatgtcctgcgtcgtgtgatgcgggaatcctattccagcgaaaacgacaagggcttcaaaactctctgtccgtcgctgcgtccggtggtgattgtcggtggcggcggccagatggggcgtctgtttgaaaaaatgctgacgctttctggctatcaggtgcgcatcctggaaaaagaggactggccgcatgcgccggagctcattaaggatgccggaatggttatcgtcagcgtaccgattcatgtgacggagcagattatcgcgaaacttcctccgctgccggaagattgcattctggtggatctggcgtccgttaaaaatggccctctacaggcaatgctggcggcgcacaccgggcccgtgcttgggttacacccgatgtttggcccggacagcggcagcctggcgaagcaggtagtggtttactgcgacggtcgtcagccggaagcgtatcagtggttcctggaacagattcaggtctggggggcacgtttgcaccgtatcagtgcggttgagcacgatcagaacatggcgtttattcaggcgctgcgccactttgcaaccttcgcctatggtctgcacctggcggaagagaacgttcagcttgaacaattgctggcgctttcctcgccaatttatcgtctggagctggcgatggtcgggcgactgtttgcccaggatccacagctttacgccgacatcatcatgtcgtctgaaaataacctggcgctgatcaagcgctactatcagcgttttggcgaagcgatcaccttgctggaacacggcgataaacaagcgtttatcgacagtttccgtaaagtggagcactggttcggtgattacgccacgcgattccagagtgaaagccgcacgctgttgcgccaggcaaatgacagtcgccagtaa

SEQ ID NO: 526336 - DNA, 498 bp, Stenotrophomonas maltophilia
atggctttccttaacaaagcagaaagtgcgctgctgcttaagtcatttacaggtgaggatctgctggttgccctgctggggattagtaccggcgggcggtggtcagagctggcaacactcaaaccggcacaaatagtaaacgggcgcgtgacattcctgaaaatcaaaaacgcaaaaaagcgcactgtaccgatttcttctgagcttgaatcgctgataaagaagaataccagcgggaatctgttcaacatcgattacgtgagtttttgcaaagtgctgaagatggttaaacctgatattcctgcaaatcaggcaacgcatattttgcgtcataccttcgcaagtcatttcatggtgaacgggggtaacatcatttcattacagcaaatactgggtaatgcaaacatccagcagacgatgacttatgcgcatttgtcaccggagtacctgcaaaatgccgtggcattgaatccgctttcaggagggatatcgctgtag

SEQ ID NO: 526337 - DNA, 261 bp, Stenotrophomonas maltophilia
atgctggatgacgccgactgcggtatgacaatcatgaactggaaagaactaagcgagaaggggctggttttcagaattaatcacgaaattttacacccgccagggctggctgttggatatgaaatgactaacggtgtttcggctggggcttcgtggctgataacggagcctggcaatattcagacgagcttgttgatgttgaacaacgagcgcggcgaggcgttagcctctaagtcgataaaatcagagtcaggaaagtag

SEQ ID NO: 526338 - DNA, 672 bp, Stenotrophomonas maltophilia
atgagcgttggattaattacggacgagccaggacgtttctacaccttccagtcaacattaccagccggtgaatacttcgaatttcgcccccgcaatcctccactgaattcaaaacccattgttgatgacgaaactgggatgtgtattggctattcagtctctcaggctcccggtttatggcagatttatgataccgacggcatgtttgtcaggctggaagaagcgccactagaagcccccctgattgacccaacagacatcgtattaattgccttgggtgcatttcgtctttttcgggctggtaaagcgttactggagagtggagttaaaaccgctgtaactgtgaggctcagtgaggctactatcagtctcttacgtggtcggctgaaaatggggttatctgcacgaacccttaaaatgaccgcaactcctgctaaacatatgcttaatcccgcgcgatatgtgcccttgcaacttcaggaaaaagttattcgctacggcaaaagaacgccagatcctcaaaaggctcaaggtctttttcgttacgaatctgagatatataaacttgttgagaatcgggcgaaaaaaggaacctattattataaaaaatatatgatagaagtattggtgcgtgagaaagactggacaataactcattttttatacaagtga

SEQ ID NO: 526339 - DNA, 873 bp, Stenotrophomonas maltophilia
atggctgaaccgcaactgctgttgaactataccgggcatctgcccgaatgcccgacgtggagtgctgaagaaaaggcgctctactgggcggatattctggaaggggagattcatcggtaccatctgcccaccgcggaacactcggtgctctcattccatgaagaagttgggtgttttgccctacgtgaacgcggcggatttatcgtcgcgatgcgaaacgccatctggctgaccgataaacacggcctgctccagcgtaaggtttgcgataacccgtccaacccgcagcttgcacgctttaacgatggaggcaccgaccatcagggacggttttatgcgggcacgttctgggggccgggagattataacggcgccatgttgatgcgtatcgacaacgacctgacaccgaaagtgatccagtgcgatattcaggggcataacggtttagcgtttagccctgacaaacggtggatgtttacttctgatacgccgaacggtgtgatctaccgtacgccgcttgataagcagggggaacccggtaagcgcgaagagtttcgccgttttagcgagggagagggtatacccgacggagcggcaatggatgaggaaggctgctactggagcgcactgtttgacggctggcgtatcgcacggttttcaccgcaaggcgaacagctggaagaataccggctgccggtacgctgcccgacaatggtctgctttggcggcgacgatatgaaaacgctgtttatcaccaccacgcgggaaaatatggaggcggaggagctggcgaaatacccgctttccggtgccatcttcaccctgcctgtaaatgtggcagggatgaagaaaagccgctttatcgaacattaa

SEQ ID NO: 526340 - DNA, 1161 bp, Stenotrophomonas maltophilia
atgacaccggaaaacccgctcctggatttacgcgtaaaaatcagtgcactcgacgaaaagttactggccctgctggcagaacgccgcgcgctcgccattgaagttggcaaagccaagctggattctcatcggccggtgcgcgatatcgatcgcgagcgtgatttactggaacggttgatacagctcggcaaagcgcatcatcttgatgcccactacatcacccgcctgttccagctcatcattgaagattccgttctgacgcaacaggccctgctccagcagcatctgaacaaaaccaacccgcactctgctcggatcgctttcctcggcccgaaaggttcttattctcacctggcggctcgccagtacgcagcccgtcatttcgaagagttcattgagagcggttgtgcaaaatttgcagacatcttcaaccaggtcgaaaccggccaggcagattacgccgtggtgcctattgagaacaccagttccggcgccatcaacgatgtttacgatctgctccagcacaccagcctgtcgctggtcggtgagctgactattcctatcgatcactgcgtgctggtctctggctcaaccgatctgagtcagattgaaacggtgtacagccacccgcagccgttccagcagtgcagccagttcctgaaccgttatccgcactggaaaattgagtacaccgaaagcacctcggcggcgatggaaaaagtggcgcaggcaaactctcctgccgtcgcggcactcggtagcgaagcgggcggcgcgctgtatggcttacaggtgctggaacgcaatctggccaaccagacgcaaaatatcacccgtttcgtggttcttgcccgcaaggccatcaacgtgtcggaccaggtcccggcgaaaaccaccctgctgatggcgaccggacagcaggcgggtgcgctggttgaagcgctgctggtgctgcgtaatcacaacctgatcatgacgaagctggaatcccgcccaatacatggcaacccgtgggaagagatgttctatctcgacgttcaggccaacctggagtctgcatccatgcagaaagccctgcgcgaactgggcgagatcacacgctccatgaaagtactgggctgctatccgagcgaaaacgtggtcccggtcgatccggcttaa

SEQ ID NO: 526341 - DNA, 342 bp, Stenotrophomonas maltophilia
atgacaatgaacattaccagtaaacaaatggaaattactccggcaatccgccagcacgtcgcagaccgtctcgccaaactggataaatggcaaacacatttgattaatccacatatcatcctgtccaaggagccgcagggtttcgtcgctgatgcaactatcaatactccaaacggccatctggtcgccagcgctaaacacgaggatatgtacaccgcaattaacgatttgatcaacaagctggaacggcagctcaataaagtgcaacacaaaggtgaagcccgtcgcgccacaacatcggtgaaagacgccagcttcgcggaagaagttgaagaagagtaa

SEQ ID NO: 526342 - DNA, 738 bp, Stenotrophomonas maltophilia
atgacgcgcatgaaatatctggtggcagcggccacgttgagcctggctttggtgggctgctccggttcgaatgaacaggtccctgacaatccgccgaatgaaatctatgcgactgcacaacaaaagttgcaggacggtaactggaaacaggcgataacgcaactggaagcgttggataatcgctatccgtttggtccgtattcacagcaggtacagttagatctgatctacgcctactataaaaatgccgatctgccgctggctcaggcaacgatcgatcgtttcatgcgtctgaaccctacccatcctaacatcgattacgtgatgtacatgcgcggcctgactaacatggcgctggatgacagtgcattgcagggcttcttcggggtggatcgttctgaccgtgacccgcaacatgcgcgtgatgctttcaatgacttctccaaactggtgcgtagctacccgaacagccagtacattaccgatgccactaagcgtctggtgttcctgaaagatcgtctggcgaaatacgagtactccgtcgcggaatactacactcgccgtggcgcatgggttgccgtggttaaccgtgtagaaggcatgctgcgtgattatccagatacccaggccacgcgtgatggcctgaagctgatggagaatgcgtatcgccagatgcagatgacggctcaggctgacaaagtggcgaaaatcatcgccgcgaacagcagcaacacctga

SEQ ID NO: 526343 - DNA, 981 bp, Stenotrophomonas maltophilia
atggcacaacgagtagaactcaccgcaacagtctccgaaaatcagctcggtcaacgcttagatcaggctttggccgaattgttccctgattattcgcgttcacgtataaaagaatggatccttgaccagcgcgtgctggtaaacggcaagatctgggacaaaccaaaagagaaagtgtttggtggggaagctgtcgccatcaatgctgaaatcgaagaggaagtccgcttcgagccgcaggatatcccgctggatatcgtctacgaagatgacgatattctggtcatcaacaaaccgcgtgactttgtcgtccatccgggcgcgggtaatcctgacggtacggtacttaacgcactccttcattattacccgccgatagctgacgtaccgcgtgccggtatcgttcaccgtctggataaagacaccacgggtctgatggtggtggcgaagacgatccccgcccagactcgactggtggaatctttgcagctgcgcgaaatcacccgtgagtatgaagcggtggccattggtcatatgacctctggcggcacggtggaagagccgattagtcgtcatccaaccaagcgtacgcatatgtccgtgcacccgatgggtaaaccggcggtgacccactaccgcatcatggaacatttccgtattcatacgcgcctgcgtctgcgtctggaaaccgggcgtactcaccagatccgcgtgcacatggcgcatattacccatccgctggtgggtgaccctgtttacggcggtcgtccgcgtccaccaaagggcgcatcggatgaattcatctccgtgctgcgtaaattcgatcgccaggcgctgcatgcgacgatgctacgtctttaccacccaatcaccggaattcagatggaatggcatgcgcctatcccacaggatatggtggaacttatcgacgcgatgcgcgcagatttcgaagaacataaggatcacgtggactggttatga

SEQ ID NO: 526344 - DNA, 732 bp, Stenotrophomonas maltophilia
atgaccaaactgattgtcccggagtggccgctgcctgaaggcgtggccgcctgtagctcgacccgtatcggtggcgtgagccagggtgcgtgggcgtctttgaacctcggtgcgcactgtggcgataacctggagcacgtcgaagagaaccgtaagcgtctgtttgctgcgggaaaccttccttcaaaaccggtctggcttgagcaggtgcacggtaaagcggtgctgaagcttacgggtgagccctatgcgtctaaacgcgccgatgcttcgtacagcaatacgccgggaacggtttgcgcggtgatgaccgctgattgcctgccggtgttgttttgtaaccgtgccggtacggagattgcagcagcgcatgcgggctggcgtggcctgtgtgaaggcgtgctggaagagaccgttgcctgcttccaggacgattctgcaaatctcatcgcctggcttggcccggcgattggcccgcaggcatttgaagtggggcctgaggttcggcaagcttttatggaaaaagatcctcaggcggttaatgcgtttgtggcgtccggcgataaatatctggccgatatttatcagcttgcccgccagcgccttaataatgtcggcgtgacccagatctttggcggagatcgctgtacattcaccgaaaaaggtgattttttctcctggcgccgtgacaagacgacaggccgtatggcaagtttcatttggctgatataa

SEQ ID NO: 526345 - DNA, 2574 bp, Stenotrophomonas maltophilia
atgcgtctggatcgtcttactaataaattccagcttgctctcgccgatgcccagtccctcgcactggggcacgacaaccaatttatcgaacctcttcatttaatgagcgccttgctgaatcaggaagggggatcggtacgtcctttgttaacgtccgttggcattaatgctggccagttacgcaccgccatcgatcaggcgctgagtcgtttaccgcaggtagaaggtactggtggcgacgtacagccgtcacaggatctggtgcgtgtactgaacctttgcgacaagctggcgcaaaaacgtggggacaactttatttcgtcagagctgtttgttctggcggcgcttgaatcacgcggtaccttaaccgacctgctgaaatccgccggtgcaaccaccgctaatgtgacccaggcgattgagaaaatgcgcggaggtgaaagcgtgaacgaccagggagccgaagaccaacgtcaggctttgaaaaaatttacggtcgatctgaccgaacgtgccgagcagggcaaacttgacccggtaatcggtcgcgacgaagaaattcgccggactattcaagtactgcaacgccgtaccaaaaacaacccggtgctgattggtgagcctggcgtcggtaaaaccgccatcgttgaagggctggcgcagcgtatcgttaatggcgaagtgcccgaagggctgaaaggccgtcgcgtactggcgctggatatgggcgcgctggtggccggggcgaaataccgcggtgaatttgaagagcgtctgaaaggcgtgctgaacgatctggcgaaacaggaaggcaacgtcatcctgtttattgacgaactgcacactatggtgggggcaggtaaagctgacggcgcaatggatgcagggaacatgctgaaacctgcgctggcacgtggtgaacttcactgcgtcggtgccactacgctggacgagtatcgtcagtacattgaaaaagatgccgcgctggagcgacgcttccagaaggtgtttgtcgcagaaccaagcgttgaagataccatcgcgattttgcgtggtctgaaagagcgttatgagctgcaccatcatgtgcagatcactgacccggccatcgttgcggcggcgacgctttcgcatcgttacattgccgaccgtcagttgccggataaagccatcgaccttatcgatgaagcggcgtccagcatccgtatgcagattgactcgaaaccggaagagctggaccgactcgatcgccgcattattcagctcaagctggaacagcaggcattgaacaaagagtctgatgaagcgagtaagaaacgcctcgatatgctcaacgaagagctggatgagaaagagcgtcagtattctgagctggaagaagagtggaaagctgagaaagcctccctctctggcacccagacaatcaaggcggagctggagcaggcgaaaattgccattgagcaggcgcgtcgcgtaggggacctggcgcggatgtccgagctacagtacggcaagatccctgagctggaaaaacagcttgagatcgccacgcagtcggaaggcaaaaccatgcgtctgttgcgtaataaagtgacggacgccgagattgccgaagtgctggcgcgctggacggggattcctgtagctcgcatgatggaaagtgaacgcgaaaaactgctgcgtatggagcaggatctgcatcagcgcgtcattggccagaacgaagcggtcgaagcggtatctaacgccattcgtcgtagccgtgcggggctgtccgatccgaatcgtcccatcggctcgttcctgttcctggggccaaccggtgtcggtaaaaccgagctgtgtaaagcgctggctaactttatgttcgacagcgatgacgcgatggtgcgtatcgatatgtccgagtttatggagaaacactctgtctcgcgtctggtcggtgcgcctccgggatatgtcggttatgaagagggcggttacctgacggaagcggttcgtcgtcgtccttattccgtcatcctgctagatgaagtggaaaaggcacaccctgatgtgtttaacatcctgttgcaggtgctggatgatggacgcctgacggacgggcagggaagaacggtcgatttccgtaacacggtggtgatcatgacctcgaacctgggttccgatttgattcaggaacgcttcggtgagctggattacagccatatgaaagatctggtgctgggtgtggtcagccaaaacttccgtccggagttcatcaaccgtattgatgaagtggtcgtgttccatccgctgggtgagaaacacattgcgtcgattgcgcagatccagttgcagcgtctgtacaagcgtctggaagagcgtgggtatgaaatccacatctcggatgatgcgctgaaactgctgagcaagaatggttacgatcctgtttatggcgcgcgtccgttaaaacgtgcaatccagcagcagatcgaaaacccgctggcgcagcaaatcctttccggggagctggttccgggcaaagttatccgtctggaagccaacgaagaccgaattgtggcagtgcagtaa

SEQ ID NO: 526346 - DNA, 1374 bp, Stenotrophomonas maltophilia
atgggcaccaatcctgccgtgtcacttcccgacagccacgcggtgtgccaggccctggcagcctgcccgctggtaatagtatctgaggtgatgcaggagacggacaccagccggtttgctcatatccgttttcccgccctgggctggggcgaaaaagacggaacggtgaccaattccgagcggcgtatttcgcgccagcgcgcgtttctgcctgcgccgggcgaggccagaccggactggtggatcatcgcccggatcgcagagcagctcggttatggcgatgccttcgcctgggaacaccctcatgagatattttgtgaacatgcggcgctgacggcgtttgaaaataacggcgaacgggcgctaaacctgcgcgaactggcgtcgctgtcgcgagaggcgtgggacgagctggcgccttatcagtggcatgccggtgatttcccgcaaagaaatcttgtaccggttgatcctttctcacatggggcaggcgtcgacgaattgtaccccttgatactgaataccgggcggatccgcgatcagtggcacaccatgacgcgcacggggtatgttccgcgcctgatgcagcatatcgatgagccttttattgagatgaacgcaaccgatgcggcgcgcgcggggctgactgacggccagctggcgcggataagttccccgcgcggggtcatggttgccagagtacgtatctctaccgcacagcgtgcgggcgagctgtttgcgccgatgcactggaacgcgcagtttgcccggcaggggaaggtcaacgcgctggtggaagggcgggttgatgcctggtccggccagccggagagtaaacaaaccgcggtgaggatcctgccctggctacccgcctggcagggggagctgtatgcccgcgagttgccagcgctgccgccgtcggtatgctggtggcgtaaagcctcacgtctgacggtggcgggggagcagccgttgctgtcgtgggtcatggcgtacgccagcggtcggggctggcagttacaggtggcacagacgggagaacgcagcagcgtgctcgcctggcatcacggcgagctgatgctgggctactgggagggccatacgctgccggcgctggcgcatgcgtttattgaagaagcctttgctgctgcgcccgtacaactcgctgaacgccacgcgctgctgcacggacaacggccgggcgaagatgccgatcccgggcgaattatctgtagctgctttagcgtgggtgaaaatacgatacgtaaggcgatagccggaggctgtaattctgccgcagcgctgggcgtgaagctgcgttgcggtacgaactgcggctcctgcctgccggagctgaaagggctgttgggataa

SEQ ID NO: 526347 - DNA, 1419 bp, Stenotrophomonas maltophilia
ttgacgacgttgaaggctgtatcgtcccgcatccgttttttgctgttactccccctttttacggctggagccgttcacggtgcgccgaaatccttcgtgcagcaggcgcaaaatccgtttgataacaacggcgatagtctgccggatctcggtatggcgcaaccgactaccgaaggcgaaaaacacctggctgaaatggcaaaggccttcggtgaagccagtatgatcgataacggcctgacggccgggcagcaggcgcgacagttcgcgtttggcaaggtgcgggatgccgtcagcggggaagtcaacgagcagattgaatcctggctttccccctggggtaacgccaacgtcaatgtactggtggatgacgacggcaactttaacggcagcagcggaagctggtttatcccctggaacgacaacacccgctatctgagctggagccagcttggcctgacgcagcagacagacgggctggtgagcaacgtcgggatcgggcagcgctgggttgccggaaactggctgctgggctacaacactttttacgacaacctgctggaagacaatctgcaacgtgccggactgggcgcagaggcgtggggcgaaaaccttcgcctgtcggccaattactaccagccgttcgctggctggcagccgcgttccgacatccgggagcagcgcatggcgcgcgggtacgacgtaacggccaaagcctggcttccctggtttcatcacctgaacaccagcgtcagctttgaacagtattttggcgataacgtcgatctgtttaacagcggtacggggtatcacaacccggttgcggtcaacctggggctgaattatacccccgttccgctggtcaccctgacggctgcccataagcagggggagagcggcgttagccagaataacctcgggctgaagctcaactatcgctttggcgtgccgctggcgaaacagctttccgccggggaagtggcggcgacgcgctcgctgcggggtagccgctatgattcacctgagcgtgataatctgcccgtgatggaattccgtcagcgtaaaaccctctcggtctatctggccacgccgccgtgggatcttaagccaggcgaaactgtgatgctgaagctgcaaattcgcagcacgcacggtatccgtcagatccactggctgggtgatacccaggcgctcagcctgacctcaccggcaaacagcaacagcagcgatggctggagcataatcatgcccgcctggaacgacgcggaaggggcgaaaaacgaatggcggcttacggccgtggtggaagataaggatgggcagcgtgtctcctccaatgagatcacgctttccgtggtgcaaccgctcgtcgcaatgcctgccgacgatccacggtggaagttgctgccggatgagtaa

SEQ ID NO: 526348 - DNA, 651 bp, Stenotrophomonas maltophilia; identical to SEQ ID NO: 118977

SEQ ID NO: 526349 - DNA, 1797 bp, Stenotrophomonas maltophilia
atgttaaaaagatgtttatctccgttgacgctggttaaccagctggcgcttattgttctgctgtccaccgctatcggtgtgaccggcatggctatttctggctggctggtacagggtgtgcagggtaatgcgcatgccatcaacgaggcaggctcgctacgtatgcagagttaccggctgctggcgtcggtgccgctgacgcaggctgaccaaccgcttatcgacgaaatggagcgtaccgcattcagccctgaactggaaagagccgccatccgtgacggccagcaatctcagcttaaggcgcttcagggctactggcatacccagctggagcccgggttaaagcgggcggaagaccgggaaacggtcgcccaggatgtcgccgggtttgtgtcacgcatcgatcatctcgtctcctcgttcgatcgcaccacagagttacgcattgaccgcgtggtgatggttcaccgcgcaatggcgctgtttatgggtttgctgctgattttcacggttatctggctgcgcgcgcggttgcttaacccctggaagcaactcctggcgatggcccgcgccgtcacacagcgcgattttacccaacgcacgcacatcagcgggcgcaacgaaatggcgatgctcggcgaggcgctcaacaccatgtcggcggagctatctgaaagctacgcggtactggaaaaacgcgtccaggagaaaaccgccgggcttgagcagaaaaacgagatcctctctttcctctggcaggcgaaccgtcgcctgcatatgcaggtaccgctttgcgagcgtctctcgccggtactgaacggcctgcaaaacctgactctgctccacgatcttgagctacgggtttatgacgttgaagatgaggaaaaccatcaggaatttacctgtcagtcggacgtctcctgcgacgataaagggtgtcatctgtgcccgcgcggcttgccgccgcttaccaccagcggcacgaccctcaagtggcggctgatggacagccatacccagtacggtattttgctggccaccctgcccgccggacgtcacctgagccacgaccagcagcagctggtcgatactcttgtagagcagctcacggccacgctggcgctcgaccgtcaccaggaaaaacagcagcagctgatcgtgatggaggagcgcgccaccatcgctcgcgagctgcacgactccatcgcccagtccctctcctgcatgaagatgcaggtgagttgcctgcaaatgcaggacgaaggcatgcccgagagcagcaaacagctgctcagccagatccgcaacgagcttaacacctcgtggattcagcttcgcgagctgctgaccaccttccgtttacagctcaccgagccggggctacgccctgcgctggagtccagctgtcaggaatttagtgccaggctgggcttcccggtgaagctggattaccagttgccaccgcgttttgtcccctctcaccaggcgatccatttgctgcaaattgcccgtgaagccctgagcaacgtgctcaagcatgccgaggcgacggccgtcacggtcaccgtcagctgccaggataatcaggtgaagctcagggttcaggataacggccgcggcgtgccggaaaatgccgaacgaacgaaccattatggtttaatcatcatgcgagaccgcgcgcaaagcctgcgcggtgattgccaggttcgccggggagagtcaggtggcaccgaagtcgtggtcacctttatacccgaaaagcccctcataactgctcaaggagaaaaccatgactaa

SEQ ID NO: 526350 - DNA, 1398 bp, Stenotrophomonas maltophilia
atgagtcactcttccgctcccgaaagggaaactggtgccgttattacagactggcgtccagaggatccggcgttctggcaacagcgcggccaccgtatagcaagtcgtaatctgtggatttccgtgccatgtctgttactggcgttttgcgtctggatgttgttcagtgcggttgcggttaacctgccaaaagtgggctttacctttaccaccgatcagctgtttatgttgactgcgttgccgtcgctttcaggcgcactgctgcgcgttccttacgcgtttatggtgccggtctttggtggtcgtcgctggacggctttcagtaccgggatcatgatcgtgccgtgcgtgtggctcggttttgcggtgcaggatacctctacaccgtttagcgtgttcgtgattatctctctgctgtgcggctttgcgggggcgaactttgcgtccagtatggcaaacatcagcttcttcttcccgaaagcgaagcagggtggtgcgctgggcattaacggcggtctgggtaacatgggcgtgagcgtgatgcagctgattgctccgctggcgatctcggtctccatctttgcggcgtttggcggcggcggtgtgacgcagcccgacggttcagtgctgttcctgcaaaatgcctcctggatttgggtaccgttcctggtggtctttaccctggcggcatggttcttcatgaacgacctgtccgcgtccaaagcgtccctgagcgagcagctgccggttctgaaacgtggccacctgtgggtaatggcactgctgtatctggcgaccttcggctcgttcatcggtttctccgcaggctttgccatgctgtcgaaaacccagttcccggacgtacagatccttcagtttgccttcttcggtccgtttattggcgcgctggcacgttcgctgggcgggatgatctccgaccgtctgggcggaacgcgcgttacgctggtgaactttgtattgatggccatcttctgtgcgctgctgttcctgacgctgcctgcgggtggtgagggaggtaacttctttgccttcttcggcgtcttcatggtgctgttcctgaccgccgggctgggcagtgcgtctactttccagatgatctctgtcatcttccgcaagctgaccatggaccgcgtgaaagcgcagggcgggagcgacgagcaggcgatgcgtgaagccgccaccgataccgctgcggcgcttgggtttatctctgcgattggcgcgattggcggcttctttattccaaaagcgttcggtatctcactggatctgaccggctctccggcgggtgcgatgaaggtattcctcgtcttctatatcgcctgtgtggtcatcacctggctggtatatggccgtaataccaagaaaaacaagtaa

SEQ ID NO: 526351 - DNA, 3753 bp, Stenotrophomonas maltophilia
  misc_feature (513)..(522): n is a, c, g, or t
atgagcaaatttttggaccggtttcgctacttcaaacagaagggtgaaacttttgccgatgggcacggccaggttctggataccaaccgggactgggaagacggttaccgtcaacgctggcagcatgacaaagttgtccgttctacccacggtgtaaactgcactggctcatgtagctggaagattttcgttaaaaacggtctggtgacctgggaaatgcagcagaccgactatccgcgtacccgtccggatatgccgaaccatgaaccgcgcggctgcccgcgtggggccagctactcctggtatctctacagcgccaaccgtctgaaatacccgctgatgcgtaaacgcctgatgaaaatgtggcgtgaagcgaaagtgcagcacagcgatccggttgatgcatgggcatccatcatcgaggacgccgacaaagcgaaaagcttcaaacaggcgcgtggtcgcggtggtttcgttcgttcttcctggaaagaggtgaacgagctgattgcnnnnnnnnnngcctccaacgtctataccgtgaaaacttacggtcctgaccgcgtggcaggcttctcgccaatcccggcaatgtcgatggtctcttacgcctccggcgcgcgctacctttcacttatcggcggtacctgtctgagcttctacgactggtactgcgacctgccgccagcgtcgccgcagacctggggcgaacagaccgacgtgccggagtccgctgactggtacaactccagctacatcatcgcctggggctctaacgttccgcagacccgtacccctgatgcgcacttctttaccgaagtacgttacaaagggaccaaaaccgttgccgtgaccccggactacgccgaaatcgccaaactgtgcgacctgtggctggcaccgaaacagggtactgatgccgccatggcgctggcgatgggccacgtcatgttgcgtgaattccacctcgacaagccaagccagtatttcaccgattacgtgcgtcgctacaccgacatgccaatgctggtgatgcttgaagagcgtgacggctattacgccgctggccgtatgctgcgtgctgcggatcttgtggacgcgctgggtcaggaaaacaacccggagtggaaaacggtcgcctgcaacagcaacggcgagctggtggcgccaaacggttctatcggcttccgctggggagaaaaaggcaaatggaacctggaacagcgtaacggcaccacgggtgaagagacagaacttcgcctcagcatgctgggcagccaggacgaaatcgccgatgtcggcttcccgtactttggtggtgaaggttccgagcacttcaacaaggttgagctgcaaaacgttctgatgcacaaactgccggttaagcgcctgcaactggcggacggttctaccactctggtcactacggtctacgatctgaccatggcgaactatggcctggagcgcggtctgaacgacgaaaactgcgcgaccagctatgatgacgtgaaggcttatacaccagcctgggcggagcagatcaccggtgtgccacgcgcccaaatcacccgtatcgcccgcgaatttgcggaaaacgcagacaaaactcacggtcgctccatgatcatcgtcggtgccggtctgaaccactggtatcacctcgatatgaactatcgcggcctgatcaacatgctgatcttctgtggctgcgtcgggcagagcggcggcggctgggcgcactacgtgggccaggaaaaactgcgtccgcagaccggctggcagccgctggcgtttgcccttgactggcagcgtccggctcgtcacatgaacagcacctcctacttctataaccactccagccagtggcgctacgagacggtgaccgcgcaggagctgctgtcgccgatggcagataaatcccgctacagcggccatctgattgacttcaacgtgcgcgctgaacgcatgggctggctgccgtctgcaccgcagttgggcactaacccgcttcgcattgcggaagcggcgaagaaagcgggcatgtcaccggtggactacaccgtgaaatcgctgaaggatggctcaatccgttttgcggcagaacagcctgagaacggcaaaaaccatccgcgtaacctgttcatctggcgctccaacctgctgggttcgtccggtaaaggccatgagtacatgctgaaatacctgctcggtaccgaaaacggtattcagggtaaggatctcggcaagcagggcggcgtgaagccggaagaggtggagtggaaagacaacggtctggacggcaagctggatctggtggtaacgctggacttccgtctgtccagtacctgcctgtactccgatatcgtgctgcctaccgccacctggtacgaaaaagacgacatgaatacgtcggatatgcatccgtttattcatccgctgtctgcggccgttgacccggcgtgggaatcaaaaagcgactgggaaatctataaagacatcgcgaagaaattctccgaagtctgtgtagggcacctgggcaaagagaccgacgtggtgacgctgccaatccagcacgactccgctgccgaactggcgcagccgcttgacgttaaggactggaaaaaaggcgaatgcgatctgatcccgggtgtgaccgcgccgcacattattccggttgaacgtgattacccggcaacgtacgagcgctttacctctatcggtccgctgatggagaagatcggtaacggcggtaaaggcatcgcctggaacacccagagcgaaatggacctgctgcgcaagctcaattacaccaaagcagacggcccggccaaaggccagccaatgctgaacacggcaattgatgcagcggaaatgatcctgaccctggcaccggaaaccaatggccacgtggcggtgaaagcgtgggcggctctgagtgaatttaccggccgtgaccatacgcatctggcgaagaataaagaagaagagaaaatccgcttccgcgatattcaggctcagccgcgcaagattatctccagcccgacctggtctggcctcgaagatgaacatgtgtcctataacgccggatacaccaacgttcacgagctgatcccatggcgcacgctctctggccgtcagtctctgtatcaggatcaccagtggatgcgtgacttcggtgaaagcctgctggtttaccgtccgccaatcgatacccgctccgtgaaagcggtgatgggggcgaaatcaaacggtaaccctgagaaggcgctgaacttcctgacgccgcaccagaagtggggtatccactccacctacagcgacaacctgctgatgctgacgctgtcacgcggggggccgattgtctggatgagcgaagcggacgccaaagatctgggtatcgaagataacgactggatcgaagtgttcaacagcaacggtgccctgacggcacgtgcggtggtgagccagcgtgtaccagccgggatgaccatgatgtaccacgcgcaggaacgtatcgttaacctgccgggttcagagatcaccgagcagcgcggcggtattcacaactctgtgacccgtattacgccgaaaccgacgcatatgatcggcggctatgcccagctggcctacggctttaactactacggcactgtaggatcaaaccgcgatgagttcgtggtggtacgtaagatgaagaatattaactggttagatggcgaaggtaatgaccaggtacaggagagcgtaaaatga

SEQ ID NO: 526352 - DNA, 1545 bp, Stenotrophomonas maltophilia
atgaaaattcgttcacaagtcggcatggtgctgaatctggataaatgcatcggctgtcatacctgctcagtcacctgtaaaaacgtctggaccagccgtgaaggtatggagtacgcctggttcaacaacgtggaaagtaagccgggcaccggcttcccgaccgactgggaaaaccaggagaagtggaagggtggctggatccgtaaaatcaacggcaaactgcaaccgcgcatgggtaaccgtgcgatgctgctcggtaaaatctttgctaacccgcatctgccgggcatcgacgattactacgagccgtttgattacgactatcagaacctgcacaacgcgccggaaagcaaacaccagccgatcgcccgtcctcgctcgctgatcaccggtaagcgcatggacaaaattaccagcggtccaaactgggaggagctgctgggcggcgagttcgaaaaacgcgcccgcgatcgaaactttcagaagatccagaaagagatgtacggccagttcgaaaacaccttcatgatgtacctgccgcgcctgtgcgagcattgcctcaacccgagctgcgtcgccacctgcccgagcggtgcgatttacaaacgcgaagaggacggcattgtgctgatcgaccaggacaaatgccgcggctggcgtctgtgtatcagcggctgtccgtacaagaaaatctacttcaactggaaaagcggcaagtcagagaagtgcatcttctgctatccgcgcatcgagtccggccagccgaccgtctgctcagaaacctgcgttggacgcatccgctaccttggcgtgctgttgtatgacgcggaccgtattgaagaggcggccagcaccgagcatgaaaccgatctgtatgagcgccagtgcgacgtgttccttaacccgaacgatccggcggtgattgaagaagccctgaagcagggcatcccgcagaacgtcatcgacgcagcgcagcgttccccggtttacaaaatggcgatggactggaagctcgccctgccgctgcatccggaataccgcaccctgccgatggtctggtatgtgccgccgctgtcgccgattcagtcctacgcggacgcgggtggcctgccgcagagcgacggtgtactgcctgcggtcgaaagcctgcgcatcccggtgcaatacctggcaaatatgctcagcgcgggcgataccggcccggtgctgcgcgctctgaagcgcatgatggcgatgcgccactacaaacgctcccagaccgtggaaggcgtgaccgatacccgcgccattgaggaagtgggcctgaccgaagcgcaggttgaggagatgtaccgctatctggccatcgctaactacgaagaccgcttcgtgatcccgaccagccaccgcgaaatggcgcgcgacgccttcccggagaaaaacggctgcggcttcaccttcggtgacggctgtcacggctccgacaccaggttcaacctcttcaacagcagccgcatcgacgcgatcaacattaccgaggtgcgcgatcacggggagggagaataa

SEQ ID NO: 526353 - DNA, 696 bp, Stenotrophomonas maltophilia
atgcagatccttaaaatcatcgcgctactgattgagtatcccgatgagctgctttgggataaccgtgaagaagcgctttccctggtggaacaggatgcgcccatgctactgccgtttgcgcagcagcacctgagcgccccgctgctggataagcaggccgaatggtgtgaagttttcgagcgggggcgcgcgacttcactactgctgttcgagcacgttcacgccgagtcccgcgatcgcggtcaggcgatggtcgacctgatgagccagtatgagaaagccgggctggagctggattgccgcgagctgccggactatctgccgctctatctggaatatctcagtatcgtcagcgacgacgaggcgcgtgaagggctgcaaaacgtcgcgcctatactggcgctgattggaggccgcctgaaacagcgcgaggtagcgcattacaagctgtttgacgccctgctgtcgctggcggaaacacggctttccagcgacagcgtggcgaaacaggtatccggtgaaaaacgtgatgatacccgtcaggcgctggacgccgtgtgggaagaggaacaggtcaagtttatcgaagacaacgccacatcgtgcgacagttcgccgatgcagcaatatcaacgacgctttagccaggacgtcgcgccgcagtacgtggacgtcagcgccggaggcccaaaatga

SEQ ID NO: 526354 - DNA, 681 bp, Stenotrophomonas maltophilia
atgactcattacctgaacgtgtttttctatgacatttatccgtacatctgcgccaccgtcttcttcctcggcagttggttgcgctacgactatgggcagtacacctggcgggcgtcatcaagccagatgctcagcaagcgcgggatgaactgggcttcgaacctgtttcatattgggattctggggatcttcttcgggcacctgttcggcatgttaaccccgcactggatgtacgcctggtttttacccgtcgcggttaaacagcagttagccatgattgcgggaggtatttgcggggtgctgacgctgatcggtgggtcgatgcttttgatccgacgcctgttcaaccagcgggtgcgcgccacgtccaccacgccggatattatcatcatgagtatcctgctgcttcagtgcatccttgggctgtcgaccattcctttctccgctcagtaccctgacggaagcgagatgatgaagctggtcggctgggcgcaggggatcgtcacgtttaggggcggctcgtcggaaatgctgagcggcgtcgcgccgatcttccgcgtgcatctggtgctggggatgacgatcttcctcatcttcccgttcacccgcctggtgcacgtgtggagcgcgccgtttgagtacttcacgcgtcggtatcaggtggtgagatcgcgccgttga

SEQ ID NO: 526355 - DNA, 1107 bp, Stenotrophomonas maltophilia; identical to SEQ ID NO: 130990

SEQ ID NO: 526356 - DNA, 1155 bp, Stenotrophomonas maltophilia
atggcaaaacacctgtttacgtccgagtccgtatcagaaggacatcctgataaaattgctgaccaaatctccgatgcggtgctggatgcgatcctcgcgcaggatccaaaggcgcgcgtagcgtgtgaaacctatgtcaaaaccggcatggttctggttggcggtgagatcaccaccagcgcatgggttgatatcgaagagatcacccgtaacacggtgcgtgagatcggttatgtacattctgatatgggctttgatgccaactcctgcgccgtactgagcgctatcggcaaacagtccccggacatcaaccagggcgttgaccgtgccgatccgctggaacagggcgcgggcgaccagggcctgatgttcggctacgcgaccaacgaaaccgacgtgctgatgccagcgccggtaacttacgcacaccgtctggtgcagcgtcaggctgaagtgcgtaaaaacggcaccctgccgtggctgcgtccggatgcgaaaagccaggtgaccttccagtatgacgacgggaaaatcgtcggcattgatgccgtggttctttccacgcagcatgctgaagatattgaccagaaatccctgcaggaagcggtgatggaagagatcatcaagccggttctgccaactgaatggctgagctctgcgaccaaattcttcatcaacccaaccggacgcttcgttatcggcggcccaatgggtgactgcggtctgaccggtcgtaaaatcatcgtagatacctacggcggcatggcgcgccacggtggcggcgcgttctccggtaaagacccgtctaaggtggaccgttctgcggcgtacgctgcacgttatgtggcgaaaaacatcgttgctgcgggcctggctgaccgctgtgaaattcaggtttcctacgccatcggcgtggctgagccaacctccatcatggtggaaaccttcggtactgaaaaagtgccttctgaacagctgaccctgctggtgcgtgagttcttcgacctgcgtccatacggtctgattcagatgctggatctgctgcacccaatctaccaggaaaccgcagcgtacggtcactttggtcgcgaacatttcccttgggaaaaaaccgacaaagccgccctgctgcgtgatgctgccggtctgaaataa

SEQ ID NO: 526357 - DNA, 1899 bp, Stenotrophomonas maltophilia
atgagctcccaggaagccagcaagatgctgcgcacttacaatattgcctggtggggcaataactactacgacgttaacgagctgggccacatcagtgtctgcccggatccggacgtcccggaagcgcgcgtggatctcgctaagctggtgaaagcccgtgaagcccagggtcagcgcttgcctgcactgttctgcttcccgcagatcctgcaacatcgcctgcgttctattaacgccgcgttcaaacgcgcgcgggaatcgtatggttataacggcgactatttcctcgtttacccgatcaaggtaaaccagcaccgtcgcgtgattgagtccctgatccactccggcgaaccgctgggcctggaagctggctccaaagcggagctgatggcggttctggcgcacgcgggcatgacccggtcggtgatcgtctgtaacggctataaagaccgcgaatacattcgtctggcgctgattggcgagaagatgggccacaaggtctatctggtgatcgagaagatgaccgaaatcgcgatcgtgctggaagaggccgagcgtctgaacgtgatcccacgccttggcgtgcgtgcgcgactggcgtcgcagggttccggtaaatggcagtcttccggcggtgaaaaatccaagttcggcctcgcggcgaaccaggtgcttcagctggtggaaatactgcgcgagcgcggtcgtctggacagcattcagctgctgcacttccaccttggctcgcagatggccaacattcgcgacatcgccaccggcgtgcgtgaatcggcacgtttctacgttgagctgcacaagcttggcgtaaatattcagtgctttgacgtgggcggtggcctgggcgtggattacgaagggacacgctcgcagtctgactgctcggtcaactacggcctgaacgaatacgccaacaacattatctgggcgattggcgatgcctgcgaagagcacggcctgccgcacccgacggtgatcaccgaatccggccgcgcggtcactgcgcaccatacggtgctggtctctaacatcatcggcgttgagcgcagcgaaatcactgaagccacgcctccggcagacgatgctccacgttccctgcaaagcatgtgggaaacctggcaggagatgcacgagccgggcacgcgtcgttctctgcgcgaatggctgcacgacagccagatggatctgcacgacattcacgtcggttattcttcaggcacctttagcctgcaggaacgcgcgtgggcggagcagctctatctgaacatgtgccatgaagtgcagaagcagctcgatccgagcaaccgcgcgcaccgtccgattatcgacgagttgcaggaacgtatggcggacaaaatgtacgtcaacttctccctgttccagtcgatgccggatgcctggggtatcgaccagctgttcccggttctgccgctggaagggttgaatcatgcgcctgaacgccgcgcggtgctgctggacattacctgtgactcagacggcgcgattgaccactacgtcgacggtgacggtatcgctacgaccatgccaatgccggagtacgatccggagaacccgccaatgctgggcttctttatggtgggtgcgtatcaggagatcctcggcaacatgcacaacctgttcggtgataccgaagcggttgacgtgtttgtcttccctgacggcagcgtggaggttgagctgtccgacgaaggggacaccgtggcggatatgctcgaatacgttcagctggatccgaaaaaactgctcacccagttccgcgatcaggtcaaaaacaccggtctggacgatgccttgcagcagcagttcctggaagagtttgaagcgggtctgtacgggtatacgtatctggaagacgagtag

SEQ ID NO: 526358 - DNA, 921 bp, Stenotrophomonas maltophilia
atgagcactttaggtcatcagtacgataactctctggtatctaacgcgtttggttttttacgccttccgatgaacttccagccttacgacagcgatgctgactgggtgatcaccggcgtaccgttcgacatggcaacgtccggtcgtgcgggtggacgtcatggcccggcggcaattcgtcaggtttccaccaacctggcctgggagcacaaccgcttcccgtggaacttcgacatgcgcgagcgcctgaacgtggtggactgcggtgatctggtgtacgccttcggtgacgcgcgcgaaatgagcgaaaaattgcaggcgcacgccgagaagctgctggcggccggtaaacgcatgctctccttcggcggtgaccacttcgtgaccctgccgctgctgcgcgcccacgcgaagcacttcggtaaaatggcgctggtgcactttgacgcgcataccgacacctacgcgaacggctgcgaattcgaccacggcaccatgttctacaccgcgccgaaagaaggcctgatcgatccgaaccactccgtgcagatcggcatccgcaccgagttcgacaaagacaacggcttcaccgtactcgacgcgggccaggtgaacgatcgcggcgtggacgatattctggctcaggttaagcagatcgtcggcgatatgcctgtctacctgaccttcgacattgactgcctggatccggcattcgcaccgggtaccggtacgccggtgatcggcggcctgacgtcagaccgcgccatcaagctggtgcgcggcctgaaggatcttaacattgtcgggatggacgtggtggaagtggctccggcctatgaccagtccgagatcaccgcgctggccgcggcgaccctggcgctggaaatgctctacatccaggcagcgaaaaaaggcgaataa

SEQ ID NO: 526359 - DNA, 552 bp, Stenotrophomonas maltophilia
gtgaatcattttagctccgtgacaatcacattgatgaaaaatataagttacaaaaaacgtaaggcggacatgatgacggcaagatggcaaggcacgattgcgcttttattactcattattatttcgtacgtcgatcgggtaaatatctcggtaatgattttaaacccggaatttgccgaacattttcagttaaatgaaaacagaatgttacagggtctactcatgacctgctttcttctgggttatggtttttccgctctattattaacgccggttattgaaagcaaacttcattatcggcagggattattaagcagcattgcgatttgggccgcggtctgcgcggtttcgcctttgttaggctcgctgacgggaatggtcatcgcccgcgaaataaccggggtttgtccacaccttcacgctggcctggggaatgttgctgctgcgcatgcggcgcgcagcagcaatcagcgcgtaaggcttattcgccttttttcgctgcctggatgtagagcatttccagcgccagggtcgccgcggccagcgcggtga

SEQ ID NO: 526360 - DNA, 324 bp, Stenotrophomonas maltophilia
atgagctggataggcgtatgtgacgcagaacaagtacaggaagatttcccttttagcggcaacgtcgacgggaaagagatcggcgtttacctgatcgacggtgaatattacgcgctggaagacgtatgcccccacgcctatgccctgctgagtcagggcttcgtagaagacggcaaggtggaatgcccgctgcacgaggcggtgttcgacgtcaaaaccggccagtgtctgcacggccccggaggacgcaacctcaaccgttacccggttcgggtctttgaaaaccagattcagattacctttgttgaggagaccgtggcatga

SEQ ID NO: 526361 - DNA, 309 bp, Stenotrophomonas maltophilia
atgagcgacacgctgaactacaacccggcgctgccggaaagccgccagtttaccccgccggcagagggcggtaatggcgccattcacaaaccgggcgagtaccagaacctgatctggcagacccgcagccgcgagccggaaagctgggaggtgaagctgattgctacgctggaagagctcttcgaacagggcgttgaaaccttaccggagctggtaaacgggctgaacgcggtgcgcatgcacgaccagcagggtgagccgtggagcgacgccagcttccaggcatttttacaggttaacggctactga

SEQ ID NO: 526362 - DNA, 1023 bp, Stenotrophomonas maltophilia
atgacgacgaccgtacaacactatctggataaaggcctgcgcggcctctggtatccggtgctggcgagctgggaagtgcagtctgcgccggtgggcatcacccgcctgggcgagcagattgtggtctggcgcaacaaagacggccaggtgcaggcgctggaggaccgctgtccgcaccgcggcgcgcgcctgtcgatgggctggaacctcggcgaccgcatcgcctgctggtatcacggcgtagaggtggcgggcaacggcgaggtgaaagacgtgcccgctgtggataaatgtccgctggtcggccagcagtgcgtgcgcagctataacgtgcaggaggcgcacggcgccatcttcctctggtttggcgtcaccgcggatcagcagccggacgaactgaccttcccggatgaactcgccgacacggacagcttcagcaacttcctctgcaccgccgcgtggaaatgcaattaccagtacgcgctggaaaacgtgatggacccgatgcacggcacctatctgcactcctcctcgcactcgatggcggaaggggatcgcaaggccgacatggtgctccagccgaccaaaaccggctttatctttgagaagaaagggcagagcggcgtcaacttcgactgggtggagctgggcaacagcggcacctgctggatgcgtctctccattccgtacaagaagcgtttcgggccgggcggccacttctttatcgtcggcatggtggtgccggaagataacgacaactgccgcgtcttcttctggcgcattcgccgggtgcagggctggcagcgcgatatgtggcgcttcatgtaccgcaaccggctggaaaaactgcactgggaagtgctggagcaggaccgcgtggtgctggagagcctggcgccaaacgcccgcgatcatgaatacctgtatcagcacgacgttggcctctcgcgcctgcgtcgcatgatgcaaaaggccgccaaagagcagctggcgatgcgtgaagcacagcagggggccgcctga

SEQ ID NO: 526363 - DNA, 681 bp, Stenotrophomonas maltophilia
atgaacgggctgctgagcggtaagcgcatcgtcataaccggcgccgcgcgcgggctgggctaccacttttcccaggcctgcgcggagcagggcgcggcggtggtgatgtgcgacatcctcaaaggcgagctggccgagagcgcccaccggctgagcgagcggggatatgcgatcgaatcgcacgttatcgatctggccgatccgcagtccattgagcaggtgttcagcgcgattggcgagcaggggcagattgacggtctggtgaacaacgcggcgatggcgacgggcgtcggcggcaaaaatatgctcgattacgatccggatctctgggatcgggtgatgagcgtcaacgtcaaaggcacctggctggtaaggggcgcgccgcgcctgatggcctacgtcgccagcaagggcgccgtgattgccatgacccgctcaatggcgcgcgaactgggtgaaaagcgtatacgcattaacgccatcgcgccggggctaacccgcgtcgaggcgacggaatatgtccccgccgaacggcatcagctctacgaaaacggccgtgcgttaacgggcgcgcagcagccggaagacgtcaccggcagcgtggtctggctgttaagcgatctgtcgcggttcatcaccggacagctgatcccggtcaacggcggttttgtctttaactaa

SEQ ID NO: 526364 - DNA, 792 bp, Stenotrophomonas maltophilia
atgatggcaaacgatcaggaagtgaagtatctggtgccggggctggagcgcggtttacagctgctgttggcctttggcgagcagcatcgcgatctgacctttgccgaactgcatcggctggtggatatgccgaaggccaccgcctatcgcgtggtacagacgctggagtacatgggatttctggagcgcaacacgcgcaccaataccttttcgctgggcatgaacgtgctgcgtcttggctttgagtacatcgcctcgctggacgtggcgcaggtcggccagccggtgatcgagcaattgcgcgacgtgagccagtgcagcagccatctggcgatccgcgacgggcgcgacattatctatatcgcccgcgtcagcgccgccgggtcgcgtatcaaccaggtcagcattggtacccgtctgccggtgcactgcacctcgctgggccgcatgctgttgaccgatatttcccgcgctgatttcgaacagctgttcccgcatgagcgcctgccgggcaacacgccggggcagcttcacgaccgcgaagccctgtggcagatggtgcagcaggacaaagcccgcgggtatgtcattggcgaatccttcttccgccacggcatctcttccatcgtctacccggtgtatgaccgaagcggccgcgtggcggcggtggtcagcattctggtgccgtcggaggagatcccactgagcgaccgcgagcgcctgcaaaacgaggttcgccttgcggcggataaaatttctggcttcttagggtatctgtcacaggccagttaa

SEQ ID NO: 526365 - DNA, 927 bp, Stenotrophomonas maltophilia
atgagtataaccggaattgaaaagctggaatttggtgtggaagacctgacgcactgcgccaaatttatgcgtgattttggcctgacgggcgatgccagcggccagcgtttcaccaccctgagcggcgcgcgcgtggagcttaacccgatcgacagccacgacctgccgcccgcgtttgaagcgggcaacaccctgcgccgcatgacctgggcggttgccagccagtctgagctggatgcgctgcgcccgaagctggcgcaacagccaggttttcgtgaagtgggcgacgcgctggaatgcctggatccgaacggcatgacgctgcgcgtgcaggtgacccagcagaccgacgtggagcttaacgtcgagccaataaaccagtggggcgacgcccgccgtatcgacacacccagcccggtttacgatcgcgcccagccgatcaacgtggggcatgtggtgttcttcgtggaagagctggcggcagtggagaaattctaccgcgaggtgctcggcttccaggtctcggatcgctatatcaaccgcgccgtgttcctgcgctgcggggcgcgtggcggccatcacaacctgttcctgctgcaactgccgaaccgcaagcgcggccttaaccacgtggccttcaccgtgcgcgacatccacgaggtgatcggcggcggtatcgcgatgaataaacatgactggagcacctttatcgggccgggccgtcatccggtgtcgtcggcgtacttctggtacgtcaacagcccgaccggcggcgcgtttgagtattacaccaacgacgactacctgaccgaaaactggcagccgcgcgagctggagcactccctggtctcctttaccgaatgggcggtggagggcgggattgaccacgacacgcgccgtcagcagaaaaagccggaggcggtatga

SEQ ID NO: 526366 - DNA, 1188 bp, Stenotrophomonas maltophilia
atgacatcgcgcattgtcattatcggcggcggccaggcgagcggctgggcggcgaaaaccctgcgtgacgagggcttcgacggcgagatttgcgtggtggcggaagaggaatgggatttctacgagcggccgccgctgtcaaaagcgtctctgctggagccggactccgcgcttccgcggctgtttagcgaagaagcgcagcaggcgctgaacctgatctggtaccgcccgctgcgtgctgaatcagtcgatcgtgaagagaaaatcgtgcgtttaagcaacggcgaatgtcttagttacaacatccttttaatcgctaccggcgggcgggcgcgcctgccttcgcaggcgtgggccagccatccgcaggtctacaccctgcgccactggcaggacgcgcagtgcctgaaaagtcgcctgtcggaaagtcacaaactggcgattatcggcggcggctggattggccttgagattgccgcttccgcgcggaaaagcggcgtggcggtcaccctgttcgagcagcagcctgcggtgtgcatgcgctcggtgagcagcgaggtgtcccagcgcctggaggccatccaccgcgagcagggggtggagatccgtaccggctgcggcgcgctggagctggaggacgataatggcctgccggtcatccactgcgacggcaaccgtgaaacctttgatacggtcgtggtcgggatcggcgtcgatctcaatctggagctggcgcttgatgcggggctgaaaaccgggcgcgggatcgtggtggatgcccagggacgcacctcggatccattcatctttgccgctggcgatgtggcccagcaccatcactacggcctgtgcatccagtcctgggccttcgcccagaatcaggcagtggcgacggcgaaagcgatgctcaaccccgatgcgccaggttacgacgacgcgccgtggctgtggtcggatcaatatcagcacaatattcagatcctcggtattccgcagccggagagtaaaacgatagtgcgtgaagatgcgctgttcttctcgctggatgaaaacgggcggctgacgcagctggtggcgttcaacgatgcgcgcaccgtcaagctggcgaagcgctggatggcggcggggcgggatctgtcgaacgtaccgcttgccgacccgacattttcactgatgtcactgcgatag

SEQ ID NO: 526367 - DNA, 237 bp, Stenotrophomonas maltophilia
atgccgaggcgcgtggtgtcgaaatcaatgcccatcgcctgctggaaatgggtatccgaaaagagcgccgcgatgctgattttgtcgaaaaacgccagcagcacgcaggccagcagcgacagcgggatggcccagcgcaccgctttttcgggcgtgcgggtcccctcaccgctcgcctcaaccggcgcggtgttcgtctctagtgtggtcatctctccccctacgggtgcgggttag

SEQ ID NO: 526368 - DNA, 558 bp, Stenotrophomonas maltophilia
ttgcaaggtcaacgtatcggctacgttcgcgtcagcagcttcgaccagaatcctgatcgacaactggaacaaatagaagtcggcaaggtattcaccgataaggcttcaggcaaggacacacaacgtcccgaacttgaaaggctgctggccttcgtccgcgagggcgacaccgtggtggtgcatagcatggacaggttggcacgcaaccttgatgacctgcgccgcatcgtccaagggctgacacaacggggcgtgcgcatggagttcgtcaaagaagggctaacgttcaccggcgaggactcaccgatggccaatctgatgctgtcggtcatgggagcctttgctgagttcgagcgcgctctgatccgcgaacgtcagcgcgagggaatcgtgctggctaagcagcgcggggcctaccggggacgaaagaaatcgctgaacagcgaacaaattgccgagttgaaacggcgagttgcggcaggcgaccagaaaaccttggtggcccgtgacttcggcatcagccgcgaaaccttgtaccagtacctgcgggaagactga

SEQ ID NO: 526369 - DNA, 213 bp, Stenotrophomonas maltophilia; identical to SEQ ID NO: 25793

SEQ ID NO: 526370 - DNA, 426 bp, Stenotrophomonas maltophilia; identical to SEQ ID NO: 25795

SEQ ID NO: 526371 - DNA, 276 bp, Stenotrophomonas maltophilia; identical to SEQ ID NO: 25796

SEQ ID NO: 526372 - DNA, 318 bp, Stenotrophomonas maltophilia
atgtccacgccgaacgtggcagagtcttaccagagcaagttcaagggccgcaacggtcttgataaggttctgggcgacagtgaaacgacccgcgtgaagattaactctgtgatcctcgataaaccgcacggcgtagcaacgatacgctttactacggttcgccgcgtgcgcagcaatcccgttgatgatcagccgcagcgctggattgccattatggggtatgaatataaatcgctggcgatgaatgctgagcagcgttatgtcaacccgctgggtttccgcgtgacgagttatcgcgtcaacccggaagttaactga

SEQ ID NO: 526373 - DNA, 885 bp, Stenotrophomonas maltophilia; identical to SEQ ID NO: 97198

SEQ ID NO: 526374 - DNA, 1161 bp, Stenotrophomonas maltophilia; identical to SEQ ID NO: 16844

SEQ ID NO: 526375 - DNA, 996 bp, Stenotrophomonas maltophilia; identical to SEQ ID NO: 16843

SEQ ID NO: 526376 - DNA, 534 bp, Stenotrophomonas maltophilia; identical to SEQ ID NO: 16842

SEQ ID NO: 526377 - DNA, 693 bp, Stenotrophomonas maltophilia
atgccccgccgttcgatcctctccgccgccgagcgcgaaagcctgctggcgttgccggacaccaaggatgagttgatccgtcactacacgttcagcgaaagcgacctctccatcatccggcagcggcgcggcccggccaatcggctgggcttcgcggtgcagctctgctacctgcgctttcccggcgtcatccttggcgctgatgagccaccgttcccgccattgctgagactggtcgccaaccagctcaaggtcggcatcgaaagctgggacgagtacgggcagcgtgagcagacccgacgcgagcacctggtcgagctgcaaacggtgttcggcttccagccgttcacgattggccactaccggcaggctgtccagttgctgaccgagctggccatgcaaaccgacaagggcatcgtgctggccagagccttgatcgagcacctgcggcggcagtcggtcattgtgcccgccctcaacgccgtcgagcgggcgagcgccgaagcgattacccgcgccaaccggcgtctctacgacgccttggctgagccgctgacggacgtgcatcgccgtcgcctcgacgatctgctcaagcgccgcgacaacggcaagacgacgtggctggcctggctgcggcaatccccggtcaaaccgaactcgcggcacatgctggaacacatcgaacgcctctag

SEQ ID NO: 526378 - DNA, 2187 bp, Stenotrophomonas maltophilia
atgacgcccgccgacctggcgaagttcgagccgcagcggcgttacgcgaccctggtggcgctcgccatcgagggcatggccaccgtcaccgacgaaatcatcgacctgcatgaccgcatcctgggcaagctgttcaatgccgccaagaacaagcatcagcagcagttccaggcatccggcaaggcgatcaatgccaaggtgcggctgttcgggcgcatcggccaggcgctgatcgaggccaagcaagcgggccgcgatccgttcgccgccatcgaggccgtcatgtcctgggatgctttcgccgagagcgtcaccgaagcgcagcggctcgcgcaacccgaggacttcgatttcctgcaccgcatcggcgagagctacgccacgctgcgccgctacgcgccggaatttctcgacgtgctcaagttgcgggccgcgcccgccgccaaggacgtactcgacgccatcgaggtgctgcgcagcatgaacagcgacaacgcccgcaaggtgcccaccgacgcgccgaccgagttcatcaagccgcgctggcagaagctggtgatgaccgacaccggcatcgaccggcgctactacgaactgtgcgcgctgtcggagctgaagaacgcgctgcgctccggcgacatctgggtgcaaggctcgcgccagttcaaggacttcgaggactacctggtgccgcccgcgaaattcgccagcctcaagcaggccagcgaattgccgctggccgtggccaccgattgcgaccagtacctgcatgaccggctgacgctgctggaaacgcagctcgccaccgtcaaccgcatggcgctggccaacgagctgccggacgccatcatcacggagtcgggcctgaagatcacgccgctcgatgcggcggtgcccgataccgcacaggccctgatcgaccagacggcgatgatcctaccgcacgtcaagatcaccgaattgctgctggaggtagacgaatggacgggcttcacccggcacttcgcccacctgaagtcaggcgacctggccaaggacaaaaacctgttgctgaccacgatcctcgccgacgcgatcaacctgggcctgaccaagatggtggaatcgtgccccggcacgacctacgccaagctggcctggctgcaagcctggcacatccgcgacgaaacctacggggcggcactggccgagctggtcaacgcgcagttccgacatcccttcgccgagcattggggcgacggcaccacgtcatcgtcggacggccagaacttccgcaccggcagcaaggccgagagcaccggccacatcaatccgaaatacggcagcagcccagggcggacgttctacacccatatctccgaccagtacgcgccgttccacaccaaggtcgtgaacgtcggcgtgcgcgactcgacctacgtgctcgacggcctgctgtatcacgaatccgacctgcggatcgaggagcactacaccgacacggcagggttcacggaccacgtcttcgcgttgatgcacctgctgggcttccgcttcgccccgcgcattcgtgacctgggcgacaccaagctctacatcccgaagggcgatgccacctacgaggcgttgaaaccgatgatcggcggcacgctcaacatcaagcacgtccgcgcccattgggatgaaatcctgcggatggccacctcgatcaagcagggcacggcgacggcctcgctgatgctcaggaagcttggcagctacccgcgccagaacggcctggccgtcgccctgcgtgagctgggacgcatcgagcgcacactgttcatcctggactggctgcaaagcgtcgagctgcgccgccgcgtgcatgccgggctgaacaaaggcgaggcgcgcaacgcgctggcccgcgccgtgttcttcaaccgcctgggggaaatccgcgaccgcagcttcgagcagcagcgctaccgggccagcggcctcaacctggtgacggcggccatcgtgctatggaacacggtctatctggagcgggccgcgaacgccttgcgtggccacggtcaagccgtcgatgacggcctgttgcagtacctgtcgccgctcggctgggagcacatcaacctgaccggcgattacctctggcgcagcagcgccaagatcggcgcgggcaagttcaggccgctacggccgctgcaaccggcttag

SEQ ID NO: 526379 - DNA, 210 bp, Stenotrophomonas maltophilia
  misc_feature (41)..(41): n is a, c, g, or t
atgacggatggctggccgctgtatgaatcccgcctgaaggnaaagctgcacgtaatcagcaagcgatatacgcagcgaattgagcggcataacctgaatctgaggcagcacctggcacggctgggacggaagtcgctgtcgttctcaaaatcggtggagctgcatgacaaagtcatcgggcattatctgaacataaaacactatcaataa

SEQ ID NO: 526380 - DNA, 639 bp, Stenotrophomonas maltophilia
atggctaggggtaggcgtctcaaatcctatttggattatgaaaatgcgctaggtgacggcataggagtgggctatggccaaagttatcagccctggcttagagctcaggacgttaaatcccgtggaaaccgttcgatagtctttggccttaagacgtttcgaaaccatcatctcctttcttctgtcgaaagtaactttttctatctggctgagtttaatgactcggtgattgatatccgggaacaattcccactctttcctctccggcttacccaacaaatagcaaatcatctacattttcaacatcctatggtgaggggagtaagaggagtacctgtcgaagttctgaatgttatgacaaccgattttttactgaccttgagaactcctgaaggcggacttcgatacaaagctatagcagtaaaacataacgagagcatacctgaacgcgaagcccaaaaacttgaaatagagaggatgttttggcagttgattgatgttgagtttcaaatttatgttggctcggaactcaataacgtcgtcggtaaaaacatttgctgggctacttctgtattaagagatggttctgaattttatgataaatatcctcttgataaaatcctatggaagcttaggtaa

SEQ ID NO: 526381 - DNA, 1203 bp, Stenotrophomonas maltophilia
gtggaaaggtttgatgccgtagtaattggcgccggtgcggcgggtatgttttgtgcggcaatggccggacaagcgggtcgtcgtgtgctgctgctggataacggaaaaaagcctggccgcaagatcctgatgtccggtggcgggcgctgcaatttcactaatctttatgtcgagcctgcggcctatttgagccagaaccgtcatttttgtaaatctgcgctggcgcgctacacgcagtgggatttcatcgaactggtgggtaaacacggtatcgcgtggcatgagaagacgctgggacagctgttctgcgacgactccgcccagcaaatcgtggatatgctggtggccgagtgcgagaaaggcggcgtagtcatgcgcctgcgcactgaagtgctggacgtcgcccgtaacgagcaagggtacacgctgcaactcaacggcgaaaccgtcagcgccgataacctggtgatcgccagcggcggcctctcgatgccggggctgggtgcctcaccgttcggctacaaaatcgccgagcagtttggcctgaaagtattacccacgcgcgccgggctggtgccgttcacgctgcataagccgctgctggaacagcttcagacgctctccggcgtgtctgtgccgtcggtcattacggccgaagacggcacggtgttccgcgaaaacctgctctttacccatcgcggtctctcggggccagcggtattgcagatctccagctactggcagccgggggagtttgtctccgtaaacctggtgccggattgcgatctggacgccttcctcaatgagcaacgcgccgcgcacccgaatcaaagcctgaaaaataccctggcgatgcagctgccgaagcgtctcgtggagtgcttgcaggtgttagggcaaattccggatgttgcgcttaagcagctcaacagccgcgagcaggacacgctggtggagacgctgacgaactggcgcgtgcagccaaacggcaccgaaggctaccgcacggcggaagtgacgctgggcggcgtggatacaaacgaactctcatcccgcacgatggaagcccgcaacgtgccgggtctttatttcattggtgaagtgatggacgtgaccggctggctcggcgggtataacttccagtgggcgtgggccagtgcctgggcatgcgcgcaggcgctggctgatgtccgaggagaataa

SEQ ID NO: 526382 - DNA, 1500 bp, Stenotrophomonas maltophilia
atgctacatttgtttgccggcctggatttacataccgggcttttattattgcttgctctggtttttgtgctgttttacgaagcgatcaatggcttccacgacactgcaaacgcagttgcaacggttatctacactcgcgcaatgcgatcgcagcttgcggtcgttatggcggcggtatttaacttttttggtgtcctcctgggcggactgagcgttgcctatgccattgtgcatatgctgccaacggatctgctgcttaacgtgagttccggtcatggcctggccatggtgttctcaatgctgcttgctgcgattatctggaacctcggtacctggtatttcggcctgccggcatccagctctcacacccttatcggcgcgattatcggtatcggtttaactaacgccctgatgaccggtacatcggttgttgatgcgctgaaccttcctaaagtactgggtattttcggctctctgatcatctcccctatcgtcggtctggtggtagcaggtggattgattttcatcctgcgtcgctactggagcaacacgaagaaacgtgcacgtatccacctgacgccagcagagcgtgagaagaaagacggcaagaaaaagccgccgttctggacgcgtatcgcgctgatcatttccgctatcggcgtcgccttctctcatggcgcgaacgatggtcagaaaggtatcggtctggtgatgctggttctgattggcgtcgcaccggcaggcttcgtggttaacatgaacgcctctggctatgagatcacccgtacccgtgatgcggtaaacaacgttgagacttacttccagcagcatcctgatttgctgaagaaagcgaccggcgtagaccagttgatcccttctcctgactctggcgcactcactgcaccgggcgagttccattgccacccggcaaacgcgattaacgcgctggaacgtgcgaaaggcatgctggccgatatcgaaagctacgacaaactggctgtagaacagcgtggtcagctgcgtcgtatcatgctctgtatctccgacgtgaccgataaagtcgcgaagctgccagaggtcaatgctgacgataagcgtctgctgaagaaactgaaaggcgatatgctcaacaccattgagtacgcgccaatctggatcatcatggcggtcgcgttggcgctgggtatcggtacgatgattggctggcgtcgtgtggcgaccaccatcggtgagaagatcggtaagaaaggcatgacctatgctcagggcatgtccgcgcagatgacggcggcagtgtctatcggtctggcgagctacaccggtatgccagtctccaccacccacgtactctcttcgtccgtggcaggtaccatgattgttgacggcggcggtttgcagcgtaaaaccgtgaccaacattctgatggcctgggtgttcaccctcccggcgtccatcctgctgtctggcggtctgtactggatttcgctgaagctaatttaa

SEQ ID NO: 526383 - DNA, 336 bp, Stenotrophomonas maltophilia
atgattagcaccgtcgcattgttttgggcgttatgcgtggtttgcatagtgaatatggcgcgctacttctcatcgttacgtgcgctgttagtggtacttcgtggttgcgatccgttgctttatcaatatgtggacggtggagggttcttcacctcgcacggacagcccagcaagcagatgcgtctggtggggtatatctactaccagcgctaccgcgatcaccacgatgaagagtttatccgtcgctgcgagcgcctgcgtcgtcagttcattttgaccagcgccctgtgtggtctggttgtggtgagtatgattgcgctgatgatatggcactga

SEQ ID NO: 526384 - DNA, 438 bp, Stenotrophomonas maltophilia
atggcttacaaacacattcttatcgcggtagacctctccccggagagtaaagtgctggttgataaagcagtatccatggcacgtccctacaacgcgaaagtttcgctgattcatgttgatgtgaattactccgacctctacaccggtctgatcgacgtgaatctcggcgatatgcagaaacgcatctccgaagagactcaccacgcgctgagcgagctttctaccaacgcgggctatccaatcactgaaaccttaagcggtagcggcgatctgggccaggtgctggttgatgcgattaagaaatacgatatggacctggtggtatgcggtcaccatcaggacttctggagcaaactgatgtcttccgcacgtcagctgattaacaccgtacacgtggatatgctgattgttccactgcgtgacgaagaagacgagtaa

SEQ ID NO: 526385 - DNA, 795 bp, Stenotrophomonas maltophilia
atgcgatgctggagcattacggaatcaaaggctgattgctacgtgaagatctgcttagtagatgaaacaggcgccggtgacggcgccttatctgttctggcggcccgctgggagctggaacatgatgaagagaacctgatggcgctggtgatgacgccggaacatctggagctgcgcaagcgcgatgagccaaagcttggcgggatttttgtcgattttgtcggcggcgcgatggcgcaccggcgtaagttcggcggcggtcgcggcgaagcggtggccaaggcggttggcattaaagggagctatcttccggacgtggtggacgccacggcggggctggggcgcgatgcgtttgtgctggcctcggtgggctgccgtgtgcggatgctggagcgtaatccggttgtcgccgcgctgctcgacgacgggctgacgcgaggctatgcggacccggaaatcggctcgtggttacaggaacgtttgcaacttattcatgcctccagcctgacggcgctgaccgatatcaccccgcgcccgcaggtggtctatctcgacccgatgttcccgcataagcagaaaagcgcgctggtgaagaaagagatgcgggtgtttcagtcgctggtggggccagatttagatgccgatggcctgctggagccggctcgtcaactggcgacgaagcgggtggtggtgaaacgtcctgactatgcgccgccgctggcggacgttgcgaccactaacgcggtgaccaccaaagggcatcgctttgatatctactcaggtacgccggaataa

SEQ ID NO: 526386 - DNA, 2043 bp, Stenotrophomonas maltophilia
atgaccaatccattactgacgcctttttcgttgccaccgttttctaaaatcctccctgagcatgtggttccagccgttacccagtcgctggaaaactgccgcgcggcggtagagaacgtggtcgcgcagggcgcgccgtacacctgggaaaatctgtgtcagccgctggccgaagtggacgacgtgctggggcgcattttctccccggtgagccacctgaactcggtgaaaaacagcccggagctgcgcgaagcctacgaacagaccctgccgctgctctccgagtacagcacctgggtcggccagcacgaggggctctacaaagcctaccgcgacctgcgcgacggcgaccattatgccgaactgaacacggcgcagaaaaaatcggttgataacgcgctgcgtgatttcgaactgtccgggattggcctgccaaaagaaaaacaggttcgctacggcgaaatcgccgcgcgcctgtccgagctgggcaaccagtacagcaacaacgtcctcgacgccaccatgggctggacgaagctgattaccgatgaatccgaactggccggtatgccggaaagtgcgctggcggcggcaaaagcccaggccgaagcgaaagagcaggaaggcttcctgttaacgctggatatcccaagctatctgccagtgatgacctactgcgacaaccaggccctgcgcgaagagatgtaccgcgcctacagcacccgcgcctccgatcaggggccgaatgccggtaagtgggataacagcccggtgatggcggagatcctcgccctgcgccacgagctggcacagctgctgggcttcgacagctacgcggataaatccctcgccaccaaaatggccgagaacccacagcaggtgctcgacttcctgaccgatctggcgaaacgcgcccgtcctcagggtgaaaaagagttagcccaactgcgcgcctttgcaaaagcggagttcggcgtggacgagcttcagccgtgggatatcgcatactacagcgaaaaacagaaacagcacctctacagcatcagcgacgaacaactgcgtccgtacttcccggaaaacaaagccgtcaacggtctgttcgaggtagtgaagcgcatctacggcattaccgcgaaagagcgtaccgacatcgacgtctggcatccggacgtgcgcttcttcgagctgtatgacgagaacaacgagctgcgcggcagcttctatctcgatctctacgcgcgtgagaacaagcgcggtggggcgtggatggacgactgcgtgggccagatgcgtaaagcggatggtaccctgcaaaaacctgttgcctacctgacctgtaacttcaaccgtccggtgagcggcaaacctgcgctgtttacccacgatgaagtgatcaccctgttccacgagttcggtcacggcctgcaccacatgctgacccgcatcgaaaccgctggcgtcgccggtatcagcggtgtgccatgggatgcggtcgagctgccaagccagtttatggagaactggtgctgggagccggacgcgctggcgtttatctccggtcattacgaaacgggcgaaccgctgccgaaagaactgctggataaaatgctggcggcgaaaaactaccaggcggcgatgtttatcctgcgtcagctggagttcggcctgttcgacttccgcctgcacgccgagttcagcccggagcagggggcgaaaatcctcgaaaccctggctgagattaaaaagcaggttgccgtcattccaggcccgacctggggacgcttcccgcacgcgttcagccatatctttgcaggcgggtacgccgcaggctactacagctacctgtgggccgacgtgctggcggcggatgccttctcgcgcttcgaagaagaggggattttcaaccgcgaaaccggtcagtcgttcctcgacaacatcctgacccgcggcggttcagaagagcctatggagctgttcaaacgcttccgtggccgcgagccgcagctggatgcgatgctggagcattacggaatcaaaggctga

SEQ ID NO: 526387 - DNA, 843 bp, Stenotrophomonas maltophilia
atgctcagttatcgccacagcttccacgctggcaaccacgccgacgtccttaaacacaccgttcagagcctgatcattgaagcgcttaaagagaaagacaagccgtttctctacctggacacccacgcgggggcgggccgttatcagctgagcggcgaacatgccgagcgtaccggtgaatatctggaagggatcgcccgcatctggcagcaggacgacctgcctgccgagctggagccgtacatcggcgtggtgaaccacttcaaccgcaacggccagctgcgctattaccctggctctccgctgattgcccgccagctgctgcgcgagcaggacagcctccagttgaccgagctgcacccaagcgacttcccgctgctgcgcgctgagtttcagaaagataaccgcgcccgcgtggacaaagccgatggctaccagcagctaaaagccaaactgccgccggtttcgcgtcgcggcctggtgctgatcgacccgccgtacgaaatcaaaaccgactatcaggcggtggtggccggtatcaacgaaggttacaaacgctttgcgaccggaacctatgccctgtggtatccggtagtgctacgcgcgcaaattaagcgcatgatcaaggatctggaggcgaccggcatccgcaaaatcctgcagattgagctggcggtgcggcccgacagcgaccagcgcggcatgaccgcgtccggcatgattgtgattaacccgccgtggaagctcgaagcgcagatgaacaacgtgctgccgtggctgcacaaaacgctggtgccagccggtacgggccacgccaccgtaagctggatcgtgccggagtaa

SEQ ID NO: 526388 - DNA, 1353 bp, Stenotrophomonas maltophilia
atgactaagcattatgactacatcgcaatcggcggcggcagcggcggcatcgcctccatcaaccgtgcggccatgtacggccagaagtgtgcgctgattgaagccaaagaactcggcggcacctgcgtaaacgtgggttgtgtaccgaagaaagtgatgtggcatgccgcgcaaatccgtgaagctatccatatgtatggcccggactacggctttgacaccaccatcaaccacttcgactgggataagctgatcgccagccgtaccgcctatatcgaccgtattcacacctcgtacgataacgtgctgggcaagaataacgtcgacgtgatccgcggcttcgcccgtttcgtggatgcgaagacgatcgaagtgaacggcgagacgatcaccgccgatcacatcctgatcgccaccggtggccgtccgagccatccgaacattccgggcgcggaatacggtatcgactccgacgggttcttcgagctgcctgctctgccagagcgcgttgccattgtaggcgcgggttacatcgcggttgagcttgctggcgtgattaacggccttggggcggaagcgcacctgtttgtgcgtaaacacgcgccgctgcgtagctttgatccgctaatcgtcgacacgctggtcgaggtgatgaacgccgaaggcccaaccctgcacaccaacgccgtgccaaaagcggtggttaaaaatgcggacggtagcctgaccctggagctggaagatggccgcagccagaccgttgattgcctgatctgggcgattggtcgtgaaccggccaccgacaacttcaacctggccgcaaccggggtgaaaaccaatgaaaaaggctacatcgtcgttgataagttccagaacaccagcgtaccgggtatttatgccgttggtgataacacaggtgccgtagaactgacgccggttgccgtggccgcggggcgtcgtctttccgagcgtctgtttaacaacaagccggacgaacatctggattacagcaacatcccgaccgtggtcttcagccacccgccaatcggcaccgtcggcttaaccgagccgcaggcgcgcgagcagtacggcgacgatcaggtgaaagtgtataaatcggcgtttaccgcgatgtataccgcggtcacctcgcaccgtcagccgtgccgcatgaagctggtctgtgtgggcccggacgagaagatcgtcggcatccacggcataggctttggcatggacgagatcctgcagggctttgcggtggcgctgaagatgggcgcaacgaaaaaagacttcgataacaccgtggcgatccaccccactgcggcagaagagtttgtaacaatgcgttga

SEQ ID NO: 526389 - DNA, 1650 bp, Stenotrophomonas maltophilia
atgttcaaccagaaactacaggctaccgagaacatcgagttcgagattgcagaagagctgcgctacgagaccgatccctgcgagttgaaactggatgaaatgattgaggcggagccggaacccgaaatgatcgaggggctacctgcctccgatgccctgacgcctgccgatcgttatcttgaactgttcgaacatgtgcagtcgacacggctgtttgcggacagcaaaactttcccagactgcgcgccgaaaatggacccgctggatatcctgatccgctaccgtaaagtgcgtcgtcatcgggattttgacctggcgcgctttgtggagaatcacttctggctgccggaggactacagcaaagagtatgtctctgatcccggcttctccctgaaagaacacattgataacctgtggccggtgctgacgcgcgagccgcaggatcacatcccgtggtcgtcgctgctggcgctgccgcaggcctatattgtgcccggcgggcgattcagcgagacctactactgggattcttatttctccatgctggggctggcagaaagcggtcgtaacgatctgctaaaatgcatggccgataacttcgcctggctgattgagcgctacggacatatcccgaacggcaaccgcacctactacctcagccgctcccagccgccggtttttgccctgatggtggagctgtttgaagaggacggcgtgcgcggggcgaagcgctatcttgagcatctcaagatggagtacgccttctggatggacggggcggaatcgctgctgctcaatcaggcctatcgcagtgcggtgcgcatgccggatggctcattgctcaaccgctactgggacgatcgtgatacgccacgggatgaatcctggattgaggacgttgaaaccgcccgtcattccggtcgcccgccgaacgaggtgtatcgcgacctgcgcgccggggcagcctcaggatgggattactcgtcccgctggctgcgcgatcctgcgcggctggccagtatccgcacgacgcaatttatccccatcgatttgaacgcattcctgttcaaactggagagcgctatcgccaatatctcagcgtcgaaaggggataaagagacggctgaactattccgccagaaagccagcgaccggcgcgcggcggtgaaccgctatctgtgggacgaagagaacggctgttatcgtgattacgactggcgacgcgaagccctggcgctgttctctgcggccagcattgtgccgctgtatgtgggcatggcgacccatgagcaggctgaacggctgtccgatgccgttaaagcccgtctgctcacgccgggcggtattctcgccaccgaatatgaaacaggtgagcagtgggataagccgaacggctgggcaccgctacaatggatggcgatccaggggttcaagcagtacggcaacgactcgctgggggatgagatcgcctggagctggctgcacacggtaaaccattactacaaaacccatcataagctgattgagaagtaccatatcgccagcagcacgccacgcgaaggtggcgggggtgagtatccgttgcaggatggcttcggctggacgaatggggtggtgcggcggttgattgggctgtatggggagccctga

SEQ ID NO: 526390 - DNA, 1338 bp, Stenotrophomonas maltophilia
atgacggcctttacgctgcaattacgcttgcttcagcagcgcgttccccagtatgaaagcgggcaggatgtcagcgaaaaccagctgattgcggcgatgcgcttcgtcacatcccttgaatatctgcgtctgcaacagccccttctgacctacgataccgggagggtgccagacaaggcgagccagctccaggcgcagaaacaggtgcgtgccattgagctgatgataaaaggattgatacagcaggcatggcccgatccggtgcggctgaataatcatcttaagaccttgtttaatgctgaacgtgtgcgtcgctggctgaaaaacggtgaaattaatgatgttctgagcggcatgttatttagtgagctggcccagctgctggtggataagaaagaatttagccgctactacacgtcgctgtttaacgccccggacatgctgacgctgctggtagaaccccgcaaaaccctgcaaaccttcctcgaagatatccgtcaaatccgcaacagcatcaccgtgcagcagccgttgagcggggcgcaaatccagctgctcgacagctattacacgcagatcacccgctccgttcagcgcgcgtttgaggaagggcggacacgcgttaacccggcggcgctgatggcggtggatgaaagcgagctgcatgcattctgggaaaaggcgcaaaaaatagaccgcaccacaggcggcgatctgtttgaagtgcgtgacagcatagagaaaccgactcagcgcgccgcgcgtacgccagagcagcgcgaacagctgatttccggcgtgctgtggggagcggttggcgtgatggttatcgcgattgtcgtgggaggagcctggctggtaaccagcagtaaaccgcagccgactgtggccagcacggcatctcccgcgccggtgcaggagatgcgcgaaacgccttcctcgcgagaaacgctgaagcgcatgggtgtcacctgggatgaaaacaacttccgttcagcgattagccgcaacgatacccgcgtggcgctcctgttcttgcagggtggcatggactggaaaatgtcatggacggaggaggcattgtcggcaggctacgatgacgtgctggaagtgatgttgcgctaccgcctgcaaatgacagagcaaaagccctgccgacgctttattaatacgcttagccatgcgatggcgaacggcgaatcgctgacgtctatgcgtaagcagtacctgaaagcattctgtaccgtcccggcggtagtgaaacgtcagcagcacgacgccgatatggcaacgcgccgcgcgaagacgcagcccgatgccagtacaaaaaaatggtag

SEQ ID NO: 526391 - DNA, 693 bp, Stenotrophomonas maltophilia
gtgactgacatgaatatccttgatttgttcctgaaggcaagccttctggttaaacttatcatgttgattttgattggtttttcaatcgcatcctgggccatcatcatccagagaacgcgtatcctcaatgccgctggccgcgaagccgaagcgtttgaagataagttctggtcgggtatagagctttctcgtctctatcaggaaagccagggacgccgtgataacctttcaggctccgaacaaattttttatagtggtttcaaagagttcgctcgcttacaccgtgctaacaaccatgcgccggaagccgtggtagaaggtgcgtcgcgtgcgatgcgcatttccatgaatcgcgaactggaaaatcttgaaacgcatattcctttcctcggaaccgttggctctatcagcccgtatatcggcctgtttggtacggtgtgggggatcatgcacgcctttatcgccctgggggcggtgaagcaggcaaccttgcagatggtggcaccgggtatcgcagaagcactgatcgcgaccgcaatcggtctgttcgcggcaattccggcggtaatggcgtataaccgtctgaaccagcgcgtgaataaactggaactgaactacgacaactttatggaagagttcaccgcgattctgcatcgtcaggcgtttaccagcaccgagagcaacaaggggtaa

SEQ ID NO: 526392 - DNA, 429 bp, Stenotrophomonas maltophilia
atggccagatcgcgtggacgaggtcgtcgcgagctcaagtccgaaatcaatatcgttccgttactggacgtgctgctggtgctgctgctgatctttatggcgacagcgcccatcatcacccagagcgtggaagtggatctgccggatgcgacagaatcacaggcggtaagcaccaatgacgatcctccggtcatcattgaggtttccggcgtagggcagtacagcgtggtggtagagaaagatcgtatggatcagcttccgcccgagcaggttattgctgaagcgcaacgacgcctggagtcaaatccgaagacggtcttcttaatcggtggtgcgaaagacgtaccatatgatgaaattatcaaagcgctgaacttgctacatagcgcgggcgttaagtcagttggcttaatgactcagcctatttga

SEQ ID NO: 526393 - DNA, 1029 bp, Stenotrophomonas maltophilia
gtgtcaaaggcaaccgaacagaacgacaagcttaagcgagcgataatcgtctccgcagtgctgcacgtaattctttttgcagcgctgatctggagttcgttcgatgagcaccttgatgcatcaggcggcggtgggggctcgtccatcgacgccgtcatggtggatcccggtgcggtagtgcagaactataatcgccagcaacagcagcaggcgagtgcaaaacgtgcggaagaacagcgtgaaaaacaggcgcaacagcaggcggaagagctacgtgaaaagcaggccgccgagcaggagcgtctgaagcagcttgagaaagagcgtttgcaggcacaggaagcggcgaaagagcaggcggagcagcagaaacaggctgaagccgcagcgaagaaagcgcaggaacagcagaagcaggcggaggaggcggcagccaaagccgcagcagacgctaaggcgcaggcagatgctcaggcgaaagtagccgcagaagcagcgaaaaaagccgctgctgacgcgcagaagaaggccgaagcagaagccgcgaagaaagccgctgctgatgcgaagaagaaagcggaagccgaagccgcgaaaaaagccgctgctgacgcacagaagaaagccgaagcagaagccgcgaagaaagccgcccaggaagtgagttccggtaagaatgcaccgaaaacgggcggtggggcgaaaggaaatggacagccgtcaaaagacagcggtacctccggagccaacggtggggcaacaggtgcagatatcagtgcttatgccaaacagatccaggttgcgattcagagccgactctttgatgcaggcctgtatcagggcaagcaatgcgtactgcacatcaatcttgcgccagacggcaggttgaaaagcgtgacgtctgaagggggcgatcctgcgctctgtcaggctgcgctggccgcagccagatcggcgaacattcctaaaccgcctagcgaggctgtttatgaaaggataaaagatgccaaactggactttaagctgtaa

SEQ ID NO: 526394 - DNA, 1293 bp, Stenotrophomonas maltophilia
atgaagcaggcattacgtgtagcagttagttttttaatgctgtgggcagctgtactgcacgcagaagtacgtatcgagatcacccagggggtggactcggcgcgtccgattggtgtcgttccgttccagtgggcaggcccgggcgctgcgcctgaagatattggcggcattgttgcagctgacctgcgtaacagcggtaaatttaaccccttagatcgttctcgtctgcctcagcagccgggtactgcgcaggaagttcaacctgcagcatggtctgcactgggtattgatgccgtggttgtcgggcaggttacccctgcgccagacggcggctataacgtcgcttatcagctggtggataccggcggtgcgccgggtaccgttctggctcaaaacacttataaagtgaacaagcagtggctccgttacgcaggccacacggcaagtgacgaagtgtttgagaagctgaccggtattaaaggtgcgttccgtacccgtatcgcgtacgtggtacagaccaacggcggccagttcccttatgagctgcgcgtctctgactacgatggttacaaccagttcaccgtacaccgttcaccgcagccgctgatgtctccggcatggtctccggacggctcaaagctggcgtatgtgaccttcgaaagcggccgctccgcgctggtcatccagacgctctctaacggtgctgttcgtcaggttgcgtcattcccacgtcacaacggtgcacctgcgttctctccggacggtaccaaactggcgtttgccctgtctaaaaccggtagcctgaacctgtacgtaatggatattggttctggtcagatccgtcaggtcacggatggtcgtagcaataacactgaaccaacctggttcccggacagccagaatctggcctttacgtccgaccaggcgggtcgtccacaagtttataaagtgaatatcaacggcggagcagcgcagcgtattacctgggaaggttctcagaaccaggatgctgacgtcagtgccgatggtaaaacaatggtaatggtcagcactgcgggtggtcagcagcacattgccaaacaagatctggtaacgggaggcgtacaaatactgtcgtcaacgttcctggatgaaacgccaagtctggcacctaacggcaccatggtaatctacagctcttctcaggggatgggatccgtgctgaatctggtttctacagatgggcgtttcaaagcgcgtcttccggcaactgatggacaggtaaaatcacctgcctggtcgccgtatctgtaa

SEQ ID NO: 526395 - DNA, 522 bp, Stenotrophomonas maltophilia
atgcaactgaacaaagtgctgaaggggctgatgatcgctctgcctgttatggcaatcgcagcgtgttcttctaacaagaacgcaagcaatgaccagagcggcgaaggcatgatgggtgccggcaccggtatggacgctaacggcaatggcaatatgtcttctgaagagcaagcgcgtcttcagatgcagcagttacagcagaacaacatcgtttacttcgatctggataaatacgacatccgttctgacttcgctgcgatgctggatgcgcacgcaaacttcctgcgtagcaacccgtcttacaaagtcaccgtagaaggtcacgcggacgaacgtggtactccggagtacaacatctccctgggtgaacgtcgtgcaaacgctgttaaaatgtatttgcagggtaaaggcgtttctgctgaccagatctccatcgtttcttacggtaaagaaaaaccagcagtactgggtcacgacgaagcggcttactccaaaaaccgtcgtgccgtactcgtttactaa

SEQ ID NO: 526396 - DNA, 789 bp, Stenotrophomonas maltophilia
atgagcagtaacttcagacatcatctgatgagtctgtcgttactggttggaatagcggccccctgggccgcttttgctcaggcaccaatcagtagtgtcggctcaggctcggtagaagaccgggtcactcaactcgagcgtatctctaacgctcacagccagcttttaactcaactccagcagcaactttctgacaaccagaacgatatcgattcccttcgtggtcagatccaggagagtcagtatcagcttaatcaggttgtggaacgccagaagcaaatcttgtcgcagatggatagcctgagcagcggcggtgcggctgcacagcccgtagcaggcgatcaaagcggtgcggcgacgcctgcacctgcggcagatgcctccgcgtcgtctggagcgcctgtacaaagcggtgacgcgaatacggactataacgcggccattgccctggtacaggacaaatcgcgccaggacgatgctatcgttgcgtttcagaacttcgttaagaagtaccctgattctacttaccagccaaatgcgaactactggctgggtcagttgaattacaacaagggtaaaaaggatgatgcggcgttttattttgcctctgtggtgaaaaattacccgaaatcaccgaaagcgccggatgcgatgtataaagtcggcgtgatcatgcaggacaaaggcgacactgcaaaagccaaagcggtttatcagcaggtggttgcgaaattcccgggtacagacggcgccaaacaagcgcaaaaacgtttgagttcgatgggttga

SEQ ID NO: 526397 - DNA, 342 bp, Stenotrophomonas maltophilia
atgacaactcttaagcccgtttctctgtcggcgatggaaatcggcagcgtagataacagctccggcggaaacgacattgcttcccagatcacccgtctgaccaaacagataacgaaagtcactcagcaactcaaagaagtcgccatgggtgatgccacagcggaagaaaagcaaaagcagcaagaattgctcgaatctcagctggctatgttgcaggcacagctggcgcaattgcagcgtcagcaggcagaagaggcgatgccaaaacaggaaagcggtcaggccgtggcggaaggcgtcaataaaccctccgcagaacatcagattgatatctatatctga

SEQ ID NO: 526398 - DNA, 942 bp, Stenotrophomonas maltophilia
atgaattattcactacgtcagcttcgtgttttcgtcaccgtcgcgcaggcccacagcttcagtcgggcaggggagatgattggcctcagccagtcggcggtgagccatagcgtgaaagagctggaaactcaaaccggcgtgaaactgctcgaccgcactacgcgcgaagtggtgctcaccgaagcgggacatcagctggcaacgcgtctggaaaggctgctggatgaactgaacagtacgctgagagacgtcggacggcttggacaagagctttccggtaccgtgagagtggcggcgagccagacgatttcggcgcatcttattccccagtgcatcgctgaaagtaatcaccgctatccggatatcgattttgttttgcacgacaggccgcagcagtgggtactggagagtattcgtcagggggatgtggatttcgggattgttattgatcccggagcggtaagcgacctggaatgtgaagtggtactctcggaaccctttttattgctctgccgcgatgatgatcctctggcatcgctgtcgcaggtggcctggcaagccttacagggggcaaacctggtgttacaggattatgcatcaggtagccgcccgcttatagatgccgcactggccgcacagggcgtaaaggcaaccattgtgcaggagattgggcatcctgccacgctcttccccatggtcgaagcggggattgggatcagcgttctgcctgcgctggcgctgccactgccgcagggaagtcgtttaacggtgaagcgtttcctgccctgtattgaacgccagctgatgctggtacgccgtaaaaacaggtctctttccggagcggctcatgcctgctgggatgtggtgcgtatgcaggccaggcgtctgatggaggcccgcacgcgcgatccactttttaacgaaaccaatgatcagatatag

SEQ ID NO: 526399 - DNA, 996 bp, Stenotrophomonas maltophilia
atgaaactttttcgtatccttgatccgtttacgctgaccctgattggtgtcgtcttgctggcctcgttcttcccggcgcggggcggtttcgttccggtcattgaagggctgaccacggcagccattgccctgttgttctttatgcatggcgccaaactctcccgggaagccattattgcaggcggtagccactggcgactgcacctctgggtaatgtgcagcacctttatcctcttccctgttctgggcgtgctgtttgcctggtgggcgccggtgaatgtcgatccggcactctataccggtttcctttatctgtgcattttgccggccaccgtgcagtctgctattgcctttacctcgctggcgggcggcaacgtcgcggcggcggtctgttctgcttcggcttccagcctgctcgggatctttgtttcaccgctgctggtcggtctgctgatgaacatgcatggtgcagaaggtaatctggagcaggtgggtaaaatttgtctgcaactgctactgccgtttgtgctcggacacttatcccgcccctggattggggcgtttgtggcgaaacacaaaaaatggatcgggaaaacggaccaaagctccattctgctggtggtttacacggccttcagcgaagccgtggtgaacggcatctggcacagggtgggcgcaggatcgctgctgtttattgtggtggtaagcattgttctgctgaccattgtgatcgcggttaacgtctttgtggcccgcaaatgcggcttcaataaggccgatgaaatcaccattgtattttgcggatcgaaaaagagcctggccaacgggatcccgatggccaatattctgttcccgacgtcggtcattgggatgatggtactaccgctgatgattttccatcaaatccagctgatggtgtgtgcggtactggcgcggcgttacaaggcacagactgaaaagctggcgcaggaagagacccgcgccgcgaaagtttaa

SEQ ID NO: 526400 - DNA, 216 bp, Stenotrophomonas maltophilia
gtggaaaaagagcagctcgttgagatcgccaatacggagatgccgttcggtaaatataagggccgcaggctgattgatttaccggaagaatatctgctgtggtttgcccgtaaggatgagtttcctgccgggcgtcttggcgagctgatggctatcacattactgatcaaaacagaggggctgacccagctggtgcagcccctgaaacgtccttaa

SEQ ID NO: 526401 - DNA, 1944 bp, Stenotrophomonas maltophilia
atggacgcaccggaagtgccggatgcggaatatgaccgcctgatgcgtgaactgcgcgagctggaagcgcagcacccggagctgattacgcccgattccccaacgcagcgcgtcggcgcggaaccgctgggtgctttcagccaggtgcgccacgaagtgccgatgctgtcgttggataacgtgtttgatgaagagagttttctggctttcaacaagcgcgtgcaggatcgcctgaagagcgtcgacaatcttagctggtgctgcgagctaaaactggatggtctggccgtcagcattctttatgagaacggcgtgatggtacgtgccgcaacgcgcggcgacggcaccaccggggaagacatcaccaccaatgtgcgcaccattcgtgcgatcccgctgaagctgcgtggcgataatattcctgcgcggctggaagtgcgcggggaagttttccttccgcaggcggggtttgagaagatcaatgaagaagcgcgtcgtaccgggggtaaagtgtttgcaaacccgcgtaacgcggcggcaggttcgctgcgccagctcgatccgcgtatcaccgcgaagcgaccgcttactttcttctgctacggcgtcgggatcctggaaggcggtgacctgccggatacccacctgggtcgtttaatgcagttcaaagagtggggtttgccggtaagcaaccgcgtgcagctttgcgactctccagaggcggtgctggcgttctatcacaaggtggaagaagatcgtcccacgctcgggtttgatattgatggcgtagtgatcaaggttaactccctggcattgcaggaacagttgggttttgttgcccgggcgccacgctgggcagtggcctttaagttcccggcgcaggagcagatgaccttcgttcgcgacgtggaatttcaggtaggacgtacgggtgcgattacgcctgtggcgcgtctggagcctgtgcaggtggctggcgtgctggtcagtaacgctacgctgcataacgccgatgaaattgcccgtctggggctgcgaattggtgacaaagtggtgattcgccgcgcgggcgatgtgatcccgcaggtggttaacgtagtggaatcagaacgtcctgccgatacccgtgccatcgagtttcctgcccattgtccggtatgtggttcggacgttgagcgcgtggaaggtgaagcggtaacgcgctgtacgggcgggttaatctgcggcgcgcagcgtaaagagtccctgaagcactttgtctcccgccgggcgatggacgtcgacggaatgggtgacaagatcatcgaccagttagttgagaaagagtatgtccatacgccagcggacctctttaccctgacggcaggtaagctgaccggtcttgatcgtatggggccgaaatctgcccagaacgtggtcaatgcgcttgaggcggccaaaaatactacctttgcccgtttcctttacgcgctcggcattcgtgaagtcggagaggcgacggcggcagggctggcggcgtatttcggcacgctggaggctcttgagaaagccaccatcgacgaactacagaaagtccctgacgttggcatagtggtcgctacccacgtcttcaacttcttcgccgaagagagcaaccgtgaagtgatcggtaaattactggaacagggcattcactggcccgcaccggtagtggttaatgcagaagagatcgacagcccgtttgccggtaaaacggtggtgctgaccggcagtctgagccagctctcgcgtgatgacgcgaaagcgcgcctggtggcgcttggggcaaaagtggcgggaagcgtgtcaaagaaaaccgacctggtgatcgccggggaagcggccggttcgaagctggcaaaagcgcaggagctcggcatcgaggtgatcgatgaagcggaaatgatgcgccttttaggagagtga

SEQ ID NO: 526402 - DNA, 402 bp, Stenotrophomonas maltophilia
atgaatgtggctgctcatcatggcacccatctgaacggtgacgtgctgcttaacagcatccaacaggcaggcttcaagttcggcgacatgaatattttccatcgccacctgagtcctgacggcagcggtccggcgctgttcagcctggccaatatggtcaatccaggcacgtttgacccggaaatgaccggtgatttcgtcacgcctggggttacgatctttatgcaggtgccgtcctacggtgacgagctgcaaaactttaagctgatgctacagtccgctcagcacatcgccgacgaagtgggcggtgtggtgctcgacgatcagcgtcgtatgatgacgccgcagaaactgcgcgaatatcaggaccgcatccgcgaagttaaggaagctaacgcgtaa

SEQ ID NO: 526403 - DNA, 321 bp, Stenotrophomonas maltophilia
atgacgttgaagacgacatcgacggtcttgacgacgacggcgtgggtgaagttcgtgttcatcgggtcaatactgcgcccggcgcagcgcatggagagcatgaagctccccgcgctccgcagcaccagtatcaaccaccgtatgcctctgcccagccgcgccagccagcgccgccgccagtggaagaacctgttcgtcatccgtcgcagcagcctgtgcaacagcagcccgttgcgccacagcctgtacagcagcaacctgtgcaacagcctgcacagccagtgcatcagccacagccagtgcaacagccgcagccggtag

SEQ ID NO: 526404 - DNA, 762 bp, Stenotrophomonas maltophilia
atggtttcaacatcttcttctgccccacgtagcggggtctggtacttttctcagggctggaaactggtctccctgccgggcattcgacgcttcgttgttttgccgttactgatcaacattattctgatggggggcgcgttctggtggctgttcaccagactggaaagctggatcccttccctgatgagctatgtgccggactggttacagtggttggactacctgctctggccgattgcggttatctccgtgctgctggttttcggctatttcttttcgacgatagctaactggatagccgcgccgttcaacggtctgctggccgaacagctggaagcgcgcctgaccggtgcggcgccgcctgacacgggcgtactggggatcgtgaaagatgtcccccgcatcatgaagcgcgaatggcagaagtttgcgtggtacctgccgcgggcgattgtgctgctcatcctttattttgtacccgggatcggccagacggtcgcacccgtgctgtggtttctgttcagcgcctggatgcttgctatccagtactgtgattatccgttcgataaccacaaagtgccgtttaaagagatgcgcactgccctgcgcactcagaaggttgccaatatgcagtttggtgcccttaccagcctgttcaccatgatccctttcctgaatctgttcatcatgcccgttgccgtttgcggcgcgacggcgatgtgggtggactgctaccgtgctaagcacgcgttatggaagtaa

SEQ ID NO: 526405 - DNA, 972 bp, Stenotrophomonas maltophilia
atgagtaagatttatgaagacaactcgctgactatcggtcatacgcccctggttcgactgaaccgtatcggtaatggacgcattctggcgaaggtcgaatctcgtaacccaagcttcagcgttaaatgccgtatcggtgcgaatatgatttgggatgctgaaaagcgtggcgtgctgaaacctggcgttgagctggttgaacccaccagcggcaataccggtatcgccctggcctatgttgcggcggcgcgcggctataagctgacgctgactatgcctgaaaccatgagtattgagcgccgtaagctgctgaaagcgttgggtgcgaatctggtcctcacggaaggcgcgaaaggcatgaagggcgcgattcagaaggccgaagaaatcgtcgccagcgatcctgcaaagtatctgctgctccagcagttcagcaacccggctaacccggaaattcatgagaaaaccaccggcccggaaatctgggaagataccgacggtcaggttgatgtgttcatctccggcgtaggcaccgggggtacgctgaccggggtgtctcgctatattaaaggcacgaaaggtaaaaaagatctgattaccgttgccgttgagccaaccgactcgccggttatcgctcaggcgctggcaggcgaagagatcaaaccaggtccgcacaaaatccagggtatcggcgctggctttattccaggcaacctcgatctgaagctgatcgataaagtggtcgccatcaccaatgaagaagccatctccacggcgcgtcgcctgatggacgaggagggcattctggcgggtatctcttccggtgcggcggttgctgcagctctcaaactgctggaagacgaaacctttaccaacaagaatattgtggttatcctaccgtcttcgggtgagcgttacttaagcacagcactgtttgccgatctgttcacagagaaagaactgcaacagtga

SEQ ID NO: 526406 - DNA, 753 bp, Stenotrophomonas maltophilia; identical to SEQ ID NO: 95287

SEQ ID NO: 526407 - DNA, 870 bp, Stenotrophomonas maltophilia
atggccaattgcgcgctcattcttaaaatatccctggcaatgctggcgtttgctgcaaactctattctgtgccgtctggccctgcagggaggccacattgatcccctttcattcagcagcctcaggctggccagtggtgcactcgtcctgtcacctttcttgttttatcacgcaaaaactacattatcgctgtggcgtccgctgagcggattttacctcatggtgtacgcagtgctcttctctgtcgcctatatccatctcgataccggggcaggtgcgctgttactttttggtgccgtacagtttgcgatggtgatccacggattatttaaaggggaatcactctccgttatgcgggcttgcggtttggttattgctctggcaggaattgctgccctgctgttacccggggcgaaggcaccgccgctttacagtgcacttatgatgatcgttgccggattagcctgggccgcctattccgtcagggggagggcgggccaggcggccggggcttcaacggcggcaaattttgtactcgccacgccgatggctctcgctctttcgttgctgtttatgaagcagggtcactatgatgctgcgggcattgctttgtcattgctgtccggtgccgccgcctcagccggtgcatatgtattgtggtatacccttttaccctctctcggctctatcaccgccagtacccttcagctcagcgttccctgtctggcaatgctagggggtgtggtattcctggatgaatcactgacggtcagaacgatattttctgccctggcggtgctgactggcattgtgatggtgacacgcgagaaatccccccgtcagtcgatgacaaaggcgagagaaccttaa

SEQ ID NO: 526408 - DNA, 1224 bp, Stenotrophomonas maltophilia; identical to SEQ ID NO: 151423

SEQ ID NO: 526409 - DNA, 774 bp, Stenotrophomonas maltophilia; identical to SEQ ID NO: 195090

SEQ ID NO: 526410 - DNA, 702 bp, Stenotrophomonas maltophilia; identical to SEQ ID NO: 195089

SEQ ID NO: 526411 - DNA, 1107 bp, Stenotrophomonas maltophilia; identical to SEQ ID NO: 439131

SEQ ID NO: 526412 - DNA, 330 bp, Stenotrophomonas maltophilia; identical to SEQ ID NO: 219404

SEQ ID NO: 526413 - DNA, 339 bp, Stenotrophomonas maltophilia; identical to SEQ ID NO: 219403

SEQ ID NO: 526414 - DNA, 582 bp, Stenotrophomonas maltophilia; identical to SEQ ID NO: 104060

SEQ ID NO: 526415 - DNA, 558 bp, Stenotrophomonas maltophilia; identical to SEQ ID NO: 120952

SEQ ID NO: 526416 - DNA, 585 bp, Stenotrophomonas maltophilia; identical to SEQ ID NO: 309693

SEQ ID NO: 526417 - DNA, 2985 bp, Stenotrophomonas maltophilia
atgccacggcgacagatactgagcagcgaagagcaggaacgcttactggttataccagatgatgaaattattctgacccgaatgtgttttctgaacgaaccggatattgcgctcattaataagcaccgaaggccagcgaatcgcctgggctttgctgtattactctgttatctgcgtggacctggatttattccggacaaaagcagtgctcctcacaatggcgttgtatccagggttgcttcccgactgaaacttcagcctgatttatggccggaatatgcatccagagagcaaacccgctgggaacatctgaccgaactttatcgctacctggaactatccccgttcagccggtcaatgcaaaaagactgtatccgtcatctgcacccctatgccatgcgaactgacaaaggatttatgctggcggaagaaatgctcagctggctacataacaataatgttattttcccttctgttgaagtgatcgaacggacgcttgccgaagtcgtcacgctcgctaacagatcggtattttcgacacttaccgcgcaactggaaaagcagcataaatcagcactcgacagcctgctcatatcagagggtgaacaaccttcccgtctggcatggctgctacagcctccgggtaaaataaacggtaaaaatgtgctgcaacatatcgaccggcttaattccatcgctgcgctggggttgcctgatggtattgcactttccgttcaccagaacaggttgcttaaactggcgcgtgagggccggaaaatgagcagcagggacctggcaaaattcaccgatgtcagacgttacgctacgctggtttgtataataacagaggccagggccaccctgactgacgaagtgattgatctgcacgagcgtatcctgggtagtctgttcagcagggcaaaacgcacgcaggccgaacggctccagcaaacgagaaagcttattcagagcaagctgaagcagtacgttaccgtcgggcaggcgttacttaacgccagagaatccggggaagatccctggactgcaatagaagatgtccttccctggcaggaattcatcaacagcgtggaagaaacgcggtttctttcccgtaagggcaatttcgacgcgcttcatctgatcaccgaaaaatacagtacgttgcgtaaatatgccccgcgtatgctgtcagcattgcagttcatggcgacacctgcggcgcaggcgctcagcgatgcgctggacaccataacggaaatgtaccgtaaacaacttcgtaaagtgccgccatcagcgccaacagggtttatccctgaaagctggcgaaaactggtgctcacgccttcaggcatcgaccgcaagtactacgagttttgcgtactgaatgaactcaagggtgcattacgttccggtgatatctgggtaaaaggatcgcgccgctacaaaaattttgatgattatctcatcccgactgctgagtttgagaaatcccgacataatgaccagttacagttggccgttcagaccgatagccaggcataccttcaggcccgtatgactcttcttgcatctcggctggaagaagttaacgcgatggcgcttgccggtgatttgcccgatgtagatatctcagataaaggcgtaaaaatcactccactggagaacagcgttccttcaggtgtttcgccctttgcagatttggtctatggcatgcttccccatccgaaaattacggagatactggaagaagttgatagctggacgggatttacgcgtcacttcgcgcacctcaaaaataataacgtcagaccaaaagacggaagactgttgctgaccaccattctggctgacggcatcaaccttgggctgacaaaaatggcggaatcctgccctggggccacaagatcgtcactcgaaggtattcaggcatggtacatcagggatgaaacttattcagcggcactggccgagctggtcaacgcacagaaagagcggcctctggccgcattctggggcgacgggacaacatcgtcgtcagacgggcagaactttcgggtaggcagtcacggacgttatgccggtcaggtcaatcttaaatatggtcaggagccgggcgtgcagatttatacgcatatctcagaccaatacagcccgttctacgccaaagtgatcagccgggtgcgcgactcaacccacgtgcttgatggcctgctgtaccatgaaagcgatctggaaattaccgagcattacaccgataccgcaggcttcactgaacatgttttcgccctgatgcacctgctgggattcgcttttgcgccaaggatccgtgatcttcatgacaagcggctgtttattcatggaaaggccgagcgctatccggggcttcagtctgtcatatcaacaacctgcctgaatatcaaagacattgagtcgcactgggatgaggtattgcgcctggcaacctcgattaagcaggggacagtcaccgcatcactgatgatgaaaaagttagccagttacccaaaacagaatggacttgccaaagcgctgagagagattggccgcatcgaacggacactatttatgctggactggttccgtgatcccggtctgcgccgacgcgtgcaggcggggctgaataagggtgaggcccgtaatgcccttgcgcgagcggtctttttgcaccgtctgggtgaaataagggatcgtgggctggagaatcagagttatcgcgccagcgggctgacattactgacagcagcgatcacgttgtggaacacggtatatatagaaagagctattgagtcactaaaacgaaagggtatcccgataaatgagcaactggtctctcatctttctcccctgggctgggaacatatcaatctgagtggagattacgtctggcgtaataatcttaagctgggatccggaaaataccgctcattacgtacagtcgataccgctttgtacaaaaaacagtcttag

SEQ ID NO: 526418 - DNA, 207 bp, Stenotrophomonas maltophilia
atgcacctgattggcttctctgtcgccattgccctgttcgcactttgctgctggggcgtatttcgtatggcgccatggctggttcgcttgctgggacaaacgggcatcaacgtgattacccgtatcatgggtctgttgttaatggcgttaggcatcgaatttatcgttaccggtataaaaagtatattccccggattagtacactga

SEQ ID NO: 526419 - DNA, 348 bp, Stenotrophomonas maltophilia
  misc_feature (315)..(324): n is a, c, g, or t
atgtccatcatcacaaaaaaaagtctggtagcggcggggattttaactgcgctaatcgcgggcaacgctgcaatggctgcggacgttcctgctggtgttcagctggctgagaagcaaacgctggtacgtaataacggtgcggaagtgcagtctcttgatccgcacaaaattgaaggtgttccagagtctaacgttaaccgcgatctgtttgaaggtctgctggtgactgacgtagacggccacccggctccgggcgtggcggaaaaatgggacaacaaagattttaaagtctggaccttccatctgcgtaaagannnnnnnnnngtatggccatatcgccaatattga

SEQ ID NO: 526420 - DNA, 1119 bp, Stenotrophomonas maltophilia
gtgacgttgagcgaacctgttccgtacttctataagttgctggttcacccgtccgtttctccggtaccaaaatccgcggtagaaaaatttggtgaaaaatggacgcagcctgcgaaaatcgtgaccaacggtgcatataagctgaaggactgggtcgttaacgagcgtatggtgctggagcgcaacccgcagtattgggataatgccaagacggttatcaatcaggtcacctacctgccaatctcttctgaggtaacggacgtaaaccgctaccgcagcggcgaaatcgacatgacctataacaacatgccgattgaactgttccagaagctgaaaaaagagatcccgaaagaagttcacgtcgatccgtatctgtgcacctactattatgaaattaacaaccagaaagcaccgttcaccgacgtacgtgttcgtaccgcactgaagctggctctggatcgcgacattatcgtgaataaagtgaagaatcagggcgacctgccggcttacagctacaccccgccttacaccgacggtatgaagcttgttgaacctgaatggttcaaatggtcccaggaaaaacgtaacgaagaagcgaaaaagctgctggctgaagcgggctataccgccgacaagccgctgacgtttagtctgctgtacaacacctccgatctgcataaaaaactggctattgccgtcgcgtcaatctggaagaaaaatctcggcgtgaacgtgaagctggaaaatcaggaatggaaaaccttcctcgatacgcgccatcagggaacctttgacgtggcacgtgcaggatggtgtgcagactataacgaaccgacctcattcctgaacaccatgctcagcgacagttcgaacaataccgcacactataagagcccggcgtttgataagctgattggcgataccctgaaagtggcagatgacgcccagcgcgccgatctgtacgcgaaatcagaacaacagctcgataaagactctgcgatcgttccggtttactactacgttaacgcccgcctggtgaaaccatgggtagggggttataccggtaaagacccgttggataatatttccgttaagaatctttatattatcaagcattaa

SEQ ID NO: 526421 - DNA, 921 bp, Stenotrophomonas maltophilia
atgttgaaatttatcctgcgtcgctgtcttgaagcgattccaacgttatttattctaattacaatttccttctttatgatgcgtcttgcgccgggcagtccttttaccggtgaacgcacgcttccgccagaagttatggccaacatcgaagcgaaataccatttaaacgatcctatcaccacgcagtacttcaactatctgaagcaacttgcacacggtgattttggtccgtcattcaaatataaagactattccgttaacgagctggtggcgtccagcttcccggtatcggctaaattaggggctgctgcatttatcctggccgttgttctcggtgtcactgcgggcgttatcgccgcactaaaacaaaatacccgatgggattacgccgtaatgggggtcgcaatgaccggggtggttatccccagcttcgttgtcgcgccgttgctggtcatgatattcgcgataacccttaaatggctgcccgggggcggctggaatggcggggcgctgaagttcatgatattgccgatggtggcattatctctggcctacattgccagtatcgcccgtattacgcgtggttcaatgattgaagtcctgcattcgaactttatccgtaccgcccgagcgaaagggttgccgatgcgccggattattttccgtcacgctctcaagcctgcactgttaccggtgctctcctatatgggtcctgctttcgtcggcattattacgggttcaatggtgattgaaaccatttatggcctgccaggcatcgggcagttgtttgttaacggggcgcttaaccgtgactattcgctggtgctgagcctgacgatcctcgtgggcgcgctgaccatactctttaatgccgttgtcgatgtgctgtatgccgttatcgatccgaaaatccgttactaa

SEQ ID NO: 526422 - DNA, 909 bp, Stenotrophomonas maltophilia
atgatgttgagtaagaaaaacagcgaggcgctggaaaacttcagtgaaaagctggaggtcgaaggtcgtagcctttggcaggacgcccgccgtcgttttatgcataaccgtgccgccgttgccagcctggtcgtgctggtgcttatcgcgcttttcgtaacccttgcgccaatgctctctcagttcacctatttcgatacggactggggcatgatgtccagcgcgccggatatggaatccgggcactatttcggtaccgactcctccgggcgtgatttgctggtgcgtgtggcgattggcggccgtatctccctgatggttggcatcgcagcggcgctggtggcggtaattgtcggcacgctttacggttcgctttccggttacctcggcgggaaagtggactccgtgatgatgcgtatgcttgaaatcctgaactccttcccgttcatgttcttcgtcattctgctggtgaccttctttggtcaaaatatcctgctgatcttcgtggcgatcgggatggtgtcctggctggatatggcgcgtattgtgcgcggccagacgctgagccttaaacgtaaggagtttatcgaagccgcacaggttggtggcgtttctaccgccaatattgtggtgcgtcatatcgttcctaacgtgctgggcgtggtggtggtatacgcctccctgctggtgccaagtatgatcttgtttgaatctttcctgagctttctgggattaggtacgcaagagccgttgagtagctggggcgctctgttaagtgacggcgcaaactccatggaagtgtcaccgtggttactgctgtatccggcgggcttcctggtcgtcaccctgttctgtttcaactttatcggcgatggcctgcgtgatgccctcgacccgaaagaccgttaa

SEQ ID NO: 526423 - DNA, 1014 bp, Stenotrophomonas maltophilia
atgaccattattgaaacggcaaccgcgccacaggcgcaacagcggaccagcgcactgctggacgttaaagacctccgcgtgacgtttaaaacccccgacggtgatgtgactgccgttaacgatctcaacttcgacctgcgtgccggtgaaacgctgggcattgtgggcgaatccggttccggtaaatcccagaccgcattcgcgctgatgggcctgctggcatcaaacggcgtgatagggggttcggcgacgtttaacgggaaagagatcctgaatttgccggaacatgagctgaacaagctgcgcgccgagcagatttcaatgattttccaggatccgatgacctccctgaacccctatatgcgggtgggtgaacagctgatggaagtgctgatgctccacaaggggctgggcaaagccgaagcgtttgaagagtccgtcaaaatgctggatgcggtgaaaatgcctgaagcacgcaagcgcatgcgcatgtatccgcacgagttctccggcggtatgcgtcagcgagtcatgatcgcgatggcattgctttgccggccaaaactgctgatcgctgatgaaccaaccaccgcccttgacgtgaccgtccaggcgcagatcatgacgttgctgaacgagctgaagcgtgagttcaacaccgccatcatcatgatcacccacgatttaggcgtcgttgccgggatctgcgacaaagtgttagtcatgtatgcaggccgcacgatggaatacggtaatgcccgcgatgtgttctaccagccagcccacccgtactctatcgggctgctgaatgccgtaccgcgcctcgatgcggaaggggagtcgctgctgactatcccgggcaacccgccaaacctgctgcgtttgccaaaaggctgcccgttccagccacgctgtccgcatgcgatggaaatctgtaacagcgcaccgccgctggaagcgtttgccccaggccgtctacgcgcctgctttaagccgctggaggagctggtatga

SEQ ID NO: 526424 - DNA, 1005 bp, Stenotrophomonas maltophilia
atgaacgcaatcgacgaaaaaagaaatgtgctgctcgaaatcgctgacctgaaggtccatttcgatatcaaagacggtaaacagtggttctggcagcctgccaaaaccctgaaagcggtggatggcgtcacgctacgcctgtacgaaggggagaccctgggcgtggtgggcgaatccggctgcggcaagtcgacatttgcgcgtgcgatcatcggcctggtgaaagccaccgacgggaaagtggcctggcttggcaaagatctgctggggatgaagccggatgaatggcgcaatgtgcgcagtgatatccagatgattttccaggatcctctggcgtccctgaacccgcgtatgaccattggcgaaatcattgccgagccgctgcgcacctatcatccgaagatgccgcgccaggaagttcgcgatcgggtgaaagcgatgatgctgaaggtgggtctgttgcctaacctcatcaaccgctaccctcacgagttttccggcggtcagtgccagcgtatcggtatcgcacgcgcgttgatccttgaaccgaaactgattatctgtgatgagccggtttcggcgctggacgtttccatccaggcccaggtggttaacctgctacagaaactgcaacgggaaatggggctgtcgctgatcttcatcgcccacgatctggcggtggtaaaacacatttcagaccgtgtgctggtcatgtatctgggccacgccgtggaactgggcacgtatgatgaggtgtaccataatccgctgcacccttataccaaagcgctgatgtctgcggttcccgttccggatcccgatctggaaaaaaataaaaccattcagcttctggaaggtgaactgccttcgccaatcaacccgccttcaggctgcgtattccgtacgcgatgcccaatagccgggccggaatgtgcaaaaacacggccggttctggagggcagtttccgacatgcggtttcctgcctgaaagtagacccgttataa

SEQ ID NO: 526425 - DNA, 837 bp, Stenotrophomonas maltophilia
gtgtcgcgattattcacgtcggcccgtcagcggctttatcaccttttatttgatccagaaacggtttccggtcgccgtttcgagggtctgtgtggcttatttgcgctgattagcgtcattattatctttatcgaatccggtgccggaacgcagtaccacatgacgtatgaggagtggcacgtttttgtctggctggaattgatcgtcacgctggtgtttaccgcagagtatgtgctgagggtcattagctggccaaatccggcgaaatacgttttcagcttctggggatttattgatttagccactatcctgccgctgtatgtcatgtggctgtggcctgagatcagcctgaattatgtgtttgcctggcgcgcaatgcgggcgattcgtgtgttacgaattctgaagctgctgcgctttatgccgtcgctgagggttttttgggtcgccattgtcagcgcccgccaccagcttattctcttctattcgtttattgctatcgtgatgatcgtttttggctccctgatgtatttaatcgaagggccaaaatacgggtttaccacgcttaatgcgtcggtttactgggctatcgtcacggtgaccaccgtgggctatggcgacattaccccgcatacgccgctcggacgtattgtggcatcgattcttatcctgatcggttattcggtaatagcgataccgacggggctaattaccacccatatgagcagcgccttccagaacagcaagcagcaacgcaaatgtccgaattgtcagcagggaaatcatgaacccggggcgcggttttgtcaccgctgtggaaatgctttgccggattaa

SEQ ID NO: 526426 - DNA, 330 bp, Stenotrophomonas maltophilia
atggaaatggatctgaacaatcgcctgaccgaagacgaaacgctcgaacaggcctacgatatttttctcgagctggcggtcgataatctcgaccctgctgacgtcattcttttcaacctgcaatttgaagagcgtggcggtgctgagctgttcgatccgtctgaagactgggccgaacacgtcgattttgatctcaacccggacttcttcgctgaggtggtaattggcctggcagatgaagacggcggagaaattaacgacatctttgcccgcgtcctgctgtgccgcgagaaagaccataagctgtgccatattctctggcgcgaataa

SEQ ID NO: 526427 - DNA, 1461 bp, Stenotrophomonas maltophilia
atgacaaccttctacaccgtggtgagttggctggtcattttaggatactggctgttaattgccggggtgacgttgcgcattctgatgaaacgcagagcggtgccttccgccatggcctggcttctgattatctacattctgccgctggtgggcatcatcgcctatctctctttcggtgaacttcatctgggtaaacgccgggccgaacgcgcccgtgccatgtggccctccacggcaaaatggcttgccgaccttaaagcctgcaagcatatcttcgccgaagagaacagcagcgtggccgcatctttgttcaagctgtgcgaacgccgccagggcattgctggggtaaaaggcaatcagctgcaactgatgacctcttccgatgacgtgatgcaggcgctgatccgtgatatccagctcgcccggcataatatcgagatggtgttttatatctggcagccgggcggcatggcggaccaggtcgccgaatcgctgatggccgctgcacgtcgcggtatccactgccgcctgatgctggactccgccggcagcgtggcctttttccgtagcccgtgggcaggcatgatgcgcaacgccggtatcgaggtggtcgaggcgctgaaagtgaatcttatgcgcgtctttctgcgccgcatggatcttcgtcagcaccggaaaatggtcctgatcgataactatatcgcctacaccggcagcatgaacatggtcgacccccgcttctttaaacaggattccggcgtggggcaatggatcgatttgatggctcgcatggaaggcccggtggcaacctctatgggcatcgtctattcgtgcgactgggaaattgaaaccggtaaacgcattcttcccccgccgccggatggcaatatcatgccgtttgaggaagccagcgggcacactatccacactatcgcctccggtcctggcttcccggaagatctgatccatcaggcactgcttaccgccgcgtactcagcgcgggaatatctgatcatgaccacgccctatttcgtccccagcgacgaccttctgcacgccatctgtacagcggcacagcgcggagtggatgtgagcattattatgccgcgcaagaacgattcgctgctggtcgggtgggcaagtcgcgcgttctttagtgagctgctggccgcgggcgttaaaatctatcagttcgaaggcggtctgttacacaccaagagcgtgctggtagacggagagctgagcctggtgggtaccgtcaacctcgatatgcgcagtctgtggctgaattttgaaataacgctggtcattgatgacgccggtttcggcggcgatctggcggcggttcaggatgattatatctcccgctcacgcctgctggacgccagactgtgggcgaaacgtccgctgtggcagcgaattgccgaacgactgttttacttctttagtccgttgctgtaa

SEQ ID NO: 526428 - DNA, 174 bp, Stenotrophomonas maltophilia
atgaagcgcagtagaactgaagtagggcgctggcgcatgttgcgacaggtgagtcgtcgtaaggctcgttggctggaagcacaatcccgccgcaatatgcgtatccacgccatcagaaaatgtggcctgaacagacaccgtaacgcgctgctgttcgcggtccaggatatctga

SEQ ID NO: 526429 - DNA, 411 bp, Stenotrophomonas maltophilia
atgaacgtaaaagtgatggcagcactcttcgggattgcagtattaagcggttgtgccagtagcaaaacctcacccgaacggcacgcgttttatttcgtgtcgcatcagtccagctttactggcggcaattacacctccagcgtgcagaaaaattatcacctgaacgtagcgcagttccgcgagctttatgcccggggcaaagctgaccgtgcggaagggcggactcaggctgaagccagtgaatacgcgcaaagcattcgcgatcagttgaaagaaaatgcgaagtcgcaggaattgtacgcaggcaacgcgaaggataaatggtcttcggacatggacagtaaagacgccatattatttggtaacgaactggccgcgacttatcttgatggctataacggcgtacaatag

SEQ ID NO: 526430 - DNA, 636 bp, Stenotrophomonas maltophilia; identical to SEQ ID NO: 153114

SEQ ID NO: 526431 - DNA, 297 bp, Stenotrophomonas maltophilia
gtgctttatgtgatttacgctgaagatgtacctgattctctggaaaaacgtctttccgttcgccctgcccatctggcgcgtttacagctgctacaggatgaaggtcggttgctgaccgcaggcccgatgcctgccgttgacagcaacgatccgggagcagcgggttttaccggctccacggtgattgccgagtttgaatctctggaagccgcgcaggcctgggcagaagcagacccgtacgtcgcagccggcgtgtacgagaaagtcacggttcgcccgtataaaaaagtgttctga

SEQ ID NO: 526432 - DNA, 738 bp, Stenotrophomonas maltophilia
atgattatgacttcgatgacccttgatttacctcgccgctttccatggccgacgctgctttccgtcgttattcacggtgctgtcgtggcgggtctgctctatacctcggttcatcaggttattgaaatgccagcgccagcgcagccaatttctgtgaccatggtatcgcccgcggatcttgaaccgccgcaggttgcgccgccgccgccacagcccgttgttgaacccgagccggaacccgagccgattcctgaaccgccaaaagaagcgccggtggtgatccataagccagagccgaaacctaagccgaagccaaaacccaagccggtcaaaaaggtggaagagcgtccgaaacgcgaagtgcgtccggttgagccacgcaccacgcagccggttgaaaatgccgccccgtcacgtccgctgatgagtaacaccacgaccgcgacaaaaccgacggtaacggcgccagcgggcccgcgcgcgctgagccgtaaccagccgcagtatccggcacgtgctcaggcgttacgtattgaagggcgtgtacgggtaaaattcgacgttacggctgatggacgtgtggataacgtggaaatcctgtccgcacagccggcgaatatgtttgaacgcgaagttaaatcggccatgcgcaggtggcgttatgaagccggtaaacccggcaatgggttgattgtaaatattgtcttccgcctgaacggcggggcacagatggaataa

SEQ ID NO: 526433 - DNA, 396 bp, Stenotrophomonas maltophilia
atgacaacaaatgacgccccacagggcgaactggttttacgcacactggcaatgcctgcggatacgaatgccaatggcgatatttttggcggctggttaatgtcgcagatggatatgggcggtgcaatcctggcaaaagagattgcacacgggcgcgtggtaaccgtccgggtcgatggcatgaccttcctgcgccctgtcgcggtgggggacgtggtgtgctgttacgcacgctgcgtaaaacgcggcaatacgtctatctccattaacattgaagtatgggtgaaaaaagtctcttctgaaccgattggtcagcgctataaggcgacggaggccctgttcatctacgtggcagtggatagcgacggtaagccccgccagctcccacggagctga

SEQ ID NO: 526434 - DNA, 369 bp, Stenotrophomonas maltophilia
atgattcagtctgaaagtaaagacaccggtaatccgttgtcgattatccccaaatataccgtcaacaccatgctggactgggaggttaacagcaagctttcagccaacgtaagctggacgatgtacggccgccagaagcccagagaaaacgctgaaatccgcaaagaggaaaatgcgatgtccaacagagagatcggcgcgtattccatcgtgggtatcggcagtaactatcagctgaccaaaaacctgcgcctgaatgccggcatcagcaacctctttgacaagcagatttaccgtgaaaatgacggtgcatctacctataacgaaccgggccgcgcctattacgctggcgtaaccatgtccttctga

SEQ ID NO: 526435 - DNA, 1362 bp, Stenotrophomonas maltophilia
atgtttaaaccggaactcctttccccggcgggaacgctgcaaaatatgcgttacgctttcgcctatggtgccgacgccgtctacgcgggccagccgcgctattcgctgcgcgtgcgtaacaacgaattcaaccacgagaatcttcagctcggcatcaacgaagcgcatgccctgggcaaaaaattctacgtggtggtgaacatcgcgccgcacaacgccaagctgaaaacattcattcgtgacctgaagccggtcgtggagatggggccggacgcgctgatcatgtcagacccgggtttaatcatgctggttcgggagaacttcccggagatggacattcacctctcggtgcaggctaacgccgtcaactgggcaacggtgaaattctggaaacagatggggctgacccgcgtcattctgtctcgcgagctgtctctcgaagagatcgaagagatccgcacccaggtgccggatatggagatcgaaatcttcgttcacggcgcgctgtgcatggcctactccggccgctgcctgctctctggctatatcaacaagcgtgacccgaaccagggcacctgcaccaacgcctgccgctgggaatataacgttcaggaaggcaaagaggatgacatcggtaacatcgtgcataaacacgagccgatcccggtcaccaacgttgagccaacgctgggtatcggcgcgcctaccgacagcgtgtttatgatcgaagaagccaaacgtccgggtgagtacatgaccgccttcgaagacgagcacggcacctacatcatgaactcgaaggatctgcgcgccatcgcgcacgtggagcgtttaacccagatgggcgtgcactccctgaaaatcgaaggccgcaccaagtcctactactactgcgctcgtaccgcgcaggtgtatcgcaaagccatcgacgatgccgccgccggtaaaccgttcgacaccagcctgctggaaacgctggaaggtctggcgcatcgcggttataccgagggtttcctgcgtcgacatacccacgacgactaccagaactacgagcatggctattcgatttccgaacgccagcagtttgtaggcgacttcaccggcgagcgtaaaggcccgctggccgccgtcgccgtaaaaaacaaattcactaaaggcgacagcctggagctgatgacaccgcagggcaacatgaacttccgcctggagcatctggaaaacaaaaaaggtgaggcgattgaggtcgcacctggcgacggccatgtggtctggctgccggttcctgaagaagtagagctggagtttgcgctgctgatgcgcaattttgaaggtgaaaatacccgaaatccgcacggcaaatag

SEQ ID NO: 526436 - DNA, 966 bp, Stenotrophomonas maltophilia
gtgacattcacaggacaactttcaaaggatcttccagattacgaacttgcacgcagtcttggtcttgcctctggcggcgatataaatttcacagcacttgcaggtcaactggactgcagcagaaattttagccaggccgggattatctactcagacggtacacgtcagtggctagtacggccatcaagaaggattgcgacaccaaacgaaagctcggttagtcatgtagtcataaccaaagtaaatgcctcacaagttaaccccgttcacgcaacaacggctacgattcagtccccttccctggcgactgaaattggttcaacggcaatttcctgcggagccgcaattcttactgttgtacttgcggcaggggccggtatggctatacctctcactgcagggtcttccggtgctatagccgctgtgattttagccggtggtgtagcaactggaattcaatgtgcaaatgggcttggccgactatcgttgattgctatgaatcacgatgactacgttgcgtggatggactcccaggagtggtatacagcaaccaacacagccctggatgcgatttctcttgccggggctgctgcgggtttaaaaagcgctgcattaacatatcgccttcttaaccgttcatcgtctgagagtttgctctccttattacaaaaaatgagccgggccgaccgtacgcgattaacagaggagattattcgtatccgcaatcccggcatctcgaattcaggtgtaaaagcagcaatgaaggcaggcgtgtatcccaaacgttatccgtcagaagcgttgcagttgctcttacagcgtgagttgctgaataccatttcaaattcttctgccttcgttggaagtgccatctcaggaaatatcagaaatccacagaatgttgcacaaacgggtaaatacatttttggtttaattcagtctttttcatttacaggaagttattga

SEQ ID NO: 526437 - DNA, 606 bp, Stenotrophomonas maltophilia
atgatgaaatacattaaagatagccttgcattaagtgctttggttaaaagtaaaatggcgaccgatgatcccaaccagcttgaaacattaaaagaacagttaaaagatcggttcggcgttcctgtgggcgtccatatgacaggaattcctttggcagtgagcacgttactggctattttttgctacgccatgctgcaagtgtccctctggttgttgctgtttcgctggctcggcttacccgaatttaaggttatgatgggagtattcattgcagcgattgtgtattgtctggtagtgatgagcacgatgtttctgactacacgaggttctttacctggatataaactgcatattttcgtcattacgctgacaggcataatgagcatcatttatttcatctggacggggatttcgcttttattcggccctgttgagaactacacaccgcaaataacctctttgctggggctgggatgtttctttctgaacattatgtggatgaattcatcgattttttaccgctccattgcgctaacgctacataatcgggtctggcgtaagcagctcaaaatcgaggcaaggccaatgtcacacctcaaacgttga

SEQ ID NO: 526438 - DNA, 900 bp, Stenotrophomonas maltophilia
atggcaacctatccagacagtttattaattcttaacggcaagagtgcaggcaacgatctgctgcgccaggcgattaccgaattgcgtgaagacggagcatgcatacacgtgcgggtaacgtttgaaaaaggcgatgcggcgcgctacatcgatgagggcatcaggttaggtgttcagaccatcatttccggcggcggcgacggaacgatcaacgagatcgccggtgcgctcattgacctcaacgacgcagctcgcccggcgatggggattttaccgctcggtaccgccaacgattttgccaccagcgccggtattccagaggatgtaggcaaagcgctacagctggccattctcggtaaggctaccgccgtcgatattgctcaggtgaatgaaaaaacctgctttatcaatatggcgacgggcggtttcggcacccgcattaccagcgaaacgccggaaaaactgaaggcggcgctgggcggcgtttcgtatctcatccatggtctgatgcgcatggacacgctcaggcccgacagctgtgagatccaaggtgaaaacttccactggcagggcgacgcgctggtgattggtatcggcaacgggcgtcaggcaggcggcggacagcagctttgcccggaagcgctgattaatgacggtcaattacagctgcgtatttttaccggcgacgggctgctgccggcgctgtttacgacgctgacgcagccagaggagagccccaatatcatcgacgggaaatccgcgtggtttgaagtgatcgccccccacggcatgacctttaacctcgacggagagccgctcagcggcgagcgattccgcatcgaagttttgcccggcgcgttgcagtgccggttgccgccggactgtcagcttttgcgctga

SEQ ID NO: 526439 - DNA, 1053 bp, Stenotrophomonas maltophilia
atgactgatattgcgcagctgcttggcaaagacgccgacagccttttacagcatcgttgtatgaccattccagccgaccagctttatctgcctggccatgattacgtagaccgcgtcatggtcgacaacaaccgtcctcctgccgtactgcgaaacatgcagacgctttataataccggccgcctgggcggaaccgggtacctctctattctgcccgttgaccagggcgttgaacactctgcgggggcatcgtttgccgcgaacccgctctattttgatccgaaaaatatcgtcgagctggcgattgaggcgggctgtaactgcgtggcctccacctacggcgtgctggcctccgtgtcgcgtcgctatgcccaccgcattccgttcctcgttaagctgaaccacaacgaaaccctgagctacccaaccgaatacgaccagacgctctacgccagcgtcgagcaggcgttcaatatgggtgcggtggcggtcggggcaaccatctatttcggttctgaacagtcgcgtcgtcagatagaagagatctccgcggcgttcgagcgcgcccacgagctgggcatggtaaccgtgctgtgggcctatctgcgtaacggctcgttcaaaaaagacggagtggattaccacgtgtctgcggatctgaccggtcaggcaaaccaccttgcggcgaccatcggcgcggacatcgtgaagcagaaaatggccgagaataacggcggctataaagcggtgaactttggctataccgacgaccgcgtctacagcaagctgaccagcgacaacccgatcgatctggtgcgctaccagctggcgaactgctatatgggccgcgccgggctgattaactccggcggtgcggcaggcggtgaaaccgacctgtccgatgcggtgcgcacggcggtgattaacaaacgcgcgggcggcatggggctgatcctcggccgtaaggcgttcaaaaaatctatggccgacggcgtgaagctgatcaacgcggttcaggacgtctatctggacagtaaggtcacgatcgcttaa

SEQ ID NO: 526440 - DNA, 1278 bp, Stenotrophomonas maltophilia
atgaaaacgaaagtccaactgtcattcatgatgtttgttgaatggtttatctggggcgcgtggtttgtgccgctgtggctgtggctgagcaagagcgggtttaccgctggggaaattggctggtcctatgcctgtaccgctattgccgcgatcctctctcctatcctggtcggctcgctgaccgaccgtttcttcgccgcccagaaagtgctggccgtgctgatgttcgctggcgcgattctgatgtatttcgcagcacaacaaacccagttcagcaccttcttcccgctgctgctggcctactccctgacctatatgccgaccatcgcgctgacgaacagcatcgcttttgcgaacgtcgatgacgtggaggctgatttcccgcgcatccgcgtgatgggcaccatcggctggattgcatccggtctggcgtgcggcttcctgccgcagatgatgggctatagcgacatctctgacaccaatatcccgctgctgatgaccgctgccagctcccttctgctcggcgtcttcgcacttttcctgccgaataccccgccgaagagcaccggcaagctggatatcaaagtgatgctggggctggatgcgctgatcctgctgcgcgataaaaacttcctggtgttcttcttctgctcattcctgttcgccatgccgctggctttctactacatctttgccaacggctatctcaccgaagtggggatgaaaaacgccaccggctggatgaccctcggccagttctctgaaatcttcttcatgctcgctctgccgttctttaccaaacgctttggtattaagaaggtcttgctgctggggctgatcaccgccgccattcgctacggcttctttgtttacggcggcgccgaacaatacttcacctacgccctgctgttcctcggcattctgctgcacggcgtaagctatgacttctattacgtcaccgcgtacatctacgtggataaaaaagcgcccgtgcatatgcgcaacgcagcgcagggcttgatcacgctgtgctgtcagggctttggtagcctgctgggttaccgtctcggcggcgtgatgatggaaaaaatgttcgcctataaagagccggtgaatgggctgaccttcaactgggccggaatgtggacgtttggtgcaatcatgattgtagtgattgccgtgctgtttatgctgtttttccgcgaatcggataaagagatcaccgcaattgaggtggttgatggcgataccgcgctgacacgaggggaagttaaatga

SEQ ID NO: 526441 - DNA, 1005 bp, Stenotrophomonas maltophilia
atgaaacaagaccgtattctcggtgctctttacgggcaggcgttaggggatgcgatggggatgccgtctgaactgtggccgcgcaagcgggtgaaagcgcacttcggctggatcgaccgtttcttacccggcccggctgagaataatgccgcctgctactttaatcaggccgaatttacggatgatacgtcgatggcgctgtgcctggccgacgcgattatcgaatgcgacggggaaattaatcctgacgttatcggtaagcatattctggactgggcgctggattttgacgcgttcaataagaatgtgctcggcccgacctccaaaattgccctgaacgccatccgtgacggcaagccggtgagcgagctggaaaataacggcgtcaccaacggggcggcgatgcgcgcctccccgctgggatgcctgctaccggccacgcgtctggcacattttgttgaacaggttgcgttagcctccagcccgacccataaatcggatctcgccatcgccggtgcggtggtgatcgcgtgggcggtttcacgcgctatcgacggcgagcgctggcagaacatcgccgatgccctgccgggtattgcccgtgcggcacaggaggcgaacaccaccaccttcagcgcatcgctttccgctcgtattgagctggccctgaaaaccgtgcgcgaagccaacggtacggagaccgccagcgagcagatctatcagcttattggcgcgggcacgagcacactggagtccgttccggcggcgattgcgatggtcgaactcgcgggcaccgatccgaaccgctgcgcggtgttatgcgctaacctgggcggtgatacggacactatcggcgcgatggcaacggccatctgtggcgcgctgcacggtgtacaggccattgatccggcgcttaaaagcgaacttgatgccgtaaaccagcttgatttcggacgctactgcgaaaaactgctgcacttccgggagcaaagggagggcgtatga

SEQ ID NO: 526442 - DNA, 954 bp, Stenotrophomonas maltophilia
atgagtgcttttgcccgccgtctcgaaacccttcacgctacgcgccccgtaacggtgctcggcgcggcggtcatcgacgtgattgccgacgcctacgccctgccctggcgcgggtgtgatatcgagcttaagcaacagggagtgaatattggcggctgcgcgctgaatatcgccatcgccctcaagcggctcggcattgcagcgcaaaacgcgcttcccgttggccacggcgtgtgggccgatattatccgtaatgccatggcgaagcaggatctgcacagcgccgtggaagcggaaacgggcgataacggctggtgcctggcgctggtggagcctgatggtgaacggaccttcatgtcgtttagcggtgtggagaatcagtggcagcaacgctggctggatgggttgagcgtgccggagaaaagcctgatctatttgtccggctaccagctggcgtcgcccagcggcgagctgctgacggcctgggtggaacgtcttcaggatgtgacgctctttatcgatttcggtccgcgcatcgcggatattcccgacccgctgatggcgcggattatggcccgtaaaccggttgtctcgctcaatcggcaggaggcggaacttgccgccgaatggcttggcgtgaacgtggaacagctcggcactcagtggcagcaacggtttggcgctgcgctaatcgtacgccatgataaagacggagcggtctggtacgacggtgacgcttccggacacgttccggcgtttcctgctaccgtggtcgataccatcggcgccggtgacagccatgcgggaggtacccttgccgggctggctgcgggatggtcactgccagagtcggtgcagcttggcaatgccgtggccgcctgggtagtcagccatcgcggtggagactgcgcccccacgcgcgaggccctactcctcgcacacaaagacgtatag

SEQ ID NO: 526443 - DNA, 747 bp, Stenotrophomonas maltophilia
atggaacaagcgcatacccggttaattgctcaactcaaggaacgaattgccgcaccggacaacacgccgctgtatctgaaatttgccgaaacggttaagaacgcggtgcgcagcggtgtgctcgcgcacggtaatattttgcccggcgagcgcgatctgagccaactggccggagtgtcgcgtattacggtgcgtaaagccatgcaggcgctggaagaggctggcgtcgtcacccgcgcgcgtggatacgggacgcaaatcaacaatatctttgaatattcgctgaaagaggcgcgcggcttttctcagcaggtggtgctacgtggcaaaacgcccaacaccctgtgggtcaataaacgcatcgtgaagtgcccggaagagatcgcccgccatctttcccttgcgccggaaagcgatgtgtttttgcttaagcgcatccgttacgtggatgacgatgcggtatcgatagaggagtcctgggtaccggtaggattaattcccaacccggacgacattggcgtctcgctttatgattacttccgcagccagaatatctttccgaagcgcacccgttcccgcgtcagcgcccggatgccggacagcgagtttcaggcacatatcaagatggacgataagataccggtgctggtgatcaagcaagtcgcgctcgatcaacagcagcggccaattgagtacagcatcagctactgccgcagcgacctatacgtctttgtgtgcgaggagtag

SEQ ID NO: 526444 - DNA, 801 bp, Stenotrophomonas maltophilia
atgacacgtattaatgccctgactattgcgggaaccgatccaagcggcggagcggggatccaggcagacctgaaaaccttctctgcgctcggcgcatacgggtgctcggttatcaccgcgctggttgcgcaaaacacgcgcggcgtacagtcggtgtatcgcattgacccggattttgtcgccgcgcagctggattcggtattcagcgacgtacgtatcgacaccaccaagatcggcatgctggcagaggcggacattgttgaagcggtcgctgaacgtctcaaacactaccagataaaaaatgtggtgcttgataccgtgatgctggccaaaagcggcgatccgctgctctccgcctcggctgtcgacaccctgcgtaaaaagctgctgccgcaggttgcgctgatcacgccaaacctgcctgaagccgccgcgctgctggatgcgccacacgcgcaaaacgaacgtgagatgaaagagcaggggaatgcgctgctggcgatggggtgtcgcgcggtgctgatgaaaggcggccatcttgatgatgcagaaagcccggactggcttttcacccacgatggcacgcaacgtttcaccgcgccacgcgtccagaccaaaaacacccacggcacgggctgtacgctctcggcggcgctggcggcgctgcgtcctcgtcacgccacatgggcggatacggtgcaggaggcaaaggtctggctctcgggcgcgctggcaaaagccgattctctggaagtgggtcacggtattggtccggttcaccattttcatgcatggtggtaa

SEQ ID NO: 526445 - DNA, 771 bp, Stenotrophomonas maltophilia
atgcagcctgacctgctcgactcacacgttttacatcaattccgaacccgttccccgctcacgcactgtatgaccaacgatgtcgtgcagaccttcaccgccaacgttctgctcgcgctcggtgcttccccggcaatggtgatcgaagccgaggaagcggaacagtttgccgcgcttgccgatgccctgctcgtcaacgttggcacgctcaccgcgccgcgcgcccagtcgatgcgtcgggctattgagagcgcggtagccgcgggcacaccctgggttctggaccccgtcgcggttggcgcgctggcgttccgcacccgtttttgccagcaaatattatcccttaaacctgcggccattcgtggcaacgcctccgaaatcctcgcccttgccggaatgagtgcgggcggacgtggggtcgattccaccgatacggcagcgagcgcgttgaccgctgcgcaggcgcttgcccgccagacccacgccgttgtagtcgtcacaggggaagtggaccacatcaccgacggccagcgaacccgtacggtcgcggggggcgacccgctgatgacccgcgtggtaggaactggctgtgcgctctcggcggtcgtcgccgcctgctgctcgctgcctggcgacaggcttgataacgcggcggcagcctgcggctttatgaagcgcgcagggtcagttgccctgactcaaagccgggggcccggcagctttgtctccgcgtttctggacgcgctttacgcgctggaggaacaggtatga

SEQ ID NO: 526446 - DNA, 741 bp, Stenotrophomonas maltophilia
ttgtttttaagttggtgtttattattagaatatttgccaactttttttattcgagaattaagcttctcaaaacatgtttgtgatcacgttagtgataaaataacgaaacctcctaatatgaaaggaagatctccaggcggggaatcatctaatcatttaggaggtttttgtttataccgcctgataaacaaggaagtaaatattatgccaaaatcatctatcactattggtgatgtattcattactaacaattgtgggttttgtactgtcattgattatacaaacaaagatagcgtaactatcaaatttgataatacaggtttcattacaaaggttagagcaagaaatttaaaatcaggacaagtaaaagatccctatgcaatctcggtttgtgaggttggttttataggagtgggtgtaccaactacgattaatggaaaacttacaagaatctatagtttatgggtacatatgcttacacgttgttatagtgaaaagtatcacttagatttccctagctataaaggttgtagtgttgcccctcgttggtgttgttttgctaattttgctaacgacatcaaaacacttgaagggtatgaagattggttagatccgcataataaaatttgcctcgataaagatgcaaaagatccaggtaataaactctatagtattgatacgtgtcgtttcattacctcttatgaaaacattgctgatgcttcctatcgtcgctctcattga

SEQ ID NO: 526447 - DNA, 981 bp, Stenotrophomonas maltophilia
atggcatttacaccattttctcctcgccagcccgccgcctctgcgcgtctgccgctgacgctgattactcttgatgactgggcactggcgacactggttggtgcggacagcgaaaaatacctgcaaggccaggtcacggcggacgtggcgcagttgactgagcaccagcatctgctggccgcgcattgcgatccaaaaggcaaaatgtggagcaacctgcgtctgttccgccgtcaggacggattcgccttcattgagcgtcgcagcctgcgtgacgcccagcttaaagagctgaaaaaatacgcggtcttttctaaagtcaccatcgcccctgacgatgaacacgttctgctgggggtagcgggtttccaggcgcgtgcagcgctgaaaaacctgtttgccgagctaccggatgccggaaaacagctgatcagcgagggagaaacctccattctgtggttcgaacaccctgcggagcgcttcttgctggtaaccgacgaagcaacggcggaacgcgtcactgacgccctgcgcggtgaagcacagctcaacaacagccagcagtggctggcgctgaacatcgaagcgggcctgccggttattgacgcggcaaacagcgcgcagtttatcccgcaggcgacaaacatccaggcgctgggtggtatcagctttaagaagggctgctacaccggacaggaaatggtggcgcgtgcgaaattccgcggcgcgaacaaacgcgccctgtggacgctggctggtcacgccagccgtgtgccggaagcgggtgaagatctcgagatgaagatgggcgaaaactggcgccgtaccggcaccgtgttagccgccgtccagctcgatgatggccgcctgctggtgcaggttgtcatgaataatgatatggagcccgacagcgtgttccgcgtgcgggacgatgcaaacacgctcagcattgagccgctgccgtattcactggaagattga

SEQ ID NO: 526448 - DNA, 267 bp, Stenotrophomonas maltophilia
atggatattaacaacaaggcccgtattcactgggcgtgccgtcgcggcatgcgtgaacttgatatctccatcatgcctttcttcgagtatgagtacgacagcttaagcgatgacgataagcgcctgtttgtccgtctgcttgagtccgacgatccggatttattcaactggctgatgaatcacggcaagcccgccgacaccgagttgcaacggatggtgcaattaattcaaacacggaatcaggaacgtggtcctgtggcaatctga

SEQ ID NO: 526449 - DNA, 363 bp, Stenotrophomonas maltophilia
atgtccttactgctccacggtctggtcgcggcaatggtgttattggtgccgtggccgctaagctatacccctctgtggctgcttttgctgtcgtttgtagtgtttgacagcgtgcgcagccagcgtcgaatcaacgcccgtcagggtgagattaagctgctgatggattctcgcctgcgctggcagggaaaagagtgggaaatgatagggacgccgtggatgctcaacaccgggatgatgctacggctgcgtcgggtcgaggacaatcgtcgccagcacctgtggctggcagcagacagtatggatcctgcggagtggcgagatctgcgccggttgatcgtgcaacagccgacgcaggagtaa

SEQ ID NO: 526450 - DNA, 522 bp, Stenotrophomonas maltophilia
atgaatattggtctgttctatggttccagcacctgctacaccgaaatggcggcggagaaaattcgcgacattattggcccggaactggtgacgttgcataacctgaaagatgacgcggttgccttgatggagcagtacgatgtgctgattctgggtatccctacctgggactttggtgagattcaggaagactgggaagccatctgggatcagctcgattcagtcaattttgaaggcaaaatcattgcgatgtacggcatgggcgaccagttgggctacggggagtggttccttgacgcactcggcatgctgcacgacaaactggccccaaagggcgcgacctttatcggctactggcctacggaaggctatgagttcaccagtcaaaaaccgattattgccgacggtcagctgtttgtcgggctcgcgctggatgaaaccaaccagtacgatcttagcgacgagcgcctccagaactggtgcgagcagattctgggtgagatggccgagcagttcagctga

SEQ ID NO: 526451 - DNA, 897 bp, Stenotrophomonas maltophilia
gtggaaaaggatctcgcactcatcgaacagtttctcgacgcgctgtggctggagaaaaacctcgctgaaaatacgcttagcgcctatcgtcgggatctcactctgctggtcgagtggctggcgcaccgggggctgacgcttgaaagcgcacaaagcgatgacctgcaagggttactggctgagcggatggaaggggggtacaaagccaccagctccgcacgtctgctgagcgccatgcgccgcctgttccagcacctttaccgcgagaagatccgcgcggatgatcccagcgcactgctggcatcgcctaaactgcctcagcggctgccaaaagatctcagcgaagcgcaagttgagagattattacagtcgcccgcagttgaccttccgctggagttacgcgataaagccatgcttgaactattgtatgccacgggcttgcgcgtttctgagctggtgggcctgacgatgagcgatatcagcctgcgtcagggcgtggtgcgcgttatcggtaaagggaacaaagaacggctggtgccgctgggtgaagaggcagtctactggctggagacgtatctggaacacgggcgtccgtggctgctgaacggcgtctccatagatgtattattcccgagccagcgcgcgcagcagatgacgcgacaaacgttctggcatcgcattaaacattacgccacactggcgggtattgacagtgagaagctgtcgccgcacgttttgcgtcacgccttcgcgacgcatctgttaaaccacggcgcggatttacgcgtggtgcagatgttgcttggacacagcgatctttcaacgacgcaaatatacacccatgtcgcgacggaacgcctgcggcagctacaccaacagcaccaccctcgcgcgtga

SEQ ID NO: 526452 - DNA, 714 bp, Stenotrophomonas maltophilia
atgaaaaagtctttagcgctgttcaccctgctggcagcttcggtttccggttttgcccatgcggatgatgccgccattaaacagtctctgacgaaactcggcgtcgccagcagcgagatccagccagcgccggtggctggcatgaaaacggtgctgaccaacagcggcgtgctgtacgtgaccgaagacggaaagcacatcattcaggggccaatgtacgacgtgagcggtgggcagccggtgaacgtcaccaaccagctactgatgaaaaacctgaatgcgctcgaaaaagagatgattgtctacaaagcggcgcaggaaaagcacgtcattaccgtcttcaccgacatcacctgcggctactgccacaagctgcatgaagagatgaaagactacaacgcgctgggcattaccgtgcgttacctggccttcccacgcgctggcgtgcagagccagcctgagcaggatatgaaagcgatctggtgtgcgaaagaccgcaacaaggcctttgatgacgcgatgaacggcaaaggcgtgaagcccgcctcctgcgatatcgacatcgctaaccactacgcgcttggcgtacagtttggcgtgagcggtacgccagccattgtgctgagcaacggctatgtggtgccgggctaccagggtccaaaagagatgaaagcgttcctcgacgaacaccagaaacagacgggtggtaaataa

SEQ ID NO: 526453 - DNA, 1734 bp, Stenotrophomonas maltophilia
gtgaaagccccgataaaactgcgccgccgcgatgcggttgaaaccgcggatttaccagatacgcttccgctgctgttaaagcggttgtacgccagccgtggcgtgcgtacggcaagcgatcttgagcgcagcgttaaaggcatgctgccctggcaagcgctgagtggcatcgaaaaagcgactgaaatgctctacgacgcgttccgtgacgggacgcggattgtcgtggtgggcgatttcgatgccgacggcgcaaccagtaccgcgctgagcgtactcagcctgcgtgcgctgggctgcgataacgtggcttacctggtgccgaaccggtttgaagacggctacggcctcagcccggaagtggtcgatcaggcccatgcccgtggtgcacagatgatcatgaccgtggataacgggatctcttctcatgcgggggtcgatcatgcccatgcgctggggatcccggtactggtcaccgatcaccacctgccaggagaaaccctgccagacgccgaagccatcattaacccgaacctgcgcgactgcgatttcccgtcgaaatcgctggccggagtaggggtggcgttttatctgatgctggcgttacgcacgttgctgcgtgataagggctggttcgaatcgcgcgggattgccgtgccgaacctcgcggagtatctcgatctggtggcgctgggaaccgtggcggacgtggtgccgctcgataccaataaccgtattctcacctggcagggcttgagccgcattcgggcgggcaaatgccgtccggggatcaaggcgctgctggaaattgccaaccgcgatccgctgaagcttgcggcaagcgatttgggttttgccctcggcccgcgcctgaacgcggcggggcggctggacgatatgtcggttggcgttgcgctgctcctgtgcgacaacatcggcgaagcgcgcgtgctggccagtgagctggacgcactcaaccagacccgtaaagagattgagcaggggatgcaggccgaagcgctgaccctgtgcgaaaagctggagcgcagcggcgataacctgccgggtgggctggcgatgtatcaccccgaatggcaccagggcgtggtgggcattctggcgtcgcgcattaaagagcgtttccaccgcccggtgatcgcgttcgcccccgccggggacggcacgctgaaaggctctggtcgttccattcaggggctgcatatgcgcgatgcgctggagcgtctcgacacgcttcatccgaacctgatgattaagttcggcggccacgcgatggcggcaggcctgtcgctggaagaggcgaagttcgacgagttccagcgtctgtttggcgaactggtcaccgagtggatcgatccgtctctgttgcagggtgaagtggtttctgatggcgagctttctccggctgaaatgaccatggaggtggcgcagatgctgcgcgatgccggcccgtgggggcagatgttcccggagccgcttttcgacggacgttttcgtttgctgcaacagcgcatcgtgggcgaacgccatctcaaagtgatggtggaaccggtcggcggcgggccgctgctcgacggcatcgcctttaacgttgatacctccatctggccggacaacggcgtgcgcgaggttgagctggcctataagctggatattaacgagttccgcggtaaccgcacccttcagatcatcatcgacaatatctggccaatttag

SEQ ID NO: 526454 - DNA, 882 bp, Stenotrophomonas maltophilia
atggcgcagggtctggaagatgtttctgggctgctggagctggctgtcgaagccgacgacgaagaaacctttaacgaagccgtggcagagctcgacgtgctggaagagaagctggcgcagctggaattccgtcgcatgttctccggcgaatacgacagcgctgactgctatctcgatattcaggcaggctctggcggtaccgaagcgcaggactgggccagcatgctgatgcgtatgtatctgcgctgggcagaagcgcgcggtttcaaaaccgagattatcgaagagtccgaaggtgaagtggcgggtatcaagtccgtcaccattaagattattggcgattacgcctacggctggctgcgtactgaaaccggcgttcaccgcctggtgcgtaagagcccgttcgattccggtggccgtcgccacacctccttcagctccgcgtttgtctacccggaagtggatgaggatatcgatatcgacatcaacccggcggacctgcgtatcgacgtttaccgcgcatccggcgcgggcggtcagcacgttaaccgtacggaatctgcggtgcgtattacccacattccaaccgggctggtaacacagtgccagaacgaccgttcccagcataagaacaaagaccaggccatgaagcagatgaaagcgaagctttatgagctggagatgcagaagaaaaatgctgagaagcaggcgatggaagacaacaagtccgacatcggctggggcagccagatccgttcttacgtccttgatgactcccgcatcaaagacctgcgtaccggggttgaaacccgtaacacgcaggcggtgctggacggcagcctggatcaatttatcgaagcaagtttgaaagcagggttatga

SEQ ID NO: 526455 - DNA, 1518 bp, Stenotrophomonas maltophilia
atgtctgaacaacaatcacagggcgctgacgcggtagtcgatcttaacaacgaactgaaaacccgccgcgagaagctggcagcgctgcgcgagcagggcgtgccgttcccgaacgattttcgtcgtgaccacacctcagaccaactgcacgcagacttcgacggtaaagagaacgaagagcttgaagcgctgaacgttgaagtgtccgtggcgggccgcatgatgacccgtcgtatcatgggtaaagcctccttcgtgaccttacaggacgttggcggccgcattcagctgtatgtctctcgtgacgacctgccggaaggcatctacaacgagcagttcaagaagtgggacctgggcgacatcctgggcgcaaaaggtaaactgttcaaaaccaagaccggtgaactgtctatccactgtaccgaactgcgtctgctgaccaaagccctgcgcccgctgccggacaagttccacggtttgcaggatcaggaagcgcgctatcgtcagcgttacctggatctcatctctaacgatgaatcccgtaagaccttcaaaattcgctcccagatcatggccggtattcgccagttcatggttaaccgcgactttatggaagtagaaaccccgatgatgcaggtgatcccaggcggtgcctctgcccgtccgttcatcacccatcacaacgccctggacctggacatgtacctgcgtatcgcgccggaattgtacctgaagcgtctggtggtcggtggtttcgaccgcgtgtttgagatcaaccgtaacttccgtaacgaaggcatctccgtacgtcataacccagagttcaccatgatggaactctatatggcgtatgcggattacaaagatctgattgagctgaccgaatccctgttccgcaccctggcgcaggatattctgggcaccacgcaggtcccttacggtgaagaagtgttcgacttcggcaaaccgttcgaaaaactgaccatgcgcgaagcgatcaagaaataccgtccggaaaccaatatggcggatctggataacttcgactctgcgaaagcgatcgctgaaagcatcggtattaaggttgagaagagctggggtctgggccgtatcgtgaccgagatcttcgaagaagtggccgaagcgcacctgattcagccgaccttcatcaccgaatacccggcggaagtgtctccgctggcgcgtcgtaatgacgagaacccggaaatcactgaccgcttcgaattcttcatcggtggccgcgaaatcggtaacggctttagcgagctgaacgatgcagaagatcaggcgcagcgtttccaggatcaggttaacgcgaaagcggcaggcgacgacgaagcgatgttcttcgacgaagactacgtaaccgcgctggagcacggcctgccgccgacggctggcctgggtattggtatcgaccgtatggtgatgctgttcaccaacagccacaccatccgcgacgtgatcctgttcccggcgatgcgtccggtgaaataa

SEQ ID NO: 526456 - DNA, 543 bp, Stenotrophomonas maltophilia
atgagtattcaagaacacgttattttggtaaatgaccagggaaaggtgattggcactcaggagaagtacgccgcgcacacgtcacacaccccgcttcacctggccttctcttcatggctgtttaacgctaacggagaatgtctgattacccggcgcgccttaagtaaaaaagcctggcccggcgtgtggaccaactccgtttgcggacatccacaggccgacgaagcgacagagcaggcgattatccgccgctgccgctttgaagtcggcgccgaaatcatagacatcactcccgttgccccggagttccgctaccgtgaagccgacccttcagggatcgttgaaaacgaaatctgcccggtctatgccgcacgcgtaacgaataccctcgcaatcaatagcgacgaagtgatggagtatcagtgggtggagctggacgcgctcttccgcgcgctggacgccacaccgtgggcatttagtccgtggatggtgcaggaagcgaacactgcgcgcgaaaaactcagcgcttttgcggcgcaataa

SEQ ID NO: 526457 - DNA, 741 bp, Stenotrophomonas maltophilia
ttgtttgcaggaagcctgacgagaaacccgatcattgccgttttctgcctgacgctgacgctacttatagtaggatgctcggggagtaaatcttcggatatgggcagttattccggtgccgtctataccgttaagcgcggggacacgctctaccgcatctcacgtgccacggggaccagcgtgaaggagctggcgcgcctgaataatatttctccaccctataccattgagatagggcaaaagctcaaggttaacggcggttcctcctcagggaataagtcctcaacgcgtaaaacagccaaagtgacgccatcctatcaggtgcctaaatcatcctggccgccggtcggtcagcgctgctggatctggcctgcaagcggaaaagtggttgcgccgtactcgctctcggaagggggcaataaaggtattgatatcgctgccgcacgcggcacgccggtttacgcttcaggggccggaaaggtggtctatgtcggtaaccagcttcgtggatacggtaacctgatcatgattaagcatggtgaggactacattacggcatatgcgcataacgacacgatgttggtgaataatggccagaacgtgaaggcggggcagaagattgcgaccatgggcagtaccgggacggatacggtgaagctgcatttccagatccgctataaggccacggccatcgatccgcagcgttatcttccggcgcagggcagtaaaccgaagtgctaa

SEQ ID NO: 526458 - DNA, 339 bp, Stenotrophomonas maltophilia
  misc_feature (308)..(317): n is a, c, g, or t
atggatattgcgttgcttaacaggggctggaacagaacatggtcagataccatggtaaatctggaagcccggaaactcgtcgaaactgcaaatcggctatcagcattctatttgcaagatgggataacacgtatcaagtttgtcgaagagataaggcaggtcgtagagaaagaatttgaaactgcacgacgggccaaaaccgatgaagaatgcattgcatgcatcaaaaatctgcgtgccgaaacagataatctgcaagaacaagaacgcctgttaagaaccagagccgcccaactttatgcaaaggnnnnnnnnnnaataaaatcgtcggatacgtga

SEQ ID NO: 526459 - DNA, 177 bp, Stenotrophomonas maltophilia
atgatgctgaccgtactggcagcagtcgcacagatggaacgtgaaacgatgctggagcgccagcgtgaaggttacgacattaaagcagaactcgcagcaggtaaaaccattcctgcaatcgcagaaagccacaacgtcagcaccagaacagtcatgaacattaaggccgaagcctga

SEQ ID NO: 526460 - DNA, 348 bp, Stenotrophomonas maltophilia
  misc_feature (9)..(18): n is a, c, g, or t
atgcccgcnnnnnnnnnnccggtgcgttttatcggtaaaaactttgagtttgatgagcgtatgggcgagcgaatttcagaggacgtaatcgctcactgccaccagtgcggtacgccgtgcgacacgcataccaactgcaaaaacgacggttgtcatcttctgtttattcagtgtcctgcatgtgccgagaagtttaatggctgctgtagcgagctgtgcagtgaagagagtatcttgcctgaagaagagcaacgtcgtcgccgtgccgggcgcgagaacgggaataagatctttaataaatcccggggccgactgaataccaaactgggtattccagacccggagtaa

SEQ ID NO: 526461 - DNA, 729 bp, Stenotrophomonas maltophilia
  misc_feature (700)..(709): n is a, c, g, or t
atgccagtgttacacaaccgcgtttcgaatgagatgttgaaagcgcgtatgttggccgaaaccgaaccgcgcacaacgatctctttctataaatattttaccatcaacgatccacaggcgacccgcgatgcgctttaccaggctttcaccgccctgaacgtgtttggtcgcgtctatctggcgcgtgagggtattaacgcgcagatcagcgtgccggaaagcaaagtcagcgccttccgcgatctcctttatggttttgatccggcgcttaacggcttacgcctgaacattgcgctggatgatgacggcaaatcgttctgggtgctgcgcatgaaggtgcgtgagcgtattgtggcggatggcatcgacgatccgagcttcaatgccgcgaatgtgggggagtacctcaaggccgctgaagtgaacgcgatgctcgacgatccggatgcagtgttcatcgatatgcgtaaccactacgaatatgaagtgggccacttcgagaatgcgatggaaattcctgccgacactttccgtgaacagctgccgaaagcggttgagatgatgcaggagcataaagacaaaaagatcgttatgtattgcacaggggggatccgctgcgaaaaagccagtgcctggatgaaacacaacggttttaataaagtctggcatattgagggtgggatcattgaatatgcccgcnnnnnnnnnnccggtgcgttttatcggtaa

SEQ ID NO: 526462 - DNA, 927 bp, Stenotrophomonas maltophilia
atgacccagttaccgaaatttactgccgcgcttttacacccacgctattggttaacatggtcaggcattggcttgttgtggctaattgtacagctgccttatcccgtaattttccgcatgggtaaaggactgggccgcattgctcaacaatttatgaagcgtcgcgccaggatcgcgtatcgaaatcttgagctttgctttcctcagatgagcgaatctgagcgtcacgacatggtggttaaaaacttcgaatctgtcggcatgggactgatggagaccggtatggcctggttctggtcggataagcgcatggcgcgctggacggaagtggccggaaccggcatggatccggtgcataatctccaggccaaccagactggcgtcctgctgattggcgttcatttcctgacgctcgaaattggcgcgcgcatgttcggcatgcaggcgccgggtattggcgtttatcgtcccaacgataatccggtgatcgatttgatacagaccaacggacgcatgcgctcgaataaaagcatgatcgaccgcaaagaccttaaagggatgatccgcgccctcaaatcaggtgaagtggtctggtatgccccggatcatgactatggcccgcaatccagcgtgtttgtcccgttctttgcggtggaagatgcggcgacaaccaccgggacctggatgctggcgcggatgtccaaagcggctatcgtgccgtttgtaccgcgccgtaaaccagacggttcaggctatcagctcatcatgctggagccggaactcacgccgccgctggatgatgcagaaaccaccgcgcgctggatgaatgctattgtcgagaaatgcattatgctcgctcccgagcagtacatgtggctgcatcgccgcttcaaaacccggcctcagggcgtcccttctcgttattaa

SEQ ID NO: 526463 - DNA, 1236 bp, Stenotrophomonas maltophilia
atgtcctccacagatgctcccataaactggaaacgcaacctgacggttgcatggctgggttgttttcttactggcgccgcctttagcctggtaatgcccttcctgcccctctacgttgaacagctcggcgtcaccggccatagcgcactgaatatgtggtccggcctggtgttcagcattacgttcctgttctccgccattgcgtcgcctttctggggtgggcttgcggatcgcaaaggccgcaaaattatgctgctgcgctccgcgctcggcatggcgatcataatgctgttgatgggggtggcgcaaaatgtctggcagttcctgatattacgcgcgctcctgggtctgctcgggggatttatccccaatgccaacgccctgatcgcaacccaaatcccacgccataaaagcggctgggcattgggtacgctttccactggcggcgtaagcggcgcactgctgggtccgctggcgggcgggctgctggccgaccattacggactgcggccggtattcttcattaccgccagcgtgctgttcctctgcttcctcgtgacgcttatctgcatccgtgagaatttcacgccggtagccaaaaaagagatgctgcacgcccgggatgtgctggcctcgctgaaaaacccaaagctggtgctgagcctgtttgtgaccaccatgattattcaggtggccaccggttcaatcgcgcctattctgacgctctatgtccgcgacctggccggcaacgtcagcaatatcgcctttatcagcggcgtgatcgcctctgttcccggcgtggccgcgttgctgagcgcgccgcggctcggcaagctgggcgatcgcatcggcccggagaaaattctgatctgcgccctgatcctctccgtcctgctgctgatccccatgtcgatggtgcaatcgccgtggcagctcggcgtgttgcgctttctgctgggcgcagcggacggcgcgttgcttccggcggtgcagacgctgctggtctataactccaccaaccagattgccgggcgtattttcagctacaaccagtcgtttcgcgatctgggtaacgtcaccgggccgctggtcggcgcgggggtttcggccagtttcggtttccgggcggtctttatcgtgacggcaggcgtcgtgctgttcaacgctgtttattcctggctcagcttatcccgggcgctacgcccggcgcgcataacacaacatcgtgacggctaa

SEQ ID NO: 526464 - DNA, 375 bp, Stenotrophomonas maltophilia
atgaccatgtacgccacgctggaagaagctatcgatgccgctcgcgaagaattcctcgccgataatcccggcattgaggaagaagatgctgacgtgcaacaactcaatatccaaaaatacgtccttcaggacggcgatattatgtggcaggccgaattctttgctgatgaaggtgaggacggagaatgtctgccgatattgagtggtgaaggtgcgcaggcggtattcgacggcgactatgacgaaattgagttacgtcaggagtggctggaagaaaatacgctgcatgaatgggatgaaggtgagtttcagctcgaaccgccgctggataccgaagaaggtcaggccgcagcggacgaatgggacgagcgataa

SEQ ID NO: 526465 - DNA, 228 bp, Stenotrophomonas maltophilia
atgaaagtaatcattgttgtcatgatggcatgcctgctcagcggctgcggcagcatcatcagccgcaccattcccggacagggccacgggaatcagtactaccccggcgtacagtgggatgtccgcgattccgcatggcgctatctcaccgtgctcgatctgccgttttcactcattttcgacacgctactgctgcccatcgatgccagccacggcccttacgagtaa

SEQ ID NO: 526466 - DNA, 2529 bp, Stenotrophomonas maltophilia
atgaataatacatctgaatatattgatgccatgccgctaacggacattgaaaaagcggcactccctgcgagcgacatccgcgcggttcacaccgcgctggatggtgaacatcgtcacttttcccgtgatgatgatacgccgctggggtcagtgaaggcacgtctggagcaggcatggccagactcgctggcagaagggcagttaatcaaggatgacgaagggcgtgaccagctacaggcgatgccgaaggccacgcgttcctctatgttccccgatccgtggcgcaccaacccggtgggtcgcttctgggatcgcctgcgtggacgtgacgtgacgccacgctatctgtcacgtctcaccaaagaacagcaggcgtccgagcagaaatggcgtaccgtgggaacgattcgtcgttacattctgctgctgctgacgctggcacagacggttgtcgccacctggtacatgaaaactattctgccgtaccagggctgggcattgattaaccctgctgacatgattggccaggatatctgggtctccttcatgcagctgctgccgtatattttacagagcggcatccttctgctgttcgccgtgctgttctgttgggtctccgccgggttctggacggcgctgatgggcttcctgcaactgctgatgggacgtgacaaatacagcatttccgcgtcgacggttggggatgaacccctcaatcctgagcaccgtaccgcgctgatcatgcctatctgtaacgaagatgttgaccgcgtattcgccgggctgcgtgccacctgggagtccgtaaaggcgaccggtaacgcggcgcatttcgacgtctacatcctgagcgacagctacaacccggatatctgcgtggcagagcaaaaagcctggatggagctgattgctgaagtgcagggcgaagggcagatcttctaccgtcgtcgtcgtcgtcgtgttaagcgtaagagcgggaacatcgatgacttctgtcgtcgctggggtaaccagtacagctacatggtggtactggatgcggactccgtgatgagcggcgactgcctgagcgggctggtccgtctgatggaagccaatccgaacgcgggtattattcagtcctcgccaaaagcgtccggtatggacacgctgtatgcgcgctgccagcagtttgcgacccgcgtctacgggccgctatttactgccggtctgcacttctggcagctgggtgaatctcactactggggccacaacgccattatccgcgtgaagccattcatcgagcactgcgccctggcgccgctgccgggtgaaggatcgtttgccgggtccattctgtcgcatgactttgtggaagccgcgctgatgcgtcgcgcagggtggggcgtctggattgcctacgatctgccgggctcgtatgaagagctgccgccgaacctgctggatgagctcaagcgtgaccgccgctggtgtcacggtaacctgatgaacttccgcctgttcctggtgaaggggatgcaccctgttcaccgtgcggtgttcctgacgggcgtcatgtcctatctgtctgcgccgctgtggtttatgttcctggcactctcgaccgcgttgcaggttgtgcatgccctgacggagccgcagtacttcctgcaaccgcgccagctgttcccggtgtggccgcagtggcgtccggagctggcgattgcgctgttcgcgtcgaccatggtgctgctgttcctgcctaagctgctcagtatcattctgatctggtgtaaaggttcgaaggagtacggtggtttctgccgcgtaaccctttcactgctgctggaagtgctgttctcggtcctgctggcaccggtgcgtatgctgttccacacggtattcgtggtgagcgcgttcctgggatgggaagtggtgtggaattcaccgcagcgtgacgatgactctacgccatggagtgaagcctttatgcgccacggctctcagctgctgctgggcctggtgtgggccgttggtatggcctggctggatctgcgtttcctgttctggctggcgccaatcgtcttctcgctgatcctgtcgccgtttgtgtcggtgatttccagccgttctacggtgggcctgcgtaccaaacgctggaagctgttcctgatcccggaagagtattctccgccgcaggtgctggtggataccgatacctatctggagcagaaccgcaaacgcacgctggatgatggctttatgcacgccgtgtttaacccgtcattcaacgcgctggcaaccgcgatggcgactgcgcgtcaccgcgccagccaggtgctggagatcgcccgcgatcgccacgttgagcaggcgctgaacgagacgccagaaaagcttaaccgcgaccgtcgtctggtgctgttgagcgatccggtgacgatggcacggcttcactaccgcgtgtggacttctccggagagatactcttcgtgggtgaactactacaaagacgtgaagctgaatccgctggccctgaaggcgaagtaa

SEQ ID NO: 526467 - DNA, 1602 bp, Stenotrophomonas maltophilia
atggatcggatcgatataagcacacaaagggggaagtgcttacttattatgaaacataaaccacaaatgatgaaaatgcgttggttgggtgtagcagtgctgttgtcactgtatacctcatctgcactggcctttaacatcgatgatgtcgcaaaacaggctaaatcgatggcgggcaagagctacgaagcgccaaaaagtaacctgccctccgttttccgcgacatgaaatacgcggactatcagcagatccagttcaatcacgataaagcgtactggaacaatattaaaaccccgttcaagcttgaattttaccaccagggtatgtacttcgacacgccggttgccatcaatgaagtgacggcgaccgcggtacgtaaaatcaagtacagcccggattatttcaattttggcgatgtgcaacacgataaagacacggtgaaagacctcggcttcgcaggcttcaaggtgctttacccgattaacagcaaagataaaaacgacgaaatcgtcagcatgcttggcgccagctacttccgcgtgattggcgcggggcaggtgtacgggctttctgcgcgcggtctggcaattgataccgcgctgccatcaggtgaagaatttccacgttttcgcgagttctggatcgaacgtccaaaaccaaccgacaaacgtctgacaatttatgcgctgctggactcccctcgtgcgacaggcgcttatcgcttcgtgatcatgccagggcgtgacacggtggttgacgtgcagtctaaagtttacctgcgcgataaagtgggcaaactgggcgtcgcgccgctgaccagcatgttcctgttcgggccgaatcagccgtctccggcgactaacttccgccctcaactgcatgattctaatggcctttccatacatgctggtaacggcgagtggatctggcgtccgctgaacaacccgaaacacctcgccgtcagcagctttgcgatggaaaacccgcagggctttggtctgctgcaacgtggccgtcagttctcccgctttgaagatctggacgaccgctacgatctgcgcccaagcgcctgggttacaccgaaaggcgactggggtaaaggcaaggttgagctggttgaaattccaaccaatgatgaaaccaacgataacatcgtggcgtactggacaccggatcagctgcctgaagccggtaaagagatgaacttcaagtatgcgatcaccttcagccgtgacgaagacaaactgcacgcaccggataacgcgtatgtgatgcagacgcgtcgttctacgggggacgtgaagcagtccaacctgattcgtcagccggatggcacgctggcatttatcgtggacttcaccgggcaggatatgaaaaaactggcgccggatactgccgtgacggcacaggccagcattggcgataacggtgaaatcgttgagaacgccgtgcgttacaatccggtcaccaaagggtggcgtttgaccctgcgcgtgaaggtgaaagatccgaaacagaccactgaaatgcgcgccgcgctggtcagtaacgataagccgctgagtgaaacctggagctatcagctacctgccaatgaataa

SEQ ID NO: 526468 - DNA, 1647 bp, Stenotrophomonas maltophilia
atgctattggggatcccttttcatatttcactgatctattccagccacacctggcatgtgaacagccagatgccctcctggtggctgacgctgttcaatgattttatccatgccttccgcatgcaggtgtttttcgtcatttcaggctatttctcttacatgctcttcttgcgctatcccctcaagcggtggtggaaagtgcgcgtggagcgcgtgggcataccaatgttgacggccattccgctgctgacgctgccgcagttcatcatgttgcagcatgttaaaggcaaggcggaaaactggcctaatctctcgttctatgagaaatacaacaccctggtctgggagctaatttcccacctctggttcctgctggtactggtggtgctaaccacggtgagtttgctgatcttcagtcaactgcgccagcgcgcgagcgccgcaacctcgaccttcttcgccaacatcaccctgggcaagctgtcgctgctgtttcttgcgctgggggtcgcgtatgccgccgtcaggcgtaccctgctcattgtctaccctcccattctgagcgatgggctgtttaatttcgtggtgatgcagaccctgttctacattcccttcttcctgattggggcgctggcatttattcatccccggcttaaagcgctgtttaccaccccctccccctggtgtgcggtgggtgctgcgctggcctttgccgcctatcttctcaatcagcgctttggcagcggggacgcgtggatgtatgagacagagagcgtgataacgatgctgatgggcctgtggatggttaacgtggtgttcgcccttggccatcgtctgctgaattttaaatccagtcgcgtcacctatttcgttaatgcttcactgtttatctacctggtccaccatccgctgacgctgtttttcggggcgtacattacgccgcatatcaaatcgaatgcgctgggcttcttcaccggtctggtctttgtggttggcattgccatcgtgttgtatgaaatccacctgcggatcccgcttttgcgtttcctgttctcaggcaaacctcaggtcggcggtgtgctcatcgaaacagacaaaaatgactttttccggcatgggtttgagggaaaggtagtgataaacggtattcacggcgatcgtagctgccgcttcctttggataaccgtacaccccggtgctaatggcggggaacgccatggtcttatagccgttatctgccgcaagccgcaggcagttacgataagcctgctccagaatctcagcctcatggcggtcgccaccgtgccagacgggtccaacggtatggatcaccgctttggccgggagatcgcccgcaagcgtaataacagcatgccccggcgggcactctccctgctgctggcgcacggttttgcatgcttcaaggagctgagggcccgcggcccggtgaatggcaccatccaccccgcccccacccaagagggaggaattggctgcgttgacgatcacgtcaacgtgcaccgtcgtgatatcaccatgaataacgtcgatttgcggtctcataaacaccctctgcaacccgcctttttcatcagtgtatcgcagagggagaaggagaaaaactgtcgcgaaaaaaacggcggttaa

SEQ ID NO: 526469 - DNA, 321 bp, Stenotrophomonas maltophilia
atgttcaaatccgcagcgtgtattatttctggtctgggactgatcctgtcctcttttttttctccggcttattcagcaactatagagaatggtggggtgattcattttcgtggcgcggtggtcgctgacccgtgcgaagtcacgccccggcatcagcagtttgcaatttcctgcccggaaaataaccgtatgaaaacgcataccatcagttatgacgaggcgctccggggccatcatcctcactcagcgctggccgctgttaccatgaaatacctgaatgaaaagaaaacgcttgcggtcgttcaggtggattaccgttaa

SEQ ID NO: 526470 - DNA, 333 bp, Stenotrophomonas maltophilia
atgagcacattcattctccttgccgcgcttgccagccagataacgttcagtacctcacagcaggcaaatgtgacaaccattattcctcaggtcacgctggcagacgcctgcgaatgtcaggttgaggtgttatctgtccgacaggggcagggggggcaaagtacatcgcggcagaaaaatactctttttatacccgctaatcagccgattgatttaacgcgaatcagtttaaatattcgctcaggggatgcggtaaaaataatcgtcaccgtttccgatggaaaatcgcttcatttatcacagcagtggaacgcaccggcaagtacgctttaa

SEQ ID NO: 526471 - DNA, 456 bp, Stenotrophomonas maltophilia
atgaaacttttcaaagtggcagttattgcagcaatcgtagtttctggcagtgctttcgcaggtgcggtaccacaatttggcggcggtcacagtggtggctggggtggcggcaataacggccctgactcaaccctgagcatttaccagtacggcggcggtaactccgcgcttgctttgcagacggacgcccgagattctgaattgaccattacccagcatggtggcggtaacggcgcagatgttggccagggctctgatgacagttctatcgatctgctgcaaaaaggctttggtaacagcgccaccatcgaccagtggaatagcaaagattctgttatcaacgtgaaacagttcggcggcggcaacggcgcggcggtagaccagacagcgtccggctcaacggtgactgtgcaccaggttggcttcggcaacaacgcgaccgcacaccagtactga

SEQ ID NO: 526472 - DNA, 456 bp, Stenotrophomonas maltophilia
atgaaaaacaaaacgttgtttatgatgtttacattactgggtgcgcctgggtttgtaatcgcaggtgattcagatttagccagttctgaatataattttgcgataaatgaattaaataaagcttcatacaatcaggcagccattattggtcaacagggttcaggaaataatgctgatgtacgccagggcggttctaaattgctgtccgttatttcccaggagggcgggaataaccgcgcgaatgttgatcagtcagggacgtataaccttgcttatatcgatcagaccggcaacggcaacgatgcgagtattaagcagggcgcttttggcaacaccgccatgattatccagaaaggctcgggtaacagggcgaatataacgcagtatggtacgcagaaaacagcagttgtagtacagagacagtcgcagatggctattcgcgttattcaacgctag

SEQ ID NO: 526473 - DNA, 1629 bp, Stenotrophomonas maltophilia
atgaaaccacaaacacgcatgcactttacgctctctttgttaaccgcaggggtcctgtgcgccagcacggcaacctgggcggctaacgtgccggcaggaacccagctggcagataagcaggaactggtcaggaacaacggcagtgaacccgcctcgctcgacccgcataaagtcgaaagcgatgtcgaattcaatattatcagcgatttattcgacgggctggtcagcgtctctccggcaggtgaaatccagccgcgcctggcggagaaatgggaaaataaagataacaccgtctggactttccatctgcgcccgggcataacctggagcgatggcacccccatcaccgcggaagatattgtctggagctggcagcgactggtcgacccgaaaaccgtctctccgtatgccagctatcccggcagtatgcgtatcgtcaacggcactgatatcgcagaaggcaaaaaagcacccgagtcgctgggcgtgaaagccatcaatgacaccacgctggaaatgacgctcacccagccaaatgctgctttcctggcgatgctggctcacccgtctctggtgccgatagataaagtcctggtaggtcgtttcggtgataaatggaccaaaccggagcacttcgtcagcagcggggcctataaactgtcacagtgggtggtgaacgaacgcattgtggcggtgcgaaacccgaaatactgggataacgcacatactgtcatcaacaaggtgacctatctgcccatttcctctgaagccgctgatgtcaaccgttacaaagcgggcgaaatcgacatcgcctacacggtgccgatcaaccagtttgctcagctgaagaaaacgctggggagcgagctggatgtatcgccgcagcttgccacctattattacgaattcaacaccacccggccgccgttcagcgacgcccgcgtgcgtaaggcgctgaatctggcgctggataaagatattatcgccgggaaagttttagggcaggggcaacgcccggcatggctcatcagccagccggatattggcggcgtcaagttacagaaccctgattacgccagctggccgatggataaacgcattgccgaggcgaaaaaactgctggccgaagccggatttaacgacagccatccgctcagctttaatctcctctataacacctcggaatcgcaccagcgtattgcgattgccgccagctcgatgtggaagaagaacctcggcgtagaggcgaagctgcaaaaccaggagtggaaaaccatgcttgataccatgcacacccataactttgacgcggtgcgctacgcctggattgctgattacgatgacgccgcaaccttcctgaataacttccgtaccggtgacagccaaaacaccactcagtacagcaatccggaatacgatctggctctggtgaatgcggcgaaggcgaaaacggcggaggagcgcggtaagttctaccagcaggcagaagatctgctggggcgcgatgtgccggcgatccctgtctatcactacgtgcgcacgcacctggtgaaaccgtgggtagggggcttcacgccggataagcttggctactattacaccaaagatatgtacatcgaaaagcactaa

SEQ ID NO: 526474 - DNA, 660 bp, Stenotrophomonas maltophilia
atggatcgtataattacttcttcacgcgaccgcacatcgctactcagcacccataaggtgctgcgcaatacctatttcatgctcagcctgacgctggcgttttcggctatcaccgcgacggccagcaccgtactgatgctgccttctccgggcctgatcctgacgctggtgggtatgtatggtctgatgttcctgacctataaaaccgcggataaaccagtgggtattctctccgcgttcgccttcaccggcttcctgggctacattctggggccaatcctgaacgcctatctgtctgccggaatgggcgacgtgattggtatggcgctgggcggtaccgcgctggtgttcttctgctgctcggcctacgtgctgaccacccgtaaggacatgtccttcctcggcggtatgctgatggcgggtatcgtgattgtgctggtcggtatgctggcgaacatcttcctgcaattgcctgctctgcatctggcaatcagcgcggtgtttatcctgatttcatccggcgcaatcctgtatgaaaccagcaacatcattcacggcggtgagacgaactatatccgcgccaccgtgagcctgtatgtgtcgctgtacaatatttttgtcagcctgctgagtatcctgggcttcgccagccgcgattaa

SEQ ID NO: 526475 - DNA, 336 bp, Stenotrophomonas maltophilia
atgaatatgttgagttttgaaggcaaagagatcgaaaccgataacgacggttatctgaaagagagcagccagtggagcgaagcgctggcggagaaaattgcggaaaacgaaggaattaccctctccccggaacactgggaagtggtgcgctttgtgcgcgaattctacctcgaattcaacacctctccggctatccgcatgctggtcaaagccatggcgaataaatttggcgaagagaaaggcaacagccgttatctgtatcgcctgtttccgaaaggcccggctaaacaggcgacaaaaattgccggcctgccaaagccggtaaaatgcatttaa

SEQ ID NO: 526476 - DNA, 282 bp, Stenotrophomonas maltophilia
atgtcaaatgtatgcaccattgcctgggtccatggccttgtacagggcgtcggattccgctacagcacccagcgcgaagcccttcagctcggactgacggggtatgcgcgtaacatggatgatggcagcgtggaggttgtggcctgcggtgaggcggatcgggtagagaagctggtggcgtggctgaaagcgggcggaccgcgcagcgcgcgggttgataaggtgctaacggaaccgcatcaacccggccgggaataccctgacttcagtattcgctattaa

SEQ ID NO: 526477 - DNA, 1191 bp, Stenotrophomonas maltophilia
atgagtgtacgtttagtgttagccaaagggcgcgagaagtcattactgcgccgccatccctgggtcttttccggcgcggttgcccgcatggaaggtaaagccagcctcggtgaaaccatcgatattgttgaccatcaggggaaatggttagcacgcggcgcatactcgcctgcatctcagatccgcgcgcgcgtctggacgttcgataaagaagaagccatcgatatcgacttctttgtccgtcgtctgcaacaggcgcagcagtggcgcgagtggctggcaaagcgtgacgggctggacagctatcgtctgattgccggtgaatccgacgggctgccgggcgtgaccattgaccgcttcggcaatttcctggtgttgcagctgctgagcgccggggcggaataccagcgtgccgcgctaattagcgccctgcaaaccctgttcccggaatgtgccatttacgaccgcagcgacgtggcggtacgtaaaaaagagggcatggagctgacgcagggcccggtcaccggcgaactgccgcctgccctgctgcctatcgaggagcacggcatgaagttgctggtggatatccagggcggccataagaccggttattatctcgaccagcgtgacagccgtctggcaacgcgccagtacgttgccgataagcgcgtgctgaactgcttctcctataccggcggctttgcggtctctgccctgatgggcggctgtgcccaggttgtgagcgtcgacacctcacaggaagcgctggatgtggcgaaacagaacgttgagctgaacaagctggatctgagcaaagcggagtttgtgcgcgacgacgtgttcaaactgctgcgtaaataccgcgaccagggcgagaaatttgacgttatcgtgatggacccgccgaagtttgtagaaaataaaagccagctgatgggcgcctgccgtggctataaagacatcaacatgctggcgatccagctgctgaacccgggtggcgttctgctgacgttctcctgctctggcctgatgacgacagatttattccaaaaaatcatcgccgatgccgcaatagatgcgggtcgtgatgtacaatttatagagcagttccgtcaggccgccgatcacccggtgatcgctacctacccggaagggctgtatctgaaagggtttgcctgtcgcgtcatgtaa

SEQ ID NO: 526478 - DNA, 318 bp, Stenotrophomonas maltophilia
atgattgccagcaaattcggtatcggccagcaggtccgccacaccttgcttggatatttgggtgtggtcgtggatatcgacccggagtattcccttgatgaaccgtcagcagacgatctggccgttgacgcagagcttcgcgccgcgccctggtatcatgtggttatggagggcgacgatggtcagcctgtccatacctatcttgccgaagcgcagctgagtggtgaactacaggatgagcatccggaacaacccactatggacgagcttgctcagaccatccgcaaacagttacaggcgccaagactgcgtaactaa

SEQ ID NO: 526479 - DNA, 414 bp, Stenotrophomonas maltophilia
atgaaagagaacgacattgtcgagattctgacgtccacgcgcactatcgcgctggtcggcgcgagcgataaaccggatcgcccaagctatcgggtcatgaaataccttctggaccagggatatcacgtgatcccggtctcgccgaaggtggcggggaaaacactgctgggtcagcagggctatgcgacgctcgcggacgtgccggaaaaggtggatatggtggacgttttccgtaattcagaggcggcctggggcgtggcgcaggaagcgatcgccattggcgcgaaaacgctgtggatgcagctgggcgtgattaatgagcaggcggccgtgctggcacgcgatgccgggctgaaggtggtgatggatcgctgtccggcaatcgacatcccccgtctggggctggcaaaataa

SEQ ID NO: 526480 - DNA, 663 bp, Stenotrophomonas maltophilia
atgaaaaccggcattgcctgggctgtggttgcattaatcatgccggtttgtgttttcgcaaccaccctcagactctcaaccgacattgacctgctggtgctggacggaaaaaaagtctccagctccctgctgcggggcgcagacagcatcgagcttgataatggcccgcatcaggtggtttttcgggttgaaaagacgattcgcctcgccgacaacgaacagcaggtgtacatttcgcctccgctggtggtcagctttaatacccaacgcatcagccaggtcaattttcgtctcccgcaccttgagacagaaaaagagtcactggcatttgatgcctcaccgcgcattgagctggtggacggggattctatgcccatcccggtaaagctggatatcctggcgctgacaaaaaggccaaaaggaacagattacgaagcggacacggagatctataacagagccagcaggcgcgcctccctgccccagttcgccaccatgatggcggatgacagtaccctgctttcgggcgtatcggagctggatgtactccctcctcagtcgcagacccttactgagcaacgcctcaaattctggttccagaatgccgatccggacacgcgcgcccgttttctgcaatgggcgaaacgacaaccttcgtcgtaa

SEQ ID NO: 526481 - DNA, 459 bp, Stenotrophomonas maltophilia
atggaactgacaacacgcacacttccggcgcgcaagcacattgctctggttgcgcacgatcactgtaaacaaatgctgcttaactgggttcgtcgccatcagcctcttttacagcatcatgccctttctgccacgggaacaaccggcaacctgatccaccgcgaaaccggtctggaagtgaatgccatgctgagcggcccgatggggggtgaccagcaggtcggcgctcagatttcggaaggtaaaattgacgttctgatattcttctgggatccgctgaacgcggttccgcatgatccggacgttaaagcgctgctgcgtctggcgacggtatggaacattccggtagccaccaatctttcaacggcagatttcatcattgaatcgccgcagtttaacgatccggtggagattttgatcccggattatcagcgttatcttgcggagagactgaagtag

SEQ ID NO: 526482 - DNA, 2079 bp, Stenotrophomonas maltophilia
atgacctcgtggatccggcaggatatggaactgaaagcaacttcaatgggcaaacgcctggcgcagcacccttacgacaaggttgtgcttcttaatgcgggagtgaaagtctccggtgaacgccacgaataccttattccgtttaatcagctactggccattcactgtaaacgagggctggtatggggggagctggagttcgttctgccagcagagaaagtggtgcgactccacgggaccgagtgggcggaaacccaacgcttctaccatcatctgaacatgcgctggcaccagtggagccaggagatgagcgtgattgccgcacaggtgctgcatcaggtgctggacgatatcgcgctaagcaatacgcagcagaagtggctgacgcgccagcaaaccgccgggcttcagcaaaaaatcacccaggcgctgacggcattgcctttaccggtggcgcggcttgaggaatttgataactgtcgcgatgcgtggcggaagtgtcaggcctggcttagcgatatcgagaaaagccgtctggcgcataaccaggcctggactgaggcgatgcttacgcaatatgccgatttcttcagtacggtggaatcatcgcctctcaatcctgcccaggcgcgcgcagtggtgaatggcgagcactctttactggtgctggcaggcgcagggagcggcaaaacgtcggtgctggtggcgcgcgcgggctggcttctgacaacgggcgaggcagttgccgaccagattttgctgctggcttttggtcgcaaggcggcgcaggagatggatgagcgcattcaggcgcgtttgcatacccaggatatctcggcgcgcacgttccactccctcgctttacacatcattcaacagggcagcaaaaaagtccctgttgtcagcaagctggagaatgatgctcaggctcgccaggcgctgtttatcaaggcatggcgtcagcagtgcagtgaaaaaaaggcgcaggcgaaaggttggcgtcagtggcttgaagaggaactcaactgggaggtgccggagggcagtttctggcaggatgaaaagctggcgcgccggctgggctctcgtctcgaccggtgggtaagcctgatgcgcatgcacggcggctctcaggcggagatgatagaaagcgcaccggaagcgatccgcgccgtgttttctaagcgggtaaagctaatggcgccgatgctgaaagcgtggaaaaccgcgctgaaagacgaaaacgcggtcgatttttccgggctaatccatcaggccattatcattctggagaaagggcgcttcgtcagcccgtggaaacacattctggtggatgagtttcaggatatttcgccgcagcgcgctgcgctgctttcggcgctgcgggcgcagaataaacacacgtcgctgtttgccgtgggcgatgactggcaggctatctaccgcttcagcggggcgcaactttccctcacgacggccttccatcactattttggggaaggcgatcgcagcgatctggacaccacctaccgcttcaactcgcggattggtgaaattgccaaccgttttattcagcagaacccacatcagctgtcgaagccgcttaacagcctgacgtcgggggataaaaaggccgtcacgctgctggcggacgatcagctggaaccgctgctggataaactgagcggctatgcgaaaccggatgaacggattctggtcctggcgcgttatcaccacctcaagccgacggcgctggaaaaagcggcaacgcgctggccaaaactacagctcgattttatgaccattcacgccagtaaagggcagcaggccgactacgtaattgtggtggggctgaaagaggggagcgacggtttcccggcaccggcgcgggaatccgtgatggaagaggcgttattgcctgttccggaagatttcccggatgcagaggagcggcgcttactgtacgtggcgataacccgcgcgcgccatcgcgtgtggctcttgttcaacaaagaggagccgtcggtgtttgtcgatattttgaaaagtattgacgtgccggtggcgagaaagccgtaa

SEQ ID NO: 526483 - DNA, 447 bp, Stenotrophomonas maltophilia
atgcgtaccgttctgaatgtgttgaattttgtccttggcggttttgccaccaccctttcctggctttttgccaccctggtgagcatcgtgcttatcttcacccttccgctgacgcgctcctgctgggaaatcaccaaactgtccctcgttccttatggaaatgaagcgatacacgtggatgaactggagccggaaagaaaaaatgccctgatgaataccggcggcacgctgctgaatattttatggctaatcttctttggctggtggctgtgtctgatgcatatcttcgccggtatcgcccagtgcattacgattattggcattccggttggcctcgctaatttcaaaattgccaccatcgccctgtggccggtaggacgccgagttgttccggtcgaagtggcgcaagccgcgcgtgaagccaatgcccgtcgtcgttttcagtaa

SEQ ID NO: 526484 - DNA, 2163 bp, Stenotrophomonas maltophilia
atgctaagccccctgcttcgtcgctatacatggaacagtaactggctgtataacgtcaggatatttatcgccctctgcggcaccgtcgctctgccgtggtggctgaatgatgtgaagctcaccatccccctcacgcttggggtggtggccggcgcgctggcggatctcgacgaccgcctggccggtcgtttgcgtaatctggtcatcacgctggtctgcttctttattgcttccgcctccgttgagctgcttttcccgtggccctggctgtttgccttagggctgacggtgtccaccagcggcttcattttgctcggcggcctcgggcaacgctacgccactatcgcgtttggcgccctgctgattgccatttacaccatgctgggcgtctctctttacgatcagtggtatcagcaaccggtcctgctgctattgggcgctatctggtataacctgctgaccttaaccgggcatcttatttttccggttcgtgccttacaggacaacattgcccgcagttacgaacagctggcccactatctggagctgaaatcccggctgtttgatccggatatcgaagaggacagccaggcgcccctgtacgatctggcgctggcaaatggccaactggtcgccacgctgaatcagaccaaagcgtctctgctcacccgtctgcgcggcgatcgcggtcagcgcggtacccggcgcaccctgcactactactttgttgcccaggatattcacgagcgcgccagctcctcgcatgtacagtacgctgatctgcgcgagaaattccgctacagcgacgtgatgttccgtttccagcgtctgctgtcgatgcagtctcaagcctgccagcaacttgcgcgctcaatactgctgcgcacgccctatcagcacgatcctcgctttgaacgcgcattcagccacctggatgcggcgctcgatcgcgttcaggccagtggaacttcgccggaacagttcaaagccctgggattcctgctcaacaacctgagagccatcgatgctcagctcgccaccattgagtctgaacaggcgatggcgatgccgggcaatgacgctgacaaccagcttgccgacgacagtctcaacggtttcagcgatatatggctgcgcctgagccggcattttacgccggattccgcactctttcgccatgcggtaaggatgtcgttggtactgtgcgttggctacgcgtttatccagataacaggattgcaccacggctactggatcctgctgaccagcctgttcgtctgccagccgaactataacgctacccgccatcgactcgcgctgcgtattgtcgggacgttagtcggggtcgccatcgggctgccggtgctctattttgtgccctcagtagaagggcaactgatcctgattgtgattaccggggtactgttcttcgccttccgcaatgtgcagtatgcccacgccacgatgttcatcacgctgcttgtgctgctctgcttcaatctgctgggtgaaggctttgaagtggccctcccccgtgtgatcgacacgctgatcggctgcgccatcgcctgggcggcggtgagctttatctggccggactggcgtttccgaaatttaccgcgcgtgtccgacagagcaatgaacgccaactgccgctatctggacgctattcttgagcagtaccatcaaggtcgcgataaccgtctggcctatcggattgcccgtcgcgatgcgcataacactgacgcagagctggcttctgttgtctcgaatatgtcaactgagccgcgcgccacggcagaaatccgggagacagccttccgcctgctgtgtctgaaccacacgttcaccagctatatctctacccttggcgcccaccgagagaaactgacgaatccgggcatcctggcactgctggacgatgccgtttgctacgttgatgatgcgcttcatcatcaacctgcggatgagccacgggttcaccaggcactggatgaactggtgcaacgtatcgcacaccttgatccaggcaccgacaacaaagctccgctggtccttcagcaaattggcctgcttatcgctttgctgccggaaatttgtcggctgcgacagcagatcgctacctggcggaatgatggccctgcgactcaggcagcgcattaa

SEQ ID NO: 526485 - DNA, 627 bp, Stenotrophomonas maltophilia
atgaaaaagatatcttatgatcggatttatcaatctcaagaatacctctctccgctgggcgaaattcatcatcgcgccctgtttggcggttataccctggccgtggatgaagcggtattcgcgatggtgtctgacggtgagctttaccttcgcgcctgtgagcaaagtgcaaaatactgtgtaaaaaacgcctcttcttttctgaccctgatgaaacgaggacgtcctgtgctgcttaattactaccgtgtggatgaaggtctgtggcaaaacagggaaaaactgcttcagctctcctcgtttgcgctcgatgccgccaggaaagagcgctaccagcgccatcagcgtaaccggcttaaagatctgccgaacctgacctttcagattgaggtcctgcttatggaggcgggcattactaatgaagagacgctacgacagttgggggcgaagacgagctggctgaaaatgcgctctaagaataaagcgctgagtatccgggtattgttcgcgcttgaaggcgcgattgaagggttacatgaagcggcactcccggcggatattcgccgggagcttacggagtggtttaatgcgctgcctgagtcgcagggccatcattccgccaggtag

SEQ ID NO: 526486 - DNA, 984 bp, Stenotrophomonas maltophilia; identical to SEQ ID NO: 167074

SEQ ID NO: 526487 - DNA, 657 bp, Stenotrophomonas maltophilia; identical to SEQ ID NO: 119515

SEQ ID NO: 526488 - DNA, 297 bp, Stenotrophomonas maltophilia; identical to SEQ ID NO: 26486

SEQ ID NO: 526489 - DNA, 207 bp, Stenotrophomonas maltophilia; identical to SEQ ID NO: 184276

SEQ ID NO: 526490 - DNA, 489 bp, Stenotrophomonas maltophilia; identical to SEQ ID NO: 119516

SEQ ID NO: 526491 - DNA, 300 bp, Stenotrophomonas maltophilia; identical to SEQ ID NO: 119517

SEQ ID NO: 526492 - DNA, 855 bp, Stenotrophomonas maltophilia; identical to SEQ ID NO: 119518

SEQ ID NO: 526493 - DNA, 2745 bp, Stenotrophomonas maltophilia; identical to SEQ ID NO: 156463

SEQ ID NO: 526494 - DNA, 330 bp, Stenotrophomonas maltophilia; identical to SEQ ID NO: 119089

SEQ ID NO: 526495 - DNA, 1461 bp, Stenotrophomonas maltophilia
atgatcagaattatagggtgctccttatgctgcgccgtcggcattgaccactcgatggaaaccttactccgcactgatcctgagaagtacggctaccaggctggtctaaaccgccttcagcgtttcctgaccaaaatccagtacgactggagccttcgggattatatcggccgcaaagtgtttgagggcgggtatgtgcgtcttcagcccaatgttttctcgtcgtccctgaccgaacgactgttccatatctgttgcagcctcgattacgtggaggcccagcgggccgcagcggtgcgggaaaagttactttctggcgaggtcgaagatacggcgcataaccgccgcatggcggagccgcagtttcgactggtgcaggaagccaacgtgctgcatatcgactttctctggtcactgcattgctttaacccgcgaccatttcgcgccatcgaactttaccgccaggtgtgggaagggggggcactggatctgctcgacgatgagccagctatgcaacccgtaccccgcacgccgatgccagcaccacgctggatgaagttgccggaaggccgtatcgggacgtcatttgacgggctgtctgatccgtctgccgaaatggcctattttgacggtcgggaggatgaccgtgcttcccgcagcctgctgagcagcggggaaagcctgaacatcgttgcattcgaagaagaggatgagctgacggtcgatgaagacactgcgtcctggattatctggcatgaatatgacggattacgccagcgtgtgtctgacggtgagtttacccccgtggcggcggcacagtacctgcttagatacggcgccgtccgaatttcccgggggaaaggtgcggtgtaccaccgcctcgctcaacgcgggcaggccttttcacgtcttggcattaacgaccagacgccgctgccgtccctgctcgtcagccaccgtttcaagatcctgaccgactgcgattaccgcctgctcgttgcccgtaaactgcgggggcagcggcagaaactgcgcttctggtgctgtgttgcggcctgtgtggcgctgcacacccacaaccgaacgcctcttggggcatggatcacgacgcaactggagaacgaacgccagcaacatctggcccggacgggtgacgaactgaaagccggtctgctcgacgctgtactgactctctgtaacctgcggattaagcctcaatcaatgcaaccggaggaacggttgtattaccgggctgtcagaaaacgctttctgacgacgttagccaggtgtatttcccaggagtacgacgaaaccttacgggaggttatttgggcgctgaggatgctgtccggtccccagtcttcgaaaaagacgggattccggcatgtggatgattgccgggagagtactgcggcactgttaaggcctctgctgaatcgtctggtccgcctgctggcgtga

SEQ ID NO: 526496 - DNA, 534 bp, Stenotrophomonas maltophilia
atgaccgataaagaggataaaaaaaggaacttaaggaagataaggggcatttcaatcaactgggaatttaataagcccactggtaaggaacacctgctattaattattgccatagtggcatgtattttccctagtcagatttttttcaattcctctctatggagcggcttcctgtatttaatttgtgttgcgggtagttatgcatacctggctatacctcattttaaacatcgtaaggaaatctggaagggatggcttgaccagtcgctgaaagagtaccagccgcttgatctgcaagcttgggaggtttttaaggcccgcgttagtgaggaaggcatgacttatgttgcttttgaatcatggatgaatactgaggctagtgctttatataaagaacccaaacaagaatggtcatttgtcgacaaaacaccggtcggagaaaatgatcagtcagaacctgttcaacagatttcagtaagtaataaaaaagaattgatcttgacccgccatttccggacagcttttgtatcttaa

SEQ ID NO: 526497 - DNA, 837 bp, Stenotrophomonas maltophilia; identical to SEQ ID NO: 118201

SEQ ID NO: 526498 - DNA, 396 bp, Stenotrophomonas maltophilia; identical to SEQ ID NO: 118202

SEQ ID NO: 526499 - DNA, 885 bp, Stenotrophomonas maltophilia
atggataatcacatctcatccagagctttgctacatcgacgggatgtcattaaaaacaacccgcgatttagtgaagctataatagaacactacagaatcaatgacgccatttataaaaaacaacccctgttctacaaaacgatgcttcaggaatcacggttcaatataatactctcaatatgttgttttgtttttggcaatcaggctgagtcggtctcggagattaaggcactgtgctcacgctataatatcgccagccctaacagcgttattgcgatcatcaccatacttaaaaccaccgggcgaattaagacctggcgctgtaccgaagatcggcgaaaaacaaaaatcgcgcctacggaaaaaggactggatgagcttaaacgctatatgtccggggcgttcacgcctgttagcattctttatccgacattcaacattaatgttaatcttctggacaatgacacactcaggcacaactttttccggcgcgccgcagaataccttttccgcggattaacattcagtaaagtacttccggaggtgggtttatttattgataaggatggtggccgaatgattatgctctatctctatttgcaggccattaaaaacaaaacagcatacggtgccataatagcgtattcagccagcacacttgcaaaagaatttttcgtctcgcgtattcacgtcaaccgcattatcaaatcggcacaggaggctggttatcttaaagatcgcggcgatggccggatgtccatttacccggcatttatcgaacttgtcgaaaattatgccggtttatattttgcctatgtcacacattacatcaatgtggtgccaaaagaacgacgccatgctgtcaacatgacgtctacactctga

SEQ ID NO: 526500 - DNA, 1176 bp, Stenotrophomonas maltophilia
atgaatgatttctcccgctttaatagccgactgaaggagccccgcctgccgcgatcgtcgctggtggcatggtcgctgtttgccctgctggtgatgtttattacctgggccagcctgttccagctggatgaggtcactacgggcagtggcaaggtgatcccgtcctcccacgagcaggtgatccagtccctggaaggggggattatccacagtctgatggtgcgcgaaggcgatatcgtcgagcgtggtcaacagcttgcccaactggaccggacgaaaaccgagtccagcgtgcttgagagcgagtctcgattaaatgctgcgatggcgacagccgcgcgtctgaatgctgaagtgaacgacaccgggctgacattcccggcagagctggatgacgacgttgagctggttaaacaggaaacggcgctttaccagtctcgtcgcgaaagccttgaaaaagggctggcgggtttacgccagggagcggatctcgtgcagcgtgaactggcattaacgcgcccgctggtgacgcagggggcggccagtaaggtcgaagtcttacgccttgaacgccaaaaaaatgagctggagagcaaaatcaccgagatgaaaaaccagtactacgttcgtgcccgcgaagaactggcgaaagcgaacgcggaaatcgaagcgcagcgttcggtgatgaaagggcgcgaagactcactcacccgcttaacgtttaatgcgccggtgcgtggcatcgtgaaagacattgacgtgacgacggttggcggggtgatcccgccgaacggcaaactgatgagcctggtaccgcttgatgaccagatggtgatagaagcaaaaatctcgccgcgcgatgtcgcgtttatccatcccgggcaaaaagcgctggtgaaaatcacctcttatgactactccatttacggcgggctggagggggaggtgacgatgatttcaccggatacccttcaggacgaggtgaaacgggatgtttattattatcgcgtttatatccgtacagacagtaaccatctgactaaccggcagggcaaggaattcccggtgtttccgggcatgatagctacggttgatatcaaaaccggcagtaaatccgtcattgattatctgctgaaaccgttaaataaggcaaaagaggcgctgcgcgagcgataa

SEQ ID NO: 526501 - DNA, 2166 bp, Stenotrophomonas maltophilia
atgaagacacatccacagtacgaaccctggttgcagggcatgctcatcatcgctaagcactatcggctggatttttcggcggagcatgttcgggtcacgattaaccatgaaagccagtcttcgcgccagctggtgctggaggagatggcgcgccagcttgggctggggatgcgttgggtagcggcggaagccgtatcgctcgacccgtggcgcttaccgctgctggcggagttcaccggcgggcaaatcgcggtcatcaaccgtatggacaacgaagggaacatcagcgtgcagttcagcggcgacggcggcctggagacgacgctgacgcgtgacgaactcggttcgcggttaaaagggctgatggtgctgcgtcccctggagtccacgccggatgcgcgcgtggatgattacatcaaaccctatgagaaaaactggttctggcagttggcgctgaaagactggcgtcgctacagcgacattatgctggtggcgctggtcgccaacgtgctggcgctctccggcatggtcttttccatgcaagtgtatgacagggtggtgccgtcccagtcggaggccacgctgtgggtgctgtttgggggcgtgatgatcgctatcgtgtttgaattcatcatgcgcatgctgcgggtgcatatttcggatgtggtagggaaacgcgccgacctgcgtatttccgagcgcgtgtttgcccacgccctgaggattaaaaacggcgcacggtcgaaatcgaccgggtcgtttatcgcccagatccgcgagctggagtcggtgcgggagctgatcacctccaccaccattgcggccatctccgatctgccgttcttcctgctgttcgtcttcattctgtggatgattggcggcccgctggtgctggtggtgctgctggccgtgccgctgctgcacattcccggcctgctggtgcagcgcccgctgggaaaactctccagcgaagggatgcgtgaatcggcgattcgtaacgccacgctggtggaagcggtgcaggggcttgaggacatcaagctgatgcgcgccgagcagcggttccagaaccagtggaataacaccaatgacgttgccgccagcgtcggcatgaaacagcgctggctgacggggctgctgctgacctggacccaggaggtgcaatctatcgtctacgccgtggtgctgctggtgggctgttacctggtcatcagcggcgacatgaccaccggtgcgctggtgggcacctcgattctggcgtcccgcaccattgcgccgctgtcgcagatttccggcgtgctctcccgctggcagtcagcaaaggtggcccgcaagggactggatgacctgatgcagcgtccgattgacgatccccagcacggcaaaaaagtgcataaagcccacctgcgcggtgattatcagctggacgacgtcgggttttattacgacgaagaagagaagctcaccgtgctgaacgtcagcaaactgcgcattcgcgccggggagcgcgtggcggtgctcgggcggaatggttcggggaaaagcaccttgctgcacctgctggcgggaatgcaggagccacagcagggcagcattttgctggacgatattgctctcaatcatcttgacccggctgacgtacgccgcgatatgcagctgctcagtcagcaggcgaggctgttcttcggctccgtacgcgacaacatcctgatgggtaatccgctggcgacagacgaggaaatccatcaggcgctggtcaatagcggcgcgctggagtttgtgcgcaagcagaaaatggggctgaacaccatcatcaacgagggcggaatggggctttccggcgggcaacgtcaggcgctgttgctggcccgcgcgctgatcacctcgccgaatattctgctgctggatgaacccaccgcctggctggatgaggtcagcgagaagcagtttatccagcatctccaccagtggctcggtaagcgccggacgctggtggtggcgacgcatcgtctgccgattctggacctggttgaccgcatcatcgtgctggaaaacggcaaagtggtgatggatggccctcgtgatgccatcttacgccagcacggaatggccccgcagcaggcggcgcagcgcacggttaaactgaaaacggagggcgtggcatga

SEQ ID NO: 526502 - DNA, 1176 bp, Stenotrophomonas maltophilia
  misc_feature (15)..(24): n is a, c, g, or t
ttgcgtcagggcttnnnnnnnnnngggcttgctaacgtcaccggcgtcgccgcggtggactacaactgggatggtgcgcaggatctgctggtgtctcagcagaatggcaaggtggtgctggtgcagaacaatgcggagatcgctgacggtaccgcgatgcatctgcacattgtcgatagcgaaggcatcaacgcctactatggcaacacggtcaatctgtataacgctgcgggcgtgctggtggcctcgcagatcatcaacgcccagtccggcattggctcgaatgatacctctgcgcaggtaagtttctacgggctggatccgaacgaaacctactcggcggagatcgtgaagatcaccaacggcgtgtcggataacgtcacctggaccggcctggacgcgagcaacggcaaagagggttatgttctcaccgccgaagcggccaccggcggccacagcggaaccattaccggaaccgggtataacgacacctttatcgcagaggatgggacctatacctataacggctccggcggctggaatacccattccgactacgacacctggagcaataccggcggcatggacgtggtggattaccgcaatgccacctctgggataactgttgatttgcgcctctcaacggctcaggacaccgggttcggtaccacacggttgttgaatattgaagggattaacggctccgactatgacgacgtgatcaccggcaacagcggtgataaccagttcgaaggccgcggcggtaacgacaccttcaacatcggcagcggcggtcaggacacgctgctctataagctgatcaacgcgtctgacgcgacgggcggcaacggtagcgatgtggtgaacggctttaccgtcggtacctgggaagggacggcagacacggaccgcatcgatctgcgcgacctgctttccgacagcggctataccggcaccggctcggcgagctacgtgaacggcgtggcgacgctggacagtagcgcgggcaacattgctgactacatccgcgtggtgcagaacggcagcaacaccgagatccaggttgacctcgacgggacgggcggccagttctcgccaaccaccctggtgacgctgaacggtgtgcagacggatctggcgacgctgctggcaaatcatcaactgttaattgcgtaa

SEQ ID NO: 526503 - DNA, 3981 bp, Stenotrophomonas maltophilia
  misc_feature (3961)..(3970): n is a, c, g, or t
gtgaccgtcacgctgggcggaaaaacctacactgcgcttgtcggcagcgatggcacctggacgctggacgttccggcggcagacctggtcgcactgagccagggtgcgctgacggtgaccgccgtggtcaacgataaagccggtaacagcggccagacgacccataccttaacggtcgataccgtcgcaccagccgtcaccatcagcaccgtggccgatgacgatatcgtcaacaacgccgagcagttggcggggcagactattagcgggaccaccaccgcggagcagggccagacggtgaccgtctccttcaacgggcacagctatcaggcgaccgttggagcagacggttcgtggtcggtcttcgtgccgggccgcgacttcctcggcctgagcgatggggattacaccattacggctacggtgagcgataaggcgggtaacccgggcagcgcaacacacgacgtgacgctgaacggcgacgtgccgaccatcgtcattaacacctttgcccaggacgatattgtcaacgccgccgagcacggcacgccgctaattgtcagcggcaccaccgacgcgcctgcgggccagacggtgaccattacgcttaacggtaaaacctacacggctaccgttcaaaatgacggcacctggagctatacggtcggcagcgcagacgtgaccgcgctggcggacggcggttcgtacgtgatcaatgcgcaggtgagcaacgccatcggcaacagcgccagcgataaccacagcgtcaccgtggatctcaccgcaccgtcaatggggatcagcattgattccctgcaaaacgataccggcctgagcgcgagtgacttcatcaccaacgataagcaggtggtggtgaacggttcgctatcggcgcagctcggcaataacgagaaggcgcagatcagcctggagggtggttcaacctggattgacctgaccgtgaccggcaccacctggcgctacaccgatgggcgtaccctgacggacgggacgtacccgtaccaggtgcgcgtcattgataatgcgggcaacgttggggcaacggacagccaggacgtggtaatcgatctgacgaagcctgcggcgacgagcattaccgtggattccgtctcgcaggataccggcctgtccgacagcgacttcattaccagcgacaaccagattagcctgaaagggacgctcggcgcggccctgggcagcggcgaccacgcgcagatcagcctggacggtggcgcgacctggactgacgtgagcgtcagcggtctgagctggacctacgttgatggccgcacgctggccgacggagactacaactaccagctgcgggtgattgacgacgcggggaatatcagcgccaccaccagccaggtggtgaccattgataccgtcgcgccggacgccagcaaaacgatcgctatcgacagcatcagcgacgataccggcctgagcagcagcgactttatcaccaatgatacctccctgacgctgcacggctcgctcggcgcaacgctggccgacggcgaatatgcccagattagcatcgacggcggagtcagctggcagaacgtgatcgtcaccggcaacagttggtactacgtggacggccgcacgctgggtaaccagacctatgactactacgttcgcgtagtggatgcggcgggcaacgtgggtgccagcgctcatcagcaggtgatggtcgatacggtcgcgccggatgcggcgattacggtgaccgtggataacatcaccgtcgataccggcttcgacaataacgacttcctgaccagttcgacctcgtacacgctcaacgggacgctcggggccgaactcggggcgggtgagtatgtgcaggtgagcatggatggcggcactacctgggtttacgccacggtaagcggcacccggtggagttataacgacgcgcgcaccctggccgacggcgactaccgctatcaggtgcgggttgtcgatcaggcgggcaacgtcggggccaccaccacgcaggacgtgacggtggatacccaggcgccgcagtacggcatcaccattgacagcatcagcgaagataccgggcagtccgggagtgatttcatcaccatggacacctcgctgacgatcaacggctcgttgggcagcgcgctggccagcgacgagcgcgtacagatcagcctcgacggcggcaatacctggattgacactgccgtcactaaccagcgctggagctatacggatacccgcgatctggcggacggggattacacctggcaggtgcggatcatcgaccaggcgggcaacgtcggctcaacctcgtcgcaggtggtaacggttgataccacgccgcctgaaacggtgggaacggtggtcagctataccgacggggaaggtgaacgtacgggcacgtacggcgcatcagtcgcgacagacgatacctcaccgctgatcaacggtacgcttaaccgtgctccggaagacggcgaaatcgtgcagctttaccgggacgggatcttgctgggtcaggtcacaatgaacggcagcgcaagctggtcctatcaggacaacggcctgctcgacgggaatcacacttacattctgcgcgtcaccgacaaagccggtaactacacggaatcggatggctttgtgctgaacgtcgataccagcatcccgaccaccacggcggcgattactgcccagaccacctcggataccacgccgattattaatggcacggtgtctgcggacctggtgaatggggagtacctggtggtgatggtgaacgggaaaacctatacgtcgcagaccggcggcgcggtggtagtcgacccggatcacaatacctggtatctgcagatcccggacagcgatgccctgagcgtggcgaactacgacgtaaccgcgcaggtgaagagtagcgcgggcaacggtaacaccactggtacggcaaccggcagcctggtgatcgataccacctcggtgaataccgactgggcgaccacgacgggtaactcgaacaactcgaccatgacggtgggcaccaatagcagcgggctgtggaatatcattgctaacggccagtcttactccagcagcgatagctcgacctatgccggcaatacgctgagcaacacccgtgtctattacgtggtgagtcagaccgccgccgactttgaccgtaacggcacccaggatattttcgcaactgagaacacctacgcgggttctacgcaggtgatgtggacctacgatggcagcagttacaccgccggccagctggcaatggggaccactatctggtacggcggcgtaattgcctacgataaaaccggggattgctatctggatctggcctacggagatgccggtatggactccctgacctacctggttaataccaacggcgttctgtcgccggacggcaccggcggggaaggtggattctacggccagttcgattccggacgtgaaatctccggcgtcgacctgaacaacgacggcaccgtggacatcgtgcagcacaccaaccgcagcggggcgtactcgctcaccgtgataaacaacaacgggaacggtacgctctccattggccagaacctgaccaacgtgtttgtggccaacgcctcgaataccaccacggcggcgtccatgacgtgggcggactttaacggcgatggctacatggacctgtacctgggcagcagctacaacagcaacggcggggtgatttactacaacgacggtaccgggcagctatccaccaccaggagcgcggtggaagcctctaacgccacggcgggctatttgtcggtggcggtggactggaacggcgatgggcagatggacatcatcaagctcagcacctacggcggctcgcagacggcaaccttgttcaccaacaacggctacggctcaacctggacttcaagccagcttgcgtcagggcttnnnnnnnnnngggcttgctaa

SEQ ID NO: 526504 - DNA, 1497 bp, Stenotrophomonas maltophilia
gtgtacggtgagcggctgctgagcttccgccgcattcagcacgtcgtcgcccgacaacgtgttcacgctaatcaccggcgcggtggtgtccacgctgatggtatgcgtcgccgaggcgctgttcccggcgctgtcctgcgccgaagcagaaacctggtagctcgcgccgtcggccagagcgcccacgtcggcggctggaacggaggtctgccaggcgccgtcgctctgaatggtggccgtatagctcttaccattcagggtgatagtgacctgcgtaccgctggcgaactgcgcactggaaccgttgataaccagcgacgcgcccgcttctgccgcattgatcacgtcatcaccgctgagggtgttgacggtcagcgcgaccgatgcggtatttaccaccacgtcatgggtctgagtgctgctgttgcctgcgctgtcggtgatagtcgcgctgagggttacggtgccgtcggccagtgcggaaatcacgctggccggaacgcccacgctccatttgccgctggcgtcaacggtggtggtgtactgattcgaaccgatggtgataatcagcttatcgccgacgctggcgccggttgcggtgccgctgacgatctgcgcctgcccgtgctccacgctgttgatgacgtcatcacccgccacgacgttaaagctgacggtcggcggcgtggtatcaagcgtaatcgctttacccgcgctgcccgggttacccgcggcgtcactcacgctcacctgcacggtgtagccgttatccgccagggcggacaggtctgtgcccggcacgttaacgctccagacgccgccctgctgaacctgcgcggtgtagctgttcccgccgaaggttacggttaccgtctgaccgacttccgccgtggtggtgccggaaatggccacgcccgcagccgcttcgctgccgttgatcacgttgtcgcctgcgaccgtgtcaatcgtcacggttggtgcggtggcatctacactgtattcgcggcccgccgaagcgctgttgccgtgcgcgttggtgatgctcacctgcacgctggcgtcgccgtctttcagacccgccagatccgaggaaggcacgctcgccgtccagttgccgtcggcatcgactttggcggtgtaagacctgccgccaaaggtgatggtcacggtctggttctcttccacattggatgtgctgccggaaagcaccagatccgcgcctttctccgccgcattaatcacgtcgtcggtggcgatggcatcgatgctgattgccacggctgccagatcgacggtgacgtcgtggctgatggagaccggattgcccgccgcgctctggcccgctacggtgacggtcatcgtgcctgcggccagagcgcccacgtctgccgccgggatcgccgcggtccaggagccgtctgccagtaccgacgcggcataggtcttgccattcagggtcacggtgagcgtagtgcccgccgccagcccatcgcttga

SEQ ID NO: 526505 - DNA, 213 bp, Stenotrophomonas maltophilia
atgaacaccctgattaaacctggactgtttttaacttttattttgatgatggtttctgccagcgcgaatgcatccggcggaattgcgctgggcgcgacgcgcgttatttatccggccgatgcaaaacaaacgtcgctggcgatcaccaacagcaataaacaagagcgctatttaattaacgcgtggggtgatgctgccaacttactgatttag

SEQ ID NO: 526506 - DNA, 543 bp, Stenotrophomonas maltophilia
atgacaaggactgggatactgctgtgtgcccttgcgattgcctcagcggtaaacgcacataccgttgtcatagacggcggcaaagtacacctcaggggagagctggttaacggcggctgcgccgtggccccggacagccagaatatgcgcgtggatatggggcaataccgcacaaacgccttttccggcgtcggcagcttttccacggttaatgtgcctttcaccgtacgtctgctggattgcagcgtggacgtctcccgcaccgtggggatccagttccagggagtgacacctgcagaagacccgcaggttttcctggcgacatcgcggccgggggaaaatgcggtcagcagtggtgtcggactggcgctttttgacgaacagcaacgtcagatcatcccgaacgcgacggcagtgagctggttacccattaacacccgcgagctggtatttcatttcagcgcccgctaccgggctatttccgaacaccttgtaccaggcactattcagtcgaatgtctggtttacgttgatttatccctga

SEQ ID NO: 526507 - DNA, 564 bp, Stenotrophomonas maltophilia
atgaaactcagcaacattgcttctactgttattgcaactctggccctggtcgcgggtgccgctcacgcagaagatccggtagcacctgtatctgtaaacggtggtacggtgcattttaaaggtgaattagtgaatgccgcgtgttcagtgaatactgactcttcagagcagacggttaatctcggccagtaccgtaccgcgaaattcactaaagtgggtgacaccacctccaatattcccttcaccatcgaactgaacgactgcgatcctgcggtagcgaaaactgctgctgtcgcgtttaccggccagatcgacgccaccgacaaaacgctgctggcggtaagctccggtaacaacgacaactccgcgaagggcgtaggcattgagatcctcgacagcaaatcctccacgctgaccccggacggtgcaaccttctctgcggcgcagaacctgattgaagggactaacaccctgaacttcaccgcgcgctataaagccacggcggcgaccaccgcgccaggccaggcaaacgcggacgcaacattcgtaatgaaatacgagtaa

SEQ ID NO: 526508 - DNA, 867 bp, Stenotrophomonas maltophilia
atggcagcaaagattattgacggtaaaacgattgcgcagcaggtgcgctctgaggttgcggaaaaagtgaaggcgcgtaaagctgccggaaaacgcgctccagggctggccgtagtgctggttggcagcaacccggcctcgcaaatttatgtcggcagcaaacgcaaagcgtgtgaagaggtggggttcgtctcccgctcttacgatctgccggaaaccaccagcgaagcggaactgctggaactgattgacaccctgaatgccgataaagagatcgacggcattctggttcagctgccgctgcctgcgggcatcgacaacgtgaaggtgctggagcgtatcgcgccggacaaagacgttgacggtttccatccgtataacgtgggccgcctgtgccagcgcgcgccgcgcctgcgtccgtgcaccccgcgcggcatcgtgacgctgctggagcgttataacatcgacacctatggcctgaacgccgtggtgattggcgcctccaacatcgtgggccgcccgatgagcatggagctgctgctggcgggctgcaccaccaccgtcacccaccgcttcaccaaaaacctgcgtcatcacgtcgaaaacgccgatctgctgatcgttgcggtcggcaagccgggctttattccgggcgagtggatcaaagagggcgcaatcgtcgtggacgtgggtattaaccgtctggaaaacggcaaagtggtcggcgacgtggtgtatgaagatgccgcagcgcgcgcatcctatattactccggtcccgggcggcgtaggcccgatgacggtagcaacactgattcagaataccttgcaggcgtgcgaggagtatcacgacgtagaggacgcgtaa

SEQ ID NO: 526509 - DNA, 213 bp, Stenotrophomonas maltophilia
atggcaactttttctttaggaaaacatccgcacgttgagctgtgcgatctgctgaagctggaaggctggagcgaaagcggcgcgcaggcgaaaatcgtcatcgccgacgggcaggtaaaagtagacggcacggtggaaacccgcaagcgctgcaaaattgtcgcgggccagaccgtgagctttgcaggtcagagcgtgaccgtgacggcctga

SEQ ID NO: 526510 - DNA, 1500 bp, Stenotrophomonas maltophilia
atgagtctgatatcagggtttgttaaatcgctgtctaagttatcgatgattggtcgcgccttaatgctgccaatttcactgcttcccgctgcgggcctgctgctggccttcggcgataagttccacctgccgctgatgatgaacgccggcggggttatctttgataacctgccgatgctgttcgccatcggctctgccgtcggtctggcttcggaatccggcattgcggcactctctgcggcggtctcggtgtttgtcaccaacataaccatcagcaccgtgctgagcattacgccggaaatggcctcccagggcgggaaatacgccatggtcgtcggcattccgacgttgcaaatgggcgtctttggcggcctgatctgcggtattctcgcggcctggtgctacaaccgcttccacaccatgcagctgccggaattcctcggtttcttctccgggaagcgttttgtggcgattgcgacggcatttctgtcgttcctgctcggcctgctgctgccgtacgtgtggcagcatattcagtccgggatcgacgccctgtccgtggtggtgaacggcgataaccaggcggcctcgacctttatcttcgggctggtggagcgcgcgttgatcccgctcggcctgcaccacatctggtatccctccttctggtattcgttcggggattacaccacccaggcgggtcaggtgatccacggcgaccagaccatctggttcaagatgctcgaagaaggggtgaaatccttcagcagcgatacctaccagaacgccgggaaattcatgcagggcgagttcccgctgatgctgttcgcgctgcctgcagcgtgccttgcgatgtaccatgaagcgcatacgaagaataagaaaattgcggccggtattctcttctccgccgccctcacctgcttcctgacgggcatcaccgagccggtagagttcacctttatcttcgtggcgccaatcctttacgtcttcaacgccatcatggcgggcctggcgtacatgaccatgtacctgctgcatgcgcacatcgccaagtcgttctcggcgggctttatcgactacctgtcgttcgggatcctgccgtcgtttaacggctatcagaccaacttcctgagcgccattatcatcggtatccctatggccctgatttactacttcacgttccgcttcgtgatccgccgtttcgacgtgaaaacgccgggccgcaccgaagtgaccgccagcgcgaatgacaagtccgattccgaacttgccaccgaaatcatcggcctgctgggcggtgcgcagaacattgattctgtcggctcctgcatcacgcgtctgcgtctggaagtggcgaagagcgaagcggtggaccgggacgggctgaacgggctgggcgcgcgcggcgtggtgtttgttggcgacaacgggatacaggtgattttcggggccagagcacagtttatcgcccagaccatgtccacgatgattggcaaataa

SEQ ID NO: 526511 - DNA, 900 bp, Stenotrophomonas maltophilia
  misc_feature (871)..(880): n is a, c, g, or t
ttgaagaaagtcagcattattgatgttgcaaagcatgcgggcgtgtcggtttctaccgtgtcgctggtgctgcgccagaaagggaaaatctcagaggcgacgatcgggaaggtcaatgccgccatcacaacgctgggctatgttcataacgtcgccgctgccaaccttcgcgccaacacctccaatttaatcggcctgatcctgcgggacttcagcgacagcttttccatcaaagtgatggcgagcatcgttcaggagctggagaaacagggttatatggtttttctcggtcagccgctgaacgacgacgaacatcttgagcgtactctgctctcatttaagcagcagggcgtggcgggcgtcatctatctggcgtcggacacccgcgccgcctctctcccggaacacattcgccaatgcccgctgccgcttgtggcggtttcgcagtcgttgctggaagagaaatgcaatctggtgatgcgcgataaccgccaggcggcgaacctggccgcgcgttatcttatcgagcgcgggcaccgcaccatcgcctacattggcgggcgcgacgggtgccgtattcgcgagcagcgcctgctcggttttcgcagcgcgatgacgcagaacggcctggtctggcgtgaggaatattcacccgcctgcaccgatgatacgcaggcggcggccatggcgactcgccagctgctggagaagaacaacacgattaccgccctgctctgccattcgccggacgcgatgatcggttcgatctccggcattcaccaggtggggcgcacggtgggcaaagacgtgtttttaacccagcaggtggcgctgattggttttgaagatatgcttcacgtaaacctcacgnnnnnnnnnncctcacgtcgccgtcactga

SEQ ID NO: 526512 - DNA, 522 bp, Stenotrophomonas maltophilia
atgcctaccgttatcacccacgctgccgtacctctgtgtctgggcttagggctcggaaccaaagtcatcccaccccgcctgctgtttgccgggatcgtcctcgccatgctgcctgacgctgacgtactggcgtttaaattcggtgtcgcctacgggaatattttcggccaccgcggtttcactcattcgctgctgtttgccttggtagtgcccatactttgcgtgctggctgggcgtcgatggttccgggccagcctgtcgcgctgctggctgtttttaaccgtgtcgctgctgtcgcacagcctgctggattcgattaccaccggcgggaaaggcgtcggctggctgtggccctggtcagatgagcgcttctttgcgccgtggcaggtgattaaggtcgcgccgtttgcactgtcgcgctataccacgccgtacgggcatcaggtgattatctcggaactgctgtgggtgtggctgccggggatggtgctgatggggttgctgtggtggcgacggaggtaa

SEQ ID NO: 526513 - DNA, 1386 bp, Stenotrophomonas maltophilia
atgttaaaaatctttaatacaatgacgcgccaaaaagaggaatttaaacctatccatgccggggaagtcggcatgtacgtgtgtggtattacggtttacgatctctgtcatatcggccatggccgtacctttgtcgcgttcgacgtggtgtcccgctacctgcgcttcctgggctataacctgaagtatgtgcgcaacatcaccgacatcgacgacaaaatcattaaacgtgctaatgaaaatggcgaaagctttgtcgcgctggtggatcgcatgatcgccgaaatgcacaaggattttgatgccttgaatattctgcgcccggatagcgagccgcgtgcgacccaccatattcatgaaatcattgagatcacccaaaagctgatcgagcgcggtcacgcctatgtggcggacaacggcgacgtgatgttctcggtgccgacggacccaacctacggtgcgctttcccgccaggatctggaccagctccaggccggtgcacgcgtggacgtggttgacgtgaagcgtaatccgatggacttcgtgctgtggaagatgtccaaggcgggcgaaccgagctggccatccccgtggggcgaagggcgtccgggctggcacattgaatgttccgcgatgaactgcaaacagctgggcaaccatttcgacattcacggcggcggttcggatctgatgttcccgcaccatgaaaacgaaatcgcgcagtccacctgtgctcacggcggcgagtacgtgaactactggatgcactccgggatggtgatggttgaccgcgagaagatgtcgaaatcgctgggtaacttcttcaccgtgcgcgacgtgctgaagtattacgacgcggaaaccgtgcgctacttcctgatgtccggccactatcgcagccagctgaactacagcgaagagaacctgaagcaggcgcgcgctgcgctggagcgtctgtataccgcactgcgcggcaccgacaggtctgttccggccgctggcggcgaggcgttcgaagcccgcttcgttgaggtcatgaacgacgacttcaacacgccggaagcctactccgtgctgttcgacatggcgcgtgaggtgaatcgcctgaagtcagaagatatggcggcggcgaatgcgctggcgtctcatctgcgtaagctctcttccgtgctcggcctgctggagcaggacccggacgtgttcctgcaaagcggcgcgcaggcggacgacggcgaagtggcggaaattgaagcactgattaaagcgcgtctggaagcgcgtcaggcgaaagactgggcggcggcggatgcggcgcgtaaccgtctgaccgagatgggcattattctggaagatggcccgcagggaaccacctggcgtcgtaagtaa

SEQ ID NO: 526514 - DNA, 495 bp, Stenotrophomonas maltophilia
atggttactttccacactaatcatggcgatatcgtaatcaaaacctttgatgacaaagcgcctgaaacagttaaaaacttcctggactactgccgcgaaggtttctacaacaacactattttccaccgtgtgatcaacggctttatgatccagggcggcggtttcgagcctggcatgcgccagaaagagacgaaagaagcgatcaaaaacgaagcgaacaacggcctgaaaaacacccgcggtacgctggcaatggcccgtactcaggccccgcactctgctaccgcacagttcttcattaacgtggcggacaacgacttcctgaacttctctggcgaaagcctgcaaggctggggctactgcgtattcgcagaagtggttgaaggcatggacgtggtcgacaagatcaaagccgtttctactggccgcagcggtatgcaccaggacgttcctaaagaagacgttgtgatcacaagcgtgaccgtcagcgagtaa

SEQ ID NO: 526515 - DNA, 723 bp, Stenotrophomonas maltophilia
gtggcgacactctttattgcggatctgcatctgcaaacagaagaaccggcgataaccgccggttttctgcgttttttacgcggtgaagcgaaaagcgccgatgcgctgtacattctgggtgacctgtttgaggcctggataggcgacgacgatccgaacccgctgcaccgtgagatggcagcggccattaaagcgctggtggattccggcgtcccctgctatttcattcacggcaaccgtgatttcctgatcggccagcgctacgcccgcgagagcggcatgacgctgctaccggaagagcaggtgcttgacctctatggccgcaatattctgatcatgcacggcgacacgctctgcactgacgataccggctacctggcgtttcgcgccaaagttcacaccccgtggatccagaaagtgttcctcgccctgccgctgtttatccgcaaccgcatcgccgccagaatgcgcgcgggcagcaaggccgccaacagcagcaaatcgatgaccatcatggacgtcaacccgcaggcggtggtgaacgtgatggagaagcatcgcgttcagtggctgatccacggccatacccatcgtcccgatgtgcattcccttatcgccaacggcgagcccgcccatcgcgtggttttaggcgcctggcacagcgaaggatcgatggtcaaagtcacgccggaaggtgtggaactgatcgccttcccgttttaa

SEQ ID NO: 526516 - DNA, 510 bp, Stenotrophomonas maltophilia
atgtcttcccgcaataatccggcgcgtgtcgccatcgtgatggggtccaaaagcgactgggctaccatgcagttcgccgccgaaatctttgaaatcctgaatgttccgcaccacgtcgaagtggtttccgcgcaccgtacgccggataaactgttcagcttcgccgaaagcgccgaagagaacggttacgaggtgatcattgccggtgcgggcggcgcagcacatctgccgggcatgattgccgccaaaaccctggtgccggtactgggcgtgccggtacagagcgccgcgttaagcggggttgatagcctgtactctatcgtccagatgccgcgcggtatccctgtcggtacgctggcgattggtaaggcgggtgccgcaaatgccgccctgctggccgcgcagatcctcgcgacgcatgataatgacttacatcaacgcctggcggagtggcgtaaagcccagaccgacgaggtgctggataacccggatccgcggggtgcagcatga

SEQ ID NO: 526517 - DNA, 1068 bp, Stenotrophomonas maltophilia
atgaagcaggtttgcgttcttggtaatggtcagcttggccggatgctgcgtcaggccggtgagccgctgggtattgccgtctggcccgtcgggctggacgccgagccggaagccgtgccgttccatcagagcgtgatcaccgccgaaattgaacgctggccggaaaccgccctgacccgcgagctggcgcgccataacgcctttgtgaaccgcgacgtcttcccgatcatcgccgaccgtctcacgcaaaagcagctgttcgacaagctcggccttgcgaccgcgccgtggcagctgttgtccgacaaaagcgagtggaatgacgtcttcgccatgctgggcgatctggcgatcgtgaagcgtcgtgtcggcggctacgacggtcgcgggcagtggcgcctgcgcgcgaacgacaccgccgagctgccggacgactgctacggcgagtgcatcgttgagcagggcataaacttcagcggtgaagtgtcgctggtgggcgcgcgcgggcatgacgggcacaccgttttttacccgctaacgcataacctgcatcaggacgggattctgcgcaccagcgtcgccttcccgcaggccaatgctgaccagcaggcgcaggcggaagagatgctctctgccatcatgcatgagctgggctatgtgggcgtaatggcgatggagtgtttcgtcacgccatcgggtctgctgatcaacgaacttgcgccgcgcgtgcacaacagcggccactggacgcaaaacggcgcctccatcagccagttcgagctgcacctgcgcgccatcactgacctgccgctgccgcagccggtggtgaccagcccgtcggtgatgatcaacctgatcggcaccgatctgaactacgactggctgaagctgccgctggtgcacctgcactggtacgacaaagcggtgcgcccgggtcgtaaggtcggccacctgaacctgaacgataccgacacggaccgcctgagcgccacgctggaagcgattgttcccctgctgccgccagaatacgcgagcgggattgtctgggcgcagtcaaaactgaagtaa

SEQ ID NO: 526518 - DNA, 1071 bp, Stenotrophomonas maltophilia
atgaacgatggaacggactatcgcgcgatcctcgcgtccgatacccctttaatcgacgttcgcgcgccgatcgaatttgtccagggtgcgatgcccgccgcactcaacctgcccttaatgaacgacgacgagcgtgccgccgtcggcacctgctataaacgccagggtccggacgccgcactgacgctcggccatagcctggtcaacggcgagacgcgagaggcgcgcatcaacgcctggcgcgaagccagcctggcccatcctgagggctacctttgctgcgcgcgcggtggccagcgctcacatatctcccaggcctggcttaaagaggcgggaatcgattatccgctgatccgcggcggctataaggccctgcgccagacggcaattcaggtgacgattgagcagtcacaaaaaccgatggtgcttatcggtggctgtaccggaaacggcaaaacgctgctggtgaagcagcatgcgcagggcatcgatctggaagggctggcgcaccatcgcggctcgtcatttggccgcacgctcaccccgcaactttctcaggcgagcttcgagaatcaccttgccgtcgagctgctaaaaaaagatgccgcgcgctgggtgctggaggatgagggccggatgattggctctaaccacctgccggagtgcctgcgcgaccgcatggcggaagcgcctgtcgttgtggtcgaagatccgtttgagatccgtcttgagcggctgcgcgaagagtatttcgaccacatgtgggccgacttttctgccgcctacggtgaagaagcgggctggaaagcctacagcgaatacctgcatcacggcctgttcgccatccgccgtcgtctggggctgcaacgattcgcggaatttaccgcgctattggattccgcgcttctggaacaacagcgctctggaagcactgacgcgcacttcagctggcttgtgccgctgctgaaggactattacgacccgatgtacggctatcagctggagaagaaagcggagaagattgtttttcgcgggacgtacgaagaaattgccgagtggcttgatcgctga

SEQ ID NO: 526519 - DNA, 1227 bp, Stenotrophomonas maltophilia
atgaatcaaaaatcctggctgcttaacctcagcctgctcaaaacacacccggcgtatcgcgccgtttttatcgctcgctttatctccattttgtccctcggtctgcttggtgtggccgtaccggtgcaaatccagaccatgactcactccagctggctggtggggttatccgtcaccttaaccggcggggcgatgtttatcggcctgatggtgggcggcgtgctggcggaccgctacgagcgtaaaaagctgatcctgctggcgcgcggcacctgcggggtgggctttgtcgggctgtgtctgaacgccatgctgccggagccgtcgctggtggccatttacgtgctgggattgtgggacggcttttttgcttcgttaggcgtgacggcgctgctggcggccacgcccgcgctggtcgggcgcgagaacctgatgcaggcgggggcgatcaccatgctcaccgtacgtctcggctcggtgatttcgccgatggtgggcggtctgttgctggcgaccggcaacgtggcgtggaactacggccttgccgcggcgggaacgtttattaccaccctgacgctactgcgtctgccgctcctgccacccccgccgcagccgcgcgagcatccgctgaagtccctgatggccgcgattcgtttcctgttcagcaacccattgattggcggcattgcgctgctcggcggcctgctgacgatggcgagcgccgtgcgcgtgctgtatccggcgctggcgggtgagtggcagatgagcgcctcagagattggcgtgctgtacgccgccattccgctcggtgcggccttcggggcgctgaccagcggcaacctggcgcagagcgcgagaccggggttgatcatgctggtggcgacgctggcctcgtttatcgccattggtttctttagcctgatgccggtgtgggcgctgggcgtgatgtgtctggtgattttcggctggctgagcgcggtcagctctcttttacagtacaccctgatccagacccagacgccggaagggatgctcgggcgcattaacggcctgtggacggcgcagaacgtcacgggcgatgcgattggcgcggcgatcctcggcgggctgggggcgataatgaccccggtggcgtcggcgagcagcagcgggtttgtgttagccgttgttggcgtgattttactggcggttctggtggagttgcgtcggttcaggcaaaccctgtag

SEQ ID NO: 526520 - DNA, 939 bp, Stenotrophomonas maltophilia
atgtcgttttcctcttctgcggtgcgcgcccttgccgtgcccgttttattgctactgctaatccttgcgattgcactcagcctgctggtcggcgcaaaaccgctgcccgcgtccgttattgtcgatgcgctatccggtacctgtcagagcgccgactgcaccatcgtgctcgacgctcgcctgccccgcacccttgccggattgctggctggcggtgcgctcggccttgccggtgccctaatgcaaaccctcacccgcaacccgctggcggaccccggcattctcggcgttaactccggcgccagctttgccatcgtgctcggcgcagcgctgtttggatttacgtccccctctgaacagctgatgatggctttttgcggcgcgctggcagcctcgctggtggtggcgtttaccggcagccagggcggcggccagctcagcccggtacgcttaacgctggcgggcgtagcgctcgcggcggtactggaaggcttgtccaacggcatcgccctgctcaacccggacgtgtatgaccagctgcgcttctggcaggcgggttcgctggatattcgtacccttgaaaccttaaaggtggtggtgatcccgacgatcgtcgctgccgccgtggcgctctgtttaagccgggcgctgaacagcctgagcctcggcagcgataccgcgaccagcgcgaccgccgtggtcgggccgattgcctttatcggcctgatgatgccgcacatggcgcgctggctggtgggggcggatcaccgctggtcgctgccggtcacgctgctggcgacccctgccctgctgctctttgctgacgtactgggccgcctgctggtgccgggtgaactgcgcgtctcggtggtcagcgcctttatcggcgcgccggtgctgatcttcctggttcgacgcagacgcgggggtggcgcatga

SEQ ID NO: 526521 - DNA, 993 bp, Stenotrophomonas maltophilia
atgatggccccgtcccgtcgtttacttaccagcgtcgccctgctggtcgtcgccagtctgctgctggcggtctggagcctgcaaagcggtgccgtaacgcttgatttcgcgcaggtctttcacgctctcagcggcagcgcgccgcgtaacatcaccatggtggtcaccgaatggcgactgccgcgcgtggcgatggcgatcctggtgggcgcggcgcttggcgtcagcggcgcgatattccagtcgctgatgcgtaaccccctcgggagcccggacgtgatgggcctgaataccggcgcgtggagcggcgtgctggtggcgatggtgctgttcgggcagcatctcacggccattacctttacggcgatggcgggcggcattctcacctccctgcttatctgggccctggcctggcgcaacggcatcgacaccttccgtctgatcatcatcgggatcggcatccgtgcgatgctgatggcgtttaacacctggcttctgctacaggcatcgctggaaaccgcgctctccgccgggctgtggtacgccggctccctcaacggtctgacgtggggaaaaacctggcccgccgcgccgctgattttgctgatgtttattggcgcgttgctgctggtcaggcgcatgcggctgctggagatgggcgacgacagcgcctgcgcgctgggcgtgagcgtagagcgctcgcgcctgatgctgatgctggtggcggtcttgctgaccgcagcgtctaccgccatcgccgggccgatctcctttattgccctcgtagccccgcatatcgcgcggcgtcttagcggtaccgcgcgctggggattaacccaggcggcgctgtgcggcgcattgttactactggccgccgatctctgcgctcagcagctgtttatgccttatcaactgccggtgggcgtggtgaccgtcagcctcggcgggatttacctcatcgtcttgctcgttcaggagtcacgcaagaaatga

SEQ ID NO: 526522 - DNA, 801 bp, Stenotrophomonas maltophilia
atgacagattcaacattccgcttgcgcggcgaaaacttgaccctcggctacggcaaaaaaatcattgtccgggatttatccgtgtccattccggacggccacttcaccgccattatcggtccgaacggttgcggcaaatcgaccctgctgcgcacgctgagccgcctgatgtcgccggttgagggtagcgtgttcctcgacggggagcagatccagcgcttcgccagcaaagaggtggcgcgccgaattggcctgctggcgcaaaacgccaccacgccgggggatattaccgtgcaggagctggtctcccgcgggcgctacccgcaccagccgctgtttacccgctggcgcaaggaggacaacgaggcggtgaagcgcgcgatgcaggcgacgggcatcaccgatctggcccaacaaagcgtcgatactctctccggcggacagcgccagcgcgcctggattgcaatggtactggcgcaggaaacctcgattatgctgctggacgagccgacaacctggctcgatatcagccatcagattgatctgctggagctgctgagtgaactgaaccgcacgcaggggtacaccctggcggcagtgctgcacgacttaaatcaggcgtgccgctacgcgacgcatctgattgcgctgcgcgacggcgagattgtggcgcagggcgcgccgaaggagattgtgacgccggatctgatcgcgcggatctacggcatgcgctgcatgattattgacgatccggtggcgggtacgccgctggtggtgccgttgggcaagcgtgcggtctga

SEQ ID NO: 526523 - DNA, 1008 bp, Stenotrophomonas maltophilia
ttgccgctgccggagctgaccagcaaaacctctggtcgcgcgcctgagacacaaaccgaagtcgccgtggcgcaggcgttttctgccctgctgggctgcgcagtgaacgatatcgaagccgatttctttgccctcggcggccactcgctgctggcgatgcgcctcgcggctcagctcagccgtgcgttcagccgtaaggtcacgccgggccagattatggtcgcctcgacggtgagtaagcttagcggcctgctggactcgcagatgagcgacgagcaggcgcagcgtctggggtatgaaactgttctcccgctgcgtgaaagcaacggcccgacgctgttctgcttccatccggcgtccggctttgcctggcagtttagcgtcctggcgcgctacctcagcccgcgctggtcaatcctcggcattcagtctccccggcctgaggggccgatggagcagtgtgcggatctcgatgcggtgatcgaacatcatctgaacacgttgcgtaagcagcagccgcaggggccgtattatctgttcggctattccctcggcggcacgctggcgcagggcattgcggcgcgtctgcgcgagcagggtgaagcggtggcgttcctcggcctgctggatacctggccgccggaaacccagaactgggcggagaaagaggccaatggcctcgatccggaggtgctggcggaaattgagcgcgagcgtcaggcgtttatcgccgcccagcaggggcaaggttccagcgagctgtttaacgctattgaaggcaactacgccgatgcggtgcggctgcttactacggcgcacagcgcgcggtttgacggtaaagcgacgctgtttgtcgccgaacgcacgcgaaccatggatccgcaggccgcatgggcgccgtgggtgagtgcgctggaggtgtacagccaggactgcgcccacgtggatattatttcaccgcaggcgtttgagaagattgggccggtactgaaggaaattttaggttag

SEQ ID NO: 526524 - DNA, 2838 bp, Stenotrophomonas maltophilia
atgaaccgtctccctcttgtcgccgcccagccggggatctggatggcagagcagctttcctccctgccaaacgcctggagcgtggcgcactacaccgaactgaaaggcgctatcgacgcgccgttgctggcaaaagccatcgctgaaggcatgatgcaggccgacaccctgcggatgcgtttcgctgaggataacggcgaggtgtggcagtgggtcgatgaggccatgatcctgccggagccgtccattgtgcgcgttaactcccacgacgccgccgtggcgctgatggaggccgatctcaaccagaacctgcgcgtcgacagcggtcagccgctggcgtttcaccagctgattcaggtgggagaaaaccactggtactggtatcagcggtatcatcatctggtggtagatggcttcagtttcccggccattacccgtcagatcgccgccatttacgctgcgtggcagaaaggtgaacctgcgcccgcctccccgtttactccgttcgccgaggtggtggaggagtatcagcgctatcgcgacagcgaggcgtatcagcgcgacggtgctttctgggccgaacagcgccaacagcttccttctccggtctcgctctcttccgcgcccctgccgggacgcgccgccaccaccgacatcctgcgcctgaaaatggcgatggacggccgtgcgttcagccagcttgcacaggcggccggacaaacgcagcgaaccgatctggcgcttgcgctggtggcgctgtggctgggccgcctgaccggacggctggactacgccgccgggtttatctttatgcgccgtatgggctccgccgcgctgaccgcgaccggaccggtgctcaacgtcctgccgctggcggtgaatattcgcccgcacgagagcttgccagcgctggcgctgcgcctggcgaaccagctgaaaaagatgcgccgccatcagcgctacgatgccgagcagatcgtgcgcgacagcgggcaggcagcaggggacgaacccttgtttggtccggtgctgaacgtcaaggtgttcgattatcagctggatatcgacggcgtggaggccattacccacacgctggcgaccggcccggtgaacgatctggagctggcgctattcccggacgagcagggcggactaagcattgagatcctcgccaacaggcagcgttacgacgaggcgacgctgaaggggcacgcggcgcggctgaacgcaatgctgacgcagtttgccgccaacccggacctgcgctgtggcgacgtggaaaccgtatcagagcaggaatacgcccggctggcgcgaatcaacgataccgggctggcgctgccgtccaccacgctggcggaccttgtcgcggagcaggcgagcaaaacgccggacgccccggcgctggcggatgcccatactgagctgaactaccgccagatgcgcgagcaggtggtcgcgctggcaaatctgctgcgcgcgcgcggcgtgaagccgggcgacagcgtggcggtggcgctcccgcgctcggtgttcctgaccctggcgctgcacgggattgttgaagctggcgccgcctggctgccgctggataccggttacccggacgaccgtctgcggatgatgctggaggacgcgaagccgtcgctgctcattaccaccgcccagcagcttccgcgctttaacgatctgccgatcgccacctttagttacaacacactattaccgggcaccgatgctgaacctctgcgcctggcgaagccggagcagaccgcgtacatcatctttacctccggttcgacgggacgaccaaaaggcgtgatggtcggccataccgccatcgttaaccgcctgaagtggatgcaggatcattattcactggcggcgcatgacgtggtggcgcagaaaacgccgtgcagctttgacgtgtcggtgtgggagttctggtggccgtttatcgccggggcgaagctggtgatggccgagccggacgcgcaccgcgatccgcaggcgatgcagagcttcttcgcacaatatggcgtaaccaccacccacttcgtgccgtcgatgctggcggcgttcgtcgcctcgctgacgccggaaaacgtcgactgttgcaggacgctgaagcaggtgttctgtagcggcgaggcgttgccgactgcgctgtgccgcgagtgggaacagctcacccatgcgccgctgcacaacctctatggcccgaccgaagcggcggtggacgtcagctggtatccggcgtacggccccgagctggcggcggtggaagggaacagcgtgccgatcggcttcccggtgtggaatacggggctgcgcattctggacgcgatgatgcgcccggtgccgttcggcgtggcgggggatctgtatctcaccggcatccagctggcgcaggggtatctgggacgccccgaccttaccgccagccgctttatcgccgatccgtttgcccccggcgagcggatgtaccgcaccggggacgttgcccgctggctggacaacggcgcggtagaatatctgggccgcagcgatgaccagttaaaaatccgcggacagcgcattgagctgggcgaaatcgaccgggccatgcttgcgctgccggatgtggcccaggccgtggcgcacgcctgcgtgttcaaccaggcagcggcgacaggtggcgatgcccgccagctggtggggtacgttgtctccgaatccggcttaccgctggatcgcgacgcaaatcagcgcgctgccgttaagcgccaacggcaagctggatcgcaaggcgttgccgctgccggagctgaccagcaaaacctctggtcgcgcgcctga

SEQ ID NO: 526525 - DNA, 213 bp, Stenotrophomonas maltophilia
atggaattcagcaatcctttcgataatccgcagggacagttcgccattttgcaaaatgaccaggggcagtacagcctgtggccgcaggagtgcgagttgcccgcgggctggcgcgtggtgtgcgaaccacattctcaggaggcgtgccagcagtggctggcggaacagtggcagacgcttgagccgtcttattttacgggggagcgcgcatga

SEQ ID NO: 526526 - DNA, 1278 bp, Stenotrophomonas maltophilia
atgcaaatagttatcaataatattatcaataaaatttgctctgaaacaaaaaagactgttaaacatggggttataagggtgacggcgttaacaaccggaagtgaagcgtggtggcaggcgaaaaacgggccggaacgggaacgtcatcaggaaaactatcgcgtgacattctggtggcgggacccggcgggaacgcagaaaacgtcgacgattaaacgcgtctggctctacgtcaccggcgtgaccgatcaccatcaaaatgcccgtccgcagtcccttgaacgtatcccggataccgacgtctggcagtggcagggcgagttcagccccgaatggcgcggcagctactgttttatcccctccgacaatgaagatgattttgccagcgcagtgtttgaaggcgagcagccggaccgcatggcgctgcgcgaaggctggcgcaaactgctgccgcacgcggtttccgatccgctgaatgcccagagctggcgcggcgggcgcgggcacgccgtctcggcgctggagatgccggaggcgcccgtacagcccggctggaaccatcccgatacgccctataaaaagccagtctgcattgagtggcacagcgcgcgtctgaggaaccatcgccgcgtgtggatttttaccaccggggatgaaagcccggagcgcccgctggcggtgctgcttgacgggcagttctgggccgaaagcatgcccgtctggcctgcgctggcgtcgctcacccatgaaggcaaactgccgcctgcggtttatgtcttaatcgacgtcattgacaccgcacaccgcagccgcgagctgccgtgcaaccctgatttctggctggcggtgcaggacgaactcctcccgcaggtgaaaagcatggccccgttcagcgaccgcgccgaccataccgtggtggcgggccaaagcttcggcgggctctcttccctctatgcgggcctcaactggccgcagcgttttggctgcatcctcagccagtccggatcctactggtggccgcaccgcggcgcgcagcaggacgggctgctcattgaacaactcaaagcgggtgaaaaaaccgctcgcgggctgcgcatcgtccttgaggccgggcgcaacgagccgcttatcttacgcgcaaaccaggcgatcctcgccgaactacacactcagcaaccggttttctggcgtcaggttgacggcggacacgatgcgctttgctggcgcggtgggctgacacaggggctgatgaccctctggcagccgcttattcaataa

SEQ ID NO: 526527 - DNA, 2241 bp, Stenotrophomonas maltophilia
atgaataagaagattcactctctggccttgctggtcaatttagggatttatggtgtcgcgctgcccgccatggcagacgacaacaccgcctccgcgcagcacgaagacaccatggtgatcaccgccgccgagcagaatttgcaggcgccgggcgtgtcgaccatcaccgccgatgagatccgcaaaaacccgcccgcgcgcgacgtggcggaaatcatccgcaccatgccgggcgttaacctgaccggcaactccaccagcggccagcgcgggaacaaccgccagattgacattcgcggcatgggcccggaaaacaccctgattctgattgacggcaagccggtcaccagccgcaactccatccgtctgggctggcgcggcgagcgtgacacccgcggcgataccggctgggtaccgccagagatgatcgagcgcatcgaagtgatccgtggcccggccgctgcacgctacggtaacggcgcggcgggcggcgtggtgaacatcatcaccaaaaaattcgacgaccagtggcacggctcctggaacacctacctgaacgcgccagaacataaggacgaaggttcgactaaacgcaccaacttcagcctgagcggcccgctgggcggcgacttcagcttccgcatgtttggtaacctggacaaaacccaggccgatgcgtgggacatcaaccagggtcaccagtctgaacgtaccggtgcctacgccaacaccctgcccgcaggccgtgaaggtgtggaaaacaaagacatcaacggcgtggtgcgctgggacttcgcaccaatgcagtcgctggagtttgaagcgggctacagccgccagaacaacctgtatgcgggcgacacgcagaacaccaacaacgacaacgcgctggtgaagaagaactacggtaaagagacgaaccgtatttatcgccagaacttcgccgtgacctggaacggcggctgggataacggcattaccaccagcaactgggcgcagtacgagcacacccgcaactcccgtctgggtgaaggactggcgggcggtactgaaggtctgttcaacagcaataaattcaccgacaccgatctgtccgacgtgatgctgcacagcgaaatcaacctgccgattgatttcattgtgaaccagaacctgacgctcggcaccgagtggaaccagcagcgcatgaaggactcgacctccttcacgcaaacccagcagggcggcaccatcccgggcatgagcgaagaccgtagcccctacacgtcagcggagatcttctccctgttcgccgaaaacaacatggagctgaccgacagcaccatgctgacccctgccctgcgcttcgatcaccacactattgtcggcgataactggagcccgtccctgaacctgtcgcaaggtctgggggatgacttcaccctgaagatgggcatcgcgcgcgcctataaagcaccaagcctgtatcagaccaacccgaactacctgctgtacagtaaaggccagggctgctacgccagctccgacggcgtgggctgctacatgatgggtaacgacgatctgaaagcggaaaccagcatcaacaaagagattggcctggagtggaaacgcgacggctggctggcgggcgtgacctggttccgcaacgactatcgcaacaagattgaagcgggctacgcgccgattggccagacgtccaccggcaaagtcaccaccgatatctaccagtgggaaaacgtaccgaaggcggtagtggaaggtctggaaggctccctgaacgtgccggtcagcgataccatcaactggaccaacaacatcacctacatgctgcaaagcaagaacaaggagaccggcgatcgtctgtcgatcatcccggagtatacgctgaactctaccctgagctggcaggtacgtcaggatgtctcattgcagtcgaccttcacctggtacggcaagcagcagccgaagaagtacaactacaaaggtcagccggtgaccgggtctgagaaagacgaagtcagcccgtacagcatcgttggcctgagcgcgacctgggacgtgacgaaaaacgtcagcctgaccggcggcgtggacaacgtcttcgacaagcgccagtggcgcgccggtaacgcccagaccacgggtaataccacgacgggtgcgtatatgtacggtgcgggtgcgtatacgtataatgagccgggtcgcacctggtacatgagcgtgaatacgaggttctga

SEQ ID NO: 526528 - DNA, 1218 bp, Stenotrophomonas maltophilia
atgacgatgaaagaaagtattcttttcgctcttgaccgcgacccgtcggtgagtcagcaggctgcacagctggggattggccaggcacaaatagacgaagcgcgtagtggctggatgccacaaatagccctgaacgggagtacgggtcacagccagaccaccgattcgagcggctcgttgcgaaattccgcagcctgggggctgagcctgacgcagcttgtgtacgattttggcaagaccaataacagcatcagccagtcttcagctcagcgtgacagctatcgctaccagctgatgagcacgatgtctgccgtcgcggaaaaaacggccctcagctatgtggaagtgaaacgctacagcgatctgctacaggcggcaacagagaacgtgcaggcgcttaaaaacgttgagcagctggcaaaactccgcgccgatgcaggcgtaagctccacctctgatgagcttcagacccgcacccgtattgccggaatgcaggcgacggtagagcagtacaatgcgtcactgaacagcgcccgcgcgcggctggcggtattaactggcatacaggctgaacgctattcaccggttccgggaggtctggccgtggagtcggattctctcaatcgaattgattattcactgatcccaacggtgatggccgcgcagaacatggagcgttcagcccagtacggcgtagaaaccgcgaagtcacagcactggccaaccttaagcctgaaagggggccgcacccggtacgagtctgataatcgcgcgtactgggatgatcagatccagctcaatattgatgcaccgctttatcagggcggcgcggtctcggcgcgcgtccgtcaggccgagggcgcaagggcaatggcatcgtctcaggtcgatcaggcccgttttgatgtcctgcaaaaagcctccgtcgcacaggccgactggaccggggcgcaaggacgtatggaggccggaaaacgtcagctggaaaatgcgttgcgcgcccgcgacgtctacaaaaatgaatataccctgagcaagcgcagcattaacgatctgctcagcgtggagcaggatgtctggtctgccacctcagcgaaaataatggctgaatacgatggctggagcgcggcgattaattacgcctccgcggtggataatctcatgccgcttatcggaatagagaaaaacgctgccgcgaaattacctgatttgagttaa

SEQ ID NO: 526529 - DNA, 1305 bp, Stenotrophomonas maltophilia
gtgcgtcgcgctgccggtgttgcccgccgcatcggtcacggagaccgaaatgctgtggctaccttcccccagcgcgccaatgacagaggcaggcacgccgacgctccagctgccgtccgcctggacgacaccagtaaaggtcttgccgccaacggtcacggtgacaacgtcgcccgccgccgcgccgttcgcctggccggaaataatctgagcctgcccctgctcgctggtgttcagaatgtcgtcgcccgcgacagtgttgatagtgaccactggcgctgcggtatcgaccgtgaaatcggcggtggtggaggccccgttacccgctttgtcgctgacgtttgccgtcagggtgtgctcgccgttagccatcgcctgtacttcactggccgaaagcgtaacggaccaggtgccgtcgctgcccacggtcgccgtgtgatttttgccgttcagcgtgaccgtcacaatctggcccgcttccgcatcggtttttccggtcagcgtcagcggctgattatgttcagccgcgttgatgatgttgtcctgggcgatcgtgtcgacagaaatcgctggcgcagcggtatcgacgccaatcgtctggctgccggtcacggtgttgcccgccgcgtctttgccgctgacgttgaccgtccaggtaccatcgcccagcgcctgcgcgtcagcagcaggcaccttcacgctccatgcgccgtttgcccccacttctgcggaataggttttaccgttcagcgtgacggtaagcgccgtgccctgcgccaggtttttgctggtgccggacagcgtaaagccagcggcctgctcgctggcgttgatcacgttatcgcccgccgtggtggcgagcgtcacgctggtatccgctgtagaaacggttacggtaatactgcccgcagaggtcgttttactgccgtcgatctgaacgacggaccaggtatgttccccgtccgcctgggtcggaagtgttaccgtccaggtgccgtcctttgcgaccatggtgctggcgatggtgctgccgctgctgtctttaacctgaatggtcgcgcccggctgcccggtaccgctgaaggttggggtgttatcatccgtgacctcttttgcactcagcaccccctgcttgtcacccgcgttatccgtcagcaaaaatgttggcgtggcgctttcgacttctttcgtattatcaataacttttgttttggtttcgccgtcaccgccgtgagccagcagtgcgccaatcgcaccgcctcccaacgccgctccggcaatccagccccacggcgcatcgcttaa

SEQ ID NO: 526530 - DNA, 387 bp, Stenotrophomonas maltophilia
atgggccagctggttaacggtgttggtgtcggtgacgaaatcgttgatggtcacctgcggcacggtggcatccaccagcccaacgcggtccgcgctgctgctgttgcccgccacgtcactgacggtggccgtgacggtgacattgccatcggtcagcgcgccaacgtcggcggcaggcacgttcaactgccagcgaccgtccgcctggaccgtggtctggtaagatttaccgttcagcgtcacggtgaccgtctggcccgcttcagcggttgtgctgccgctgagcaccagatcctgctgcgcttctgccgcattaatgatgttgtcgtcggtcaggttatcaagcgtaatggctggtggctgcgtatcgacggtcaccacgcgtga

SEQ ID NO: 526531 - DNA, 501 bp, Stenotrophomonas maltophilia
atgttgtcgccgctgatggtgttgatggtgaccgctggcgcggcggtatcgacgctgaatgcctgcgaggaagaggccgcgttgccgttcatgttggttacgctaacctgtacgctggcgtcgccatccttcaggccgctcagttcggcagccggtacggtgcaggtccagtcgccgttggcatcgaccatcgtggcccaggttttacccgcaaagataatggtaacggtctggcccgcttcaacgttcgaggaggagccggacagcaccagatcctggcctttttctgccgcgttcagcacgttgtcgtccgtcacgctgttgatgcttatcgccaccggggcgagatcgacatccaccacggtaccgatgttcaccgggttgccggaggtatcctgcgcgctggcgctgatggtgagcgctccatccgcccaccgggagacgtctgcggccggaaccgcagcctgccaggtgccgtccgccagtaccgaggcggaataa

SEQ ID NO: 526532 - DNA, 831 bp, Stenotrophomonas maltophilia
atggctggtgttcgcgctattacccgcggtatcggtcacgctggccgtcacgctgtagctcgcttcgcccagtgccgagacgtttgccgccggaacggtgacgctccagttaccgctggcatcggtggtggcggcgtaactgataccgttcagggttacggtgatgcgggtcccgtccggctggttgctggtgccggagaccagcagatcctgacctctctcggtcgcgttgatcacgtcgtcaaccgccagggtagtgatggcaatcaccggcgcggtcagggagacgtcaaacgcgtgcgtcgtgctggtgctgttgcccgctttatcggtgagcgtggcggagatcgtttgatcgccgttagccagcgcgcccacgtccgccgccggaacgcccacgctccagttaccggcaccgtccagcatggcggtgtagtctttgccgttcagggtcagggtaatcacatcgcccgcctgcgcgcccgtcaccttgccggtgacaatcagcgcctggccgtgctcggcaatattaacaatgtcgtcgcccgccacaatgttgaaggtaatctgcggcacggtagtgtcgaccagcacggacgcccccgcgctggccgggttgcccgctttatcggacacggtcgccgtgaccgccgcgctaccgtctgcgatccccgccagatccgccgccggtacatccagcgtccagctgccgtttgcctgcacctgggcggtgtactgattgccgttgaaggtcacggtgaccgtctggcctgcttcggcagtagacgtcccgctcagggtcagatccagcgccgcctctgccgcatttag

SEQ ID NO: 526533 - DNA, 1578 bp, Stenotrophomonas maltophilia
gtgcgaggtgctggtgctgttgccgacgctgtccgtcgcggaggccgacacggtgtaaagcgcttcacccagttgccccacctcgctcgccggaacggttgtagtccattggccattggtagctaccgtggcgctgtacgctttgccgttgagcatcacggtcaccaccgcgcccgccgccagcccggaagccgtacctgtgatggtcagatcctgagttttctcggtgttgttgatcacatcgtcaccggacacggtgtcgatggtcagcaccggcgcggtgaggttgacttcaacctcgtgcgttgtgctgttgctgtttccggctttatcggtcagcgccgcggtgatggtgtgatccccggcagtcagagcactcacgtccgccgcaggcacgcccacgttccacttgccggaagcgtccagggtcgccgtgtaatctttgttattgatggtgactgtcaccacgtcacccgccgccgcaccggtcacggaaccggtgacaatcagcgcctgcgcatgctcggcgctgttgatcacgtcgtcgtcggaaacggcgttaatggtcagctgtggcaccgtggtatccaccagcacatcgcgatccgccgaggccgggttacccgctttatcctggacggctgccgtgatggtgtaatcgccgtcggcaatcgcgccgacatccgcagacggtacggtgacgctccagctgccattcgcctgcatggtggtggtgtaattctcgccgttcagggtcacggtcactgtctggcccgcttccgcgtcagagacgccgttgatgaccagatcctgctgcgcttcggcagcattgatgatgttgttgtcgctgacgatttcaatcgacaccgtcggcgcggtggcatccacgctgtactcgcggcccgcagaggcgctgttgccgtttacgttggtgacgctgacctgcacgctggtgtcgccgtctttcagtccgcccaaatcggcagacggtacggtcgccgtccagtggccgctggcatccaccgtcgcgctataggtcttaccgccgaaaatgatattaacggtctggttttcttccacgttggtggtcgagccggacagcaccagatccgcacccttctcggctgcgttaatcacgtcgtcggtagctacggcgtcgatgctgatggcgaccggcgccagatccaccttcacgtcatggctgatggaaaccgggttacccgccgcgctctggccgtcaacggtcacggtgactgtacctgcgctcagcgcgccgacgtcagccgccggaatagccgccgtccaggtgccgtccgccagcacggttgccgcgtaggttttgccgttgacggtgaccgtcagcgccgatccgctcgccagcccgtcgctggagccggtgataatcaggttttgagtatgctcgatgctgttgatcacatcgtcgcctgccacggtatccacgcgcaggcccggcaggctggcatcaatcgtgatgtcgcgctcgccggtgccggtgttgccgtggccgttggtcacgctcgctgttacggtgagatcgccgttaccgatagcggttaa

SEQ ID NO: 526534 - DNA, 759 bp, Stenotrophomonas maltophilia
gtgctcaatggtgttgatcacgtcatcacctgccacggtattcacgcgcaggcccggcaggttagcgtcgatagcgatctcgcgttcgccggtgccggtgttgccgtggccgttggtgacggttgccgtcacgctcaggctgccgttgccgagtgcggtcagcacgtcagacggcacattcacggaccaggacagattgttctgcaccgttgcggtgtagctgaggccgccgatagtcacggtcacggtgttgcccgcttcggcattcgccacggtgccgctcagggtctgacctgccgccacttccgccgcgttgatgacgttgtcgcccgccacggtgttgatggtgacggttggcagcgcggtgtccaccagcaggttcgcggtgttgctcacgctgttgcccacgccgttggtggcggtcgcgttcagggtgtaactggcctgaccgagaccggccagatccgccgccggaaccgtcaggctccaggtgccgtctgccgcagttgtcgccgtgtagtttttaccgttcagaattacggtcaccacggtgccttccgtcaggttggcgctggtgccgctgacgctcaggtcctgccctttttcaacggcgttcaggacgttgtcatcactgatggcgttgaagctgaccgacggcagaccggtatcgacggtcacattatgcgtgccgctgccagtgttgcccgccgcgtcggtgacagacgcagtgacggtcacggtgccgtcgctgaggcctga

SEQ ID NO: 526535 - DNA, 228 bp, Stenotrophomonas maltophilia
atggcaattagcggaacagtgaaaattaaaaacatcagcggtatctctccatggggtgagggatggaatcgccacatggatgtagaggtggaggatatggaaatctccgaggcttttaaggcggatgagattgttaacgaataccaggtggacgatctgctggaagccattggtgaatcggatgtggctacatggctttccgagcaagggtacgaagtttcgaaatga

SEQ ID NO: 526536 - DNA, 198 bp, Stenotrophomonas maltophilia
atggttctggatgaagagcgtataagcatgaaaattcaggcgatggggcgggcggtgatggaattgtcactggctgatttacccatgacccagcaaaacatcatcgacaagctgaagcagtaccggaaggaaacaggaaacgtgatagggaagggcgtgaacagggatgcggctgagatagtgcggaaaggcttatag

SEQ ID NO: 526537 - DNA, 453 bp, Stenotrophomonas maltophilia
atgagctcggtggcgtcggaaaatacttctttcgcagggcattattcacctggctcaaaatatccggtgattagcaaagttcaggcgggcgcctggtgtgaagcggttgagccgtacacccttaaagatatcgacctttggcttgaatcagatgctcacattcagggggaggcgttctggctgcaggttgatggtgactcaatgacagcaccggcgggtcttagcatcccagaaggaacctttgtcctcttcgatactgggcgcgaggcaatcaacggcagtctggtaatagcaaagctatccgattcgaacgaggcgacttttaagaagctggtgatcgatggtgggcagaagtacctgaagggccttaacccgcaatggccactcgtgccgattaatggtaactgccggattattggggttgctgtagagacaaagttgcgtttagtttaa

SEQ ID NO: 526538 - DNA, 201 bp, Stenotrophomonas maltophilia
atgaaaatttcactcgccgagtatgtcgacgaagttggccaggtaaaagcagctgatgccattggcgtccatcaaacggcaattagcaaagcgatcagggtcggccgtcagattttcatcaacaagcttcctactggcgaggttaaggcggtcgagtaccgcgaatttcctcacagtaagaaacaggaacatcaggaatag

SEQ ID NO: 526539 - DNA, 543 bp, Stenotrophomonas maltophilia
atgcattcacttgcgtatcaacacaataccggaatacacacgggagcgatgataaaccgcgctcagcctaaggcggcgccagaccacgaaaagatccgcgatgcggtccgtgcatggtcatcggcgctggacaatcaggacgtcgtttcggcgttggtcatcaacgaataccgggagcagggcgggaccgccatcagctttccggaagacatcagccgggcgcgccagaagctgttccgcttcctggataaccgtttcgactccgaacagtaccgcgagaacgtgcgccagctgacgcccgcaatcatggcggtcctgccggttgagtatcgcactcgcctgatcggtgccgattgcaaaatgtctcgcctggctgaggccgagaaagaactcgcagaggctaaacaggccgtgctgctggacgctccagaacaccagaagctgaaagaggtaagcgagggtatagcgtcgctgttccgcctcatgccggagcaggtaggcccactgatgacgatggtcacttcaatgttaggggttatgtga

SEQ ID NO: 526540 - DNA, 147 bp, Stenotrophomonas maltophilia
atggcaaaaaatccacgctattaccataccgctgtacataaaaacataacccgcgaccgcttcatccgctcggttaatccgattgtggcagagaagatgcgcgccatcctggaagaactgaaacgcaaggagagtggccgtgggtaa

SEQ ID NO: 526541 - DNA, 900 bp, Stenotrophomonas maltophilia
gtgggtaacgtatccaatttagccgaagccagagaggccagaaggctccagaaaccgcgtacgaatggcggtaaggggtttgccttgctgcaccgtaaaattatggatgtgccgttctacaaggacgctgaagcggctcatttatgggttcacctgctcctgcgtgctaatcacgaacagacactggtatcgactgatgtcggcgatgtgatctgcgaacgcggagagttcattaccgggcgaaacacgctggcaatggaaacggggttgaccgctgatcgcgttaaatcactactccgtaaattccagagcctgggcatgatcaccaccaaatctaacaaccgttttactgttctaaaagtggtcaaatatgacgaatatcagtcaaatttttgtccagccgatgtccagccagtgtccagcccaaacgcagtcgtaccaatgcctgcggaggtggagtgtccagccgatgtccagccagtgtccacagataacaatatattaaataacttactacctaacggtagtaagtatgtcgcaaatgaccagaaacccgctgaagagaaaaagtcccgtttgtcatgcgatgaagtatggcaatgcctgaaagacgaactgcctgaagcccggggatggagatgcctcactgatgatcgacgtaatctgatccgcaccttctggggaaaggctaacaaaattgcccgcaacctggacggcaagccgatggatatggacgggttcagaagctatctgcgctacatcgctcaaaactgccgctggatgcttgaagaccgaccagaccagaaatccgggaagacctggcgccgcatgaaattcgataagttcctgaccgaaaagctctacatcgaagtgcgcgagggggatcgtgatgaccgctga

SEQ ID NO: 526542 - DNA, 1404 bp, Stenotrophomonas maltophilia
atgaccgctgatttcatggctgtaccacaaaacctcgaagcagagcagagcgttatcggtggcctgctgctggatgatgacaacagcgagcgagtccagaaggttctggcgatgctcaagcctgagtcgttctacagccgacctcaccaactgatctttgccgagatgcgccagatgttccgcgaaaacaagccagtcgatggtctgacattgttcgacgcgctcgaaggtaaagggctcgcggagcaggtaggtggctttgcttaccttgcggagatcgccaagaacactcccagcgctgcaaacatcgtggcttacgcagcatcagtccgggaagccgcaatggagcgctacggtatcaaccgcctgaccgaagctactgagctgctgtattcccgcaacggcatgagcgctacgcagaagtacgaggccattcagggtattttcacccagctcgcagaccattcaaaaaccggcagtcgccgtgggttgagatcgtttggcgaggttatggatgactgggtagcagatctggagaaacgctttgacccttcaggcgaacagcgcggcatgagtaccggtattccgtcgctcgatcgactgctggcaccgaaaggtctggttaaaggctctctgttcgtgattggcgcaaggccaaagatgggcaagacaaccctgtacgggcagatggcaatcaactgcgcgattcgcgagaaaaagccagcgctgatgtttagcctggaaatgcccagcgaccagatcctcgaaaagcttgttgggcagaagtccggcgtaaacccgagcattttttacatgcccgccacggatgacgcagatgatcagtaccagggcgattacgacggcgactttaagaaggcgatcgccacagccgggcgattgagtgaaatcgacatgctgtacatcgacgatactcctggcctgtcactggctcacatcgttagcgaaagccgacgaatcaaacgcgagaagggctgcgtaggcatgattctggttgactacctgacgctgatgaccgccgaaaaagcagaccgtaatgacctggcctacgggatgatcaccaaagggttgaagaacctcgccaaagagctgggctgcgtcgtcgtgctgcgagtgaataaacgcccgttaccgagcgattctcgcgacacaggacagattgagcaggactgcgactactgggttggtatccaccgagaaggtgctttcgatgacagcgttccgcctggcgaaacggagttaatcctgcgactcaaccgccatggcagtaccggcacggtttattgcaatcagatcaacggggcaatttacgacacagaccagcaggccgccgccgcagaacgccgcgggcgtgagcagcagccgaaaaagaaagggggattctga

SEQ ID NO: 526543 - DNA, 264 bp, Stenotrophomonas maltophilia
  misc_feature (180)..(189): n is a, c, g, or t
atgaccataacaatccgcgggcagattcttgcagccctgcgtaataacccgggcctgaacagtggtcgcattgccagcatgatcggcatgaccaccaaaaagatttccggcccgttaagcacgttgtttgcagacggcctgatcgagttcgaaggtaagcatggccagcggctttatcgnnnnnnnnnnaatacgcaccggaaaccataccggccatgccgaagggaaattcgaagctggtgcagcgcacagaggcaaatgtga

SEQ ID NO: 526544 - DNA, 297 bp, Stenotrophomonas maltophilia
atgaaaatttacatcgcaggaccaatgacgggttacgaaaattacaaccgtccgatgtttaacgcagtagcacagcaaatgttatcaggtggtcatgtggcattaaatccggccacgctcccggatggtttatctcagcgtgagtatatggacatctgcctggctatgcttcgctgcgcagacgccattcacatgctgcatgggtggcaagagtcggatggtgccgtcgctgagcatgccatggctaaaaagctgggaattaaaatttcttaccaatttgaaggggccgcacaatga

SEQ ID NO: 526545 - DNA, 396 bp, Stenotrophomonas maltophilia
atgagcaacatcgacaaacaggcgcgtgatatggaacgtgaatatttcattctgagcactgctcacacccatcgcggcgacccgtatatcactctgtgggcggcagatgatagcggctaccggtgtcgatgccacgcggcaggccgctatgccgaaagccatgtgttatcaaacctcggctactacaacaacggcgtacagacggttgcggtgccgtgtgatgtagccgagccactgtctcactcagtcgctaaaggcttctttgacgataatgatgggcgctggcttcgcaataacgcagcgacctggaaagagctgctgaagcatgccattgccgcgcctaagcacgttccggcaccagaatatcgcggagcgccgcgtaaggttgaggactaa

SEQ ID NO: 526546 - DNA, 696 bp, Stenotrophomonas maltophilia
atgagcacacttaccaaagaatggctgcaaaagactatcgctgagcttgaagaagagcgcgatgctgtgaccggagttgtaaacgaagatgcggccatggcgctcgctgcgatgaagctagcgctgtcatcgctcgaagcgaagcctgtgacgcaggttctctcaagtcgagcgggtaacgatacatcgactattgataaagctctgccagaaggaactatgctatataacgtcctgccagcgccggtatctgtgccagatggatacaggttgcagccaatatctgaatatgacgcaatgtgcgccgccatgcttcagggtgccgaacttgtaacgacggctaacaagttgcgcgacgcagtggaaaccatacgcaactccggcattgaaatcgacgctgagaaaatctttgcagagcgtgatgctctcaacgccccggtgattccggatggttactgcatcatgccactaaagttgactgccgataatggagccaaaggcgcgctatgcggagagtttcatgttcaataccgcatcgtttgtcagtcatgcgtaggtgaaggttgtgaagactgtaaccatacaggcgggtgggatgctgaaatccccgttggctgggacaccataaagcgaattcatgaggcagcagtagaagcttgcgcaatgccagcagcaccgcagcaggaggtgaagtga

SEQ ID NO: 526547 - DNA, 255 bp, Stenotrophomonas maltophilia
atgggcaagtttactttcgtcattgagttcgaagacggcaaggagccgccagtacatgcccatatggaagctttcggtggggtgattgttgctgtcgcgttccgtgatgcattgagcgaggatgatcaccagaagacgatcactacctctcctcaggtgcttagcgagatgcggtgctttatctgcaatggcaagcatccgataggtgtcgcctgcccacttaggtcgccaacagtggtatcgcataatgcctaa

SEQ ID NO: 526548 - DNA, 438 bp, Stenotrophomonas maltophilia
atgagtatcaaattttacctccgcgacgagcaggttcgccgcaacctcattgactacatcaacaagcagcctgtaaacgcagatttcccgctcgtggtgagttttgccgaccctaagcgcactcttcctcagaattcactgttccacgcgctttgcggcgacctggctaagcatcgcattgagtgggctggctctgcgtggtcacttccgtcatggaaatcaattctggtttccggtcactccattgccactggcgggcaggggaaggttattgccgggattgagggcgaattggtggcaattcgcgaaagcacctcatcgatggggatcaaacggatgaatagtctgattgagtacacccaagctttcgccgtcagccagaacatacagcttcgcgatgtccgttaccgtggcgattatttcgggaggcttgcatga

SEQ ID NO: 526549 - DNA, 171 bp, Stenotrophomonas maltophilia
atgaataaccctctcgcacgcgtcatcacaaatcatatcttcaacgttccggcgcgccgcaagcgtaagcccgcgattaagccgtccgatatcccgacactgaagggctacaccgcccgcctggtggatcagaaatggctgcgtctcgcggcgaggagagcgcatggctaa

SEQ ID NO: 526550 - DNA, 291 bp, Stenotrophomonas maltophilia
atggctaatttatgcaaagcggcacgcggccgcgaatgtcaggtgcggatccccggcgtatgcaacggcaatcctgaaacctcagtactggctcacattcgtcttgctggcctctgcgggaccggaatcaagccgcctgacctgatcgccaccatcgcatgcagctgttgccacgacgagattgatcgccgcacccgtctggtcgatgcggagtatgcaaaggagtgcgcgctggaaggcatggctcgcacgcaggtcatctggcttaaagaggggctcgtaaaagcatga

SEQ ID NO: 526551 - DNA, 363 bp, Stenotrophomonas maltophilia
atgaatgaataccgcatcagtctcccatggccgccgagcaacaaccgctactaccggcataaccgcgggcgcacgcacatcagcacagaggggcaggcgtaccgcgacagtgtcgccagaatcatcaaagactcaatgctggatatcggcctggctacacccgtgaaaatacgcattgggtgccatatgccggatcgccgccgccgcgacctggacaatctgcaaaaggccgcgttcgacgccctgacgaaatccgggttctggctcgatgaccagcaggtcgactactacagcgtgaagaggatgccaatcgtcaaaggcggcaggcttgaactgaccatcaccgaactggaggctgaatga

SEQ ID NO: 526552 - DNA, 363 bp, Stenotrophomonas maltophilia
gtgttgcatgtgactcataagtcatcttataaccctgagggcaacccgctcattattggggaagatgttaccgtcggccataaagtgatgctccacggctgcacgatcggtaacagggttctcgttgggatgggatcgattttgctggatggcgtcattgtagaagatgacgtaatgattggcgcagggagtcttgttccgcaaaacaagcgtcttgaaagtgggtatctctatttaggcagcccggttaaacagatccgccccctaaaagagacggagatcgaaggattgaaatactcagcgaacaattacgttaaatggaaaaacgactatctggatcaggataaccagatccaaccctga

SEQ ID NO: 526553 - DNA, 249 bp, Stenotrophomonas maltophilia
gtgaatcaggcgattctttttcccgacagagaaatctgggatgaaaacaagcaagcggtttgtttcccggtgctggtgcatggtatgcagcttacctgtgcgattaaaggggaaacgttgcttcagtgctttgggggggcagatccgttagcggtcttttgcgaaaatcgctgggacctggaagaggatgccagcgatttgatccgcgatcagcaggaagacgatcagggttggatctggttatcctga

SEQ ID NO: 526554 - DNA, 819 bp, Stenotrophomonas maltophilia
atggaaacctatgctgtttttggtaacccgatcgcgcacagcaagtcgcctctgatccatcggctgtttgcggagcaattgcatatagatcacccatatggtcgggttcttgcgcctgttgatgcatttataccgacgctgaatagcttttttgatgcgggtggtaaaggtgcgaacgtcacggtgccttttaaagaagaggctttcgggcgcgcggatgaactgaccgaacgtgcgtcgctcgctggcgccgtcaatactcttaagcggcttgaagatggtcgccttctgggcgataacaccgatgggattggtttactcagcgatctggagcgattgtcgtttattaaaccaggctttcggatcctgctgatcggcgcgggtggcgcctcgcgcggcgtattgcttcctcttctttcgctggattgtgcggtgacaatcaccaaccgtactttctccagagcagaagagctggcggcgttgttcgcacacacaggcagcgtagctgcggtagcacctgacgatctcgcgcgtcacgaatttgatcttgtgattaatgccacctcaagcggtattaatggagagatcccggcgattcctgcatccctgattcattcccacatctacgcctatgacatgttttatcaaaaagggaaaacgccctttctgacctggtgcgaacaacagggggcaaaacacgtggctgatggtctgggaatgctggtggggcaggcggctcatgcggtgctactctggcatggcctgttacccgctgtagaaccggtgattgaaaagctcaaacaggaactgacggcgtga

SEQ ID NO: 526555 - DNA, 573 bp, Stenotrophomonas maltophilia
gtgaataataacctgccatcaggctccatcgcgcaggcggtggaaatcctgaaaaaagaagaagtcatcgcctatccaacagaagccgttttcggggtcgggtgtgatcctgacagcgaagtcgccgttaaccgtctgctggcgctaaaacagcggcctgtcgaaaaaggattgattttgatcgctgcgaactacgagcagcttaagccttatattgatgattccatgctgacacctgcacagcgggaaaccattttctctgcgtggcctggtcccgtgacgtttgtttttcctgcacagccgacaacgccgcgctggttaaccgggcgtttcgattcactcgcggtacgtgtcaccgaccatccgctggtggtggagttatgccaggcatttggtaaacctctggtttcaaccagcgccaacctgaccgggcttcccccttgtcggacaaccgaagaagttctggcgcagttcgggaatgatttccctgttgccgtgggtgaaaccggtggtcgtcttaacccgtcagaaattcgcgatgccttgaccggcgaacgttttcgccagggataa

SEQ ID NO: 526556 - DNA, 555 bp, Stenotrophomonas maltophilia
atggccaaatcagcactcttcacggtgcataaaaacgagccctgcccacagtgcggggcagaacttgttattcggtccgggaaacacggtccgtttctcggttgttcacactatccggaatgtgattatgtccgtcccctgaaaagccaggcggatggacatatcgtcaaaattctggagggacagctttgtgctctctgtggcggtgaactggcgctgcggcaggggcggttcgggatgtttatcggatgcagccgctacccggagtgtgaacatacggaacaaattgataagccagatgaaacggcaattgcctgccctcagtgccagcgtggccaattggtgcagcggcgctctcgttatggcaagaccttccattcgtgcgatcgctatcctgaatgccagttcgtcatcaatttcaaaccagtagcgggcgtctgctctcattgcgattatccgttacttatagagaagaaaaccgcgcaaggcttgaaacgcttttgcgccagtaaacaatgtggaaagccggtttcggcggatcaaatcagtgaataa

SEQ ID NO: 526557 - DNA, 474 bp, Stenotrophomonas maltophilia
atgttcgacgtactgatgtatttgtttgagacttacatccacaacgaagcagaaatgcaggtggatcaggacaaattaacacgggatctgaccgacgcaggttttgagcgggaagatatatataatgcgttgatgtggctggataagttggctgattatcaggacggcctcgccgaaccgatgcagcttgcttctgacccattgtctgtgcgcatctatacagctgaagagtgtgaaaggctggatgccagctgccggggattcattttattcctcgagcagattcaggtgctaaacctcgaaacgagagagatggtgatagagcgcgtcatggcgctggatactgctgagtttgaactggaagatctgaaatgggtgatcctgatggttctgttcaacattccaggctgtgaaaatgcctatcagcaaatggaagaattactctttgaagtgaatgaaggtatgctgcattaa

SEQ ID NO: 526558 - DNA, 1140 bp, Stenotrophomonas maltophilia
atggcagggaaaaggatgacgtccacagagatatggttacggcttataaacatcgggtcgttatacggtgatgcgatgctggagattgcgcagaggctgcttcgccaggcaaccgtcgatgctgaagctgttaacgcgtcagggctttcgcccaaacatgccgtaaagtttttttcgttcagtgagagtgagcttgaacgtagtctggaatggctggaacacgccgacaaccaccttctcacggcggatgatcctcgcttcccgccattgttgcgttctatccctgattttcccggggcgctatttgtgcgaggccgcgttgacgtgcttaatagcatgcagcttgcggttgtgggcagccgtgcgccctcgtggtatggcgagcgttgggggaaaatactgagcgaacagctgtcccaatgtggctttacgatcaccagtggtctggcttgcggcatcgacggtgtagcacatcatgcggcgttgtccgcaaaagggcgaagtgtcgccgtgcttggcaatggtctttttagtctctatccgcgtcgtcatcatattctggctgagcaacttattgcttcagagggggcaatagtgtctgagttttcactctcaacaccgcccagaccgggtaactttccacggcgtaaccggatcattagtgggttaagccagggcgtgctggtggtcgaagctgcgattcggagtgggtcgctggttaccgcaaggtgcgcactggagcaggggcgtgaagtttttgcgctgcccggcccgttggggaaccccggttgcgaaggccctcactggctgataaaacagggggcgacgctggtgacctgcaaagaagatatccttgaaaatttgcagtatggactgcattggttgcaggatgatctccaaaagcgacatatttcatcggatcaggaggcagtagcattgccatttcccaagctcctggctaacgtaggagatgaggtaacacctgttgacgttgtcgctgaacgtgccggccaacctgtgccaataacggtagcacagctactcgaactggagttagcagggtggatcgcagctgtacccggcggctatgtccgattaaggagggcatgccatgttcgacgtactgatgtatttgtttga

SEQ ID NO: 526559 - DNA, 510 bp, Stenotrophomonas maltophilia
atggcagttttgcaagtgttacatattcctgacgagcgccttcgcatcgtcgcggaaccggttaaagaagtgaatgcagaaattcagcgtatcgtcgatgatatgttcgataccatgtacgctgaagaaggcattggccttgccgcgacccaggtagacattcacaaacgtattattgtgatcgacatttctgaaaatcgtgatgagcgcctggtgctgatcaaccctgagctgctggaaaaaagcggcgaaacaggtattgaggaaggctgtctgtctatccctgaacagcgcgctttggtgccacgtgccgaaaaagttaaaatccgcgcactggatcgtgacggcaatccgtttgagctggaagccgacgatctgctggcaatttgcattcagcatgagatggatcacctggtcggtaaactgtttatcgattacctctcacctctgaagcaacagcgtattcgtcagaaagttgagaaactggatcgtttgcgttctcgcgcttaa

SEQ ID NO: 526560 - DNA, 924 bp, Stenotrophomonas maltophilia
gtgtctacatcactacgtataatcttcgcgggtacccctgattttgcagcgcgtcatctcgacgcgctgttaacgtctggccatcagattgttggcgtatttactcagccggaccgtccggctggccgcggtaaaaaactgatgcctggcccggttaaggtactggcagaaacacatggtttaccggttttccagcctgcgtcattacgacctgaggaaaaccagaagttagtggcagttgtggcttacggcctcattctgccgaaagcggtacttgatatgccccgccagggctgtgttaacgttcatggttctttgctcccacgctggcgtggtgcagcccctattcagcgcgctctgtgggcaggcgatgctgaaactggcgtgacaatcatgaagatggacgtaggtttagacacgggcgacatgctgtataaactggcgtgtcccatcaccgcagaagataccagcgccacgctgtatgacaagctggcggatctcggcccgcaggggctgattgagacgctgcaacagcttgctgacaatacagcgacacctgaagtgcaggatgaggcacaggtgacctatgctgagaaactgagtaaagaagaagcccggatcgactggtccctgtcagcagctcaactcgaacgctgcatccgcgcctttaatccatggccgatgagctggttgatgattgatgagcagccagtgaaagtctggaaagcttcagttattaacgggaatgcatcggcagagcccggtacgattatcgacgccagcaaaaacggtatccaggttacgaccggagaagggatactgaatcttgaatcgctgcaaccggccggtaaaaaggcaatgagcgcgcaggatctattaaattctcgtcgtgaatggttcatccctggcaatcgccttgcctga

SEQ ID NO: 526561 - DNA, 1263 bp, Stenotrophomonas maltophilia
atggcggctcaggccgttgagcaggttatcgagcagggccagtcactgagtaatgtcctgcctccactgcaacaaaaggtttccgataaagacaaagccctgcttcaggagctgtgctttggcgtgctgcgcaccctctctcagcttgagtggttcattaacaagctgatgtcacgcccgatgagcggcaagcagcgtaccgtgcattatttgatcatggtcggtttctaccagcttcttcatacccgcattccacctcatgctgcgctggccgagacagtggagggtgccgttgcgattaaacgtcctcagctaaaaggattgatcaacggcgtgctgcgtcagttccagcgtcagcaggacgaactgttggcagaatttgcgcaaagcgaagcgcgcttccttcaccctgaatggctgctgaatcgccttaaaaaagcctacccacagcaatggcaagacattgtggatgccaataatcaacgtccgccgatgtggttacgcgtcaatcgtaaccatcatacacgcgacgcatggctggccctgctggaagaggccggaatgagcggcttcacacacgctgcttatcctgatgcggttcgtttagcctcccctgcaccggtacatgcattacccggttttgaagagggctgggtaacggtacaggacgcatctgctcagggctgcatgacctggcttgagccgaaagacggggagcagatcctcgatctctgtgcagcgccaggggggaaaacaacgcacatcctggaagtggcgccgcaggccagcgtgatggccgtggatgttgatgagcagcgcctttcacgcgtctatgacaaccttaagcgtctgggtatgaaagcacaggttaagcaaggcgatggacgcaaacccgctgactggtgtggtgatacccggttcgatcgcattttgctggacgccccctgctcagcaaccggcgtgattcgtcgtcatcccgatatcaaatggctgcgtcgcgatcgtgatatcaaggagcttgcccagttgcaatccgaaattctggatgccatctggccgcatctcaaacccggcggaaccctggtgtatgcaacctgctctgtgctcccggaagagaacagtcagcaaattgcggctttcctgaaacgcaccccggacgctacgctgcacgatacgggaacgcctgagcacccgggtctgcaaaacctgccgggcgcagaagagggtgatggcttcttttacgctaagctaatcaaagagtga

SEQ ID NO: 526562 - DNA, 1377 bp, Stenotrophomonas maltophilia
atgaaaattatcattctgggcgcagggcaagttggcggaacgctggcggaaaatctcgtgggtgaaaacaacgatatcaccattgtggataccaatggcgatcgcctgcgcgttttgcaggacaagttcgacctccgcgttgttcaggggcacggctctcatccacgtgtgcttcgggaagcgggcgcggacgatgccgacatgctggttgcagtaaccagttctgatgaaaccaacatggttgcatgtcaggtggcctactcgcttttcaacaccccaaaccgcatcgcccgcattcgctccccggactatgtccgggatgcggaaaagctgtttaattccgaagcagtacctatcgaccatcttattgcgcctgaacagctggttatcgacagtatttatcgtctgattgagtacccgggcgcgttgcaggttgtgaactttgctgaagggaaagtaagcctggcggtcgtgaaggcttattacgggggcccgctgataggtaatgccctgtcgacaatgcgcgagcatatgccacatatcgatacgcgtgttgcggcgattttccgtcacgacagacctattcgtccgcaaggttccaccattgtagaagccggggatgaagtcttctttattgcggcttctcagcatatccgtgcggtgatgagtgaactacagcgtctcgaaaaaccgtataaacgtattatgctggttggcggcggtaatattggcgcaggtctggcgagacggctggaaaaagactacagcgtgaagctgatcgaacgggatcaacaacgcgcgtcagagctggctgaaaaacttcagaataccatcgtgttttatggcgatgcttcggatcaggaattgctggccgaagagcatatcgatcaggttgatctttttattgccgtcaccaacgacgacgaagcgaatattatgtccgccatgctcgctaaacgtatgggggcgaaaaaagttatggtgcttatccagcgtaaggcttatgtcgatctggtacagggtagcgtaattgatattgctatttcaccccagcaagccaccatctctgccctgctaagccatgtgcgtaaagcggatattgtcggcgtgtcatctcttcgtcgtggtgttgctgaagccattgaagccgtcgctcacggggatgaaacgacgtcacgcgttgttggtcgcgcaatcgatgaaattaaacttccaccaggcaccattatcggcgcagtagtgcgaggtaatgatgtgatgatcgccaatgataatttacgtattgagcagggtgaccacgttattatgttcctgaccgataaaaaatttattaccgacgtcgagcgtttattccagccaagcccgttcttcctgtaa

SEQ ID NO: 526563 - DNA, 381 bp, Stenotrophomonas maltophilia
atgcgcgggaatgtggtggatttggctgtgggtgtcattattggtgcggcgttcggtaagatcgtttcatcattagtcgccgacattattatgccgccgttaggactgttgattggaggcattgatttcaaacaattcgccttcacccttcgggaagctcagggcgatatccctgcggttgtaatgcactacggcgtattcattcagaacgtatttgatttcgtgatcgtggcatttgccattttcatggcgatcaaacttatcaacagacttaaccgtaaaaaagaagaaccggctgctgccccgccagcaccaactaaagaagaagtcttactgactgaaattcgcgatctgttaaaagagcagaataaccgcgtttaa

SEQ ID NO: 526564 - DNA, 216 bp, Stenotrophomonas maltophilia
atgagccgctatcagcatactaagggacaaattaaggataacgccattgaggcattggttcacgacccgctttttagacagcgtgttgagaagaacaagaagggaaaagggagttatttgcgtaaaggtaaacatgcacaacgtggtaactgggaggccagtggcaagcaagctaatcgcttttttaccactggcctttctgtttctctcgcctga

SEQ ID NO: 526565 - DNA, 426 bp, Stenotrophomonas maltophilia
atgtaccgcataggtgaacttgcgaagcttgctaacgtaacgccggatactatccgctactacgaaaagcagcagatgatcgatcatgaggtcagaacagaaggtggatttcgcctttatacggataacgacctgcaacgccttcgttttatccgctatgcccggcaactcggcttcacgctggagtcgatccgtgaactgctgtcgatccgtatcgatcctgaacatcatacgtgtcaggaatctaaaagcatcgttcaggcccggctggatgaagttgaaggacgaattcaggagctgcaggccatgcaacgatctctacaaaggctgaatgacgcgtgctgcggtactgctcacagcagtgtttattgctcaatactggaagcccttgaacagggcgccagtagtgaaactcagggttgttga

SEQ ID NO: 526566 - DNA, 369 bp, Stenotrophomonas maltophilia
atgtggttgctcgatcagtgggctgaacgccatattagcgatgcccaaaacaaaggcgagtttgaaaatctccccggtagcggtgagccactggtgctggacgatgattcacacattccccctgaattacgagccggttatcgcttactgaaaaacgcaggttgtttaccccctgaacttcagcaacgcaatgaagccgtcgagcttgccgatctgcttaaaggcattcataagaatgacccgcggtactccgaaatcagccgtcgattagcgctcatcgaaataaaactgcgccagacgggaatgaatactgactttttgcatggtgagtacagtgaaaggttaatgcaaaaaataaacgaggagtag

SEQ ID NO: 526567 - DNA, 384 bp, Stenotrophomonas maltophilia
atgcgccatcgtaagagtggtcgtcaactgaaccgcaacagcagccatcgccaggctatgttccgcaacatggcaggttcactggttcgtcatgaaatcatcaagacgaccctgcctaaagcgaaagagctgcgtcgcgtagttgagccgctgattactcttgccaagactgacagcgttgctaatcgtcgtctggcattcgcccgtactcgtgataacgagatcgtggcaaaactgtttaacgaactgggcccgcgtttcgcgagccgtgccggtggttacactcgcattctgaagtgtggcttccgtgcaggcgacaacgcgccgatggcatacatcgagctggttgatcgttcagagaaagcagaagctgctgcagagtaa

SEQ ID NO: 526568 - DNA, 267 bp, Stenotrophomonas maltophilia
gtgaaagaagagaaaccagaattcgatccgatcctgctgcgccctgttgacgatctggaattgactgtccgctctgctaactgcctcaaggcagaagctatccactatatcggtgatctggtacagcgtaccgaggttgagttgctgaaaacgccgaacctgggtaaaaaatctcttaccgagattaaagacgtgctggcttcacgtggtctgtctctgggcatgcgcctggaaaactggccaccagcaagcattgctgacgagtaa

SEQ ID NO: 526569 - DNA, 882 bp, Stenotrophomonas maltophilia
atgatgcgaatcgcgctcttcctgctcaccaacctggcggtgatggtggtattcgggctggtgctaagcctgacgggaattcagtcgagcagcgttcagggtctgttgattatggcgctgctgtttggtttcggcggctctttcatttcactgctgatgtcgaagtggatggcactgaaatccgtgggcggtgaagttattgagcagccgcgtaacgatatggaacagtggttgatgagcacggttgctcagcagtcaaagcaggcgggcatagccatgccgcaggtggcgatctaccacgcgccggatatcaacgcgtttgctaccggtgcgcgtcgtgacgcgtccctggtggccgtcagtaccggtctgctgcaaaacatgagccgtgacgaagcggaagcggttattgctcacgagatcagccacatcgctaacggcgatatggtcaccatgaccttgatccagggcgtggtgaacaccttcgttatctttatttcccgtattctggcgcagattgctgccggatttatgggtggcaaccgtgatgagggtgaagagagcaacggtaacccgctgatctattttgctgtttcaatggtgctggagctggtgttcggtatcctggcaagcatcattaccatgtggttctcccgtcatcgtgagttccacgcggatgccggttctgcgaaactggtgggtcgtgagaagatgattgctgcgctgcaacgtctgaaaaccagctacgagccgcaggaagcaaacagcatgatggccttctgtatcaatggtaaatcaaagtcgctgagcgagctgtttatgtcacatccgccgctggataaacgtattgaagcgctgcgaagcggcgaatacctgaagtaa

SEQ ID NO: 526570 - DNA, 2025 bp, Stenotrophomonas maltophilia
atgaacactttttttaagctcaccgcgctggctggcctgtttgctataacaggccacgctttcgctgtggacgatattacgcgtgttgatcaaattccggttcttaaggaagaaactcagcacgcgacggtgagtgagcgcgtgacgtcgcgctttactcgttcgcactatcgtcagttcgatctcgatcaggccttttcggccaaaatctttgaccgttatctgaacttgctggattacagccataacgtactgctggccagcgatgtcgaacagttcgctaaacgcaaatccgaagtgggtgatgagctgcgctccggaaagctggatcttttctacgatctgtacaacttatcgcaaaagcgccgttttgagcgttatcaatacgcgctgaaagtgctggaacgtccgatggacttcaccggcaacgacacctttaatctggaccgcagcaaagcgccatggccgaaagatgaggctgaactgaatgcgctgtgggacggaaaagtcaaatatgacgaactgagcctcaagctcacaggcaaagacgagaaagagatccgtgagacgttaaaccgtcgctacaaattcgcaattcgtcgtctggcgcagaccaacagtgaagatgttttctcgctggcgatgaccgcgtttgcgcacgaaattgatccgcacactaattatctctctccacgtaacaccgaacagttcaataccgaaatgagcctgtctctggaaggtatcggtgctgtgcttcagatggatgatgactacaccgttatcaactccatggtggccggtggccctgcgtcgaaaagcaaagcgatcagcgtaggcgaccgtattgtcggtgtaggtcaaaccggctggcgacttgatgacgtagttgcgttgatcaaagggccgaagggcagcaaagttcgcctggagatcctgccagccggaaaggggaccaaaacccgtatcgttactctgacccgtgagcgtatccgtctggaagatcgcgcggtgaaaatgtcggtgaaaaccgtgggtaaagagaaggttggcgttctggatatccctggcttctacgttggcctgaccgatgatgtaaaagtgcagctccagaagcttgaaaagcagaatgtcagcagtgtgatcatcgacctgcgcagcaacggcggcggggcattgaccgaggccgtctcgctctccgggctgtttatcccgtctggcccggtggttcaggtgcgcgataacaacggtaaagtgcgtgaagatgccgataccgatggcgtggtctactataagggtccgctggtggtgctggtcgatcgcttcagcgcctctgcatcggaaatcttcgctgctgccatgcaggattacggccgggcgttaatcgtcggcgaaccgacgtttggcaagggcaccgttcagcagtaccgctctctgaaccgtatttacgaccagatgctgcgccctgaatggccggcgctgggctcagtacagtacaccattcagaagttttaccgtgttaacggcggcagtacgcagcgcaaaggcgtgacgccggacatcatgatgccgacaggtaccgaagagacggaaacgggcgagaagtttgaagataacgcgctgccgtgggatagcattgatgccgcgacattcgtgaaatcgggtgatatgaaacagttcggtccggaactgctgaaaaatcacaacgaccgcatcgggaaggatccggaattccagtacatcatgaaggacatcgcgcgtttcaacgctctgaaagcgaaacggaacattgtctctctgaactacgcccagcgtgagaaagagaacaatgaagatgacgcgacacgtctggcgcgtatcaacgatcgcttcaaacgtgaaggcaagcctctgctcaaaaaactggacgatctgcctaaggattaccaggagcccgatccgtatctggacgagacggtgcatatcgcgcttgatctcgcgaagctggaaaaagagaaacctgccgtacaacctgctccgacaaaataa

SEQ ID NO: 526571 - DNA, 687 bp, Stenotrophomonas maltophilia
atggaaaatcaacctaagttgaatagcagtaaagaagttatcgcatttctggccgagcgtttcccgcagtgcttcagcgctgaaggtgaagcgcgtcctctgaaagtcggtatctttcaggatctggtcgcgcgcgttgagggggagatgaacctcagcaaaacgcagcttcgttctgccttgcgcctttatacctcgagctggcgttacctgtacggtatcaagccgggtgcgacccgtgtcgaccttgacggcaacccgtgtggtgagctggacgagcagcacgtagaacatgcgcgtaagcagcttgaagaagccaaagctcgcgttcaggcacagcgtgctgaacagcaggccaaaaaacgcgaagccgcagcggcaaacggtcaggaagacgcccctcgtcgcgagcgtaaaccgcgtccggcaccgcgtcgtactgaaaataacgatcgcaaaccgcgtgctgacaaaccagcagctaaagccccacgtgcgccgcgcgaagagccgcgccacaccccagtttcggacatcaacgccctgagcgtaggtcagtctctgaaggttaaagcgggtaacaatgcgatggatgccaccgtactggaaatcaccaaagatggcgttcgtgtacagctgacttctggtatgtcaatgattgtacgcgcagaacacttgttgttctga

SEQ ID NO: 526572 - DNA, 498 bp, Stenotrophomonas maltophilia
atgaacaaaacagaattctacgcggatctgaatcgcgattttaaggcattaatggcaggggaaaccagtttcttagccactctggcaaataccagtgcgttactgttcgaacgcctttctggcgtgaactgggcgggcttttatctgctggaaggcgacacgctggtgctggggcctttccaggggaaactcgcctgcgtacgcatcccggtaggtcgcggcgtgtgcggtaccgcagtggcgacccgtcaggttcagcgtgtcgaagatgtacatgcgtttgacggccacattgcctgcgatgccagcagcaattctgaaatcgtactgccgctggtggttaaaaatcagattattggcgttctggatatcgacagcacggtcttcagccgctttactgccgaggatgagcaggggctgcgcgcgttggccgcaaacctggaaaatgttctggcagagaccgattatcataaattctttgcgagcgtcgcaggataa

SEQ ID NO: 526573 - DNA, 1170 bp, Stenotrophomonas maltophilia
atgttgccgaagatgaaatcgcaccaaagtgctttttgcccttgctgcgatgccaaaattcgcgacggccgggactggtcattgacgcgtctggcggcaatggcggttaccatgctgctgctgatgccgttcgcctggaccgagccgctgttgaagctctacctgcttggcgtgcgtattgacgctaacgtattgcaggggatctggcagatgacgcgcgagggcgatccgctcaccggcgctatggtgctgttctgcgtcgtcggcgcaccgctggtgctggtcgcggcaattgcctacctgtggtttggcaacattctggggatgaacctgcgccctgtcctgctcatgctggaaaagctcaaggagtgggtgatgctggacatctatctggtgggcgtcggtgtggcctccattaaggtgcaggattatgcgtttttacaacccggcattggcctttttgcgtttatttcactggtcctgctgagtattttgaccctgattcatctgaatgttgaacagctttgggagcgattttaccctcagcgtcccgcgacccggcctgatgaaaacctgcgcgtctgcctggggtgccattacaccggttttccggataaacgcgggaggtgtcctcgctgccacattccgttaagattgcggcgcaacaacagcctgcaaaaatgctgggcggcgcttatcgcctcactgatatttttattcccggccaatatgctgccgatctccgtaatttatgtgaacggcgcccgtcaggaagatactatcctttcagggattatctctctggcgcacagtaacgtgggggttgccgccattgtgttcatcgccagtattctggtgccctttaccaaagtggtggtgatgtttacgctacttatcagcattcactttaaatgcgaacaaggactacgcacccgtatcctgcttctgcgattcgtgacctggattggtcgctggtcgatgttggatctgttcgtgatttcgctgatgatgtcgctcatcaatcgcgatcagttacttgcttttaccatgggacccgcagctttttatttcggctctgcggtgatattgactattcttgcagtggaatggctggacagccgcttactttgggacgcacatgagtcaggaaacgcccgcttcgccgactga

SEQ ID NO: 526574 - DNA, 2634 bp, Stenotrophomonas maltophilia
atgagtcaggaaacgcccgcttcgccgactgaagcgagaattaaaacaaaacgccgcatttcgccattctggttgctgcctgtcatcgcgctgatgatcgcaggctggcttatctggacgagctatgaagatcgcggaagtaccatcacgattgatttccagtctgcggacggcattgtcgccggacgtacccccgttcgcttccagggggtggaagtgggtaccgtgcaggatatttccctcggcaaagggctgaacaaaatccaggtccgggcgagcattaagtctgacatgcaggatgccctgcgcgccgaaacgcagttctggctggtcacgcctaaagcctccctggccggcgtttccgggctggatgcgcttgtgggcggtaactatatcggcatgatgcctggcaaaggtgagccacaggatcactttgttgcgctggatacccagccgaaatatcggctgaataacggcgatctgatgatccacctccgcgcgccggatttgggctcgctgaacagtggttctctggtctatttccgcaaaattccggttggccgcgtttacgactacgccattaacccgaacaaagatggcgtgaccattgatgtactgatcgatcgccgttttaccaacctggtaaaaaaaggcagccgcttctggaacgtctctggcgtcgatgctgacctgagcttaagcggtgcgaaagtgaagcttgagagcctggcggcgctggtgaatggcgctatcgccttcgactcacctgctgactccagccctgccgccgcagaggatacctttggtctgtacgccgacctggcacacagccagcgcggtgtcatcgtcaagttgaccttgccggatgccaaaggcctgaaagccggttcgaccccgctgatgtaccagggtttagaggtcgggcaactgacaaaattaaccctcaacgcgggcggctccgttaccggcgaaatgacggtggatccgagcgttgtggacctcctgcgggaaaaaacacgcatcgagctgcgtaatccgaagctctccctcagcgacgccagcatcagttccctgctgacgggaagcacctttgagctgatccccggtgaaggtgcgccgaataaaaactttgtcatcgcgccggcggataaagctctgctgcaaaaaccgggcgtgttgacggttaagctgaatgcgccggaaagctatggtatcgaagccggtcaaccgctaatcctgcacggtgtgcaggtgggtcaggttctggaacgaaagctgacggaaaaaggggtctccttctccgccgccatcgatccgcagtacggcaaccttgtgcacggcgacagtaaatttgtggtgaacagccgggtcgacgtgaaggtgggtctggacggcgttgagttcctcggcgccagcgccagcgagtgggttaacggcgggatccgcattctgccgggcagcaaaggcgcgctgcgtgagagctatccactgttcgccaatctggacaaagccattgaaaacagcctcggcgacctgccgaccaccacgctgaccttaagcgctgaaacgctgccggatgtccaggcaggctccgtcgtgctttatcgtaagtttgaggtcggagaagtgatcaccgttcgtcctcgtgcggacgcgtttgatatcgaactgcatatcaagccggagtatcgcaagctgctcacgccaaacagcgtgttctgggctgaaggcggcgcgaaagtgcagctcaatggcaacgggctgaccgtacaggcgtctcccctctcccgtgccctgcgcggtgcgatcagcttcgataacctgagcggcgcgggcggcaacatgcgtaaaggtgacaagcggatcctcttcccgtctgaaaccgcggcgcgcgccgtcgggggacagattaccctgcacacctttgatgccggtaaactggcagaaggcatgcctatccgctatctcggaattgatatcgggcaggttcagaagctgacgctgatcaccgcgcgcaatgaagttcaggctaccgccgtgctttatccggaatatgtacagactttcgcccgggcaggctcgcgcttctcggtggttacgccgcaaatttctgccgcaggggttgagcatctcgacaccatacttcagccgtacattaacgttgaaccgggtcggggcaacgcgcgtcgtgagtttgagttgcaggaggcgaccatcaccgattcccgttatctggacggtctgagcattgtggttgaagtaccggaagccggttcgctgggcatcggtacgccggtcctgttccgcggtattgaagtggggacagtaacaagcctgacgctgggtaacctgtccgatcgcgtgatggttggcctgcgcatcagccagcgttatcagcatctggttcgcaacaactcagtgttctggctcgcttcaggctactcgctggacttcggcctgaccggtggcgtggtcaaaacggggacctttaaccagttcattcgcggcggcattgccttcgcgacgccgcctggcacgcctctggcgcctaaggcgcaggcaggaaaacacttcctgctgctggaaagtgaaccgaaagagtggcgcgaatggggaacggcactgccgcgttaa

SEQ ID NO: 526575 - DNA, 1398 bp, Stenotrophomonas maltophilia
atgcgcgaggcgcttcctgctcatctctctttcgacgatttcgtcgccgcctgccagcgccctttgcgtcgaagtattcgcgtcaatacgctgaaaatcagcgtcggagcgtttctggatctcgtctcctcctacggctggcagctgacgccggtgccgtggtgtgaggaagggttctggatcgagcgggatgacgaggagagcctgccgctcggcagcaccgccgagcacctgagcgggctgttttatattcaggaagccagctccatgctgccggttgccgcgctgtttgccgacggaaaccagcctgagcgggtgatggatgtcgcggcggcgccgggctctaaaaccacgcaaattgccgcccggatgaacaaccgcggcgcgatcctcgccaacgaattttccgccagccgcgtcaaagtcctgcacgccaatatcagccgctgcgggatccacaacgtcgcgttaacacacttcgacggtcgcgtgtttggcgctgccttgccggaagcttttgatgccatcctgctcgacgcgccctgctccggcgaaggcgtagtgcgtaaagatcctgatgcgttaaaaaactggtccgttgaaagcaacctggagatcgccgccacgcagcgtgaactgatcgacagtgcgtttcatgccctgcgccccggtggaacgctggtttactccacctgcacgctgaaccgcgatgaaaacgaggacgtctgcctgtggctcaggcaacactatgcggatgccgtcgagtttctgccgctggacaccctcttcgattcggccagtcacgcggccacccctgaaggcttcctgcacgtcttcccgcagatttacgattgcgaggggttctttgtcgcacgactgcgtaaaacccgcgccgtcgatccgctgcctgtccctaagtttaaggtcggcaacttcccgttcgcgccggtcaaaggccgtgaggcggcacaggcgcaagcggctgccaacaaagtgggactgcactgggatgagagcctgcgcctctggatgcgtgacaaagagctgtggctgttcccggccaacatcgaaccgctgattggtaaggtgcgtttctcccgcctcggtattcgcctggcggagatccacaacaaaggctatcgctggcagcacgaagcggtcattgcgctggcaggaagtgagaactccttcgccctgacgcatcatgaagcggaagagtggtatcgcggtcgtgacgtttacccggaagacggcccgtcacaggatgaagtcatcgtgacgtatcagggctatccgctcgggctggcgaaaaaagtcggctcgcggctgaaaaacagctatccgcgtgaactggtacgcgatggtcgcctgtttaccggtaacagccgcactgactga

SEQ ID NO: 526576 - DNA, 240 bp, Stenotrophomonas maltophilia
atgacgaaaaccagcgtacgcattggcgcttttgaaatcgacgacgctgaattgcgtggcgaagcacaaggcgaacgaacgttaagtattccctgcaaatccgatccggatttgtgcatgcaactggacgcctgggatgcagataccagcgtcccggcaatccttgatggggaacattccgttctgtaccgtgaacattacgacagtaaaaccgatgcctgggtcttgcgtcttgcataa

SEQ ID NO: 526577 - DNA, 492 bp, Stenotrophomonas maltophilia
atgctcaggagtctcgtgggctcggagatgtgtataagagacaggttttatgcggtacgcggtaatcacgagcaaatggcgttagatgcgcttgaaaataatgattttagtctctggaagataaatggcggtaactggtttaccgggcttacggtcgctcaacaaaagcaggcgaaggatttactcgacgcgtgtcgggacttaccgcacattattgaaataacctgcaaaaacggtctgaacgtgattgctcatgcggattatcccgccgccgaatatgcctggcataagccggtagatgcccagcgggtgctgtgggatcgcgaccggttaatgggctttatggtgggtagagggcagggcattagcggtgcggatcacttctggttcggacatacgcctgtggacaagcgctacgatttcaacaatctgcactacattgatacgggagcggtgttcgggggctttctgacgctgacgcagcttcagtaa

SEQ ID NO: 526578 - DNA, 528 bp, Stenotrophomonas maltophilia
gtgctcatctttaaatttgcaggcagtctacgccgattttaccgccagatatccctgaacgttgatactcccgcgcagggattacgcctcctattggcgcaggatttcgaattcaaaaaagcctttctcaatacaaagctgcgtgtgcgggtagcgggcgaggatattgaggcatctgcgatgcaatggcatatggaccgccaccttaaagatggctcagtggtcctgttcgtgccggtagtggagggggcgatcaccgccgctgcggccgcatggattgcggttgccgttagcgtagcgtctatagcttattcggtttacatgtcacgcaacatgaagaccaaaacctccgcagaagccgcagagaccaatacgctcacaaataactcatttaccagtgctgagaaccgggtggggcaggggcgcgcggtgccactcctactgggagaaatggaggtcggttcgaacgtaatttcactcggtatcgacacaagcaacaaccaggactggacggaatctattagctaa

SEQ ID NO: 526579 - DNA, 723 bp, Stenotrophomonas maltophilia
atgatgcaggaattactcgattatgcggcatcgtcgcaggatgaggtgtgcggcttaatcctggatggcgggcagttgttccgctgtcggaatgttcacccggagccctggcatcacttccgtataagtgacgatgactggcttgcagcagaggatgaaggagaggttacagcggtttttcattcgcacccgcaaagccagccagcgctttctggtgctgaccggcagatgcaggtaatgacggggctgccatggtggcttgcatctggcgggcaactgaggaaatacaggcctgtgccactcctgctggggcgcaggttcgaccacggcattatggattgctacacgcttttccgggacgcatatcatctttgcggcatcgacctgccggacttcgggaggactaacggatggtggttgcggggagaaaatctctatctcgccaatatgcaggtcaatggcttctatcaggtatccatgcaggatgcacaaccaggcgacgtcattatcaggcagccattccccggcgccgacccatgccactcaatgattctccttcatgacaacctggtgcttcaccatgaccatgccggacacctcagcagacgagaacaaatgcgccgggcatacatcaagcagacgcactcaatctggagacacgaacagtgctcatctttaaatttgcaggcagtctacgccgattttaccgccagatatccctga

SEQ ID NO: 526580 - DNA, 705 bp, Stenotrophomonas maltophilia
gtgcgcgacataccagccagtatgattattgatagcgtcgacgccggagtaggcgcgtttatcgacctgttcgaagccgacctgcaaccctttggcggagaccttatccggttccattccggcaccaatggatattacggaaatgtgatctggaaggggaatcagtatcaggcatacccgatagcagtcgaagggttcgagtcaaagaacgaaggcacatatgcccggccaacaatggtggtggcgaacgtcacgggtttactgacgggcatcaaccacgacttcgacgatatgctcggtgtggttataactcgccggcaggttccggtaaaaaatctggatgcggtgaatttcccgaatggaaaccctgatgcagatccgactcaggaagccgtttcccgctacgttgtggaagagatgaccgaagagacattcgagcaggtcacttacacgctggcgacaccgattgactgcgacaacgctatcatcccggcgcgaaccatccttgccgacgtctgccagtggctgtatcgcggcgtcgggtgcggatatgacgggccgccggttgcagatgagcgcgacaatccaaccactgacccggcgaaagataagtgctctcaccgccgtagcggctgccgcttccgttatccacgaccggaaccaatgccaatcagcagcttccccggctctcagaaggtttcatga

SEQ ID NO: 526581 - DNA, 156 bp, Stenotrophomonas maltophilia; identical to SEQ ID NO: 122169

SEQ ID NO: 526582 - DNA, 369 bp, Stenotrophomonas maltophilia
atgcgcatccacccccgcatccagggccgcttgtctggcctcggctacagccctttcttttttgtctgttatggacagcagattgttttgcttttcaaggctggacaggagtttatctccatcctcgctgcgcataaccatcagactggaagagttatatttctccttcgctttggcggcgaaattgatcatatcgccaagcttgcccatcattccggcggcgacacccgcttcctcaccatcccggcgaagcaggtcaatcccttgcctcatcgtgccattgagcgtggcgcgtcctatgttaatagcgttctgcgtctggctaaggcgattctgcgcacgttcaagctcgagagttgcaatcgctaa

SEQ ID NO: 526583 - DNA, 522 bp, Stenotrophomonas maltophilia; identical to SEQ ID NO: 122171

SEQ ID NO: 526584 - DNA, 303 bp, Stenotrophomonas maltophilia
atgaatagcaagatggatgacaatattcactttgtagacttcccaaaacatggtggtggcggtagcggcggtgacggaggcgatatgtacacacgcgagagacttgcaagacttgaagccacagacgaactgcgagagcgaaacatccgaggcattgaatctgagctgaaaagcatcaaccaaaacctatcatcaatggaaaagcggttcattgataagatcgacgacaaccaaaaatggctggttggccttttggtatctgcaatactcgttccattattcattgctttagtcaccaagtga

SEQ ID NO: 526585 - DNA, 264 bp, Stenotrophomonas maltophilia
atgaaaaaactaccaattattgcgatctgcgttgcactcctcgctggttgcgcaggaatcatggagaaacaggaaccgatctgtgaggctgtggcaatgctcggcgggcaagataccaccgtgcagatttacggagttcgcaaagtagccaaccagacccagtatcgcgccggctatccgttcaactggcagtgggtatcaaagaacaatttctccagtaccacctgcgataagaagccagaggttcgtaacgaccttctctga

SEQ ID NO: 526586 - DNA, 381 bp, Stenotrophomonas maltophilia
ttgcagaatcaggaatggaagacctacatcgacagccgcaataccgggaatttcgacgtgatccgtgcgtcgtgggtaggggattataatgagccgtcgacattcctgtcgctgctgacgtcctctcacaccggcaacatctcacggttcaacgaccctgcttacgataagattattcatcaggcgacgctcgaaaccactgaaaaagcgcgtaatgcagactacaacatggccgagaagatcctcgccgagaaagcgccgatagcccctatttatcaatacaccaatggccgcctcattaagccctgggttaaagggtatccgataaataacccagaggatgttgcgtacagtcgtacaatgtatattgaaaagcattaa

SEQ ID NO: 526587 - DNA, 741 bp, Stenotrophomonas maltophilia
gtgacggcagtcgatgctaaaacgctgcgcgtgcagctggataaaccgctgccatggttcagcaacctcacggctagctttgcgttctatcctgttcaaaaggcaaacgtggaaagcggtaaagaatggacgcgccctggcgcgctcatcggcaacggtgcgtatgtgctgaaagatcgcgtggtgaatgaaaaactggtggttgagccgaatactcactactgggataacgtcaacacggtgcttaaaaaagtcacctttgtgccaatcaaccaggagtcctcagcgaccaaacgctatctggcgggcgatatcgatattacagaatcgtttccgaaaaacatgtaccagaagctgcttaaagatattccgggacaggtttatacaccgccacagcttgggacctattactacgcgtttaacacacaaaaaggcccaactgcggatgcccgcgtacgtctggcgctcagcatgactatcgacagacgtattatggctgaaaaagtcctgggaaccggtgagaaaccggcctggcatttcactcccgatgtcactgccggttttacaccggaaatctcgccatttgagcagatgtcgcagcaggagctaaatgctcaggcgaaaacgttattacaggcggcaggctatggtccccagcgcccgctgaagttgacgttaagttgcagaatcaggaatggaagacctacatcgacagccgcaataccgggaatttcgacgtga

SEQ ID NO: 526588 - DNA, 714 bp, Stenotrophomonas maltophilia
atggcaaccacccgaccaagaacggaacgcggcgccttcccgcccgggactgaacattatggccgctcatttttaggcgctccactgatctggtttccggctcccgagcccgatcgcactagcggcttaatcattgcgggcacacatggcgatgaaaactcgtccatcgtgacgctttcgtgcgcgctacgtacgctggcccccgatttacgacgacatcatgtgattttgaccgtcaacccggacggatgccagcttggattacgggcgaatgcacgaggcgttgaccttaacaggaactttccggcagcaaactggcgtgccggtgaaacggtgtatcgctggaacagttcggcgcaggaacgagatgtggtcctgcttacgggagaaaaaccgggttccgagcccgaaacccaggcgctgtgtcagcttattcataagatccacccggcctgggttgtctctttccacgatcccctcgcctgtattgaagatcctcgtcatacagcgctcgggcagtggctggcggatgcgtttgctctacctctggtaaccagcgtcgggtatgaaacgcccgggtcgtttggcagctggtgcgcggacctcagtcttcactgtatcaccgcagagtttccgcctatttcctcggatgaagcgagtgaaaaatacctcagagcgatgacagatcttctgcgctggcagcctcaaagatga

SEQ ID NO: 526589 - DNA, 966 bp, Stenotrophomonas maltophilia
atgagaagcgttaaggtctatgaagaagcctggccattgcacaccccgtttgtgatctcgcgcggtagccgtaatgaggcctgcgtggtcgtggttgaatgtgaagaggacggcgtaaaaggcgtcggggaatgtaccccttatcctcgctacggagaaagcctggcgtcagtcattgcgcaaattatgacggtggtgcccgagttgcaggcgggcctgacgcgtgaggctcttcagcagaggttgccggccggagcggcacgtaacgcgattgactgcgcactctggagtctggaagcggcgaaacaacaaaaaccgctaccttcgctgctggacgttacgctgccgcaatcgatcgtcaccgcgcaaacggtggtcatcggtgaaccagagcaaatggcggccagcgcccaggcgctatatgcaaccggtgcaaccttattaaaggtgaagctcgacgatcgtctgattagcgaacgcatggtcgccattcgtgcggcggtacctgatgccacccttatcgtcgatgcgaacgaatcatggcacagcgaagggctggcagcccgttgtcagctgcttgccgatctgggcgttgccatgctggagcagcctctcccggcagaagacgatgccgcgctggcgaattttattcatccgcttcccgtctgtgcagacgaaagctgtcatacccgtgagaacctgtcagccctcaagggccgctacgagatggtgaacatcaagctggataaaacgggtgggttaaccgaggccctggcactggcacaagatgcccaggcgcaaggcttttccctgatgctgggctgtatgttgtgcacgtccagagcgatcggtgctgcactcccgctggtgaacagcgtgcgttttgccgatctggatggcccaacctggctggcggttgacgtttcacccgccctgagttttacctccggcgtacttcatctttga

SEQ ID NO: 526590 - DNA, 507 bp, Stenotrophomonas maltophilia
atgtcacaactcgttcatttccagggcaacccggttgctgttgcaggttccatcccacagtctggcagcaaagcacagccttttactctggtggctaaagatctgtctgacgtcacgctgagccagtttgctggcaaacgtaaagtcctgaacattttcccaagcatcgatactggcgtttgtgctgcatcagtgcgtaaattcaaccagctggcgaccgaaatggacaacaccgtggtgctgtgcatttctgctgacctgccgtttgcccagtcccgcttctgcggcgctgaaggcctgagcaacgtcatcaccctttccactctgcgcagcccggatttcctggaaaaatacggtgttgccatttccgaaggcgcgctgaaaggtctggctgctcgtgcggtgctggtgatcgacgaaaacgacaacgttgttttcagtgagctggttaacgaaatcactaccgaaccggattacaccgctgcacttgaggcgcttaaagcctaa

SEQ ID NO: 526591 - DNA, 1542 bp, Stenotrophomonas maltophilia
atgcgtctggaagtcttttgtgaggaccgtctcggtctgacccgcgagttactcgatcttcttgttttacgtagcattgatttacgtggcatagagatcgaccctgtcgggcgaatttacctcaattttgccgaaattgaatttaataccttcagtagcctgatggccgaaatccgccgtatcgctggcgttacggatgtacgcaccatcccctggatgccatccgagcgggaacaccttgcgctgagcgcactgctggaagcaatgccggagccgtttctctctctcgatctgaaaaacaaagtcgagcgcgttaaccaggccagttgccagctgtttgcgcagactcaggaaaagcttatcggtcattacgccacgcaatttatcccaggttttaatttccagcgctggctggacagcaacccgcaaaatacccatagcgagcacgtcgtcatcaatggacagaatttcctgatggagatcacgccggtctacctgaaaggggaaaatgccgcgcgggtgctcaccggcgcggtaatcatgctgcgctccacggtgcgcatgggacgccagttacagaacctttccagccaggacgtcggcgcattcagccagattattgcggtgagcccgaagatgcgtcacgtgctcgaccaggcgcgcaagctggcaaatcttacggcaccgctgctgattaccggggataccggtacggggaaagatctgctggcgcatgctgtgcatatggccagcccgcgtgcggcaaaaccgtatctggcgctgaactgcgcgtctattcctgaagatgcggtggaaagtgaactgttcgggcatgcgccggaaggcaaaaaaggcttctttgaacaggcgaatggcggctcggtgttgctggacgagattggtgaaatgtcgccacgcatgcaggcgaaactgctgcgtttcctcaatgacggcacgttccgccgcgtgggggaagatcatgaagtgcacgtggatgtacgcgtcatctgcgccacccagaaaaacctggtggagctggtgcagaaaggagtattccgcgaagatctctactatcgtctcaacgttctgacgctcaatattccgccgctgcgcgattgcccgcaggacatcatgccgttgacggaactgttcgtcgcccgttttgccgacgagcagggcgtgccgcgtccgaagctctctgccgacctgggtaccgtgctgacgcgttacggctggccgggcaatattcgtcagctaaaaaatgcggtctatcgcgcattaactcagcttgaagggtatgaactgcgtcatcaggatattctgttgccggattacgatgccgggacggtctcggtaggcgaagaggcaatggaaggctcgctggatgacatcaccagtcgtttcgagcgttcggtgttaacgcagctttatcgcagctatccgagcacgcgcaagctggctaaacgtcttggggtgtcacataccgcgattgcgaataagctgcgcgagtatgggttaaatcagaagaagggtgacgaataa

SEQ ID NO: 526592 - DNA, 1053 bp, Stenotrophomonas maltophilia
atgacggaaccgttaaagccccgcattgattttaccggccagcttgagcagtccccgcatgaggcgtttaaaacagcgcaaaccttcagcggtccgcaggccgacaactttgctcccgtgctggcagaggagccgttggttgaagaggggcaggcggaagcggtcgttgatgcggcactgcgcccgaaacgcagcctgtggcgtaagatggtgaccgccgggttagccctttttggtgtgagcgtaattggtcagggcgtgcagtggggcgtcaatgcctggcaaacccaggactgggtagcgctggggggatgcgccgccggggcgttgatcgttggtgcgggcgtcggctcggtcgtgactgagtggcgtcgcctctggcgtctgcgtcagcgtgcgcacgaacgcgatgaagcgcgggatctgctgcacagccacggcaccggaaaagggcgtgctttttgtgaaaagcttgcggctcaggccgggatagatcactctcacccggcgcttcagcgctggtatgcggcgatccacgaaacccagaatgaccaggaagtggtcacgctctatgcgcacattgttcagccggtactggatgcgcaggctcgtcgtgagatcagccgctcggcggcggaatccaccctgatgattgccgtcagtccgctggcgatggtggacatggcctttatcgcctggcgcaacctgcgcctgatcaaccgcatcgccagactgtatggcattgagcttggctattacagccgactgcgcctgttcaaactggtgttgctgaatatcgccttcgccggggcaagcgaactggtgcgggaggtcgggatggactggatgtcgcaggatcttgcggcgcgtctctctgcccgggcggcgcaggggattggtgccggtctgctgacggcacgcttaggaatcaaagcgatggaggtttgtcgtccactcccctggatcgatggcgataagccgcggctgggggatttccgtcgcgaattgattggtcagcttaaagagacgctcaataaaaaacctgctcagtga

SEQ ID NO: 526593 - DNA, 1413 bp, Stenotrophomonas maltophilia
  misc_feature (1332)..(1341): n is a, c, g, or t
atgaagcgacttaaaaacgaattcaattctctggtgaaccgtggcgttgatcgccatctgcgtcttgccgttaccgggctgagccgcagcggtaagacggcattcattacggcgatggtcaatcagctgttgaacctgcatgctggggcgcgcctgccactgcttagcgcggtgcgcgaggagcgattgttaggcgtaaaacgcgtaccgcaacgtgattttggcatcccccgtttcacctatgatgaaggtctggcacagttatacggggagcctcccgcctggcccaccccgacgcgtggcgtgagcgaaattcgccttgcgcttcgttttcgctcgaatgaatccctgatgcgtcactttaaagaaacgtccacgctgtatctcgaaattgtggattatccgggagaatggctgctcgatttaccgatgctggcgcaggattacctgagctggtcccggcagatgaccggtctgttgcaggggcagcgggcagagtggtcgaccaaatggcgccagctttgcgaagggctggatccgctggcaccggcggatgaaaaccgtctggctgtcatagcccaggcctggacggattacctgcatcagtgcaagcaggaagggctgcattttattcagcctggccgttttgttctgccgggagatctagccggtgctcccgcgctacagtttttcccgtggccggacgttgaccgcatcggcgaatcgaagctggcacaggcagacaagaccaccaacgccggtatgctccgcgagcgatacaattattactgtgagaaggtggttaagggtttttataaaaatcattttttacgctttgaccgccagatcgtgctggtggactgcctgcaacccctcaacagcgggccgcaggcgttcaatgatatgcggctggcgctgacgcagctgatgcaaagttttcattatggccagcgtacgctgtttcgccgtttattctcgccggtcatcgacaagctgctgtttgccgccacaaaagctgatcatgtgacggtcgatcagcacgccaacatggtatccctgctgcaacagctggtgcaggatgcctggcagaacgcggcgttcgaagggattagtatggattgtctgggtctggcgtccgtacaggcaacacagagtgggttgattgacgtgaatggcgagaaaattccggccctgcggggcaaccgactcagcgacggtgagccgctcacggtctatccgggcgaagttcccccacgtctgccgggccagtctttctggcaaagccagggttttcagttcgaagacttccgtccgcagagcatgaacgttgannnnnnnnnngttgaccagccattgccgcatatccgtctggatgccgcgctggagtttttaattggagataaattacgatga

SEQ ID NO: 526594 - DNA, 864 bp, Stenotrophomonas maltophilia
  misc_feature (838)..(847): n is a, c, g, or t
atgtcacccaccatctatgatattgcccgcgttgctggcgtttcgaaatcaaccgtgtcacgcgttctgaataaacaaacgaatatttctcctgaagcgcgtgaaaaggtgttgaaggcgatagatgagttaaattaccaacctaataaacttgcccgcgcactcacctcttctggcttcgacgccattatggttatttcgacccgctcaaccaagaccactgcaggaaatccctttttctcagatgtactgcatgccataacggcaaaagcagaagaagaaggttttgatgttattttacaaacgtccaaaagcagtgaagatgatctgcaaaaatgcgtgggtaaaataaagcagaagatgatcaaaggcatcatcatgctaagctcgccggcgaacgagtcgtttttctcgacgctggatgaatacggtgtgcctgtggtcgtcattggtaaagtggaaggaaattaccagaatatctattctgtcgacacggataatttccgcgacagcgccatattaacagactcgtttatcacgcatggccgcaccaaaattgcctgcctgcatgccccgctcgattatcacgtctctatcgatcgcctggcgggttataaattcagccttgagaaacacggcatcgaaattaacccgacctgggttatcgatggcggctatacccatgaaagcgcgcttcaggcggcctgccaactactctcctcagacaacccgcccgatgcggtttttgcgactgacagcatgaaattgctgagtctttatcgtgctgcggatgcgctaaatctggcgatcccggaacaggtcgcaatggcaggatacnnnnnnnnnngctatctctcattttaa

SEQ ID NO: 526595 - DNA, 672 bp, Stenotrophomonas maltophilia
atgacgcgcggcacctatttcgatcgtcctgaatttgaattacggtatcgcttcattggcacagaggattttacgctgggtcttacgggcggattccgtaattatggatatcattttaaagatgagcacggtgcgaaagacggtagtgctaatatgcagcgctataaaattcagcctgactgggatgtgaaattaacagatgactggcgttttggcggttggtttgccatgtaccagtttgcgaatgacctgggaaaaaccggttattctgacagccgcgtcgaaacggaaaccggatttacctggacaataaacgaaaccgtctctgcaaaagttaactactatttagagcgtggcttcaatatggacagttcacgtaataacggtgaattctccacccaggaaattcgtgcctacctgcctgtttcattaggccagacaacgcttacaccttacacccgtctggggctcgatcgctggtcaaactgggactggcagaacgatccaactcgtgaagggcataacttcaatcgactgggtctgctctatgcttatgactttgcgaatggcctttcaatgacgctcgagtatgcctacgaatgggaaaatcatgacgaaggcgagagcgaccgcttccactatgcgggtgtcggcgtcaattacgcgttctga

SEQ ID NO: 526596 - DNA, 276 bp, Stenotrophomonas maltophilia
atgcggatagagcgcatagttctggaagaccattgcgatatcacgggacttggcgggaacatcattcatgcaaaccccgtcaataatcagttcacctgcgctgatctcctcaaggccggcaatcattcgcagcgtcgtggatttcccacagcccgatggaccgacgaagacgataaattctttatcttcaatctcgagattgaaatccttaaccacgtggacctggttatcatagattttctgaatgtgtttcagagacagttgagccattattaa

SEQ ID NO: 526597 - DNA, 666 bp, Stenotrophomonas maltophilia
atgacgcttaacgctgttgtattcgatctggacggggtgatcaccgataccgcgcatcttcactttctggcctggcgcgccgtggcggaggagattggtattaccttcgatgaagtatttaacgaacagctgaagggaataagccgtatggactccctccagcgcattctgaaacatggcgggaaagaggggatgttcagtgacgagcagcgcctggcgctggcaacgaaaaaaaacgcgctttacgtccagtcgctggcatcactgacgcaggattcgctgctcccgggtattcgcgacgtgctggcggatattcgcgccgcgaaggtcaaaattgggctggcatccgtatcgcttaatgcccctgggattttgcacgcgttgggtattcatcaggctttcgatttttgcgccgatgcttcgcgcatttgccgctcaaagccggacccggagatcttccttgcagcctgtaaaggactgaacgtgcgtcctgaagaggccattggtatcgaagatgccgccgcaggggtagatgcgatcaacgccgcaggaatgctgtcggtcgggattgggcctggcctgaaccatgcgggattacaacttcattcaacgcaggaactgacctgggaacgcctgacggcgttctgggcatcccgggcgtattga

SEQ ID NO: 526598 - DNA, 2280 bp, Stenotrophomonas maltophilia
atgctgaacgtatctgtattaaccgatccgggattttgtcctcacagcctgaataaatatgcctcagtcatgacctgcggtaatggctacatgggcattcgcgctgcgcatgaagaagattacaccctgcaaaccaggggcatgtatcttgccggcctttatcatcgcgcgggtcgcaacgagaccactgaactggtcaacctgccggatatcaccggtattgatgttgagctggacggcgtcaatttcaccctcctttcaggggaaatacttgagtggcagcgcgagctggcctttgcaaacggcgaactgcatcgcaacgttgtctggcgttcacccaacggcaaacgctatcggctggagagtcgccgatttgtgtcgctggaccagctgcctttagtggctatgcagcttgcaatcaccccccttgatgcccccgcgcaggccgtgctgaaaaccggcatagatgcgacacaaacgaacagcggcagacagcatctggatgaaatctcggtcaggatctttgaccagcactacatgcagggcgtgtatgaaacgcaggaccgtgcatctgaggttgtggtttcggcgtattgccagctctcgacgaaaagcgacagctgtttcaccgccaaaaaccgccgtctcagcgtgcatcattcgctgacgattgttcggggtgacactgtcacgcttgagaagatcgtctgggtggctcatcgtagcgagaaagcgctgtcacaggagtcattcgcgcgcaacgcgctggccgatcttaaagtctgtgcggcaagaggttatgaggcgttgcttgaaagctcagcgtatgcctggaaagatgtctggcgcgacgcacgtgtggaagtgacttccacagagcaacaggatcagcaggcgctggattacgccgtctggcatctgacgacaatgacgcctgctcatgatgagcgaagcagtattgcggcgaaagggctgacgggtgaggggtacaaggggcacgtcttctgggataccgaaattttcctgctgccgttccatctgtttacccgcccgcagattgcccgcagcctgctacgctatcgttggcttaatctggcaggcgcacgggaaaaagcgcgccgtaacggttggccgggtgcattgttcccgtgggaaagtgcggccagcggacaggaagagacgccagaattcgcggccattaacatccgcaccggggttcgccagaaggtggcttccgcactcgctgaacatcacatcgtggctgatatcgcctgggccgtggtcgcttactggcaggcaacacacgacgatgcctttatgcggaatgaggggctgacgctactgatggaaaccgcttcgttctggatgggacgcgcgacggaaatcaatggtcgtcttgagatccatgacgtgatcggaccggatgaatacaccgagcatgtcaacaacaacgcctacaccaactatctggcctggcacaacgttgcctgcgcgcgtcagtttatggcgatgtttggccgtgaagatgcgcgttttacggagaatgccgggaagttcctggcgcgcctgtggctgccagaggccgacgctgacggtgtgatcccgcaggatgataccttcatggcaaaacctgccatcgatctgagccgctataaagccaaagcgggtaagcaaaccattctgcttgattactctcgcgcagaagtgaacgagatgcagatcctgaagcaggccgatgtggtgatgcttaactacctgctgccggaacggtttacgccgcagcaatgtgccgccaatctggcgttctacgagccacgtacgattcatgattcatccctgagtaaagcgattcacggcattgtgctcgcacgctgcggtgacaccgagggggcgtatgccttctggcgtgacggtatcgccatcgacctgggggacgacccacacagcagtgatgacggtattcatgccgctgccaccggtgcgatctggttgggcgctattcaggggtttgctggcctgcacattagcgaaggggagctgcatcttgcaccgaaactgcctgttcactggcagaaactcgccttcccgctgcggtggcgggacgcaacaatgcacattacctgtgaaaatgaccagttaaccattgagactaccgcacctgtcacgttgacgctgtggggtaaaacgctgcacgtatcagggcgaaaagtctgcgcgcataaggactttcttgcacctgttaatgggaccgctaccacggaggggcgccatgacgcttaa

SEQ ID NO: 526599 - DNA, 1056 bp, Stenotrophomonas maltophilia
atgagtgcttctacacctttgcctctgcgcgtcgccatcattggcgccgggcaggttgcagacaaagtgcatgcctcgtattacgccacgcgcagtgatgttcaaatggtggctgtcatggacagccgccttgagcaggcacaggcgttcgcggagcgttttgccattccaacggcatggcaggacgctcacgagatgttgcagaaagtaaaaccggatgtggtgagcgtctgttcgcctaaccggttccattttgaacatgtgatggcggctctcgaagcgggttgccatgtgatgtgtgaaaagccgccggcaatgacgccggaacaggccgaccagatgcgcatcgcggcgcgcaaggcaggaaaagtccttgcgtatgattttcatcatcgctttgccctggacacccagctcctgcgcgatgcggtaatgaacggcacactcggtgaaatttacttcacttccgcgcaggcgctgcgtcgctgcggtgtgccggggtggggcgttttcaccaataaatcgctccagggcggtggaccgcttattgatattggcattcatatgctggatgccgccatgtacgtcctgggtttcccggcggtgaagcgggtgaccgcgcacagcttccagaagctcggaaaccagaaacacagcggccagtttggcgagtgggatcccacgcagtttaccgttgaagatgccctgtttggcacgatcgaattctgcaacggcggcgttctgcgtctggatacctcctttgcgcttaacatccgcgagcagtccgtcatgaacgtttccttctgcggtgagaaagcgggcgcaacgctgttcccggcgcatatctataacgacgaagccggagttttggaaacccttgcccagcgtgaagaggcggacgatcggcgccatctgcgcagcatggatgccttcgtacggcatgtcctgggtgagcccgggatgatcgctgacgcagagcagggactggttattcaacagcttgtagccgcgctttatgaatccgcagaaacaggggaaagcgtgacattatgctga

SEQ ID NO: 526600 - DNA, 789 bp, Stenotrophomonas maltophilia
atgaaaattgcaacacaaaaccaggcctttttcccgaccgctatcatggaaaaattcaaatatatcaaagcgatgggatttgatggttatgaaattgatggccgactgctggttgaacatctcgacgaagtgaaagccgctatcaaagccaccggtctgccggtcacgacggcgtgtggcggatacgatggctggatcggggatttcatcgaagaacgccgcctgaacggtctccagcagattgaacgcattctggaagcgctggcagaagttggcggaaaggggattatcgttccggctgcctgggggatgtttaccttccgtctgccgccaatgacttcgccacgtagcctggatggcgatcgcaaagcggtcagcgcttccctgcgctggctggatgaggtagcagcgcgcaccggtactaccgtctacctggagccgctgaaccgctatcaggatcatatgatcaacaccctggccgacgcgcgtcgttatatcgaagagaacggcctgaagcacgtgcagatcatcggtgatttctaccacatgaacattgaagaagactcactgacggaagcgctgcatcacaaccgcgacctgctgggtcatgtgcacattgctgataaccaccgctatcagccgggcagcggcagcctcgatttcgccagcctgttcggtcagctgcgtgctgataactatcagggttatgtggtgtacgagtgccgggttcgtgccgacgatccggctcaagcctatcaggactcactcaattacctgcgtgaatgctaa

SEQ ID NO: 526601 - DNA, 1053 bp, Stenotrophomonas maltophilia
atgaaaaaattagttgcgacagcgcctcgtgtagcggcgctggtggaatacgaagatcgtcctgttgcagcacatgaagtgaagattcgtgcccgttatggcgccccgaaacacggcaccgaagttgtggatttccgcgcggcaagcccgttcattgatgaagagtttaacgccgagtggcagatgtttaccccacgtgaagagggggcagcccgcggcatcgaatttggtaaattccagctgggaaacatgatcgtcggcgacatcatcgaatgtggtgcggacgtaacggaataccagatcggcgacagcgtttgctgctacggcccattgcaggaaacggtcatcgtcaacgcggtgaacaactataagctgcgcaaaatgccgcagggcgcatcctggaaaaacgccgtttgttacgatccggctcagttcgccatgagcggcgtgcgtgatgctaacgtccgcgtaggggatttcgttgtagttgtcgggctgggcgctattggccagattgcgattcagctggcgaaaaaagctggcgcgtcagtggttattggtgtcgatcctattgaacatcgctgtgagatcgcccgccgtcacggtgcagaccactgcctgaacccaatcggtaccgatgtcggtcttgaaattaagaaactgaccggcaagcagggcgcggatgtgatcatcgaaaccagcggctttgcagatgcgctgcaatctgcgctgcgcggactcgcctacggcggcacgatctcttacgtggctttcgccaaaccttttgcggcaggcttcaacctgggccgcgaagcacacttcaacaacgcgaagattgtcttctcccgcgcatgcagtgaacccaacccggattatccacgctggagtcgcaagcgtattgaagagacctgttgggaattgctgatgaacggttatctcaattgtgaagatctgatcgacccggtcgtcacctttaccaccagcccggaaagctacatgaagtatgtcgatcagcacccggaactcagtatcaaaatgggcgttactttttaa

SEQ ID NO: 526602 - DNA, 843 bp, Stenotrophomonas maltophilia
atggcaacaaataaacgcgttctgggccgtatcggtttttatctgggactggcggtattcctgattatcacgctgtttccgttttttgtgatgctgatgacatcgttcaaaagcgcgaaagaggcgatctcactgcacccgactatcctgccgcaggagtggacgttacagcactacatcgacatctttaacccgctgattttcccgtttgtggattatttccgtaacagcatggtggtgtcgctgacctcctcggtcattgcggtgtttctcggtacgctgggcgcttatgcgttatccaaactgcgctttaaagggcgcacgacgatcaatgcgagcttctacaccgtctatatgttctccgggatcctgctggtagtgccgctgttcaaaatcatcaccgcgctcggcatttatgacaccgagctggcgctgatcatcaccatggtgacgcagacgttgccgactgcggtctttatgctgcgcagctatttcgacactatcccggatgagatagaagaagccgcgatgatggacggcctgaaccgcctgcaaatcatcttccgcatcaccgtgccgctggcgatctcgggtctggtgtcagtcttcgtttactgcttcatggtggcgtggaatgactacctgttcgcctccattttcctgtccagcgccagcaacttcacgttgccggtggggctgaacacgctcttcagtacgccagattacatctggggtcgcatgatggcggcatcgctggtgaccgcactgcccgttgtcattatgtatgccctgtctgaacgttttattaaaagtggtttgaccgccggcggcgtaaagggctga

SEQ ID NO: 526603 - DNA, 882 bp, Stenotrophomonas maltophilia
atgaagacgttgttttctggtcgttcagatatgcctttcgccatgctgctgttggcccccagcctgattttgctggggggcctggtggcctggccaatgatttctaacattgaaatcagttttttacgtttaccgctgaatccgcgtattgatgcggtgttcgtcggtctggataactacattcgcatcctgggcgatgctgcgttctggcactccctgtggatgacgttctggtatacggcgctggtggtgatcggcagcaccggactggggctggccgtagcgatcttctttaaccgtgaattccgcatgcggaaaacggcacgttcactggtgatactgtcctatgtgacgccgtctatttcactggtatttgcctggaaatacatgttcaacaacggctacggaattgtgaactatcttggcgttgatctgctgcatctctacgatcaggcgccgctgtggttcgataaccctggcagcagttttgtcctggtcgtgctgttcgccatctggcgttacttcccatacgcctttatctcgttcctcgcgattctacagaccattgataaatccttgtacgaagcggcagagatggacggggcgaatgcctggcagcgttttcgtatcgtgacgttgcccgccatcatgccggtgctggccacggtggtcacgctgcgcaccatctggatgttctacatgtttgcggatgtttatctgctcaccaccaaggtcgacattctgggcgtatatctctacaaaaccgcctttgcgttcaatgacctgggtaaagcagccgccatttccgttgtgctgtttgtgatcatcttcgctgtcattctgctgaccagaaaaagggtaaacctcaatggcaacaaataa

SEQ ID NO: 526604 - DNA, 1293 bp, Stenotrophomonas maltophilia
atgaaaatgccaaaaattgtgctgttatcagcactggtttcgtgcgccctgttatcaggctgtaaggacgataaagcatctcaggtcaccattgagtttatgcactcgtcggtagaacaggagcgtcaggccgttatcacgaaattgattgaaaaattcgaacaagagaacccgactataacggtgaaacaggtacccgttgaggaagatgcctataacaccaaggttattactctggcacgtaccggtgcgctaccggaggtgatagagatcagtcatgactacgccaaagtcatggataaagagcagttgctggatcgtgacgccatcggccgcgccgtcaaggcggtgggcgaggagacattttacgacggtattttacgcgtggttcgcacggaagatggcaacgcatggacgggggtgccggttagcgcctggctgtccggcgtctggtatcacaaagatgcgctcgcggcagcggggatcgaggaaccgcacaactgggaacaactgctgaaagccagtcaggcgctcaacgatccggcgaaaaaacattacggcatcgcgcttccaaccgcagaaagcgtcatgacggagcaggctttctcgcagtttgctttgtctggaggggctaacgtctttgatgcaaacggcagcgtgaaaatcgatacccctgagatgtcgaaagcgctggagttttatagggcactggccgcgaacaccatgccgggctcgaatgatgtcatggagatcaaagacgccttcatgaacggttctgcgcctatggccgtttactctacctatatcctgcccgcggtcttcaaagatggcaatccggccaacctggggttcgttgtcccgacggaaaaatcatcagccgtgtacggcatgatcacttctttgacgatcactaccggccagaccgaagaggaaacgcaggccgccgagaaatttgtcacctggatggagcaggctcagaacgcctctgattgggtcatgatgtctccgggcgccgcgctaccggtcaataaactcgtggtgggcactgattcctggaaaaacaacgacgttatcaaggcctttggtcaactgccttacgagctgattgcgcagttcccgaacgtccaggtgtttggtgccgtgggcgacaagaactttacccgcatgggagatgttaccgggtccggcattatcagttccatggtgcataacgtgacggtgggacaaaaagatctcaatgcgacgttaagcaacagccagaagaaactgactgacctgatatcacaacgatag

SEQ ID NO: 526605 - DNA, 1578 bp, Stenotrophomonas maltophilia
  misc_feature (393)..(402): n is a, c, g, or t
atgagtatttccttgaagaagtcagggatgctgaagcttggtctgagcctggtggccatgaccgtcgcagcaagcgtacaggcaaaaaccctggtttactgttctgaaggctctccggaaggctttaacccacagctctttacctctggtacgacttacgacgcaagctctgtaccgatctataaccgtctggttgaatttaaaaccggtaccacggaagtgattcctggcctggctgaaaagtgggatatcagcgaagacggtaaaacctataccttccacctgcgtcagggcgtgaagtggcaggacagcaaagaattcaaacctacgcgcgactttaacgccgacgacgtagtgttctccttcgaccgtcaaaaaaatgcccagaacccnnnnnnnnnngggatgggtctgccagacctgattgctgaagtgaaaaaagtggacgataaaaccgttcagttcgtgctgacgcgtccggaagcgccattcctcgctgacctggcgatggacttcgcctctattctctctaaagagtacgcggacaacatgctgaaagccggcacgccggaaaaagtggacctgaacccaatcggtaccggcccgttccagctgcttcagtaccagaaagattcccgtattctgtataaagccttcccgggctactggggcaccaagccgcagatcgaccgtctggtcttctccatcacgcctgacgcatccgtgcgttacgcaaaattgcagaaaaacgaatgtcaggtgatgccgtatccaaacccggctgacatcgcgcgcatgaagcaggacaaaaatatcaacctgatggagcaggcgggcctgaacgtggggtatctctccttcaacaccgagaagaaaccgttcgatgacgtgaaagtgcgtcaggcgctgacctacgcggtgaacaaagaagcgatcatcaaagccgtttaccagggcgctggcgttgcggccaagaacctgatcccaccaaccatgtggggctataacgacgacattaaggactacacctacgatcccgagaaagcgaaagcgctgctgaaagaagcgggccaggataaaggtttcaccgttgagctgtgggcgatgccggtacagcgtccttacaacccgaacgcacgtcgtatggcggaaatggttcaggctgactgggcaaagattggcgtacaggccaaaattgtgacctacgagtggggcgagtacctgaaacgcgccaaagcgggcgaacaccaggcggtcatgatgggctggaccggcgacaacggggatccggacaacttcttcgcgaccctgttcagctgtgcggcagcgaaagacggttccaactactctcgctggtgctacaagccgtttgaagacctgatccagccggcgcgtgcgaccgatgatcacaacaaacgtatcgaactgtacaagcaagcgcaggttgtcatgcaagatcaggctccggcgctgattgttgctcactccaccgtgtacgagccagtgcgtaaagaagtgaagggctacgtggtcgatccactgggcaaacaccacttcgaaaacgtgtctgttgaataa

SEQ ID NO: 526606 - DNA, 1020 bp, Stenotrophomonas maltophilia
atgttgcagttcatcctccgacgtctgggactggttatcccgacgtttatcggtatcacccttctcacttttgccttcgtccatatgatcccgggtgatccggtgatgattatggcgggcgagcgtggtatctcccctgaacgtcatgcgcaactgctggctgaactcggccttgataagccgatgtggcagcagtacctccactacatctggggcgtattacacggcgatttagggatttcactgaaaagccgtcttccggtgtgggacgagttcgtgccgcgtttccaggcgacgctggaactcggcatctgcgccatgatcttcgcgaccgcggtggggattcccgtcggcgtgctggctgccgttaagcgtggctctattttcgaccacaccgccgttggcctggcactgaccggctactccatgcctatcttctggtggggcatgatgctgatcatgctggtctcggtgcagtggaacctgacgccggtctccggacgtgtcagcgatatggttttccttgacgacaccaacccgttaaccggctttatgctgattgatacggcgatctggggcgaagagggcaacttcattgatgcggttgcgcacatgatcctgcctgcaatggtgctgggcaccatcccacttgcggtgatcgtgcgtatgactcgttcctccatgctggaagtgctgggcgaagattatattcgtactgcccgcgctaaaggtctgacccgtatgcgcgtcatcatcattcatgccctgcgtaacgccatgctgccggtggtgaccgttatcggtttgcaggtcggtacgctgctggccggggcgatcctgaccgaaaccatcttctcctggccaggccttggacgctggctgattgatgcgctgcaacgccgtgattatccggttgtgcagggcggtgtattgctggtcgcgacgatgattatcctcgtcaacctgctggtcgatttgctgtacggcgtggtgaacccgcgtattcgtcataagaagtaa

SEQ ID NO: 526607 - DNA, 903 bp, Stenotrophomonas maltophilia
atgtcacaagttactcaaaataaagcggttaccgcaccggtgccaatgacgccgatgcaggaattctggcactacttcaagcgcaacaaaggcgcggtcgtcgggctggtatatgtttccatcatgatcctgattgcggtgtttgcgaacttccttgcgccgtataaccccgcggaccagttccgtgatgcgctgctcgcgccaccggcctggcaggaaggtggtagcctgacgcacctgctcggtactgatgacgttggccgcgatgtgctgtctcgtctgatgtacggtgcgcgcctctctctgctggttggctgtctcgttgtggtgttgtcgctgatcatgggcgttgtgcttggtctggtggcgggctacttcggcggcatcgttgataacgtcatcatgcgtatcgtcgatatcatgctggcattgccaagccttctgctggccctggtgctggtcgcggtctttggtccttcgataggcaatgccgcgctcgcgctaacgttcgttgcgcttcctcactatgtccgattaacccgtgcggccgtgctggtcgaggtgaaccgcgattatgtgacagcatctcgagtggcgggtgcgggggcgatgcgccagatgttcgtcaatattcttcctaactgccttgcaccgctgattgttcaggcgtcgctcggtttttctaacgccattctcgatatggccgctcttggcttccttggcatgggtgcgcagccgccaacaccggaatggggcaccatgctctccgacgtgttgcagttcgcgcaaagcgcctggtgggtcgtcaccttcccgggtctggcgattctgctgacggtgctggcatttaacctgatgggtgatggtctgcgtgatgcacttgatcccaaactgaagcagtaa

SEQ ID NO: 526608 - DNA, 984 bp, Stenotrophomonas maltophilia
atggcgttattaaatgtagataaattatcggtgcacttcggcgatgaaggcacaccgtttcgtgctgtggaccgcatcagctatagcgtaaatcagggcgaagtggttggtatcgttggggagtccggttccggtaagtcagtgagttcactggcaatcatggggctgattgactatcccggccgcgtaatggcggaaagcctggagttcaatggtcaggatctgcagcgcatttccgaaaaacagcgccgccagctggtgggagcggaagtggcgatgatcttccaggacccgatgaccagtctgaacccgtgttacaccgtgggtttccagattatggaagccattaaggtgcaccagggcggtaacaagcaaacccgtcgccagcgcgctattgacctgctgacgcaggtgggtatacccgatccggcatcgcgtctggacgtttatccgcaccagttgtccggtgggatgagtcagcgtgtaatgatcgcgatggccattgcctgtcgtccaaaactgctgattgccgatgaaccgacaaccgcgctggacgtgaccattcaggcgcaaattattgagctactgctggagttgcagcagaaagagaatatggcgctggtgctgattacgcacgatctggcgctggtggctgaagcggcacacaaaatcattgtgatgtatgcaggccaggtggtggagaccgggagttcacacgatatcttccgggccccgcgtcatccctatacgcaggcgctgctgcgcgcgctgccggagttcgcgcaggataaagcgcgtctggcctcgctgccgggggtggtaccgggtaaatatgaccgtcctcagggctgtctgcttaacccgcgctgcccgtatgcgacggataaatgccgcgtcgacgagccggagctgaacctgttagctgacggacgtcagtcgaaatgccactacccactcgatgatgccgggaggccaacactatga

SEQ ID NO: 526609 - DNA, 999 bp, Stenotrophomonas maltophilia
atgagtacgcaacaaatgctgttgcaggccatcgacctgaaaaaacattacccggtgaagaagggcctctttgctcctgagcgcctggtaaaagcgctggatggtgtctcctttactctcgaacgcggaaaaacgctggcggtggtaggggaatctggctgtgggaagtccacgctgggccgtctgttaacgatgattgaagttccgactggcggcgagctttactatcagggccaggatctgctcaagcacgatccgcaggcgcagaaactgcgacgtcagaaaatccagattgtgttccagaatccgtatggttcgctgaacccgcgaaaaaaagtggggcagattctggaagagccgctgctgatcaacagcaacctgagcaaagagcagcgtcgtgaaaaagcgctggcgatgatggcgaaggtgggcctgaaaaccgagcattacgatcgctatccgcatatgttctctggcggtcaacgtcagcgtatcgccatcgcccgtggtctgatgctcgacccggacgtggtgattgccgatgaaccggtttcggcgctcgacgtatccgtgcgtgcgcaggtgctgaacctgatgatggatttacagcaggatcttgggctgtcgtacgttttcatctcccatgacctgtctgtggttgagcacattgccgatgaggtgatggtgatgtatctgggacgctgcgtagagaaggggacgaaagatcagatctttaataacccgcgtcatccatatactcaggcactactgtctgcgacgccgcgactgaacccggatgaccgtcgtgagcgcattaagttgaccggcgagttaccaagcccgcttaacccgccgccgggatgtgcgttcaacgcccgctgccgtcgccgcttcggtccgtgtacgcagttgcagccacaactgaaagattatggcggacagctggtggcctgcttcgcggtcgatcaggatgaaaacggcgaaaagccgcatgcataa

SEQ ID NO: 526610 - DNA, 936 bp, Stenotrophomonas maltophilia
  misc_feature (669)..(678): n is a, c, g, or t
atgacgccctatcttcagtttaaccgtagccagtgggcagccctgcgtgactccgtccctatgacactgacggaaggtgaaatcgcacggctaaaagggataaacgaagatctctccctggaagaggtggcagaaatctatctccccctctctcgcttgcttaacttttacatcagctccaacttgcgtcgtcaggccgtactggaacagttcctcggcacgaacggtcaacgtattccttatatcatcagtattgcgggcagcgtggcagtgggtaaaagtaccaccgcgcgcgtgctacaggcgctgctgagccgctggccggaacaccgcagcgtggagctgatcaccaccgacggcttcctgcatcccaatgaggtgttgaaagaacgcggcctgatgaagaagaagggcttcccgctctcttatgatatgcaccgcctggtaaagtttgtctctgatttaaaatcgggcgtgccgaacgttaccgcaccggtctactcgcatctgatctacgaccgcatcccggatggtgacaaaacggtggtgcagcccgacatcctgattctggagggcttaaacgtactgcaaagcgggatggattaccctcacgatccgcatcacgtgtttgtctctgacttcgtcgatttctcaatttatgtggatgcnnnnnnnnnncctgaagatctgttgcaacgctggtatatcaaccgcttcctgaagttccgtgaaggggcgttcaccgacccggattcttacttccacaactacgctcagctctctgaagaagaggctatcaacgtggcgaccgggctgtggaatgagatcaactacgtcaacctcaaagagaacatcctgccgacgcgcgaacgtgcaagcctgatcctcaccaagagtgagaaacacgccgttgaccagattcgtttacggaagtag

SEQ ID NO: 526611 - DNA, 1185 bp, Stenotrophomonas maltophilia
atgtctaaagaaaagtttgaacgtacaaaaccgcacgttaacgtcggtactatcggccacgttgaccatggtaaaacaacgctgaccgctgcaatcactaccgtactggctaaaacctacggcggtgctgctcgtgctttcgaccagatcgataacgcaccagaagaaaaagctcgtggtatcaccatcaacacctctcacgttgagtatgacaccccgactcgccactacgcacacgtagactgcccaggccacgccgactatgttaaaaacatgatcaccggtgctgcgcagatggacggcgcgatcctggttgttgctgcgactgacggccctatgcctcagactcgtgagcacatcctgctgggtcgtcaggtaggcgttcctttcatcatcgtgttcctgaacaaatgcgacatggttgatgacgaagagctgctggaactggtagagatggaagttcgtgaactgctgtctcagtacgatttcccaggcgacgataccccaatcgttcgtggttccgcgctgaaagcgctggaaggcgacgcagagtgggaagcgaaaatcatcgaactggctggcttcctggattcttacatcccagaaccagagcgtgcgattgacaagccattcctgctgccaatcgaagacgtattctccatctccggtcgtggtaccgttgttaccggtcgtgtagagcgcggtatcatcaaagttggtgaagaagttgaaatcgttggtatcaaagagactgcgaagtctacctgtactggcgttgaaatgttccgcaaactgctggacgaaggccgtgctggtgagaacgttggtgttctgctgcgtggtatcaaacgtgaagaaatcgaacgtggtcaggttctggcgaagccaggctcaatcaagccacacaccaagttcgaatctgaagtgtacattctgtccaaagacgaaggcggccgtcatactccgttcttcaaaggctaccgtccacagttctacttccgtacaactgacgtgaccggtaccatcgaactgccagaaggcgtagagatggtaatgccaggcgacaacatcaagatggttgtgactctgatccacccaatcgcgatggacgacggtctgcgtttcgcaatccgtgaaggcggccgtaccgttggcgcgggcgttgttgctaaagttctcggctaa

SEQ ID NO: 526612 - DNA, 384 bp, Stenotrophomonas maltophilia; identical to SEQ ID NO: 118341

SEQ ID NO: 526613 - DNA, 297 bp, Stenotrophomonas maltophilia; identical to SEQ ID NO: 199408

SEQ ID NO: 526614 - DNA, 282 bp, Stenotrophomonas maltophilia; identical to SEQ ID NO: 144466

SEQ ID NO: 526615 - DNA, 1206 bp, Stenotrophomonas maltophilia
atgtccactatcgaaaatgatgtaaaaaccgctaacaacgatatcagcctgcgcacttacctggagcgttccggtaacggcgcacgcaaaagcaatggtctggtcatcaacccggcagtggtcgaagaggaagaaggttttaacacccgtaccgctggcatgggagaaagctactactccttaccccacgtggtagcccacctgaacagtcttaaagagtcctataagtctgagcctttaagcgtaccagctatcgtcgtgcaggttctgaatggtcgtcctgttctgcgtcagggggcatgtcgtatccgcgccgccgctatggcaaacatcgagctggcagaggaagggcgtgaactgatttcgttaattcgctgcgaggagtttcgcggtagccgcgccagtgccgaacagtttacgctggacggtaactctaatctggctctgtctgtcgtggctgaggcgctctccatcaaacggatggtcgaagatgctgaagaacctaaaacgttcgcagaactggccaagcgtcgcggtaaaacagaacagcacctgcgtcagatggttcgcgtcctggacctgcctgaagccctccaggttatgctggtgacaggggaagtgagcatgtatgtcgcgctggatgaatatctctacagcggcgataaggccgtgaataatatcaccaaagccatcgacgtctatggcaaggcgacggccaaaacccttaaattcgtcaaagctggcaacattgatgcagccatgcagccgaaagcgccggtcgtgcaggaaacgaacgcaaacacccctgaaaccaccgtgacggaacaaacatccgtcgaaggtactacggatgagaccaccccgccgcagctggtggacgggaatgttgggaccaacccggagccaactccggaaaacaccccggagccgaaggcgaaagatccgatcaaaacgccagagcctaaaactgtatcggtctccagcgtactcaacaaaaagaccgtgacgacgattgcggacacggcaatcccgcttttttcgcgtattgcggaagaagcagaacaacgtgccgctaagaacctcagcgacgatacgtacaccttagtgctgaccaatgatgagatgaatgccatctgtgaagcccacggcaatctcacgcagtacctgcgtaagcatgccgaaaagcagcaacagggccaggcatga

SEQ ID NO: 526616 - DNA, 195 bp, Stenotrophomonas maltophilia; identical to SEQ ID NO: 144468

SEQ ID NO: 526617 - DNA, 384 bp, Stenotrophomonas maltophilia; identical to SEQ ID NO: 144469

SEQ ID NO: 526618 - DNA, 255 bp, Stenotrophomonas maltophilia; identical to SEQ ID NO: 144470

SEQ ID NO: 526619 - DNA, 414 bp, Stenotrophomonas maltophilia
atgattaaggctactatcagcaacgatgcgcttcgcacccgtattcaggcgctgcgtaaaaccagtgcaaacacccttgtcagcacgacgaaattcgacgctgatgcgctggaggagctcctgcgcctgcgtaccgcagtgaagctgagacgagtacgcgtggtccagagtggcacctgcgactgcgaggagccctgtgaatgcatgcccgggctgtatgtaaccgtcgactccggcgtgggtcacggccaggcggtctggacttaccgggacgacggaaaatccggtctggcgtactggtgcgaatttatgggactcgctccattctgggccgaagaccagatgcatgccgccgaactgcttcgcgagaagctggcctggctgggtgaacatgtcgaggtggtcccgtggtaa

SEQ ID NO: 526620 - DNA, 132 bp, Stenotrophomonas maltophilia; identical to SEQ ID NO: 144472

SEQ ID NO: 526621 - DNA, 282 bp, Stenotrophomonas maltophilia
atgacgctgactaacgcccaaatttatactctgcgtcggctgaataccggaacccgctacctgatgcagggcaacggaaagaaagggatggagcagcgtccagattgcctcagtacgctgggatattttccggttaatgcccccagtctgccacccctcttccggctgggcctgattgagttcactctgaaaagtgggttagaacagagctgtttctatcgcgtacggctgaccgggcgtgggcaggagttagccacaacggcggtgatctcggtgggctga

SEQ ID NO: 526622 - DNA, 555 bp, Stenotrophomonas maltophilia
atgaaaccgatgcttaaatccgctttcttctcagctgttaaatcactcctcaccaacggcttcagaccaaccttctacaccgttaactgtggccgaatcggcattatcgcctttaccgataaaaacggttctaagcaggttgaacaggtctattcctgtacctcgcttgccgtgaagaccattgctccccgtttcgaaaagtggtttgctgctgccgtggcggaatttcatgcggccgcagctgagactctggagtcgggccagcgggtcctggacaagggtactgttcgtaccgtgacgggatttcgaagtgcattcatccgcagcgctaacggcacaccccgtgcccaggcacggactggcatagtcatgcttgatcatcggcacgaagttatggccggtgatcttgttcgaatggctgacaatccatcagacaccgtcgtccataatacagaccaacagcctgaccagacaattcattctaacgtgcagaacgtttccgtaaacctcgccacaggactggcccctgacccgacggtttcaacagcgacatga

SEQ ID NO: 526623 - DNA, 249 bp, Stenotrophomonas maltophilia
atgaccgataacaatgaaaagcacgttaacgcgatccatatgaagggcaacgataacgcgaaaaaagatgaggccgacaaagcaacggcactggtccagatgcgtatgaccccggagaaaaaatcacgctatgtccgtgaggcgaagcgtaatggcctgactatctcggcatggattcagcgtcatatggatcaggtatgtgatgagtcagacgtaaactatctaaagaaaaaggctggcgagcaatag

SEQ ID NO: 526624 - DNA, 333 bp, Stenotrophomonas maltophilia; identical to SEQ ID NO: 199401

SEQ ID NO: 526625 - DNA, 570 bp, Stenotrophomonas maltophilia
atgaccgaacaactatcggatgaaaaactgcaccagctggaaggtgctgccgcaaattaccgtacgacataccaggcgcacctcgctaatccactggatggctccgcagtacaggactgggatgaagcgacccgtcaactaatggcggtcatcaattacgatgaagccaatattatcgcgcacctactggctcgccgggatgcagatcttgccaggcatgaaagcgacatgacccgggctatcgcagcttggcagacggcatccgtgaagctgtccgagcaggccagccagcaaccagaattccacctccgccgtgttggtggggacgaggagctctatgccccttgtggaaaagattatccacggggaagagcgtactacgttaagccggtagtgagcctggttaccgtaaattctccgccctgcgaccaatgctttgattctgccgacgccgcaacggcctaccgggatgagcagtggagacatgtgctgagtgaagctggtgtgctggttacgccgggggagacagccccggttcagcccactgaagacaagccgctttccaaatag

SEQ ID NO: 526626 - DNA, 363 bp, Stenotrophomonas maltophilia; identical to SEQ ID NO: 144478

SEQ ID NO: 526627 - DNA, 207 bp, Stenotrophomonas maltophilia
atgaccataattgaacgccgtgcagagatgcgccagacggccattaaagctctgctggatgctgaagaagcactgaccgcactggctatgtcctatgagctacagcccaatgagaagaccagtgcatgtcatccacaaaccagtactctctccacgaccagccaggttcggaaaatgcggcgggtcctcgaaaaattgaggcgttga

SEQ ID NO: 526628 - DNA, 159 bp, Stenotrophomonas maltophilia
atgaaactgccgaaccaacccgttgttttgtgcgtattgatagtatgtcttacgctgttgatattcacctggcttacgcgcaattcgctctgcgaactgcggctgaaagacggtacgcgggaagtgtcggctgtgatggactacgaatccggtaagtag

SEQ ID NO: 526629 - DNA, 288 bp, Stenotrophomonas maltophilia; identical to SEQ ID NO: 84381

SEQ ID NO: 526630 - DNA, 240 bp, Stenotrophomonas maltophilia; identical to SEQ ID NO: 117438

SEQ ID NO: 526631 - DNA, 756 bp, Stenotrophomonas maltophilia
atggcgctctggatgctgaccttggctgcgcttccggccgatgagaaccatgcatatgggcacggcaaagccgaatatttctcgagtgctttcgaaggatttctgatcctattggcggcagccagtatcgcctataccgcagttgagcggatgttaactccacagccgcttgaggagattggtctcggattactggtttcaacagtcgcatcaatccttaattttgtgacggctcgcattttgttaagggctggcaggcagcacaactctatcactcttgaggcagatgctcatcacctgctgaccgatgtctggacgtcggtcggtgtcatttttggtgtcggactggtttatctgaccggctggttttgggtcgatccgatcgttgcattgctggtcgcagccaacatcgtttggactggttatcagcttatgagtcgttcagctgcaggtctgatggacgtatcgctacccacggaagaactcaaaaaaatcgagtcactgctggcaggatatcgtgaacaggggcttgatttccatgcactacgtacacgccaggctggcgggcgggcgtttatgacaatgcacatcctagttcctgggcgatggactgttcaatatgggcacgactgggccgagcgtatagagaatgatatccgcaccgcactgccttttatccatatcaccactcatgtggaaccgttggaagatcccgcgtcaatgaacgaccaaacgctcgacatttctgatcactaa

SEQ ID NO: 526632 - DNA, 486 bp, Stenotrophomonas maltophilia
gtgggcgaggaagaacttcgcggcattgataccaaaccgctggtgggtaacctggcggcgtggaactactttgaatccgtcgacaacccgaccaaccagacctttgtcgcggcttacaaagcctacgcgaaagcccataagctgccgaatgccgataccgtggtcaccaacgatccgatggaagcgacttacgttggcctgcatatgtgggcgcaggcggttgaaaaagcggggacaaccgacgtggacaaagtgcgcgcggcaatggcgggccagtcgttcaacgcgccgtccggctttacgctgaccatggacgccaccaaccaccacctgcataagcccgtcatgattggtgaaattgaaggcaacggccagttcaacgtcgtctggcaaaccgaacagccggtacgcgctcaaccgtggagcccgtttatcgccgggaatgacaaaaagcctgaccagccgatgaaaaccgccagcaactaa

SEQ ID NO: 526633 - DNA, 1542 bp, Stenotrophomonas maltophilia
  misc_feature (377)..(386): n is a, c, g, or t
atgaacgccatacgcatgatgattgcgattgtgtggcttaccggactgctgccagggatggcgcaggcatcggatgccgatgatttcgttgccgctagccgcagccagcaaaccgccatgctgacccgctgggcagccacgccggaacctgcacgtttgccgctgcttaaggcgctgcaacaggagaacctttataccgacagccagaagaaggcatttacccgcatcgacggcgaaatggttgccctgggcgcggcaaaaagcgctgaaggcacgaccaaagccgtgcggctgaccaaccgactgcgcgtgttaaccgtcacggcgctggcgacgcatcagcttgtcagtgacagtgtcaccgaaaggcgtcatgnnnnnnnnnnctttctgcaacagcgggccagtagcgaaacggacgacgtcacccgacagtcgctgatgctggcgctggcaaacctccagttgacgagcccacaggctgaagtacggctcaaggctgttgagctgttgggacagtctgacgatccggacgtgcaggccacgctgacgccgttcacccaaacgcaaaccgagccggacgcacgggtacgtgccgccgccgctgagagcctggagcgtattcagcaccggctgatgtggggcgaactgctggggcaggccttcatgggcctgtcgttggggtcggtactcttgctggccgcgctcgggctggctatcacctatggtctgctgggggtgattaacatggctcacggtgaaatgctgatgctcggggcgtatgccacctggatggtgcagcaggtaatggcgcagtggatgcctcagtggctggcgctctatccggtggtggcgctgccggtggcgttttgcctgaccgcaggcatcggaatggtgctggagcgcacggtgatacgccatctttatggccgcccgctggaaaccctgctcgccacctgggggataagcctgatgcttatccagctggtccgcatgacctttggcgctcagaaccttgaggtcgctaacccggcatggctgtccggcggggtgcaggttttcgccaacctgacgctgccctggaaccgtattgtggtgctcggctttgtactgctggtgctgttcttcacctggctcattctgaacaaaacgcgtctgggtctcaacgtgcgggcggtgacgcaaaaccgcagcatggcggcctgctgcggcgttcccaccggacgggtagatatgctggcgtttggcctcgggtccggcattgccgggttgggcggcgtggcgttgtcccagctggggaacgtggggccggagctgggccagggatacatcatcgattcgttcctggtggtggtgctcggcggcgtcggccagctggccggtagcgtcgcggcggcctttggtctggggatcttcaataaaattcttgaaccgcagatgggcgccgtgctgggcaagatcctgattctggtggcgatcattctgtttatccagaaacgtccgcaggggttattcgcacttaaagggagggtgacagactga

SEQ ID NO: 526634 - DNA, 1074 bp, Stenotrophomonas maltophilia
atgagccagccattgaccttaacactggcgcgcagggcaccgcgcaccgcgcaaatcttcggcagtctgctggttgcggcgctgctggtgctgccttttctcgcgctgttacccgccacccatccgctggccgtttcgacgtggatgttgacgcttatcggcaagatcctctgctacgcggttgtcgccgtggccctcgatctggtctggggctatgccggtatgctctcgctggggcacggcatattcttcgccctgggcggctatgcgatgggcatgtacctgatgcgccaggcggccggggacgggctgcccgcgtttatgtcgtttctctcgtggagcgaactgccctggttctggtggggaacgcagcatttcgcctgggcgctggtgttaatcgtgacgatccccggcctgctggcgctggtcttcggctggtttgctttccgctcgaagataaaaggggtctatttttccatcatgacccaggcgctgacctatgcgggcatgctgctgttctttcgcaacgaaaccggttttggcggcaataacggctttaccggctttaccacgctgctcgggttttccgttacggcgactaccacgcggatcgcgctgtttctcgcaacggtcatgctgctgcttctggccctgggcacaggctacgcgctggcgaagagtaagtttggccgcattttaacggcggtgcgcgatgcggaaaaccgtctgacgttctgcggctacgatccgcgcggcttcaagctgctggtctggacgctttccgccgtactgtgtggtctggcgggggcgctgtacgttccgcaggtgggtattatcaacccgggtgaaatgtcgccgaccaactcgattgaagcggccatctgggtggcgctgggcgggcgcggcaccctggtaggcccggtgattggtgcggcgctggtcaatggtgcgaagagctttttcaccgtggcgatgccggagtactggcaactgtttcttgggctgattttcatcgccgtgacgctctttttaccgcgcggcgtgttcggtctgtttcgtaagggagagaattaa

SEQ ID NO: 526635 - DNA, 798 bp, Stenotrophomonas maltophilia
atgcagccctctgaaggactctttacccgccagctaccgggcgatcgttaccgtgagcagaccgatcctgtgttacagctcgaggccattaacgtcagtttcgatggttttcaggcgttgaccgatctctcacttaatatcggcattggagaattgcgctgcatcattggccctaacggcgccggtaaaactacgctgatggacgtgatcaccggcaaaacccggccaaaaagcgggaaggctatttacgatcagtccatcgatctgacagcccttgaaccggcggccattgcccgtcagggcattggccgtaagttccagaaaccgaccgtgtttgaagcgctgaccgtaggggaaaacctcgaaatcgccatgaaagccgacaggtccgtctgggcgagcctgcgggcaacactcagcggcgagcagcgcgaccgcattgacgagatgttggttttgctgcggcttggcagcgagcgcgatcgccgcgccgggctgctttcccacgggcagaagcagtttctggagatcggcatgctgctggtgcaggatccgcatctgttgctgctggacgaacccgccgccggtatgaccgacgcagagacggaatacacagccgagctgttccgaactctggcaggcaagcattcgctgatggtggttgagcacgatatgggcttcgtcgagaccatcgccgaccacgttacggtgctgcatcaggggcgcgtactggcagaaggctcgcttcgcgaggtacaggccaatgagcaggtgattgacgtctatctgggacgctaa

SEQ ID NO: 526636 - DNA, 405 bp, Stenotrophomonas maltophilia
atgggactgtcgcgcttctccgcgggaaacgcaaggagcgtgccggaggagatttggcagcttttcccggtgctgaaggagatgaaacaccgtcgcggaggcgatctttccggtggtcagcagcagcagctggcgattggtcgcgcgctggcgagccgtccacggttactgatcctggatgaacccacggaaggtatacagccgtcggtgattaaagagattgggcaggtgatccgcagcctggcgaaccggggggatatggcgatcctgctggtggagcagttttatgattttgcggcggagctggccgacagctatctggtgatgtcgcgcggcagcatcgtccagcaggggcgcggtgagaacatggagcaggagggggttcgcggactggttgcgatctga

SEQ ID NO: 526637 - DNA, 639 bp, Stenotrophomonas maltophilia
gtggctgcacaacttggaaaaattgcgctgactctgggaacgctgctggtaagcggctcgctttttgcccattcgcacggtcatcagatgacggaggcggaacagaaggcggcaaacggcgtctttgaggataaagacgtcagggacaggacgctgtctgactgggacgggacctggcagtctgtttacccgttcctgcttgatggttcgctggatccggttttcgaaaagaaagcgcagaagggggaaaaatccgctgccgaggtgaaagcctactaccgtaagggctacgcgacggacgtggacgccatcggcattgaaaacaacgtgatggaattccacagaggcaaaacggtgagcagctgccgctacgactacagcggttataaaattctgacctatgcgtcggggaaaaaaggcgtgcgctacctgtttgaatgtaaggataaggcaagccaggcgcctaagtttgtgcagttcagcgatcataccatcgggccgaaagcctcttcacacttccatatctttatgggcaacacctcccacgaggcgctgctgaaagagatggataactggccgacctactacccgaacgagatgtataaagagcaggtggtggaggagatgttgcaccactag

SEQ ID NO: 526638 - DNA, 1152 bp, Stenotrophomonas maltophilia
  misc_feature (1119)..(1128): n is a, c, g, or t
atgaaaccatcaatcaggcgctcaaccgcagcgctgctggcatcgtcattgttattaacaattggccgcggggcaacgctgccctttatgaccatatatctcacacgcgtgtacgatatgagcgtggagaatattggctatgcccttaccgtggcgttgaccattggcgtggtgtttagcctggggtttggcatcctggcggacaagttcgacaaaaaacgctatatgctggtcgccatcgtggcctttatcgccgggtttgtggccattccgctggtgaataacgtgacgctggtggtgttgttctttgccctgattaactgcgcctattccgtcttctcaacggtgctgaaagcgtggtttgccgacgtgctgacctccagcgaaaaggcgcgcgttttctcactcaactacagtttcctgaacatcggctggacgattgggccgccggttggcactctactggtgatgtacagcctgcaactgccgttctggctggcggccttctgcgccgcactgccgctcgggtttatccatttctttgtgcagaaaagcgtagcgtctgacagcgtggaggaaaaagcgccgtggcagccctcggtgctgctgaaggaccgggcgctgttctggtacacgctctccggcctgctggcgtcctacgtgggcggatcgttcgccagctgcatttcccagtacgtcctcgccgcgtatgcggacagcgatttcgcagaaaaggtggtggccgttgtgttgcccgtcaacgcggtggtggtggtctccctgcaatacgcgcttggccgcaagatctccgccagcaacatccgcccgctaatgactgccgcgacgctctttttcatcctcgggctgggcgggtttatgctttccggcgagaacctgctttactgggggattgcggcggcgattttcaccctgggtgaaattatttatgctccgggtgaatacatgctgatcgacaatatcgccccgccgggcatgaaggcgagctacttctccgcccaggcgctgggatggctgggcgcggcggcgaacccgatgatcaccgggctcatcctgacccatctgccgcactggtcgttatttattattatgatggccgcnnnnnnnnnnccgccattattgcggcgtggctga

SEQ ID NO: 526639 - DNA, 942 bp, Stenotrophomonas maltophilia
  misc_feature (128)..(137): n is a, c, g, or t
atgacgcggaaagacgggctgttagcgttactggttgtcgtggtgtggggactcaattttgtggtcatcaaaatggggttgcataacatgcctccactcatgctggtgggtctgcgcttcctgctggnnnnnnnnnnactcatgctggcgggtctgcgcttcctgctggtggccttcccggcgctgctgttcgttgcccgcccaaagattcccctgaagcttctgctgggctacggcctcaccatcagctttggtcagtttgcgtttcttttttgcgccatcaaattcggtatgcctgcgggtctggcttcgctggtgcttcaggtgcaggctttctttaccattattctcggcgcgtttgtctttggcgaacgtttgcagggcaaacagctggcgggcattagccttgcggtctttggcgtgctggtgctgatagaaggcagcctcaacggtcagcatgtcgcgctgctgggctttatgctcaccctggcggcggggctgagctgggcgtgcggcaacatctttaacaagctgataatgcagcatgagtcgcgtcctgggatcatgtcgctggtggtctggagcgcgttgatccccattgtgccgtttatggccgcgtcgtttattctggatggaccgcaggtgatgctgaaaagcctggtggagatcgacctgacgaccattttgtcgctgatgtacctggcattagtcgcctcaatcattggctacggcatctggggatcgctgctcggacgctatgaaacctggcgcgtggcgccgttatcgctgctggtaccggtggtcgggcttgccagcgccgccctgttgctggatgaaacgctcagcgcgctgcaactgtgtggcgcagggctgattatggccgggctgtatatcaacgtctttggcttgcgggtgcgtcgggcgacgcgggtgcggagttaa

SEQ ID NO: 526640 - DNA, 216 bp, Stenotrophomonas maltophilia
atgaaatttatcgtctccgccgccctcaccttgctggtgctggtttccggccagagcttcgcggagcaaacccccagtgcggggcagcaaaataatcgtgacaccatgattatgccgtccacgcaaaaccagtcgccctgggacttcaatcacatgggcgctggcagcgacaaatccgacgaattaggcgtgccgtattataatcacgacctgtaa

SEQ ID NO: 526641 - DNA, 381 bp, Stenotrophomonas maltophilia
atgtccagacgcaatactgacgctatcaccattcatagcattttggactggatcgaagataacctggaatctccactttcccttgagaaagtgtctgagcgttcaggttactcaaaatggcacctgcaacggatgtttaaaaaagagactggccattcattaggacaatatattcgcagccgtaagctgacggagattgcccaaaaactgaaagaaagcaatgagccgatcctctatctggcggaacgctacggatttgaatcgcaacaaaccctgacgcgtacgttcaagaactactttgacgtgccgcctcataagtaccgtattaccagtatgccgggtgaatcccgttatctgtatccgctaaaacattgcagttaa

SEQ ID NO: 526642 - DNA, 435 bp, Stenotrophomonas maltophilia
gtgaaaagcaccagtgatctctttaacgacataatcccactgggtcgtcttattcatatggttaaccaaaaaaaagatcgcctgctcaatgactacctgtcaccgctggatatcaccgcaacacagttcaaagtgctgtgttccattcgctgcgaagtgtgtatcacgccggttgagctgaaaaaggtgctctctgtcgatctgggtgcgttaacccgcatgctggatcgtctcgtctgcaaaggatggatagaacgaagccctaacccgaatgacaaacgtggcgtactggtgaaactgaccagcgatggcgcggccatgtgtgagcaatgtcatcaattagtaggacaaacactgcaccaggaactgacaaaaaacttaacggcagatgaagtggcaacgcttgagcttttactcaagaaaatcctgccgtaa

SEQ ID NO: 526643 - DNA, 237 bp, Stenotrophomonas maltophilia
atgattgaaacttttgctgctggtatggatatcaaagcgaaaattatttatttccctaaaagcattatgaagttactgctttccgctgttggaaaaggtggtatttacgatcagttgtttggcgatctggaagtcgatgcctccaaatcgcgggaacatttgcactggacacccccgataacacttcatgaaactatgaaaaaaacggcgaaatattatactgaaggtaataaataa

SEQ ID NO: 526644 - DNA, 261 bp, Stenotrophomonas maltophilia
  misc_feature (244)..(253): n is a, c, g, or t
atggctatcactattgtccgtccggctttaatttgtggcgaaaatgcaccgggtaatattcagcgtcttttgaaacttgtatcgaaaaacctgccgttaccgtttaaaaatgttaagaataagcgtgctcttgtttcgctggataatgtcgtcagttttatcaatgaatgtgtcgtaaacgagaaagctaagaatcaactctttttactcgctgatgcagaacgaccttcaacggaagagatgnnnnnnnnnnagagatga

SEQ ID NO: 526645 - DNA, 897 bp, Stenotrophomonas maltophilia
atgattaatttgaaagcagtcataccggtagcgggtctgggcatgcatatgttgccagccacgaaggcaattcccaaagagatgctgccgatcgttgacaagccgatgattcagtacatcgtcgacgagattgttgctgcagggatcaaagaaatcgttctggtgacgcactcttcgaagaatgcggtagagaaccacttcgacacctcttatgaactcgaagcgttgcttgagcagcgcgttaagcgtcagcttctggcggaagttcagtctatctgccctcctggcgtgaccatcatgaacgtgcgtcaggcgcagccgctgggtctgggccactcgatcctgtgcgcgcgtccggtcgtaggcgataacccgtttatcgtggtactgcccgatatcatcattgataccgcttctgccgatccgctgcgttacaacctggcggcaatggttgcacgcttcaacgaaacgggtcgcagccaggtgctggcgaaacgtatgaagggtgatctctctgagtactcagttattcagactaaagagccgctggagtcggaagggcaggtgagccgtatcgttgagtttatcgaaaaacccgatcagccgcagaccctggactccgacctgatggcagtcggccgttatgtgctgaatgcggatatctgggctgagctggaaaaaaccgagccgggtgcctgggaccgtatccagctgaccgatgcgattgctgagctggcgaagaagcagtcggttgatgccatgctaatgaccggtgacagctatgactgcggtaagaaaatggggtatatgcaggcgtttgtgaactatggcctgcgtaatctgaaggaaggggcgaagttcagaagccggattgagaagttgctggctaacgactga

SEQ ID NO: 526646 - DNA, 1392 bp, Stenotrophomonas maltophilia
atgctgaataagattacccgacgccgatttgtctcttctttatccgtcctggctgccatgccgctgctgtcaccccgcgctgtgcgggcggcaaccgggaagacggtttctgtcgatcgttacaacaataaggactggatcgccgcgtttaagcaggcatttgccgagggcgataccgttgttgttcccgccgggttaacctgtgaaaacatcaataccggcattttcattcctgatggcaaaaccctgctgatccgcggtacgctgaagggcaacgggcgcgggcggtttgtgcttcaggagggctgcaaggtcattggggaaggagaagggcgcacgcataacatcacgctggacgtgcgtggctccgactgtgtcattaaagggctggcgatgagcggcttcggccccgtcacccagatctacatcggcggtaaaaagcggcgagtgatgcgcaacctgctcatcgataacatcaccgtgacgcaggccaactacgcgatcctgcgtcaggggttccacaatcaggtggacggtgcgcgcattaccaacagtcaattcagccacttgcagggtgacgcgattgagtggaacgtggcgattaacgaccgtaacatcctgatctcggaccacgtgatcgataacatcaactgcaccaacggcaagatcaactggggcataggcatcgggctggccggcagtacgtacgacaatgattatccggaacagcagaccgttaaaaacttcgtggtggcaaatatcaccggcagcaactgtcggcagctggtgcatgttgaaaacggtaaacactttgtaatccgtaatatcaaggccagcaatattactcccgacttcagtaaaaaggccggaattgataacgcgacggtagctatttatggctgtgataatttcgttattgataatgtcgatatggtcaacagcgccggaatgctaattggctatggcgtgatcaagggcgattatctgtcgataccgcagaacttcaaacttaacgatattcgcctggataaccgacagcttgcctataagctgcgcgggatacagatttcctccggcaatgccacgtcgtttgttgccatcaccaacgttgagatgcagcgggcaacgcttgagctgcataacaaaccccaacaccttttcttacgtaatatcaacgtgatgcaggagtcaacgacgggaccggccctgaagatgaacttcgatttgcgcaaagacgtgcgcgggaagtttatggctaaaaacgagacgctgttgtcgctcgcgaacataaaagcggtaaatgaaaaggggcagagttcggtagatattgatcgggtcgatcaacacgtggtgaatacggaacggttgaattttgcgctgccgcacaggtaa

SEQ ID NO: 526647 - DNA, 1221 bp, Stenotrophomonas maltophilia
atgaaggttggtttcttcttactgaaatttccgctgtcgtctgaaacctttgtgctgaaccaaatcaccgcgtttatcgatatggggtatgacgtggagattatcgccctgcaaaagggcgatacgcaaaacacccatgcggcgtatacccagtatgggctggaggcgaaaacccgctggttgcaggacgaacccgccggacggatgaacaaactgcgccatcgcgccggacagacgctgcgcggcctgcatcgcgcctcgacgtggcgggcgctgaatatgtcgcgctatggggcggaggcccgcaacctgatcttatccgccatttgcgggcaaacggcccagccgtaccgggccgatgtctttatcgctcactttggcccggctggcgtcacggcggcaaaactgcgtgagctgggggtgattgacggcaaaatcgccaccattttccacggtatcgatatctccagccgggaagtgctgaaccactacacgccggaatatcagcagctgtttcgccgtggtgacatgatgctgccgataagcgacctgtgggccgggcgcctgaaaaccatggggtgcccgagcgagaaaatcaccgtttcacgcatgggcgtggacatggaacgcttcacccaacgacccgtcaaggtgccgggcaagccgctgcaaattatctctgttgcccgcctgaccgaaaagaaagggctgcacgtagccatcgaagcctgtcgccagctgaaggcgcgtggtgtggacttccactaccgcatcctgggtatcgggccgtgggagcgtcgcctgcgcacgctgattgaacagtatcagctggaagacgtggtcgagatgcccggcttcaagccgagccacgaagtgaaagccatgctcgatgacgcggatgtgttcctgctgccttccgtaaccggcgccgacggtgatatggaaggcattcccgtggcgctgatggaggcgatggccgtcggcattccggtggtctcgacgttacacagcggcatcccggagctgatcacctctgagcattccggctggctggtccctgaaaacaatgcgctggcgctggcggaccgtctggccgcgttcagcgatatcgatcagcagacgctgatccctgtgctgcaaaatgcgcggcaaaaagttgaagcagaattcaatcagcaggtgattaatcgccagttagcgagcctgctgcaaacgctgtaa

SEQ ID NO: 526648 - DNA, 1281 bp, Stenotrophomonas maltophilia
atgaaattacttattcttggcaaccatacctgcggcaaccgtggcgacagcgccatcctgcgcggtttattggatgcaattaacacccttaagcctgagacagaagtggatgtgatgagccgttatccggtcagctcatcctggttactgaaccgcccggtgatgggcgacccgctctacagccagatgaaacagcacaacaacgctgcgggcgtgatggggcgcgtgaagaaagtgctgcgtcgccgctaccagcatcaggtgctgctttctcgcgtaaccgacaccggcaagctgcgcaacatcgccatcgcgcagggctttaccgatttcgtgcgtctgctgtccggctatgacgccattattcaggtgggcggctcgttcttcgtcgacctgtacggcgtgccgcagtttgagcatgcgctctgcacctttatggcgaaaaaaccgctgtttatgattggccacagcgtcgggccgttccaggatccgcagttcaaccagctggcgaactatgtcttcggccactgtgacgcgctgatcctgcgcgaatcggtcagcctcgacatgatgaagcgcagcgaaatcgacaccaccaaagtggagcacggcgtagacaccgcctggctggtggatcatcaggatgacagcttccaggccagctacgcggtacagcactggctggacgtggcggcaaaacagaaaaccgtcgccattaccctgcgtgaacttgcgcccttcgataaacgcctcggcacgactcaggcggcgtatgaaaaagcctttgccgaggtggtgaaccgcgtgctggacagcggttaccaggtgctggcgctttccacctgtaccggtatcgacagctacaacaaagatgaccgcatggtggcgctcaacctgcgcaacctggtcaacgacccatcccgctaccacgtggtgatggacgagctgaacgacctggagatgggcaagctgctctccgcctgcgaactgaccgtgggcacgcgtctgcactcagccattatctcgatgaacttcggcacgccagccatcgccatcaactacgaacacaagtccgcgggcattatgcagcagctcggtatgccggaaatggccgtcgatattcgtcatctgctggacggatcgctgggtgcgatggtgggcgacacgctcggccagttgcctgcgataaacgaacgtctgacggtggcggtgaaagccgaacgcgaaaaaggtattggcatggtgaaatccgtcctcgaccgcgtccgggaggggaaatga

SEQ ID NO: 526649 - DNA, 1479 bp, Stenotrophomonas maltophilia
atgagcttacgagaaaaaaccatcagcggcgcaaaatggtcagccatggccaccatcgtcatcattggcctcggcctggtgcagatgacggtgctggcgcgcattatcgataaccaccagtttggtctgctgaccgtctcgctggtgattatcgccctggccgatacgctgtcggactttggtatcgccaactccattatccagcgcaaagagatcagccatcttgagctgaccaccctctactggctgaacgttgggctgggtatcttcgtctttgtgctggtgttcctgctgagcgatgtgattgccggcgtgctgcataacccggacctggcgccgctgatgcgcaccctgtcgtttgctttcgtggtgatcccgcacgggcagcagttccgcgcgctgatgcagaaagagctggagttcaacaagatcggcatgattgaaaccagcgccgtgctggcgggctttaccttcaccgttgtcagcgcccatttctggccgctggcgatgaccgccattctcggctacctcgttaactctgccgtgcgcacgctgctgtttggcttctttggccgcaagatttatcgcccgggactgcatttttcgctggcgtctgtttcatccaacctgcgcttcggcgcgtggctgacggcagacagcattatcaactatgtgaatactaacctctctacgctggtgctggcgcgcattctgggcgcgagcgtcgcgggcggctacaacctggcgtataacgtcgcggttgtcccaccgatgaagctcaacccaatcattacccgcgtgctgttcccggcgttcgccaaaattcaggacgataccgagaagctgcgcgtaaacttttacaaactgctctccgtggtggggatcatcaacttcccggtactgctggggctgatggtggtcgccagcaatttcgtaccgctggtgtttggcgagaagtggaacagcatcatcccgatcctgcaactgctgtgcgttgtggggctgctgcgctcggtggggaatccaattggttctctgctgatggcgaaggcgcgcgtggatatcagcttcaagttcaacgtgtttaaaaccttcctgtttattccggcaattattgtgggcgggcacatggcgggcgccattggcgtgacgctcggcttcctgctggtgcagatcgttaataccgtgctgagctacttcgtgatgatcaaaccggtgctgggctccagctaccgtcagtacattctcagcctgtggctgccgttttatctctccttaccgactctggcggtgagctacggcctgggcgtggtgctcaacgggcatctgccgctggcggcgctgcttgcggtgcaggtcgcggcaggcgcgctggcattcggcgtgatgattgtactgtcacgcaatgcgctggtggttgagataaagcgccagttttgccgtaacgaaaaaatgaaaacgctgcttcgcgcaggctaa

SEQ ID NO: 526650 - DNA, 1395 bp, Stenotrophomonas maltophilia
atgacaaatctaaaaaagcgcgagcgagcgagaacgaatgcatcgttaatctctatggtgcagcgtttttctgatatcaccatcatggtcggcggactgtgggcggtgtgttgggtcagcgggcagtcgttcttatacatgcacttgctgatggcgttgattgcgctggtggtgtttcagatgatcggcggcatgaccgatttctatcgttcatggcgtggcgtcaaaatgaccaccgaactgatgctgctgctacagaactggaccttaagcctgattttcagcgcgggcctggtggcgttcagccatgattttgataaccgctttgtgacctatctctgctggtatctgttaaccagcgttggcatggtggtttgccgctcgctgatccgctttggcgcgggctggctgcgcaaccgtgggtataaccgtcgctttgttgccgtggcgggcgacctgccggtgggacaggtgctgctcgacagcttccgcaaagagccatggttaggttttgaagtggtgggggtttatcacgacgcgaagcccggcggcgtaccatctgactgggcgggcagctacgaacagctgatagaagacgcgaaagccggcaaaattcacaacgtctacatcgccatgcagatgaaagatgaatcccgcatcaagacactgatgcgcgagctggccgatacaacctgctcggtgatcctcatccctgacgtgtttaccttcaatattctccactcccgtattgaagaggtgaacggggtaccggttgttccgttgtacgacacgccgctgtcggggattaaccgcgtgctgaagcgcgtggaggatatcgtactttcgtccctgatcctgctgctcatctccccggtgctgtgctgcattgcgctggcggtgaagctcagctctccggggccgatcatcttccgtcagacccgctacggcatggacggtaagccgatcatggtgtggaaattccgctccatgaaggtgatggagaacgacaaggtggtgacccaggcgacacagaacgatccgcgcgtcacccgcgtgggtaacttcctgcgccgtacctcgctcgatgagctgccgcagttcatcaacgtgttcaccggcgggatgtccatcgtcgggcctcgtcctcacgccgtggcccataacgagcagtaccgtaccctgattgaaggctacatgctgcgccataaggtgaagccaggcatcaccggctgggcgcagatcaacgggtggcgcggcgagaccgacacgctggaaaaaatggaaaaacgcatcgagttcgatctggagtacatccgcgagtggagcctctggttcgatatcaagattgtttttctgaccattttcaaaggcttcgtgaacaaagcggcgtactaa

SEQ ID NO: 526651 - DNA, 528 bp, Stenotrophomonas maltophilia
atgcaatggcgtaactcctccagccgctacggaataatatccatgtgtttacactggctatttgcacttgctgtctatgccatgtttggtctcggcctctggatggtgacattaagctattatgacggttggtatcatcaggcccccgaattgcacaaaagcattggggttctgctgatgatgggtctggtttttcgcgtgatctggcgacatctctctccgccccctcctgcccccaaaagccatggccgtcttacccgcataagcgctgttggcgcacatatctatctcatttcgaccgcagacggcaaaccgatcagcgtgtttgggctctttgacgtccctgccacgctggctgacgccggttcacaggctgacaccgcaggtgtggttcatctgtggctggcatggagcgtggtgatcctgtctgttctgcatggccttgcggccctgaaacaccactttatcgataaagacgatacgctgaagcgcatgcttggccgttcgtcagttgactctggagcataa

SEQ ID NO: 526652 - DNA, 1119 bp, Stenotrophomonas maltophilia
atgaaatacgatttgatcattatcggaagcggctccgttggatctgcagccggttattacgctacgcaggcgggtctgaatgtgctgatgattgacgcccaccttccccctcattctgaaggaagccatcacggcgatacccgtcttatccgtcacgcttacggcgaaggtgagcgctatgtaccgctggtgcttcgggctcagacgctgtgggatgagctggccgcagtcaccgaagaacgcatttttgagcgcaccggggttattaatctggggcccgccaactccacgtttctggcgaatgtcgaggagagcgcgaaagcctaccgtctggacgttgagcgtctggatgcgaacgacataatggcgcgctggccggaaatttctgtccctgaagactacattggattgtttgaagccaattccggggtactgcacagcgaaacggccattaagacctggattgatctcgccgccaaagcgggctgcgcacagttgtttaactgtccggtcacgggtatcacccaccatgccgggggttcaaccgtcaccacgtctgaaggtgaatataccgccacgcgcctgctggtgagtgcaggaacgtgggtgacgaaactgctgccggatctgcccatccagccggtacgcaaagtcttctcctggttccagtctgacgggcgttacagcagccagaacaaattcccggcgttcacgggcgagttacctaatggcgaccagtactacggtttcccctcggaaaaagacgcgctcaagattggcaaacataacggcggacaggtcatttcctctgcggaagaacgcaagccgtacggagcctatccgcaggatggttccgaagccttcacgttcctgcgtaatatcctgccgggcgtaggcgggttgctttatggcgcagcgtgcacctatgacaatacgccagatgaagacttcatcatcgacaccctgcctgggcacgacaacaccctgatcgtaaccgggctcagcggtcacgggtttaaatttgcctctgtgttaggtgaaatcgccgcccagtttgctcaggggattgcgccttcgtttgatctcaaacccttcgcgctctcgcgctttagccgataa

SEQ ID NO: 526653 - DNA, 255 bp, Stenotrophomonas maltophilia
atggaaaagaataatgaagtcatccagacccatccactcgttggctgggatatcagcaccgtagacagctacgatgcgctgatgctgcgtttgcactaccagaccccgaatcagctaaaccgtgacgaagcggaagttggacagacgctgtggcttacaacagacgtcgcccgtcagtttatttctattttggaagcaggcatcgcaaaaatagaatctggcgactaccaggaaaatgagtataaacggcattga

SEQ ID NO: 526654 - DNA, 246 bp, Stenotrophomonas maltophilia
atgcgtattgaagtcaccattgccaaaaccaccgtcctgcctgctggcgcactcgacgctctggcgggtgagctatcccgacgtattaacagcacttttcctgaaaacgatggcgccataacggtacgttatgcgacagcaaaccatctttccgtcattggcggcgcgaaagaagacaaagaccgcatcagcgaaattttgcaggaaacatgggaaagcgccgacgactggtttatcactgattaa

SEQ ID NO: 526655 - DNA, 1047 bp, Stenotrophomonas maltophilia
atgactgtacaatcccaggttctcaaaatccgccgcccagacgactggcatatccatcttcgtgatggcgacatgctgaaaaccgtcgtgccgtataccagcgaaatttatggccgtgcgattgttatgcctaacctggttccgccagtcaccaccgtcgaggccgcgatcgcctatcgccagcgtatccttgacgccgttccggccgggcacgattttactccgttgatgacctgctacctgacggactcgctggatcccaatgaggttgagcgcggatttaacgaaggtgtgttcaccgccgcgaagctctacccggcaaacgccaccaccaactccagccatggggtgacgagcatcgacgccatcatgcccgttctggagcgaatgcaaaaactgggaatgccactgctggtgcacggggaagtgacccacgctgacattgatattttcgatcgcgaagcgcgttttatcgaaacggtcatggagccgctgcgccagcgtcttcctgggctgaaggtagtgtttgaacacattacgaccaaagatgccgcagagtatgtccgggatggaaacgaattgattgccgccaccatcaccccgcagcacctgatgtttaaccgtaaccacatgctggtgggtggcgttcgcccacatctgtattgtctgccgatcctcaagcgcaatatccaccagcaggcgctacgtgagctggtcgccagcggcttcccgcgcgcgttcctcggcacggattccgccccgcatgcccgtcatcgaaaagaggcgagctgcggctgtgcaggctgctttaacgccccgaccgccctggcaagttacgcaaccgtctttgacgagatgaatgcgttaggccatttcgaagccttctgctcccttaacggcccgcgtttctacggtctgccggttaatgacacgttcattgagctggagcgcaaagaaagccaggttgaagcgtcgattgcgctcaccgacgatacgctgatccccttcctggcaggtgaaaccgtaagctggacggtaaaaagctaa

SEQ ID NO: 526656 - DNA, 561 bp, Stenotrophomonas maltophilia
atgaaaaagatcgttattgccgctgcgttaattgtcagtgggctgctggtgggatgtaaccagcttacgcagtacaccgtcagtgagcaggaaattaatcaggcgctggaaaaacataataacttttcaaaagatatcggcgtgcccggccttgcggatgcacatatcgtcctgacgaatctcgccagccagattgggcgcgaggagcctaacaaagtcaccctgtccggcgatgccagcctggacatgacctcgctcttcggcaatcagaaagcggatatcaaactgaagctcaaggcgctgccggtctttaataaagagaaaggggcaattttcctgcaagagatggaaatcgtcgatgcggtcgtcacgccggataaaatgaaaccggtgctgcaaacgctgatgccttatctcaaccagtcgttacagaactatttcaaccagcagcccgcctacgttctgagcgaagacaagagtaagggcgaatctctggcgaaaaaatatgccaaagggatagaggtgaaaccgggtgaaatcatcattcctttcaccgactaa

SEQ ID NO: 526657 - DNA, 1209 bp, Stenotrophomonas maltophilia
atgtcccgcgtatcacaggccaggagcctgggtaaatatttcctgctcgtcgataacatgctggtcgtgctcggcttttttgtcgtttttccacttatatcgattcgttttgtcgatcaaatgggctgggcggcgctgatggtcgggatcgcgctgggcttacgccagtttgtacaacagggtcttggcgtgtttggcggggcaatagccgaccgcttcggtgcgaaaccgatgatcgtcaccggcatgctgttacgtgcggcgggattcgccacgatggcaatcgctcatgacccctggctgctgtggttctcctgtttcctttccgggattggcggcacccttttcgacccaccgcgtaccgcgctggtggttaagcttatccgtccgcaacaccggggtcgtttcttctcaattttgatgatgcaggacagcgctggcgcggtagtgggcgccctgctgggaagctggctgctgcaatacgatttccgcctggtctgcgccaccggcgcggtgctgtttattctctgcgcgctgtttaacggtctgtttctgcctgcatggaagctgtcgacggtaaaagcgccggtgcgggaagggcttgaccgcgtgctgagcgataaacgcttcgtcacctatgttttaacgttgaccggctactacatgctcgccgtgcaggtcatgctgatgctgccgattatggttaacgatattgccggcacgccggcggcggtaaaatggatgtatgccattgaggcctgcctttctctgactctgctctatccgattgcccggtggagcgagcgccgtttccggcttgagcaccgtctgatggccgggctgttgctgatgacgctgagcatgatgcccatcggcctggtgagttcactccagcagctgtttatgctgatttgcaccttctatattggctcaatcattgccgagccggcccgtgaaaccctgagcgcgtcacttgccgacgcccgggcccgtggcagctacatgggcttcagccgtctcggactggcgcttggcggcgcgctgggttacaccggtggcggctggctgtttgatgccggaaaagcgctccatcagccggagctgccgtgggtcatgctcggtatggtcggctttatgacgctgattgccctctggtggcagttcagtgataaacgcagcacccgcgggatgctggagcctggcgcctga

SEQ ID NO: 526658 - DNA, 585 bp, Stenotrophomonas maltophilia
atgtttggctatcgcagtaatgtgccaaaagtgcgtctgacgacggacaggctggtcgttcgtctggtgcatgagcgtgatgcctggcgtctggcggattattacgccgagaatcgccagtttttaaaaccctgggaacccgttcgggacgagagccattgctacccctctggctggcaggcgcgcctcagtatgattgcggaatttcacaaacagggaagtgcgttttatttcgcgcttctcgatccggaagagaaagagatcgttggcattgccaatttttcaaacgtagtacgcgggtcgtttcacgcctgctatctcgggtattccatcggccagaaatggcaggggcaggggctcatgtttgaggcgctgacggcggcgattcgctacatgcagcgcacgcaacatatccatcgcattatggcgaactacatgccgcacaataagcgcagcggcgatctgctggcccgcctggggtttgagaaagagggctatgccaaagattatctgctgattgacggcgagtggcgggaccatgtcctcaccgcgctcaccacgcaggagtggaccgcgggtcgttaa

SEQ ID NO: 526659 - DNA, 651 bp, Stenotrophomonas maltophilia
atgaaatatcagttaaatggcgccgaagcgcgcgtgattggctgcctgctggaaaagcaggttacgacgccggaacagtatcctctttccgtgaatgccgtcacgatggcctgcaaccaaaagacgaaccgtgagccagtgatgaaccttggcgagtacgaggtgcaggatatccttgatgagctggtgaagcgccactacctgcgcaccgtcagcggcttcggtaatcgcgtcactaaatatgaacagcgcttttgtaattccgaatttggcgatttaaaactcagcgccgcagaagtggcggttatcaccacgctgctgctgcgcggggcgcagacgccgggtgaactgcgcacacgcgcctcccgcatgcatgagtttcaggatatgcaggacgttgaacagacgctggagggattagcctcacgcgaggacggtccttacgtggtgcgtctggcccgcgagccgggcaagcgtgaaagccgctacatgcacctgtttagcggcgacgtggagacctctacgctggccgtcgaatccgacacgccagcatcaaacgacagcctgactgcgcgcgtggcagccctggaagacgaggttgccgggctgaagcagcgtctggatgctttactcgcacacctgggagattaa

SEQ ID NO: 526660 - DNA, 924 bp, Stenotrophomonas maltophilia
gtgactacattacgcattggagtggtggggctgggcgggattgcgcaaaaagcatggctgcccgttttaggcgccgcgtcagactggacgctgcaaggggcgtggtcgcccactcgcgagaaagcagagcgcatctgcaaaacctggcgcatcccttatgctggctcactccaggatttagcccgtgaatgtgatgcggtatttgtgcatacctcaaccgcgacgcacttccaggtggtgagcgagttgctgaacgcaggcgttcacgtctgcgttgataagccgctggcggaaaatgtgcaggatgctgaacgactgattgagctggccgcgcgtaaaaagctgacgctgatggtcggcttcaaccgccgttttgcgccgctctatcagcagcttaaagcgcagtccggctcgtttgcctctctgcgtatggataagcaccgtaccgacagcgtggggccgaacgatctgcggttcacgctgctggatgattatctccacgtcgtggatacggccctttggctgagtaacggaaaagcccagctgcaaagcggcacgctgctgaccaacgagcagggtgaaatggtttacgccgaacatcattttgccgttgagcatttacaggtgacgaccagcatgcatcgtcgggcgggcagccagcgcgagtccgtgcaggccgttacggatggcgcgctgtatgacgtcaccgatatgcgagagtggcgggaagagaagggcaatggcgtgctcgcgttacccgttcccggctggcagagcaccctggagcagcgtggctttgtgggctgcgcgcgtcacttcattacctgcgtacagaatcagacggttcctgaaacgtccggggagcaggccattctggcgcagcgcatcgtggaacgactctggcgcgaagccatgtcggaataa

SEQ ID NO: 526661 - DNA, 570 bp, Stenotrophomonas maltophilia
  misc_feature (112)..(121): n is a, c, g, or t
  misc_feature (535)..(544): n is a, c, g, or t
atgcaaaccactacatacgctggtcgtaaaaatgaaagcttccagcttcgcctaccgggacagatgaaagaggagatccgcagaatggctcagatggacggaatttcaatcnnnnnnnnnnctctgcgattgtgcagcgactggctaaaagcttgcgtgaggatcgcgctaatggtcagtaaaaaagacgaaacccggcagtgtggggacactaaccgggcttctttgccaacaaaccaccgtaggaatgatgacatgaacagtgtacagaacaaagaattaactttccagcagacagagtttcacccggtatcacacgctggtgaaacatggctcacttcatctgagttagcagcggcgctcggttacaaaaagtcagatgccgttacccaaatattcagtaggtatcacgatgaatttacggaacatatgtcaacgaccctcaaaatgagtgtcgttagaaagactggtgctgttgatattccggttcgcgttttttcgcttcgtggcgctcatcttgtcgcgatgttcgctnnnnnnnnnncgccgctgggttctggacattcttga

SEQ ID NO: 526662 - DNA, 774 bp, Stenotrophomonas maltophilia
atgacatcattaaatttagcagttcaagagcgaaatgtcgatccccagccgctgccggttattgaatggaagggtttgcgtgttgttacgactgaaacgctggccgcagggtatggttctgatgaggctaacatccggaaaaacctgtcacgcaacgctagtcgattcatggatggcatccacattttcactattaaaggtcaagagttgaaggatttgcgagtgactaatagtcacgcacaaatttcgagcaaatcccgttccgttattctttggaccgagaagggcgctgcccgtatgtctaagattgtcgacactgacgaggcttggtctttcttcgaacgtcttgaggactcgtattttcgtcctgccgcctctgctggcattccacttacctatgaagcagcactggaagatctgctgtcaaaggtaaaggaaaaccgcatcatcacagagcagcgtgaccgagcagtaaaagagaagctttggatcgcagataagcgtgaagccacggcgatggcgacagcctcagccgagaagcgtaaggctaatgcgttggcggagaaattgggtgagtgcaagaagcatgcgacgatcaaggccgttcagcgcgtcactggtaagtcattcagtcactggccgatgaagaaatggtgtgccgctaatggcatgaagcccagagatgtaccggatgaaacctacgggagcgttaaatcatggcctgccgaggcatggaaggccgtcaacagcattgaacttagaaaactgttttaa

SEQ ID NO: 526663 - DNA, 240 bp, Stenotrophomonas maltophilia
atgccacgcacagcagacatacacgccgccttcgttgcggtaattaagctcaaccataagggctatagatatctgagcacagacagctttatcgagaagctgcgggagttcaactggcactacacgcgcgaaaaagcgaatgcctggatagagcgcaaccagccgggcttcgctgataagaccaccgacggcagcgataaccgctattgggtcctgcgtaacatggggagggtgcactga

SEQ ID NO: 526664 - DNA, 318 bp, Stenotrophomonas maltophilia
atgggatttccttcaccggcggctgatttcgtagcaccgcgtttatctccggaaattatctgcgggatcggcatggacagccgcatcctcgaaacctcgtctggctttgcggttatcgagccgtgcaccagactggtacagaatcaggttctgctaatcctcagcggcggacggactcagtttgccagggtcatgggcagggcgctgatttgtgatgatggtgaagcgatagagggggaggctgcggaagaggttgaggtgatggggcgggtgacgttcttcatcaacagcgtgatgcaggatgacagggtggtgtga

SEQ ID NO: 526665 - DNA, 369 bp, Stenotrophomonas maltophilia
atgacgacgaaagcagcacaaaaaatatcgctgtgggagtttttccagcaactgggcaaaacctttatgctgcccgtggcgcttctctctttttgcgggatcatgctggggatcggcagctcgttaagcagccatgacgtcattactctaatccctttcctcggaaatccggtactgcaggcgatcttcatctggagactattaagtcttttaacgaagtggcttgatgttggattgatgtgcggtaacttctgctatgttgccgcgatacgatttgtcatgtgcaatgaactaacgtcgtttcgcggtaactttatgccccacccatgccccatcacaccaccctgtcatcctgcatcacgctgttga

SEQ ID NO: 526666 - DNA, 1029 bp, Stenotrophomonas maltophilia
atggctgtagcgaaaaagatcaccatcaacgatgtcgcgctggcggcgggggtttccgttagcaccgtttcgctggtattgagcgggaaggggcgcatctctcctgctacgggtcagcgcgtcaacgaggccgttgagcaactgggctttgtgcgtaatcgccaggcgtcggcgctgcgcggtgggcaaagcggggtgatagggctgattgttcgcgacctcgcgtcgccgttttatgcagaactgaccgccgggcttaccgaggcgcttgaagcgcaggggcgaatggttttcctgctccacggtgggcgcgaaccggagcagctgctctccaggctggatatgctgctgacgcaaggggtggatggggtgatcgtggccggcgcgtccgttgtgggcagtgaattgtgtgagcgcgcggcgcagaaaggcgtaccgctggtggttgcgtcacgcgccagctatctcgacgaagccgatacccttcggccggataacatgcaggccgcgcaaatgctgaccgagcatcttattcatcgcggccatcagcgcatcgcctggctcggcggtaaaagctcgtccctgacgcgtgcggagcgggtgggcggttactgctccacgctcatcaaatacggcctgccgtttcacagcgaatgggtggtggagtgtgagtccagccagaaaaaagccgccgaagccatcggcacgttgcttcgcaacagcccgacaatcagcgcggtgatttgctataacgatgtgattgcgatgggggcgtggttcggcttgatccgcgccggacgccagagcggtgagggcggggtagaaacgttcttcggccatcaggtggcgctgggggcatttgcggatgtcggtgaaaatgcgctagacgatctccccatcgtctgggcgacgacgccggctcgtgaaatggggtacaccctggcagaccgaattatgcagcgtattgaaaatacggacgtgcaggccgggcatcagattgtggcggcgcggttagtgacggtgaagtaa

SEQ ID NO: 526667 - DNA, 1527 bp, Stenotrophomonas maltophilia
atgaaaaaatcggtcgtagcggtaggagtgattgttgctttaggcgtgatctggacgggtgcttcctggtataccgggaaacagctggaaagccgtctggcagagatgatggcgcaggcaaacagcgaaattaagcgcagcgcgcctgaagcaggtctggagctgagctaccagaactaccagcgtggcgtctttaccagccatatgcaggtggtggtgaagccggtagcgggcaatcagaacgcctggctgaaaccgggccagagcgtggtactggatgaagtggtcagccacggtccgttcccgctggcacagttgaaaaagtttaacctgatcccctctatggcatccgccagaaccgtactggtaaataacgaggtgacgaagccaattttcgatatggcgaaaaatgagtcgccgttcgagatcaatacccgcatcagctatgccggtgatacgcgttccgacatcgacctgaaagcgctgaattacgaacaaggcaccgataaagtcgccttcagcggcggtaatttccagcttgatgccgatcgcgacggcaagaatgtctctctgaccggcgatgccgccagcggcctggtgaattcagtcaatgaatataaccagaaggtccagcttaccttcaacaacctgaaagccagcggcaatagccgtatgaccgattttgacgagcgtattggcgatcagaagctgagcctcgataagatcgccattgcgattgaaggtaaagagatggcagtgctggaaggcatggatctggacggcaagtctgacgtttccaaagacggtaaaagcatcaacacccagctggattacagcctgaaaagcctgaaagtacagaatcaggacctgggtaccggcaagctgtcactgaaaattggcaacattgacggccaggcatggcacgaatttagccagaaatacagcaaagagagtcaggctctgctgaccgatgccgccctgcaacagaacccgcaggcgtaccagcagcaggcgatggccgtgctgtttaataacctgccgatcctgctgaaaggcgagccggtaattaccgttgcgccactgagctggaaaaacgacaaaggcgaaaccaacttcaacctgtcgctgttcctgaaggatccggcggccgcgaccggcgagccgcagaccctggcgcaggaagttgaccgcagcgtgaaatcgctcgacagcaagctgaccatcccgatggatatggcaaccgagttcatgacgcagattgcgaaactcgaagggtatggtgaagaagatgcaggtaaactggcaaaccaacaggtgaaaggcctggcggcgatgggccagatgttccgcatcacgaaggtggaagacaacaccatttccaccagcctgcaatatgctaatggccaggtaacgctcaacggcgacaaaatgccgctggaagattttgtcggcatgtttggtatgccgacgctgggcattccggcaccggctgaaccggcagcgccgccagcagtaccgcagcagtaa

SEQ ID NO: 526668 - DNA, 1176 bp, Stenotrophomonas maltophilia
atgcaaaaactcatcaactcagtgcaaaactacgcctggggaagtcaaactgcgttaacggatctctacggtatcgccaacccggacaacctgccgatggcagagctgtggatgggcgcgcacccgaagagcagctcaaaaattgaagatgccagcggccaggtgcgcagcctgcgtgatgtcatcgatgccgacaaagccgcgctgctcggcgataaagtggcgaatcgttttggtgagctgccttttctgttcaaggtattgtgcgccgaccagccgctctccattcaggttcacccgaacaaaaaagcctctgagctgggctttgccaaagaaaatgccgccggtattccgttagacgccgcagagcgtaactacaaagatcctaaccacaagccggaactggttttcgcccttacccctttcctggcgatgaatgccttccgcgagttttccgagatcatatccctgctgcaaccggtcgctggggctcacaacgcgatcgcccacttcctggaaaacccgaacgcagaagccctgagcgcgctgtttgccagcctgctgaatatgcagggcgaggaaaaatcccacgcgctggcggtgctgaaagccgcgctgaacgaccagcagggtgagccatgggacaccattcgcgtaatttccgcgttttatccggacgacagcggcctcttctctccgctgctgctgaacgtggtgaagctcaacccgggcgaagcgatgttcctgttcgctgaaaccccgcacgcctacctgaacggcgtggcgctggaggtgatggctaactccgataacgtactgcgcgcgggcctgacgccaaaatacatcgacatccctgagctggttgccaacgtgaagttcgtggcgaaacctgctgcggagctgcttactcagccggtgaaaaacggcgcagagctggacttcccgattccggttgacgattttgccttctccctgcatgacctcagcgcagacgaaaccgccattgcacaggagagcgccgcgatcctgttctgtgtggaaggcgaagcgacgttgcataacggtagcgagcgtctgctgcttaaaccgggggagtccgcttttgtcccggcaaacgagtcgcctgtcttcgtgagcggcactggtcgcctggcgcgcgtttttaataagctttag

SEQ ID NO: 526669 - DNA, 375 bp, Stenotrophomonas maltophilia
ttgcgaatagcgcaggttgtcttcggtataggtgttgtagacgccgcgcgccagcgccgcttcgtcaccgccgccggtccagacgcgctggccttttttaccggtgataatcgccgtgccggtgtcctggcaggtcggcagaatgcctttcgccgcgatatcagagttacgcaggaattgcagggcaacgtatttgtcgttctcgctggcttccgggtcgctcagaatatcggcaacctgctgctgatgcgccggacggagcataaaggaagcatcgtggaaggcttgctgcgccagcagcgtcagcgcctgcgggtcaactttgaggatctcctgcccttcaaactcagagacagaaacgtaatcgcgggttaa

SEQ ID NO: 526670 - DNA, 174 bp, Stenotrophomonas maltophilia
gtggcgcgggaggcggatcacgcgaatgtcatgcgcgaagtatttgccgccaaactgcgcgcccagccccagattctgcgcttcggccagcagttcctgctcaagctgcacgtcgcggaacgcctgaccatgttcgttaccttccgttggcaggccatcgtagtatttggttga

SEQ ID NO: 526671 - DNA, 534 bp, Stenotrophomonas maltophilia
atgataagcccgtgcaatgacgcgcccaagacacgacgcgctatcgcgcgccgagtccgcgcatttttccttatccccgcacctgtcggtgcgcgcccttcaacaagacgggggcttttcatgtccctgctgcttccatccacgcatggcgtggatccaccgtgtcgaccaaggtcgacacctaccagcagccgcgcagtgcgccgtcccgacagatcgcaggaatctgtcgaaggcgtggtgggtccggttgcgggggtgtccgcggcatggatgccgcggccaagcccccatggacgggtttacggcgtcccccgcaactggacccaccacgccatgcctcggaatgctgctgttgcttcggccgttgcggttgcctctgcgggtgccgggcgcagcccggccagccctctcaagcgaacagcggggcctggcgttgttccagtcgcagcagcgcggcctttgtttccagtccaccgccgaatccggtcagcgctccattgctgccgatcacgcgatggcagggcaggatga

SEQ ID NO: 526672 - DNA, 399 bp, Stenotrophomonas maltophilia
gtgcgcgcagctggcgtcgtgcacgtgaccgtggttgaggcgcaggttgaccaggtgggccactcccaccagcaggccgccgacggtcatcaccaccgcgtgcggcaccgcattgtggtgcaacgggtcgtacagcacgccggcccacaacgcgaccaggccgggaatcaggaagcccagcgcacgcagcgcaccgtgccggcggtagccccagaccaggctgaacagccccagcagggtgacgaacaccaccagcgcctgttccaccccatcgctcagccagaacgacagccccaacgaaggcgctgcggccagcagtaccgggatcaccgcgcagtgcaccgcgcacagcatcgaaccagtagcgccgaaacggtcgagcaggtggcgcaggcgtga

SEQ ID NO: 526673 - DNA, 288 bp, Stenotrophomonas maltophilia
atgaccaagtcagaattgattgaaagacttgccagtcagcaaccgcatatccctgccaaggctgtggaagatgccgttaaagagatgctggagcatatggctaccactcttgcccagggcgagcgcattgaaatccgcggtttcggtagtttttccctgcactatcgtgcaccacgtaccgggcgtaacccgaagactggcgataaagtggagctggaaggaaagtatgttccgcactttaagccgggtaaagaactgcgcgatcgcgccaatatttacggtaactga

SEQ ID NO: 526674 - DNA, 1674 bp, Stenotrophomonas maltophilia
atgactgaatcttttgctcaactgtttgaagaatccttaaaagaaatcgaaacccgtccgggttccatcgttcgcggtgttgttgttgctatcgacaaagacgtagtactggttgacgccggtctgaaatctgagtccgccatcccggctgagcagttcaaaaacgcccagggcgagctggaaatccaggtaggtgacgaagttgacgttgctctggacgcagtagaagacggcttcggcgaaaccctgctgtctcgtgagaaagctaaacgtcacgaagcatggatcacgctggaaaaagcttacgaagaagctgaaactgtggtcggtgttatcaacggcaaagttaaaggtggcttcactgttgagctgaatggtattcgtgcgttcctgccaggttctctggtagacgttcgtccagtccgtgacaccctgcacctcgaaggcaaagagcttgagttcaaagtaatcaagctggaccagaagcgtaacaacgttgttgtttcccgtcgtgccgttatcgaatccgaaaacagcgcagaacgcgatcagctgctggaaaacctgcaggaaggcatggaagtcaaaggtatcgttaagaacctcactgactacggcgcattcgttgacctgggcggcgttgatggcctgctgcacatcaccgacatggcgtggaaacgcgttaagcacccaagcgaaatcgtgaacgtgggcgacgaaatcactgttaaagtgctgaagttcgaccgcgagcgtactcgtgtatccctcggcctgaaacagctgggcgaagatccatgggtagctatcgctaagcgttacccagaaggtactaaactgactggtcgcgttaccaacctgaccgactacggctgcttcgttgaaatcgaagaaggcgttgaaggcctggtgcacgtttccgaaatggactggaccaacaaaaacatccacccatccaaagttgttaacgttggtgatgtagtggaagtgatggttctggatatcgacgaagaacgtcgtcgtatctccctgggcctgaagcagtgcaaaaacaacccatggcagcagttcgcggaaacccacaacaagggcgaccgtgttgaaggtaaaatcaagtctatcactgacttcggtatcttcatcggcctggacggcggcatcgatggcctggttcacctgtctgacatctcctggaacgttgcaggcgaagaagcagttcgtgaatacaaaaaaggcgacgaaatcgcagcagttgttctgcaggttgacgcagagcgtgaacgtatctccctgggcgttaaacagctcgcagaagatccgttcaacaactgggttgcactgaacaagaaaggcgcaatcgtaaacggtaaagtgactgctgttgacgctaaaggcgcaaccgtagaactggctgacggcgttgaaggttacctgcgcgcttccgaagcttcacgtgaccgcgttgaagatgcaactctggttctgagcgttggtgacgacgttgaagctaagttcaccggtgttgaccgtaagaaccgtgcaatcagcctgtctgttcgtgctaaagacgaagctgatgagaaagatgcaatcgcaactgtgaacaaacaggaagatgcaaacttctctaacaacgcaatggctgaagctttcaaagcagctaaaggcgagtaa

SEQ ID NO: 526675 - DNA, 684 bp, Stenotrophomonas maltophilia
atgacggcaattgccccggtaatcaccattgatgggccaagtggcgcagggaaaggtactctgtgcaaagcgatggcggaagcattgcaatggcatcttttagattcgggagcaatctatcgtgtgctggcgctggctgcgctgcatcatcatgtagatgttgcgtctgaagaagcgctggtaccgctggctgcacatctggatgtgcgctttgtctctactgatggcaaccttgaagtgatcctggaaggggaagatgtcagcggtgaaatccgtacgcaggaagtggccaatgcggcctctcaggtggcggctttcccacgcgttcgtgaagcgctgttacgtcgccagcgcggtttccgcgaagcgccggggctgatcgccgacggccgcgacatgggaaccgtggtattccctgatgcgccagtgaaaattttccttgacgcctcttcggaagaacgtgctcaacgccgcatgcttcagttgcaggaaaaggggtttagtgttaactttgatcgccttttatccgagataaaagagcgcgatgaccgcgatcgtaaccgcgccgtcgcaccacttgttcccgcgcaagacgcattagtgctggattcaaccagtttaactattgagcaagtgattgaaaaagcgctacaatatgcgcgccaaaaactggcactcgcgtaa

SEQ ID NO: 526676 - DNA, 1284 bp, Stenotrophomonas maltophilia
atggaatccctgacgttacaacctatcgcgcgggtagatggcaccattaatctgcctggttcaaaaagtgtctcgaaccgcgctctgctgctggcagctctggcaaacggcaccaccgtcctttccaacctgctggacagcgatgacgtgcgccatatgctcaatgcactgaaagcgttgggcgttcagtacgcgctgtcagacgatcgtacccgttgtgaagtcaccggtaacggcggcgcattacattccgctgaagcgctggagcttttcctgggtaacgccggtacggcgatgcgtcctctggccgctgcgctgtgtcttgggagcaacgatattgtgctgaccggcgagccgcgcatgaaagagcgtccgatcggccacctggtcgatgccctgcgtcagggcggcgcgcagattgattatcttgagcaagaaaattacccgccactgcgtctgcgcggtggtttcactggcggtaatgttgaggttgatggtagcgtctccagccagttcctgactgcactgctgatgaccgcaccgctggctccaaatgataccgtgattagcattaaaggcgatctggtctctaagccgtacattgatatcacgctgcacctgatgaaaacctttggtgttgaggtggaaaaccagtcataccaacgcttcgtggttcgcggtggccaacagtatcagtctccgggtcactacctggttgaaggcgatgcgtcatccgcctcctatttccttgccgcaggcgcgattaaaggcggtacggtaaaagtgacgggtattggtcgcaacagcgtgcagggcgatattcgttttgccgacgtgctggaaaaaatgggcgcggttgtgacctggggcgatgacttcatctcctgtacgcacggtgagctgaacgccatcgacatggacatgaaccatattcctgacgcggcaatgaccatcgccaccgctgcgctgtttgcgaaaggcaccaccacgctgcgtaacatctataactggcgcgtaaaagagactgaccgcctgttcgcaatggcaaccgagctgcgtaaagtgggggcggtggtagaagagggcgaagactacattcgcgtcacgccgccggcaaaactgcaatttgcagaaattggcacctacaacgatcaccgcatggcgatgtgtttctcgctggtggcgctgtcagatacgccagtcaccatccttgacccgaagtgcacggcgaaaaccttcccggactacttcgaacagctggcgcgcattagcaccctggcctga

SEQ ID NO: 526677 - DNA, 1053 bp, Stenotrophomonas maltophilia
atgttaccggcagacgtgctcaaacaggctcaacaggagctgtgtgactggaacggtctgggtacgtcggtgatggaagttagccaccggggtaaagcgtttattcaggtggcggaagaggcagaaaaggattttcgcgatctgctgaacattccctcgaactacaaagtattgttctgtcacggcggtggacgcggtcagtttgcgggtattccgctcaatctactgggcgacaaatccaccgctgattacgttgatgccggctactgggcggccagtgcggtaaaagaagcgcacaaatattgcacgccgaacgttatcgatgccaaagtgaccgttgacggtatgcgcgccgtgaagccgatgagtgagtggcagctttctgacaacgccgcgtatcttcattactgcccgaacgaaaccatcgacggtatcgctattcacgaagagccagactttggcgaaaatgtcattgtgacggcggacttctcctccaccattctgtccacgccgctggacgtcagccgctacggcgtcatctacgcgggtgcccagaaaaacatcggtcctgcgggtctgactatcgttatcgtgcgtgaagacctgctggggaaagcccataagtcttgcccgtcaattctggattacaccgtcctgaacgacaacgattccatgttcaacactccaccaacgttcgcctggtatctctccggcctggtcttcaaatggctgaagcaaaaaggcggcgtggcgcagatggacaagatcaatcagcaaaaagctgaactgctgtacggcgtgatcgacaagagcgatttctaccgtaacgatgtcgccaaaactaaccgttcgcgcatgaacgtgccgttccagctggcggacaacaacctggataacgtgttcctggaagagtccttcgcggcgggtctgcatgcgctgaaaggtcaccgtgtggtaggcggtatgcgtgcctctatctataacgcgatgccgctggaaggcgttaaagccctgactgatttcatgatcgacttcgaacgtcgtcacggttaa

SEQ ID NO: 526678 - DNA, 693 bp, Stenotrophomonas maltophilia
atgaaagcatttgatctccagcggatggcgtttgataaagtcccacctgagtttttaggcgaagtggcgttgcgtagcctgtacacctttgtactcgtcttcctgtttctgaaaatcaccggacgtcgcggcgtgcggcagatgtcactgtttgaagtgctgattatcctgacgctgggttcggcggcaggggacgttgccttttatgacgatgtgccgatggtgccggtttttatcgtcttcgtgacgcttgcgctgctgtaccggctggtcatgtggctgatgtcgaaaagtgaaaaactggaagatctgttcgaaggaaaaccggtggtgattgtcgaagatggtcaactggcctgggagaatgtgcaaagcgccaatatgacggagtttgagttctttatggagctacgtataagcagcgttgaacaactggggcaggtgcgtctggcgattatggaaacgaacggtcaaatcagcgtttattactatcctgacgatgaggtcaagcccggcctgtgcatactgccggatatgcttatcgagcgatacaaaaccgtccctgatgcgggccagtatgcttgcataaaatgcagccacgtggtggtcatgcaggcgggcgatcatcaattatgccctcgctgtacaaatccagaatggacgaaggttagccgggctaaacgcattacctga

SEQ ID NO: 526679 - DNA, 1761 bp, Stenotrophomonas maltophilia
atgactcaaacgtttatccccggcaaagacgccgctctggaagattccatcgctcgcttccagcagaaactgaccgacctgggctttaatatcgaagaagcctcctggctgaatccggtgcctcacgtctggtccgtgcatattcgcgacaaagactgtgcgctgtgcttcaccaacggcaaaggcgcgaccaaaaaagcggcactggcctctgcgctgggtgagtattttgagcgtctgtccaccaactatttcttcgccgacttctggctgggtgaaacgattgccaacggcccgttcgttcactatccgaacgaaaaatggttcccgctacccgaagacgacgaactgccggaaggcattctcgatgcccgcctgcgcgcgttctacgatccggaaaacgaactgaccgccagcatgctgatcgacctgcaatccggcaatgaggatcgtggtatctgcgccctgccgttcacccgtcagtctgacgagcagaccgtttacattccaatgaacatcgttggcaatctgtatgtgtctaacggtatgtctgccggtaacacccgtaacgaagcgcgtgtacaggggttgtctgaagttttcgagcgtcacatcaaaaaccgtattattgctgaatccatcagcctgccggagatcccggctgacgtgctggcgcgctacccgggcgtggtggaatccatcgccaaactggaagcggaaggtttcccaatctttgcttatgacggctctctgggcggcaaatatccggttatctgcgtggtactgtttaacccggcaaatggcacctgcttcgcctctttcggcgcgcacccggacttcggcgtggcgctggagcgtaccgtgaccgaactgctgcaaggtcgtagcctgaaagatctcgacgtattcaccccgccaacctttgatgatgaagaagtcgccgagcacaccaacctcgaaacgcacttcatcgactccagcggtttgatctcctgggatatgttcaaacaggacgcagactatccgttcgtggactggagctttgccggtacgacggaagaagagttcgccaccctgatggcgatcttcaacgcggaagatcaggaagtctatattgccgactatgaacacctcggcgtttatgcgtgccgtattattgtgccgggtatgtcggacatctatccggcagaagatctgtggctggcgaacaacagcatgggcgcgcatctgcgtgaaaccctgctggccctgccgggcagcgagtgggataaagaagattatctgaacctgatcgcccaactggacgaagaaggacacgatgatttcacccgcgtacgcgaactgctgggtctggcaaccggaaaagataacggctggtacacgctgcgcatcggcgagctaaaagcgatgctggcgctggcgggcggcgatctggatcaggctttggcctggaccgagtggacgatggagtttaaccagtccgtcttctccgccgagcgcactaactattaccgttgcctgcaaacgctgctcctgctttctcaggaagacgaccgcgagccattgcagtatctgaacgccttcgtccgcatgtacggtgcagatgccgttgaagctgccagcgctgcgctgagcggtgaagaaccgttctatggcctgcaagcggttgacagcgatctgaaagccttcccggcgcatcagtcactgctgaatgcgtatgaaaaattgcagaaggctaaagccgcttactggtcaaaataa

SEQ ID NO: 526680 - DNA, 921 bp, Stenotrophomonas maltophilia
atgaatactattattctaccgaaaacacagcacctcgtggtatttcaggaagtcatcaaaagtggctctataggttctgctgcaagacaactggggctgacgcaacctgccgtcagcaaaatcatcagcgacatcgaatcttactttggggtggaagtgatggtgcgtaaaaacaccggcgtaaaactcactgccgccggtcaggtgctgctgtcctacgctgagtcgatcacccgcgaaatgaaaaacatggtgagcgagatcaacagcctcagtttcagtaccgtcatggacgtctccttcggctatccgtcgctgattggcttcaccttcctgtccgggatgatcaaaaaattcaaggaagtgttcccgaaggcgcgcgtctcaatgtatgaagcgcagctctcttcattcctgcccgccattcgcgatggccggctggatttcgccatcggcacgctaagcgacgggatgttgcttcaggatcttcacgttgagccactgtttgaatctgagtttgtgctggtggcgagtaaatcacgaacgtgtaccggcccgaccagactggcatcgctcacgcacgagcagtgggtgatgccgcaaaccgatatgggctactacaacgaactcctgaccaccctgcaagataaccacatcagcattgaaaacatcgtccagaccgattctgtcgtcaccatctataaccttgtcctcaatgccgattacctgacggtgatcccccgtgacatgattgcgccattcggctcggaccagtttattgtcctgccggtggaagatgcattacctgtggcgcgttatgctgccgtgtggtcaaaaaattacagtattaaaaaatcggcgtcagtattagttgaactggcaaaacaatattcgtcgatgaatatcgaaaaacgacgatag

SEQ ID NO: 526681 - DNA, 990 bp, Stenotrophomonas maltophilia
atgcacattacttacgatctcccggtgaccattgacgatattcaggacgccagaaaaagactggcgggaaagatctataaaaccggtatgccgcgctcaaattatctgagcgaacggtgtaagggtgagatattcctgaaatttgaaaatatgcagcgtaccggttcgtttaaaatacgtggggcgtttaataaattaagctcgctgaccgatgcggaaaaacgcaagggcgtggttgcctgttccgcagggaaccacgcgcagggggtgtcgctctcctgcgccatgctcggcatcgacggcaaagtggtaatgcctatgggcgcgccgaaatccaaggtggccgccacgcgcgactactccgccgaagtagtgctgcacggcgagaactttaacgacactatcgccaaagtgagcgaaatcgtcgagatggaagggcgcatatttatcccgccttacgacgatccgaaagtgatcgccggtcagggcaccatcggcttggaaatcctcgaagatttatacgacgtggataacgtgattgttcccatcggcggtggtggtttaattgccggtattgcgacagcaattaaatccatcaacccaactatcaatattatcggcgtgcagtctgaaaacgtgcacggaatggcggcgtcgtatcagaccggtgaaataacgaaccaccgcattaccggcacattagcggacggctgcgacgtgtctcgcccgggtaatttaaccttcgaaatcgttcgtgaactggttgacgacattgtgctggtcagcgaagacgagattcgcaacagcatgatcgcgcttattcagcgaaataaagtggttacggaaggtgctggcgcgctggcgtgcgcggcgttattaagcggcaagctggaccactatattcagggccgaaaaaccgtctgcattatttccggcggcaatattgatctctcccgtgtttcccaaattaccggcttcgttgacgcataa

SEQ ID NO: 526682 - DNA, 1332 bp, Stenotrophomonas maltophilia
atgagcaacacagaaagcattatcgttggccagacaaaaacgtccacctggcgtaaatcggataccacctggacgctcggcctgtttggtaccgccattggcgcaggcgtgctgttcttccctatccgtgcaggctttggcggcctgatccctatcctgctgatgctggtactcgcgttcccgattgcgttttactgccaccgcgcgctggcgcgtctgtgtttgtccggcagtaacgtctccggcaacatcaccgaaacggtggaggagcattttggtaagaccggcggggtggtgatcaccttcctctacttctttgctatttgcccgctgctgtggatttacggcgtcaccattaccaacacctttatgaccttctgggaaaaccagctccagatgcctgccctgaaccgcggcgtggtagcgctgttcctgctgctgctgatggcctttgtgatctggttcggtaaagacctgatggtgaaggtgatgagctacctggtgttcccgttcatcgccagcctggtgctgatttctctctcgctgatcccgtactggaactcagcggtgatcgaccaggttaacctgagcgatatcgccttcaccggtcatgacggcattcttgtcacggtgtggctggggatttccattatggtcttctccttcaacttctcgcctatcgtctcctcgtttgtggtctccaagcgcgaagagtacgagccggagtttggtaaagaattcaccgagcagaaatgttccaaaatcatcggtcgcgccagcctgctgatggtggcggtggtgatgttcttcgcctttagctgcctgtttacgctctctccgcagaacatggcggacgccaaagcgcagaacattccggtgctctcttacctggcgaaccactttgcgtcgatgtcaggcagtaaatccacgttcgccacggtgctggagtacggcgcgtccatcatcgcgctggtcgctatctttaaatccttcttcggtcactacctgggcacgctggaggggctgaacggcctgatcgttaagttcggctacaagggcgacaagaagaacgtctccgtgggcaagctgaacaccatcagcatggtcttcatcatgggctccacctggattgtggcctatgccaacccgaacattctggaccttattgaagccatgggcgcgccaattatcgcctctctgctgtgcctgctgccgatgtacgccatccgcaaagcaccggcgctggcgaaatacaaaggccggaccgagaacatcttcgtaaccgtggtcggcctgctgaccattctgaacatcgtgtacaaattgttttaa

SEQ ID NO: 526683 - DNA, 1209 bp, Stenotrophomonas maltophilia
atgattgagtttccggtagtactggtcattaactgcggatcgtcctctgttaagttttcggtgctggacgccgcaggctgcgatgccctgctgacgggcattgcggacggcatcaacacagaaaaagcctttatttccgtgaatgggggtgagccagtcagactggctcatcaggactacgaaggggcgctggccaccatcgccctggagctggagaagcgcgacctgatgggcagcgtggctttgattggccatcgcattgcccacggcggcgatctcttcagcgagtcgaccctgatcacggaagaggtgatggagcagatccgccaggtctccccgctggcgccgctgcataactacgctaacctgagcggcgtggaagccgcagagcgactcttccccggggtgcagcaggtggcggtatttgataccagcttccaccagaccatggcgccgcaggcgtatctgtacggcttgccgtaccgctattttgaagagctgggcgtgcgccgctacggcttccacggcacctctcaccgctacgtggcggcgcaggcgcacgcgcttctcgggctctccgccgaagacagcggcctggtgattgcccatctcggcaacggggcgtccatttgcgcggtgcgtaacggcagaagcgtggacacgtccatggggatgacgccgcttgaaggactggtgatgggcacgcgctgtggcgacgtagattttggcgcgatggcgtggattgcccggcagaccggccagacgttcgaggatctggagcgcgtggtcaacaaagagtccgggctgctggggatctccggcatctcctccgatttgcgcgtgctggagaaagcctggcatgacggcaacgagcgggcgcggctggcgataaagacctttgtccaccgcatagcgcggcatatcgccggtcatgccgcatccctgcaccgtctggatggcgtggtgtttaccggcgggatcggtgagaactccgtgcttatccgcgcgctggtggtggagcacctgaaggtgtttggcatcatcctcgacgagtccaaaaatgccctgccgggcagcgcgggtgagcgcgtgatctccaccgagtcgtcccgcgcggcctgcgcggtgatccctaccaatgaagaaaaaatgatcgcgctggatgccctccgtcttgggaaggtcaccccggctgcggcttacgcctga

SEQ ID NO: 526684 - DNA, 2295 bp, Stenotrophomonas maltophilia
atgaaagtaacaatcgatacgggcgtcgcgccttacagcgacgcatgggccgggtttcgcggtgaagaatggaaaaacgccgttaacgtgcgcgattttattcagcataactacaccccttatgaaggcgatgaagctttcctcgcgcaggcgacgccagcaacgacggcgctgtggcagaaggtgatggtcggcattcgccaggagaatgctactcacgctccggtggattttgacaccaacatcgccaccaccattaccgcgcacgggccgggctatattgaccaggagctggagacgatcgtcggcctgcaaaccgacaagccgctcaagcgggccctgcatccgtacggcggaatcaatatgatccgcagctcattcgaagcctacggtcgcgagatggatccgcagtttgaatatctcttcaccgacctgcgcaaaacccacaaccagggcgtatttgacgtttattccccggagatgatgcgctgccgaaaatccggcgtgctcaccggtctgccggacggctacgggcgtggacgcatcatcggcgactaccgccgcgtggcgctgtacggcatcagctatctggtgcgcgagcgggaacttcagttcgccgatctccaggggaaactggagcgcggagacgatctggaggccacgatccgcctgcgcgaggagctggcggagcataaacgtgcgttgctccagatccagcagatggcggcgaactatggctttgatatttcacgtccggcgacgaatgcgcaggaagcggtgcagtgggtctactttgcctaccttgccgcagtgaaatcccagaacggcggggcgatgtcgctggggcgcacggcctcgttcctcgatatctacattgaacgcgacatgcaggcaggaaggctgaacgaggtgcaggctcaggagctgatcgaccacttcatcatgaagatccgcatggtgcgcttcctgcgcacgccggagttcgacacgctcttctccggcgatccgatctgggccacggaagtgatcggcggcatggggctggatggccgtacgctggtgaccaaaaacagcttccgctatctgcataccctgcacaccatggggcctgcgccggagccaaacctgacgatcctctggtccgaacagctgccgatcgcgttcaagaaatacgccgcgcaggtctcgatcgtcacctcctcgctgcaatacgagaacgacgatctgatgcgtgccgactttaacagcgacgactacgccattgcctgctgcgtcagtccgatggtgatcggcaagcagatgcagttcttcggcgcacgcgccaacctggcgaaaacgctgctgtacgcgattaacggcggggtggatgagaagctgaagatccaggtggggccgaaaaccgagccgctgctggatgaggtactggattacgacaccgtaatggcgagcctcgatcacttcatggactggctggcagtgcagtacatcagtgcgctgaatctcattcactacatgcatgataaatacagctacgaagcctcgctgatggcgctgcacgaccgggacgtttaccgcaccatggcctgtggcattgccgggctgtcggtggcggcggattccctgtcggccatcaagtacgccacggtaaaaccggtgcgcgaccacaccggtctggcggtcgatttcgtcatcgaaggcgactatccccaatacggcaacaacgacgatcgcgtggacagtatcgcctgcgatctggttgagcgctttatgaagaaaatccaggcgctgccgacgtaccgcaacgccgtgccgacgcagtcgattctgaccatcacctccaatgtggtttacgggcagaagaccggcaacacgccggacggacgtcgcggcggtacaccgtttgcgcctggcgccaacccgatgcacgggcgcgacagaaaaggagcggtggcgtcgttgacctcggtcgccaagctgccgttcacctatgccaaagacgggatctcctacaccttctccatcgtgccgcaggcactgggcaaggacgagctggtgcgcaaaaccaaccttgtcgggctgctggacgggtacttccaccacgaagcgaccatcgagggcgggcagcacctgaacgtcaacgtgatgaaccgggagatgctgctggatgccatcgcccatccggagaactatccgaacctgacgatccgcgtttcaggctatgcggtgcggtttaacgctctgacgcgcgagcagcagcaggacgtgatttcgaggacgtttacgcaggcgatctaa

SEQ ID NO: 526685 - DNA, 1332 bp, Stenotrophomonas maltophilia
atgaatatggcaacaaacagcagtgtgattgtgagtgattcccctgcggcaaggcgggcgggaatgagcgaaagcgaatggcgagaggcgattaaattcgacagcaccgatacgggctgggtcatcatgagtattgggatggctatcggcgcgggcattgtttttcttccggtgcaggttggattaatggggctatgggtatttttactctcgtcgataattggttatccggccatgtacctgttccagcgcctgtttattaatacgctggcggaatcaccggaatgtaaagactatccgagcgttattagcggatatttaggcaaaaactggggcatcttattgggtgcactttatttcgtgatgctggtgatctggatgtttgtctattcgacggccattaccaacgacagcgcatcctatttacacaccttcggcgtaaccgacggtttgctctcggaaaatccgttctacggcttattcctgatctgcattctggtcgccatttcgtcgcgcggtgaaaagctgctgtttaaagtctccagcctgatggtgctgaccaaattatttgtggtggcggcgctggggctttcgatgattggcctctggcatttagccaacgtcggcatgctgccgccaatggggctgctgattaaaaacgccattattacgctgcctttcaccttaacctccattctgtttattcagacattaagcccgatggtgatttcctatcgttcaagggaaaaatccgttgaggtggcgcgtcataaagcgctgcgggcaatgaatatcgcctttggcgtgctgtttgtgacggtctttttctacgctgtctccttcaccctggcgatggggcacgacgaggcggtaaaagcctacgagcagaatatttccgccctggcaatcgcagcacagtttatcagcggtgacggcgcgggctgggtcaaaattgtcagcgtaatcctcaatatttttgccgtgatgaccgcgttctttggcgtctatctcggctttcgtgaggcgacgcagggcattgtgatgaacatcctgcgccgcaaaatgccggcggagaaaatcaatgaaaatgccgtccagcgcgggattatgctgttcgccatcctgctggcctggagcgcgattgtgttaaacgcgccggtgctgagcttcacttccatctgtagccctattttcgggatggtgggctgcttaattccggcgtggctggtctacaaagtgcccgcacttcataaatataaaggcgtatcgctggtgattattgtgattaccgggctgctgctttgtgtttctcctttcctcgccttctcatga

SEQ ID NO: 526686 - DNA, 573 bp, Stenotrophomonas maltophilia
atgtctgagcaaattaatcctttatggaaccattttattcgcgcggtgcaggaagaggtaaagcctgcgctgggctgtaccgaacccgtctcgctggcgctggcgtgcgcgatggctgccggacagcttgacggtgaggtgacgcgtatcgaggcgtgggtatcgccgaacctgatgaaaaacgggcttggcgtaacggtgcccggtaccggtatggtcggtttacccatcgcggccgcgctgggggcgacaggcggtaatgcacacgccgggctggaggtgttgaaagacgcgtcgtccgaggcgctaacgcgcgccaaagcactgctgaacgcgggtctggtgcaggtaaaattgcaggagccgtgcgatgagatcctctattcacgtgcctgcgtttacgtcggtgaatcctcggcgatggtgaccatcgctggcgggcacactcgcgtggtggaggtagtttgtcagggcgaaacgcgcttcaggcttgacgataatcagagccagaacagcgacgatccgcctgtctcttatacacatctgacgctgccgacgactccttacgtgtag

SEQ ID NO: 526687 - DNA, 531 bp, Stenotrophomonas maltophilia
atgaataaaaaattgatgatggcaatgttagcggcaggttctgtactcaccatgaccaatgcatttgcagcagcaggtaccgttaattttaacggaaatattctggattctgcctgcgacgtagatgtggcatctcagaaccaggtggtggtattgggcgattattataaaacggaattcccgacggcgggagccagaacggctgcgacgcagtttaatattattttgaaaaactgtcctgtgacggtcactaatgcaaaagtccgttttgacggtacgccggatttaaccaacgccagcctgctggcgattgatacgtccgtggcgggggcggccacaggggtagcgattaacctgatgactgcagataaagccgatctgccgctgtacggcagcaacagctatacctacgcgctcagcagtacggctgataatacgctgaacttctacgcgcagtatatctccaccgcagcgtccgtgaccgcgggcccggctaactcggtcgcgaacttctcagtggtttacaactaa

SEQ ID NO: 526688 - DNA, 678 bp, Stenotrophomonas maltophilia
atgcgttttataacgacaactggcctggcgatggcgctgttatcgctgacgttaacatccgccagtgctggagtagttattggcggcacccgcattattttcgatggggcaaaaaaagaagcgtcaataagtatcaccaatcctgatgacgttccttatttaatccagtcgtggattgatgttcaggatgggcaatccggtaaagcgccttttattattacgcctccgctgtatcggctggatggcgggcaaaaaaaccttgagcgtattgtcatgacaggctcgctgcctcaggggcaggagagtttattctggctgaacattaaagctattccatcagcctcaaagcagatgaactcgctgcaaattgccgtcaaaacgcggattaaacttatttatcggccagagagccttcgtgcgtctacccctgaggaacaaaccaacaaattaacctggcatcgtgcgggaaatgctctgcaggtaaataaccctacgccgtacgttatcaatttcaatgaaataacggtcgggggtaaaaaacttgacgatgtcacgtacgtaatgccttcaggctcagttcgtttcccgttaccgaatgggaccaatggcaatacgctgacgtttaaagtcattaacgattatggcaatcctggcgaattacaccgggccagtttgtga

SEQ ID NO: 526689 - DNA, 2544 bp, Stenotrophomonas maltophilia
atgacaacggcatttaatacagtgcagcctgcgcgcctggcaatattcattgccctcgcgcttgcgggtttctctcccacgctgtatgccagtgagacgtttaatacggaactggtagaactggataatcccggaatgggaaaagcggatttatctgcctttgaatccggctcgcaggcacccgggacgtaccacgtggatattattcttgacgagcggctgctggaaacgcgggatattcgtttcatggcagtgaaggatgctaacggcagtgaaacgttgcagccgtgcctgagtatcaggcagttaaaagcgtggggcgtgaaaacggcgcttttcccgcagctcgacgccgggcaaggagaatgcgccgatctcaaggcgattccacaggccagcgcggacttccagtttggcgcccagcgtctggcaatcagcatcccacaggcggccatagatctgccagcgagaggttacgttccgccggagatgtgggatgaaggcattaccgcggccatgctcaactacagcctgagcggcgcgaacagccgggcaagaagcggggcaggcatccgcagcgacagtcagtatgcaaacctgcgaccggggatcaacgtcggtccctggcggttacgcaactacaccacctggtcccgcgatgcgtccggccaggataagtgggacaatgtctataccttgatgcagcgcgcgattattcccctgcaagcccagcttacgctcggagacagttccgcccctgccgatgtctttgacagcatgccttttcgcggcgtccagctggcgtccgacgacgacatgctaccggattccctgaaaggctatgcgccggtggtgcgcggtattgcgcgaactaacgcgcaggtcgtggtgcgtcagaatggctatcaaatctaccaaagctatgtggcgccgggcgcgtttgagatcgcggatatgtatcccaccggcggcgcgggcgatcttgatgtcacgatcgtcgaagctgatggcagtgagcaacatttcaccctgccgtacgcttcgctgccggtcctgcaacgggaggggcgcctgaaatatgcccttaccgccgggcagtatcgatcgtataaccgtagcgtggagaaaacccccttcgggcaactgaccggaatctacggcctcccttacggcctcacgctctatggcggcgttcagggggcagataagtaccagtcggcggctctgggggtgggcaagaacatgggcgatttcggggcgatatccgcagacctcacccagggctggtcaacgccggagcatgccgcgaaaacaagcggtcagtcgtggcgggcccgatacagcaagaattttattaataccgggacgaacttttcgattgccgggtatcgctactcgacccgcggctattacgggatgcaggaggtcctcgattcgtacggcgacagcagcgcgcttcaggacaggcgacgtaaccgtgccgagctgacaatgagccagacgctgggggacaacctgggcgcgcttaccctcagtgcggcgcaggaagattactggaatgacggtaagtcgatggcttcgtggagcgtcggctatagcaactactggcacaacatcagctatggcctgacatggacctacagcaaaaatgtccgctcagcgtcagaaacccgcgacaaccaaaaaaacgctgatcacgaccagcttctggcgttcaacatcagcattccgctggataaatttttgccgcagacatgggcgaactatggcatgaacgccagcaggaataacgggacgacacacagcatcggtctgaacggggtggcactcgaaaaccgagccctgaactggaacgcgcagcagggatacggcacagagggcgtgggctataccggcagcgttaacgcggactatagaggcacctatggcgaagccacggcggggtatggttatgacaaaaacagtgaacgcctgaattacgggctacaaggcggcattctcgcccatgctgatggcatcacgctttctcagccgctgggggagaccaacgccttaattaaagcccctggcgcccacggcgtggatatccgcaatcagcccggtgtacggacagatgttcgcggttatacggtcgtgagcaacctttcggtctaccgaaaaaacgatctcactctcgatccggaaaatatgccggaggatgtcgaactggagatcaacacccgcacggtgacgccgacgcggggagcggtggtgagagcccattatttgccgaagtcaggtcgccgggtgctgatgaccttgaccgacaacgaacgcgccgttccgtttggggcggtggtcacccttgtcggtgatgagagcagcagttttattgtgggcgatcgcggtcaggtttatttaaccggtatgcgcgaggaggggacgttagtcgcgacatgggggagtcagtccagccagcaatgccgcgctgatttcagcctgccgacacactcaacattcggtgggatcgctgacatgcgcgcctcctgccgtcaggaacgttaa

SEQ ID NO: 526690 - DNA, 948 bp, Stenotrophomonas maltophilia
atgaaatggcttatcgtgattttgcttctctgtttgctcgcggcgggaaacctcgcccgtgccggtacgtgcaccaccatcacgccgcagctgtcaaccctgtccgtggggacgattaacgtgcagcgtgatgcgcctgtcggcacggtggtcttttccggcgcggcgacagccaccggttcctatcttactggatgtgctaatccgctgatgctgggattcagcatgcgctacaacagcgccacgttgagcagctacggcaatcatgtttacaacactaacgtcagcgggataggcatacgcttttcctccaacgcctattttgaaaacccgagcaatacgttctcgtacaatgcgcagacctcctatgtcgactggtatggcgggaggattgagctggtggtgactggcccggtctcatcgggggcgttaaccccgggggcgatcggcgtcgtgacgcttcaggggagcgacggcatctatcgtgacggcctgaccacgcagctcaccgccggaaccattaatgccatggcgtgcacggtgaatacgtcacagctgacgtttccgatcggggatatccccgcctcggcgttcggcaccgtggtgggcaccacgccagcgggagcacaaaacacgcaaaacctgggcttaacctgcgccgccggaaccaatattacggtctcgctcagtggaatacagaatccggacagcgccaataccagcgtgatggccttaaccgggcagggaaatgccggcaccgcaaaaggggttggggtgcagcttatctataacggtgtgccgctggtgatgaacagccgactattcttgcggcagtctgccggcgggcaagagacattgccgttaacggcccgatattaccagacgttgaaccgcgtggagtcaggttcagcaaatgcctccgccacccttaatttgacctatcagtag

SEQ ID NO: 526691 - DNA, 513 bp, Stenotrophomonas maltophilia
atgaaaataatatacgggacactgctgttactggctttactcagcgggaaggctttcaccgctgatagcgtcaacatcggtgtgacgggaaatatcgttgcgtcgccgtgcatatttaatggcgggagtaacagcctcgatgtcaatctgggcaatattcaggcaaccaatatggcgacgccgggctcaacatcggatccggtgccatttagtctgctgttcacccagtgcccaacgggaacgcaaagtgtgaccgtctcttttaccggcagccccgatcccgcggcgggcgcggactattttatgaacagcggttcggccacgcacgtggcgatagccatgcgcgatgcccaaacgggtacgcttaaaggaacaggctctggcatgactcaaactattggtgccgacagaaccgcgacaatggctatgcaggcctcggttaaatccgtgtcgggtggcgtcacgccgggaagcatcagtgcagttgtggtgatgacgatgcagtacaactga

SEQ ID NO: 526692 - DNA, 654 bp, Stenotrophomonas maltophilia
atgttaaatattctgattcaggaaaccgatctattttttcaggctgggctacatgaatttttcgaggatttttttaaacataactttcatcgtgccatcacatttaacctggcgctgacccatgaaaacgtcagtcaggccgatattattgtcctgtcattatgccagggtgaaacactgacctgttttcccgagttactcgcccggcaaaaagggattgtgctagggtttgtcgacgatgaactgcgcttttcggcgttgccctcctgctttcaggacattatttttctccctcgccgtgcatcgcttgatcgtatcagtggcgtactgtttatcgcgtggttcaggacgcaattaccgggttacacatggactaaacataactgcttcgactgccagcataaagggttatcccggcaacaaattcgtattctggtcaatttttaccgagggctgtcggtagtgcagaccgctcaggcgctggagatgagtcagaaaacggtctttacccataaatatatgctgatgcaaaaatttaatctgcgaagcgattacgagctgatcgtactgttgagaaggttgatggagaaaaagagccgtccgaacctgcttcgcgattacctggaaaataattatgcagaacagatagcgtaa

SEQ ID NO: 526693 - DNA, 2151 bp, Stenotrophomonas maltophilia
atgaaaaaaatcgccagcgtctgcccttactgcggtgcaggctgcaaactaaacctcgtcgttaaaaataaccggattatccgtgccgaagccgctgatggcgtaaccaatcagggcacgctttgcctgaaaggattctacggctgggactttcttaacgacacacggctgcttaccccccgtctgacgcagcccatgatccgctacagcaaaggcgagtcctttacccctgttacctgggaagaggccattcgctatactgctcacaggcttaaaagcatcaaagatcagtacggccctcgatccattatgaccacggggtcctcgcggggaacgggcaatgagaccaactatgtgatgcaaaaatttgcccgtgcggtgctgaacactaacaacgtcgactgctgcgcccgcgtctgtcacggtccgtccgttgccggtttacaggagaccctcggcaacggtgccatgagcaattccattaacgatattgaaaactcaaaatgcctgctggtgttcggctataactgcgccgactctcaccccatcgtcgcccgacgcgtgcttaaagcacgtgaaaatggcgcaaaaatcatcgtctgcgatccgcgtcatattgaaacggcacgcattgccgatcttcatcttcagttgaaaaacggcagtaacatggcgctggtcaatgcctttggctatgtcctgcttgaagaggaactgtacgacaaaaactacgttgcccgcttcacagaagggcttgaggcttaccgactgacggtaaaagattacgcacccgagcaggttgaacatctgacgggcattcccgcgcgggatgttcgtcaggcaatgcgcatgttcgcggcggcgccttcagcaacggtaatgtggggaatgggcgttacgcagtttggtcaggcggttgatgtggtgaaaggtctctccagcctggcgctgctcaccggcaacctgggccgccctgccgtcggcgtaggtccggttcgcgggcaaaataacgttcagggtgcctgcgatatgggcgttttgcccaatatgttccccggctaccaggatgtcactgacccggcagtcagactgaaatttgccgatgcgtggaaaatcaatgtcagccggatggacgatcgcgtcgggacgcgtatcaccgaagtgccgcatctcgcgctggaaggtaagatcaaagcctattacatcatgggggaagatccgcttcagacagaagccgatctgggcctggtccgccgcggctttgagtccctcgattttgtggtggttcaggacatctttatgaccaaaacggcagaggtggctgacgtactgctccctgccacgtcatggggagaacatgctggcgtgttcacctgtgccgatcgcggcttccagcgttttggcaaggccattgaggccagcggcaacgtcaagcgcgactgggagatcatcagcctgctggccacggagatgggctatcccatgcattacgagaataaccagcagatctgggacgaaatgcgcgagctgtgccccctcttctacggcgtgacttacgaaaaaatgggcgagatgggccatgtccagtggccctgcccaacccttgatcatcccggcacaccctatctgtacagggataatcagttcgacacccccactggcaaaggccagctgtttgctgccccctggcgcgctccggccgagacaccggatacggattacccgctggtactttgcacggtgcgcgaagtcggtcactactcctgtcgctcaatgaccgggaactgcgcggcgctgcaaagcctggccgacgagccgggccgggtgcaaatgaacccggccgacgcggatgagcgtgggatcgccgacggccaattggtctgggtacgttcacgccggggtaaagtgatcacgcgcgccagcatcagcgagcgcatcaatgcgggagcaatctatatgacctaccagtggtggattggcgcctgtaatgagctgacgcaggataatctagacccgatctccagaacgcctgaaacgaaatattgcgccgtgcagatggaggcgatcgaggaccagcgctgggcggaggattttgcggcttctgcataccagaccatgaagacgcggttgatcgctgcggttaacgtttaa

SEQ ID NO: 526694 - DNA, 279 bp, Stenotrophomonas maltophilia
atgagacaaaatattcagcttcaacccgaataccactccgcctttttagatagcgcgttgtcggagtatttccgtcacgcaggcgatcgctttgctgaagagtctgccattttttcgactgcggttcgttgtgttctcgcttctgaaggtcatctgaccaacaaagcgatcattctctggctgatccagacgctggaaaccaccgacgatgtcgttaaggcagatgtgatccgcaagacgctggaaattgttgtcggttataccatggacgatctttaa

SEQ ID NO: 526695 - DNA, 294 bp, Stenotrophomonas maltophilia
atggccggaagtgtgacctggcgtagcaaatacggaaaactcgcacccgagtatgaagatactttcgccttcttcgacaacttgcgtcgtacccttatcctgtgtctctgctggtccgtagacgggaatatggggatagcgcgcaaggagatcgggaacaccgccgacatgatcgtgatggtgatgggtaaggaggatcgcttcaggctgccagtcgttttcttctatcgcgtgcaggatcggtacggattcgccgggatcaacaatgatgcatctgcgatcgtcatcgactaa

SEQ ID NO: 526696 - DNA, 717 bp, Stenotrophomonas maltophilia
atgaaaccggcaaggatacctcagactgtcgcaccaccggaacgttgggcagagttgccctggggtgaatattatcgcgaggccttagaacttcagcttaaaccctggctcgcgaaaatgtatggttttcacctgcttaagattggcaatctgagcgcagaaatcaataccgaaagctgcgctatctcgcatcaggttagcgtatcgcttaatggctccccggttcaggtgaaggctgatccgctgcatttgccgtttgcggaaaaatccattgatgcctgtctgctcgctcacacgctgccctggtgcagcgatccccatcgtctgctgcgggaagccgaccgcgttttgattgatgacggctggctgatcctgagcggttttaatccgctgagtctgatcgggctacgtaaactgacgcccgttctgcgccgcacgccgccatataacagcaggatgtttaccatgatgcgccagctggactggctttcactgttaaatttcgaagtgctgagctacgggggttttcaggtcatcccctggacgcgtaaaggcggggtcttattaagtacccatttacccgcgctgggctgcatgcaatttattgtcgcgcgtaagaggacgatcccacttacgctcaacccaatgaagcaaagcaaatcaaaaacgcggatccgccagaccgtgggtgccacgcggcagtacaaaaaaccgtga

SEQ ID NO: 526697 - DNA, 468 bp, Stenotrophomonas maltophilia
atgcgtaaacaggtagaaattttcaccgatggatcttgtctcggtaacccagggcccggtggttatggcgccattatgcgttatcgtgagcatgaaaaaacctttagtgaaggctattttctcaccaccaacaaccgcatggagctgatggcggccatcgtggcgctggaagccttaaaagaacattgtgacgtggtgctgagtaccgacagccagtatgttcgccagggcattacccaatggatccacaactggaaaaagcgcggctggaaaacggcagagaaaaaacccgtcaagaatgtcgatctctggaagcgtcttgatgccgccctcggtcagcacgaaatcaaatgggagtgggtaaaggggcacgccggtcaccctgaaaacgaacgctgtgacgagctggctcgcgcggcggcatcaaacccaacccatgaggatgcaggttatcaacctgaatcctga

SEQ ID NO: 526698 - DNA, 627 bp, Stenotrophomonas maltophilia
atgaccgctatgagcactgcaattactcgccagattgttcttgataccgaaaccaccggtatgaaccagattggcgcccactacgaagggcacaaaatcattgagattggtgccgttgaagtagtgaaccgtcgtcttacgggcaacaacttccacgtttacctcaaacccgatcggctggtggatccggaagcgttcggcgttcacgggattgccgatgagtttttgctggatctcaaccgcgatattccaaagaccaatacgttctgtaaagtcacggatagcctggcgctggcaaggaagatgttccccggcaagcgtaacagccttgatgccctgtgctctcgctatgagatagacaacaccaagcgtaccctgcacggcgcattgctcgatgcccagatcctggccgatgtatacctgaccatgaccggcgggcaaacgtcgataaaattcagtatggaaaatgaatcccagcagacgcgggatgaaggcggcattcagcgtgtcgtgcgccaggctaatcgcctgcgggttgttttagccagtgatgaagagctaatgaaccacgaatctcgcctcgatttagtgcagaagaagggcggaagctgtctgtggcgtggatga

SEQ ID NO: 526699 - DNA, 804 bp, Stenotrophomonas maltophilia
atgactatccctgcactgggtctgggcacttttcgcctgaaggacgacgttgttatcgcatctgttaaaaccgcactcgagttgggctatcgcgctattgatacggcgcagatttatgacaacgaagctgccgtaggtcaggctatcgaggagagcggcgtaccgcgccatgagcttttcatcaccaccaaaatctggattgagaacctcagcaaagacaaactgatcctaagcctgaaggaaagtctgaaaaagctgcgtactgattatattgatctgacgctgatccactggccatcacctggcgatgccgtctctgtagaggagttcatgcaggcgctgctggaagcaaaagagcaaggcttgacgcgtgaaattggtatctcgaatttcactatcccattgatggaaaaagccattgccgcagtgggtaaagagaatattgctactaaccagattgaactctctccttacctgcaaaaccgcaaagttgtggactgggcgaaacagcatggcattcacatcacctcgtacatgacgctggcatatggtaaggccctgaaagatgaagtgattgcacgcatcgctgaaaaacacaatgcaacagctgcacaggtgatcctggcatgggcgataggtgaaggatatgccgtgatcccgtcttcaaccaaacgtgaaaacctggcaagtaacctgttagcgtgggatctccagctcgatgatgaagataaaaaagcgatcgctgcactggaatgcaacgatcgtctggtcagtcccgaagggttagcacctaactgggattag

SEQ ID NO: 526700 - DNA, 906 bp, Stenotrophomonas maltophilia
atgaaagccacatcggaagaactgactgtcttcgttgccgttgttgaaagcggcagcttcagccgtgctgccgaacagctcggacaggcgaactccgccatcagccgctcgctgaaaaagctggagatgaagctcggggtgagtctgctcaacagaacaacgcggcagctcagcctgacggaagaaggtgaacgttattttcgacgcgtgcagtccgttttgcaggagatggcggcagcagaaacggaaatcatggaatcacgcagcacgccgcgtgggctgctgcgcatagatgcggcgacgccggtcgtgctgcatttcctgatgccgttgattaaacccttccgcgaacgctacccggagatgaccctgtctctggtctcttctgagacgtttattaacctgattgagcgtaaagttgatgtggcgatccgcgcgggaaccctgacggattcaagtttacgcgctcgccctctgttcaccagctaccgcaaaattatcgcgtcaccgcaatatattgcagagcatggcaaacctgagaccgttgaggagctgaagcagcacctgtgcctgggctttacggaacctgtctcgctgaacacctggcccgtggcctgtcatgacggacaacttcatgagatcacctgcggactttcgtctaatagcggggaaacgctgaaacagctatgtcttgaaggaaacgggatcgcctgtttatcagactatatgattgataaggaaattgccgcgggccagctagttgagctaatggctgacaaacgcttacctgtagagatgccttttagcgcggtgtattacagtgacagagcagtaagtacgcgcatacgcgcatttatcgacttccttagtgagcatataaaaacagctcccggaggagctgtatga

SEQ ID NO: 526701 - DNA, 1176 bp, Stenotrophomonas maltophilia
atgccactggcgcttcttgccctgacgatcagtgccttcgcaattggcacgaccgaatttgttattgtaggacttgttcctaccattgctgaacaactcgctatctcgctgccttctgccgggctgctggtatctatttacgcgttaggcgtcgctgttggggcgcctgtgctgaccgcactgactggacgctttccacgtaaacaactgttagttgccctgatggtgctcttcaccgccggcaatattctggcgtggcagtcaccggattactccacgctggtcattgcccgcctgctgacaggcctcgcgcacggtgtcttcttctccatcggttccacgattgcaaccagtctggtgccaaaagagaaagcggcgtcagccattgcgattatgtttggtggcttaaccgtcgcgctggtcaccggcgtgccgttaggaacgtttatcggacaacattttggctggcgtgaaaccttcctcgcggtatcgctgttgggcgtgattgctctggtagccagcctgctgctggtgccctccagtattccggggcgcgcgagcgtcagcctgagcgatcaggttaaagttctgacacacccgcgcctgctgctgatctatgccgttacggccctgggttatggaggtgtgttcactgccttcaccttccttgcaccgatgatgcaggaactggctggtttttctccgggcgcggtgagctggattttactgggctacggtatctccgtcgcaatcggcaatatctggggcggcaagcttgcggataagcatggtgcggtaccggcgctgaaattcatcttcgccgccctggttgccctgctgatgattttccagttcaccgcatcgatgcaatacgccgcgctggtaacggtgttggttatggggatattcgcttttggtaacgtgccgggattgcaggtatatgttgtgcagaaagccgaacgttatacgcctaatgcggtggatgtcgcatctgggctgaatatcgccgcatttaatatcggtatcgcactcggttcggttatcggtgggcaggtggttgaacatgttggattaacccaaacgccatggattggtgcggtaattgtgcttatcgctttcctccttattggtctcagtggacggcttgataaacccgctcgcgtcgcacttggataa

SEQ ID NO: 526702 - DNA, 744 bp, Stenotrophomonas maltophilia
atgttgccggaatgcctgcggagccttagccaggcattaccagcgggcactccattaagcagtgacgaaaaaattcgcgtactggtgtggaacatctttaagcaacagcgtgcggagtggttatccgtacttcaaaattttggtaaagatgcgcatctggttctgttacaggaggcgcaaaccacgcctgaactggtcaggtttgcaacgacgaactatcttgcagccgatcaggtgcctgcctttgttctgccacagcatccttccggggtgatgaccctttcagccgcacatccggtctattgctgcccgctgcgtgaacgtgagccgatcctgcgtctggcaaaatcagcgctggtcacggtctatccgttgcccgacacccgcctgctgatggtggtaaacattcatgcggtgaacttcagcctgggtgttgatgtgtacagtaagcagttacttcccatcggcgatcagattgctcatcacagtgggccgatcattatggccggggacttcaatgcctggagccgtccgcgtatgaacgcgttgtaccgcttcgcgcgtgaaatgtcgctgcgtgaagttcgttttaacgatgaccagcgcaagaaagcgtttggtcgtcctctcgattttgtcttctatcggggtttaggcgtgcacgacgcctccgttctggtgacgcgcgcctccgatcataatcctctactagtcgaattcagtcccggcaaacctgataaataa

SEQ ID NO: 526703 - DNA, 774 bp, Stenotrophomonas maltophilia
atgacaacaacacactcccatcatgacaacgtcgaaaaacagtttggttctcaggcaagtgcctacctgagcagtgccgtacatgcctctggccgcgatctggtacgtctcggcgaacggctcgccgcgtttcctgacgcgcacgtgctggacttaggctgcggggcggggcatgccagttttaccgccgcacagcaggttgctcaggtgacggcgtatgacttatcgagccagatgctggatgtggttgctgaagcggcgaaagcgaaagggctgaataacgtcacgacgcgacagggctacgctgaatctttaccctttgaggatgcatcctttgaggctgtgattagccgttactctgcacaccactggcatgatgtggggcaggcattacgggaagtgaaacgcgtgctcaaaccgggtggaatattcatcatcatggacgtgatgtctcccgggcatccggtacggaatatctggctccagacggttgaagcgctgcgtgatacctcgcacgtgcaaaactactccagtggagagtggcttacgtttatcaccgaagctggcttgatttcacgctcattgataaccgaccgtttgtcgctggagttcacgtcatggattgcacggatgcgcacaccggaggcattaactcaggcgatccgattgtatcaggagagtgcctctgctgatgtcaaggcgtactttgaattgcatgacgatggttcgtttaccagcgacaccattatggctgaagcgcaaaaagcgggataa

SEQ ID NO: 526704 - DNA, 1185 bp, Stenotrophomonas maltophilia
ttgtgggcctctattggcgacgagctaaagatgggaattccggaaaacagccggattcgcgaacagaaacagaagtatttgagaaataagagctatctccacgatgtaacattacgggcagagccgtatatgtactggatagcagggcaagttaagaaacgtaacatgcctatggaactggtactactacccatagtggagagcgcttttgacccgcacgcgacgtctggcgccaatgcagcaggcatctggcagatcattccgagcacagggcgaaattatggtttaaagcagacccgcaactacgatgcgcgtcgtgatgttgtcgcttcaacgacagccgctctcgacatgatgcaacgtctgaacaagatgtttgacggcgactggttattgactgtcgcggcgtataacagtggtgaaggtcgtgtactgaaggcaatgaaagcgaataaagcgcgtggaaaatccacagacttctggtcgctctcactgccacaggaaacaaagatttacgtaccgaaaatgctggcactgagtgacattctcaagaacagcaaacgttacggtgtacaactgccaacaccagacgaaagtcgtgcactggcgcgtgtccgcctcagcagccctgttgatattcaacaggttgctgatatgacgggtatgtcggtaagtaagcttaaaacctttaatgcaggtgttaaaggctccacgctgggtgcaagcggcccgcgctatgtgatggttccgcagaaacacgcggagcagttacgtgagtctttagcttcgggtgaaattgcagccgttcagtctacgctgattgctgatacgtcgcctgtaagcagccgcagctataaggtgcgttcaggtgatacgctttcaggtattgcatcacgtcttggcgtgaatacgaaagatctccagcagtggaataatctgcgcggatccggtctgaaagtgggtcaaacgctgaccgtaggtgcaggtagcagcgcacagcgtctcgctaaaaacagcgatagcattacctatcgcgtacgtaaaggcgactcgctgtccagtattgctaagcgtcacggcgtaaacatcaaagatgtgatgcgctggaacaacgatactgacaacctgcaacctggcgaccagctgacgttgtttgtgaaaaacagcgctacgccagattcctga

SEQ ID NO: 526705 - DNA, 357 bp, Stenotrophomonas maltophilia
atgcttatggcgacgaaacatcactcagaggctctgtcaccgttttcgcagcgcgtatacatgctgtccgttgcccatcgcgaccctaagcaagcggctgcgctgatttcagcctgtcatcctgaagcaggaaagccccttccgctgctcgacttctccggctggccgcacgtgcgctacgccacgtcgggtgaattacagacgcccgagactgaagaatattttcacaggatttcgtctgccgccacgatattacgcggtgcaattattgacgctgagcagcagaaaaacacgccagcattttatattctggataaggtactcagcctgggtgatgctgccaacttactgatttag

SEQ ID NO: 526706 - DNA, 705 bp, Stenotrophomonas maltophilia
atgcttcaatttcataatgtggacgttttttacggggtgatccaggcgttgaagcaggtttcacttgaggtaaacaaaggggaaaccgtggccctgattggcgctaacggcgcggggaagtcaacattactgatgtctgtctttggtcagccccggatccgcaacgggcagatcctcttctgcggcgaggatatcagccacaaatccacccactatgttgccaccggcggcatctcgcaggcacctgagggacgacgcattttcccggatatgtctgtagaagagaacctgctgatggggacaatccccgtcggcaatcagcatgcagctgaagatatgcaaagtatgttcgacctcttccctcgcctcaaggagcggcgtaaccagcgggcgatgacgctttccggcggtgaacagcagatgctggctattgcccgggcgctgatgagccgtcctaaacttctgctgctggatgaacccagcctcggcctcgcacccatcgtggttaaacagatcttccatacgctgcgcgaactggcccgtaacggaatgacgatttttctggtcgagcagaatgcccaccacgcgctgaaattgtccgaccgcggctatgtgatggttaacggccagattcggttaagcggcagcggcgaggcgttgctgaaggatccggaggtgaggaaggcgtacctgggcggcgtgtga

SEQ ID NO: 526707 - DNA, 876 bp, Stenotrophomonas maltophilia
atgaacgcaacgattttgcgtgtagaacatctgatgatgcacttcggcgggatcaaggccttaaacgacgtcaatcttgaggtgcagcgcggctctattactgcactcattgggcctaacggcgcgggaaaaacaaccgtctttaactgcctgaccggtttctaccgggcctccggcggcaacattctgttcaatgcacgaaataaaactaccaatgtcattcaggtgctcggccagaaactccagccgggcgactggctcagcccggcgcagcttggtcaacgcctgttctataagatgtttggcggcacgcatctggtgaaccgcgcgggtcttgcgcgcacgtttcagaacatccgcctgttccgcgagatgtccgttgtggaaaacctgctggtggcacagcacatgcgcgtcaatcgcaatctgctggcgggggtgctgaacacccctgcgtatcgtcgggcagagaacgaggcgctggaccgggcgttttactggctggaggtggtggatctggtagattgcgcgaaccgtctggccggggaaatgtcctatggccagcaacgacgcctcgaaatcgcccgcgccatgtgcaccggcccggagatgatttgtctcgatgaacctgctgccggtctgaacccggtggagacgcacaagctgagcgagatcatccggttcctgcgcgaccaccacgacatcacggttttgctgatcgagcatgatatggggatggtgatgggcatttcagatgacatcattgtgctcgatcacggcgatgtgattgccagaggtaaaccggctgagatccagcacaatgaaaaagtgattgccgcgtatctgggcaccgacgaaagcgaggtaaatctgtga

SEQ ID NO: 526708 - DNA, 1275 bp, Stenotrophomonas maltophilia
atgacctctgacggcttttccctgaagcgctgcattctggacgcgattttttccggaatgatcgccctgattattttcggcccgattgcgggcgtgatactggatggttacagctttaactttgacggccagcggctggcgtggattgtaggcacggtgatgctgggacgctttttgctgagcgccttttcagctacggcggccggaagacgtttacaggcgcggtttgaatccgacaatgcgggggtgtatgtccggccaccggcgtataaaagccgcatgcgctggatcattccgctgattgtcacgctggcgatctgcttcccgtttgtggccacaaaatacgttctgacggtcgctatactcggactgatctacgtcctgctcggtcttgggctgaacattgtcgttggcctggcagggctgctggatctgggttatgtcgccttctatgccatcggcgcttacgggctggcgctcgggtatcagtatctggggcttgggttctggagcatgctgccgctggcggcgctaatggctgcgggcgcgggcgccctgctcggctttccggtgctgcgcatgcacggggattatctcgccatcgtcacgctcgggtttggcgagatcatccgtctggtgctgaacaactggcttaccttcaccggcgggcctaacggcgtttcagcccctgctccgaccttttttggcctggagtttggccgacgcgccaaagaaggtggcatccctttccacgagttcttcggcctgacctataactccaacatgaagtttattttcatctatgcagtactgttcctggtagtcatgctggtgctgtacattaaacaccggctgacccgaatgcccattggacgcgcgtgggaagcgctccgtgaggatgagattgcctgccgttccatggggctgaatcacgttctggtcaaactctcggccttcaccctgggcgcatcgacggcaggtatcgccggggtgttttttgccacctggcaggggtttgttaaccccacctctttcaccttttttgaatcggccctcatcctcgcgattgtggtcctgggcgggatgggctccaccgtcggcgtcgtactggccgcctttgtgctgaccgtcacgccggaactgctgcgcagctttgcggaataccgcgtgctactgtttggcatgctgatggtggtgatgatgatctggcgtcctcgcggtctgatccgcatcaaccgcagcggatttgccgtgcgtaaaggagtggcgccatga

SEQ ID NO: 526709 - DNA, 915 bp, Stenotrophomonas maltophilia
atgagtacattcttcctgcaacaattaattaatggcttaacgctgggttcggtctatggtcttatcgccatcggctacaccatggtgtacggcatcatcggtatgatcaatttcgcccacggcgaagtgtatatgatctccgcctatctctcggccattggcctggccctgctggcgttttttggactccactcctttccgctgctgatcctgggaaccctggttttcaccatcgtggtcaccggcgtttatggctggacgattgagcgcatcgcctataagccgctacgcaattcgacgcgtctggcgccgctgatttcggccatcgggatgtcgttgatactgcaaaactacgtccagctcagccagggcccacggcagcagggcgtaccgaccatgctggatggcgtgctgcgttttcacctcggcgaagggtttgtccagataacctataccaaagtctttattctcatcgcctcgttcgcgggcatgctggtgctgacctggattatcaaccgtacccgcttagggcgcatgtgccgtgcggtgcagcaggatcgtaagatggcctccattttgggtatcaacaccgacagaattatttcgctggtgtttgttatcggcgcagccatggccgggctggcgggcgtgctgatcaccatgaattacggcacctttgatttttacgtcgggttcgttatcggcatcaaggcctttacggcggcggtgctgggcggcatcggctctctgcccggtgcgatgcttggcgggctgattctgggcgtcgcagaagcgcaattctccgggatggtgaactcggattataaagacgtgttctcgtttggattgctggtattaatcctgatcttccgtcctcaggggctgctgggccgccctgtcgtggctaaagtgtaa

SEQ ID NO: 526710 - DNA, 1122 bp, Stenotrophomonas maltophilia
atgtcgctgaaatttaccaaaactcccctctccctgttgctggccggttgtctggtgacggccttttctgcacaggccgatatcgtgatcggcgtggccgggccgttcacaggcccgaacgcaacctatggcgatcaatactggcatggcgctacgcaggcggcggaagacattaacgccgctggcgggatcaacggtgagaaaatcaaactggttcagggcgatgacgcctgcgaacccaaacaggccgttgccgtcgccaaccgcttagtcgatcaggataaagtgaaagcggtcgtcggccacttctgctcctcgtcgaccatgcccgcctccgaggtctatagcgatgccgggatcctctccatcacccccggctcaacgaacccgcttattaccgagcggggcatgagcgatatgttccgcatgtgcggacgtgacgaccagcagggccaggtcgccagcgattttattcttgataagcttaaagccaaacgggtcgtcatcatccacgataaagacacctacggtcaggggctggcggacgccactaaagcggcgctggcgaaacgcggcgttaaggaagtgatgtacgaagggttgtcccgcggggagaaagactttaacgcgctggtgaccaaaattggcgcacaaaaaccagacgtggtgttcttcggtggctgtcacccggaagcgggcccgctggttcgccagatgcgtgaacagggcgtgcaggcgaagttcttctcgggagactgtatcgtcaatgaagagatggtcaccgccgccggtggggcgcagtacaccaacggtatttacatgaccttcggtaaagacccgcgcctgatcccggacggaaaagccgtcatcgagaaattccgcgccggtaaatttgaaccagaaggatacaccctctacgcctatgcgtctgtgcaggctatcgcagcggcattcaaggccacgaaagggacggattccgcaaaagccagcgagtggctgaaggccaaccctgtcgacacggtgatgggtaaaaaagcctgggacagcaaaggtgacctcaaagtgtctgactacgtggtctaccagtgggacgacaaaggcaaatataaagaagtgccataa

SEQ ID NO: 526711 - DNA, 669 bp, Stenotrophomonas maltophilia
atggctgaaggcccattaaatgaaagcgagatggcgtggctggaagagacattaatctcttacggacacgacgatgcatccgtgattgacgtgtccgaactggacggcatgcttaccgcagtactttccggtcccgttgtggtggagcccgacacctggctggtggcggtatggggtggcgagaagtatattccgcgctggaaaaacgatcgtgagatgaaccgttttatcgatctctgctttaagcacatgaacgatattgccgagcgcctgagcgaatacccggatcagtttgaaccgctgtttggctataacgacgttgacggtcagagctataccgtagtggaagagtggtgctatggctacatgcgcggcgtggcgctgacggactggtcatccctgccggaagcgctggaagcggatctggcggtgattgccctgcacggaacggaagagaacagcgagaagctggaagcgctgaccgaagaggagtatatggccagcatcgagagcattcagcctgcggcgctgcgtttgtacaactactgggtggctaatccgcagcagccggaagcgaaaaagccgatcgtgaacgggtcgaaggtgggacgtaacgatccgtgtccgtgcgggagcgggaagaagtttaagagttgctgtctgcactga

SEQ ID NO: 526712 - DNA, 1143 bp, Stenotrophomonas maltophilia
atgccgttggctgccgccggcgtcgggtttggggttaccgtagtgctgctgggcggtctttgggccctgatgtgttacaccgcgctattattgctggaggtttatcaacatgtccctgccgataccggcttaggctccctggctgcacgctatcttggacgctacgggcagtggatcaccggtttcagcatgatgttcctgatgtacgcgctgaccgccgcctacatcagcggcgccggggagctaattgcgtcaagtatcaatgacggcttcggtgcgtcgctttcaccggaaacaggcgccattgtctttacgctgatcggtggcggcgtggtttgtgcgggcacgtcgctggtcgatctgtttaaccgttttttgttcagcgccaaaattctcttccttgttgtgatgctggtgctgctggcaccgcatgtgcacaaggttaacctgctctccctcccgctggagaaaggtctggcgctttcggccatcccggtgattttcacctctttcggttttcatggcagcgtgccgagcatcgtgagctatatgaacggggatattcgcaagctgcgccgcgtctttgtgatcggcagcgccattccgttgattgcttacctgttctggcagctggtgacgctgggcagtattgattccaccacctttatcggcctgatggcagagcattctggtctgaatggattcctggttgccctgcgtaacgtggtggcctcttcacacgtggagctggcggtacatctgtttgcagacctggcgctggcaacctccttcctcggcgtggcgcttggcctgtttgactatatggcggatctgttccagcgtcgcaataccgttgccggacgcttacagacgggggcgatgaccttcctgccgccgctggccttcgcgctcttttatccgcgcgggtttgtgatggcgctggggtatgctggcgtggcgttatcggtactggccctgctgctgccttccctgctggcgtggaagagccgccagcaacatccgcagcaaggataccgcgtggcgggtggtaagccgctgctgtgcgtggtgtttggttgtggggtggtaattattctggtgcaggtgctgattgcagcgggaatgctgccggaagtgggataa

SEQ ID NO: 526713 - DNA, 237 bp, Stenotrophomonas maltophilia
atgtcaattcacggacacgacgtgctgaatatgatgattgagtcaggtgagcgttatacgaaggagagtctggttgaggcgatacatgcccgctttggcgaagcggcgcgtttccatacctgttcagcttcggaaatgacagccgcggagctggtggcgtttatggcggcgcgcggaaaattcattccggcagcagacggattttccacgcacgaaagtaaaatttgccgtcattga

SEQ ID NO: 526714 - DNA, 498 bp, Stenotrophomonas maltophilia
atgttaaaaactgaaatgatcgacaagctcaatgcgcaaatgaatcttgagctattttcttccctgctttatcagcagatgagcgcctggtgcagctatcacagctttgaaggggctgccgccttcctgcgtcgtcatgcccaggaagagatgacgcacatgcagcgtctgtttgattacctgacggacaccggcagcctgccgcgcattgataacgtggtatcgcctttcgccgagtacggctctcttgatgaactgttccgtgccacctatgagcacgaacagctgatcacccagaaaataaatgaactggctcatgccgccatgaccaatcaggattatccaacctttaatttccttcagtggtatgtggctgaacagcacgaagaagagaagctgtttaaatccgtgctggataaattatctctggcaggtaaatccggggaaggtctgtacttcattgataaagagctgtcgacgctcgacacgcagaattaa

SEQ ID NO: 526715 - DNA, 678 bp, Stenotrophomonas maltophilia; identical to SEQ ID NO: 156633

SEQ ID NO: 526716 - DNA, 861 bp, Stenotrophomonas maltophilia; identical to SEQ ID NO: 166077

SEQ ID NO: 526717 - DNA, 924 bp, Stenotrophomonas maltophilia; identical to SEQ ID NO: 166076

SEQ ID NO: 526718 - DNA, 939 bp, Stenotrophomonas maltophilia
atggatattatcttctatcaccccacttttgatacggcttactggattaaggcgctcacggcggcactgcctggcgcacgcgttcgcgaatggaaacagggcgataatgaacatgccgactacgcgctggtctggcatcccccggtcgaaatgctacagggacgccgtttgaaggcggtgtttgctcttggtgcgggggtggattccattctcagtaagctgaaggctcaccctgaaatgctgccggaagatattcccctgtttcgtctggaagataccggtatgggggagcagatgcaggaatacgccgtaagccaggtgctgcactggttccgccgcttcgacgattatcaggcgtttaaacagcactcccactgggaaccgctcccggattatcagcgtgaagatttcaccatcggcatcctcggggcgggtgtgctgggttcgaaagtcgccgaagcgctcgctccgtggggcttcccactgcgctgctggagccggagccgtaaggattatccgggcgtcgagagctttgccggattggacgaactcccggcgttcctgaaagggacacgcgttctcattaacctgctgccgaatacggcggaaacggtcggcattatcaatggcacgctcctcaaccagttggcagaagatagctacttaatgaacctggcgcgcggggtacacgttgtggaagacgatctgctgaaagcgctggatagcggtaaactgaaaggcgcaatgctggatgtgtatagccgcgaaccgctgccgacagacagcccgctttgggcacatccacgcgtggcgatgacgccccatattgcggccgtgacgcgaccggcggaggccgtggcgtatatctcgcataccatcagcgaaatagagaagggcaatgcggtgaccggacaggtagacagacagcgaggctactga

SEQ ID NO: 526719 - DNA, 738 bp, Stenotrophomonas maltophilia
atgtatcccgttgacctgcatatgcacaccgtcgccagtacccacgcttacagtaacctccatgattatatcgctcaggcaaagctgaaaggcatcaaactgtttgcgataaccgatcacggtccggatatggcggatgcgccgcactactggcattttgtgaatatgcgtatctggccacgtctggttgacggtatcgggatactgcgcggcatcgaagcgaacatcaaaaataccgacggggaaattgactgcaccggcccgatgctgacctcgttagatctgatcctcgccggcttccacgagccggtctttgcgccccaggataaagagaccaacaccgcggcgatgattgccaccattgccagcggcaatgtgcacattatcagccacccgggaaatccgaaatacccgatcgatattcaggccgtggcacaggccgcagcgaagcaccgcgtggcgctggagatcaacaactcctcgttcgtgcattcgcgtaagggcagtgaggccaactgccgcgacgttgcggcggccgtgcgtgacgcgggcggaatggtggcgctgggctctgattcacacacggccttcacgctgggtgatttcagcgagtgcatgaaaatattgcgggacgtgaatttcccggaagaacagatcctgaacgtcacgccgcgtcgtatgctcgacttccttgagtcgcgcggcatggcgccgattgatgaatttgccgatctttaa

SEQ ID NO: 526720 - DNA, 555 bp, Stenotrophomonas maltophilia
atgaatgagttttccatcctttgccgcgtgctgggcaccttatattaccgccagccgcaggatccgctgctggttccgctgtttaccctgattcgtgaaggtaaactggcgcagagctggccgctggaacaggatgagttgctggaacgcttgcaaaaaagttgcgatatgcagcagatttcaacggattacaacgcgctgttcgtgggagaagagtgtcgcgtgtcgccgtatcgttctgcctggcaggaaggtgcgaccgaagcggaagttcgggcgtttctttcagaacgcggcatgccgctgacggatatgcctgccgatcatatcggtaccctgttgctggcggcctcatggattgaagataaagcaggtgatgatgagaatgaggcgattgaaaccctgttcgaaacgtatctgctgccgtgggtcggaaccttcctgggtaaagttgaagcccacgccacctctccgttctggagaacgctggctccgctgacgcgtgacgctatcgctgccatgtgggatgagctggaagaagagagtgaagagtga

SEQ ID NO: 526721 - DNA, 492 bp, Stenotrophomonas maltophilia
atgcgcaccatgaacatattactttgtattgcaatcacgactggcatcctctccggcctctggggttgggtggcggtatctctcggtttgttgagctgggccggttttcttggctgcacggcctatttcgcctgtccgcagggtggttttaaagggctctttatttcaggcagcacgttactgagtggcgtggtctgggcgctgatcattatgaagggcagcgcgctggcgccgcatgtggaaatcctggggtacgtcatgactggtattgtggctttcctgatgtgcgttcaggcaaaacatctgctgttgtcctttgtgcccggcacgttcatgggtgcctgcgcgacctttgcaggccagggggactggaagctggtggtcccttcgctcatgctgggattactgtttggctacgctatgaagaacagcggtctctggcttgcagcccgacgcgagaagagccagaacgttcctgtggtaggtaaataa

SEQ ID NO: 526722 - DNA, 834 bp, Stenotrophomonas maltophilia
atgcagcgcttttttattttagttgcagtgtgcttattaagcggttgtttaactgccccgccaaaagaagccgccaaacccaccctaatgccccgtgcccagagctatcgggatctgacgcatctgcccggccctaccgggaagatattcgtctcggtctataacattcaggatgagacgggccagttcaaaccgtatccggccagtaacttctccacggccgtaccgcagagcgccaccgcgatgctggttaccgccctgaaagattcgcgctggtttatcccgctggaacgccaggggctgcaaaacctgcttaacgaacgaaaaatcattcgtgctgcacaggagaatggtaccgttggcgtcaataaccgcatgccgctacagtctctcaccgcagccaatatcatggttgaaggctcgattatcggctacgaaagtaacgtgaaatcgggcggcgcgggtgcccgttactttggtatcggggccgacacgcagtatcagctggatcagattgccgtcaacctgcgcgtggttaacgtgagcacgggtgaaattttatcctccgtgaccaccagcaaaacgattctctcatatgaagtgcaggcgggggtattccgctttatcgactaccagcgtttgctggaggctgaaattggctatacctctaacgagccggtcatgctgtgtctgatgtcggccatcgaaaccggggtgattttcctgattaatgacggcatcgatcgcggcttgtgggatcttcagaataaaagtgacgtgagtaatgcggtgctggtgaaataccgtgagatgtcggttccgccggagtcatga

SEQ ID NO: 526723 - DNA, 417 bp, Stenotrophomonas maltophilia
atgcgtctcgcacacacagtgatttcgttaatgctcattgcgccgttgagttgggccggaaatatgacattccagttccgcaaccctaattttggcggcaacccgaataacggagcctttatgcttaaccaggcgcaggctcaaaactcctataaagaccccagctatgacgatgatttcggtatcgagaccccgtcagctctggataattttactcaggccatccagtcgcaaatattaggtggcttattaaccaacattaataccggaaaacccggccggatggtcactaatgactttatcgtcgatattgccaataaagacgggcagcttcagttaaatgtgacggaccgaaaaaccggtaagacgtcgacaatccaggtttccggtttgcagaccagttcaactgatttctaa

SEQ ID NO: 526724 - DNA, 390 bp, Stenotrophomonas maltophilia
atgaaacgcaccctaatttggattgccgccgcaggcattatgcttgctgccggaaaccttcaggctgttgaggtggaagttcctggactgttgaccgaccacaccgtcacctctgtcggacacgatttttatcgtgccttcagcgataagtgggaaagcgattatccgggtaatttaaccatcaacgaacggcccagtgcgcggtggggaagctggatcacaataaccgctaatcaggacgttatttaccagacttttttattcccaacgaaaagagacttcgatcagaacgtcgctttcgcactggcacaaacagaagaagctattaaccgcctacagttagataaagcccttttgagcacaggcgatttagcaaaagatgagttctag

SEQ ID NO: 526725 - DNA, 402 bp, Stenotrophomonas maltophilia
atgattaccacagtacaggccaaggaatatctggagtcagtcggtatcacgctgcctgatttcatcctgcaggctcttttagagcaggctggcagcattcaggagtgtctggatgcgcattaccctcccgcaaccgctctgctaatacagtcctacctgctggggctaatggcgctggggcagggtgacaagtacatcagttctcagacagggcccaacggcgcatcacgctcatttcggtacctgtcttttgctgaccgatggaaagcctctctggggcttctgaggggactagataagtatggatgcgctacaagcctgatcccgcctgatccgactaacaccgctttcgctggcatctggattgccaggggcggctgcatgcgcaacgggagtcgatga

SEQ ID NO: 526726 - DNA, 297 bp, Stenotrophomonas maltophilia
atggctgaaaaatacgaagtggttaagccgtggcacggcgttgcgcttggtgacgttgttgagctgggcaaagtacacccgtcacttaaatcgcatgtgcgcaagctgtccgataaagctgctgcggaactgctacctgcaactccgggtgctggcactgacaacaaagcgcgcaaagaggcagtcattgcccgactcgatgcgctgggcattgagcataaaggcaacctgggcctggagaagctcaccgagttgttgccggaaggtgagttcgaacagcttttccctgctgaataa

SEQ ID NO: 526727 - DNA, 1098 bp, Stenotrophomonas maltophilia
atgtattttaccgctgaaacactggctactaaccgccgactgcaagggcactggagtgagctgtgggccaatcgtgatatctataacgcccagcatgacatgatggtcaacgcgtaccgcacgcgcatgacgcatgaaatgctggcggcgaatgccatcggaggctttacgcgtgaattctgggccgaaattgaccgccagattatccagatgcgcgatcaggaaattggcatggaaatcgtcaatgacctgatgggtgtgcagaccgtgctgccgattgggaaaactgcaaagctgtataacgtctctggcgatatcgcggatgatgtgtctatcagcatcgatggtcaggcgtcttactctttcgataatactgagtttggttctgatggcgacccgatcccggtattcactgctggttacggcgttaactggcgccatgctgccggactgagcactgtcggcatcgatctggctctggagtctcagtcggccaagatgcgtaaattccacaagaagcgcgtagacttttacctgaatggcgctccaagcattgttgtggaaggtatgccggctcagggcatgaagaaccatcgcaacactcagaaaattaacctgggtagtggcgctggcggcgccaatatcaatctcaccaccgctacaccggctgagctactggcattctttggccctacaggtccatttggcctcactgcccgccgtaacaaggttacagcttacgacaagctgtgggtgagccctgaagtctgggccaacatggctaagccgtatctggtggatatcaacaccggcacaaatgcgctgcttagcggaaccgttctggatgcgatcagcaagtttattcctgctaagtctatccagatgacctatgcactggaaggtaacgagttcctggcgtacgagcgccgacaggatgtgatttctcctctggtaggtatggctgtgggcgttgtaccgctcccgcgcctgatgccgcagagcaactacaacttccagatcatgtccgcagaaggtttgcagatcaagaaggacggcgaaggcctgtccggtgtggtctacggcgctaacctggcttaa

SEQ ID NO: 526728 - DNA, 456 bp, Stenotrophomonas maltophilia
atggcacgttatcgtcgcgttaatatcgacggtcagtctctgtacaagaccgaaacccgcgttactgccgcatccttgctgcccggtaccgctgcagtcatcaatgacgacaatgagtttgcgcaggcaactgcgctggctggtcgtatctacatcatcgatgttgcctatcatcagggtctcaaaatcactgaagcagtgccagccggcgactccgcagtgggtaactacgtagaagagggccgcgagctggcgctgctgtgcgtggcggggacttacgccaaagacgatccaatcaagctgggtagtaatgggcaatttaccaaagctactgcagacaccgattcggtgattggctatagccaggacgatgcgaccatcgcagccagcactaccgatttcatccgcgtgcgtatgcgcgtcggtaccgtagccgctgcaggtgctggcgcttaa

SEQ ID NO: 526729 - DNA, 1146 bp, Stenotrophomonas maltophilia
  misc_feature (1062)..(1071): n is a, c, g, or t
atgccaatgcaagttaatgtcacctcgaaggtgaacagtaaggccatccggcgcgaacagcacaacggacgcgagcactgggttgttccttcttacacccttccggcgaacgtggtcatgaacggcggtctgtatccggccagtgagattgaccagcactacagtggcctggaggggacactggcaccgattggacatccacaggtcaacggtcagtttgtttctgcttttagtcctgaggggctgaatgtgggttatgtaggggcatggaacaaaaacgtcaagaagtccggcaaccgcgtattcctggaggagcttgaagcgaacgatgagcagaaagctcagggggcttcatgggttgcgaaaattcacgcgatggaccatgacgccatccttctggatgaggttggcgcagctacgccagaacagggggtagggatgatggtaaatgctgatcttgccactccactgaaagctaattccggcgctctggtgggggaaacctatcgcgagcgtgagcggaggctggagaaggcagcgaaagataaattcgctcctggcgagaaagaatacgcctgggtggctgacttcactgactcgcaagcggtaatcatcctcaacaatggcgagccgaaggtttacggatacaagtctgaaggcggaaagattgtctttgatgataccgggacagaggttcagcgccagagttcatgggttgctgtcgtcaacaaactcaaatcttttttcacaccgcaggaacagcctgcaccaaaccacaaaacggagggcgacatgcctttaaccactgaagagaaacaagagctgatcagcgaaatcggtaaaggcctggccgcaaacttcgccgaagccctgaacccgattaaggatgcgatcaccggcctacaggccaatcaggacaagctcactgaaacgctaactgcaaactcccgcgctgaagagaaagcaaagcgtgaggcggtagctaaggtccatggcgacatcgtggccaacgcgctttctggcgatgcgctggacgcgatgttcaagtcactgggcgaagcnnnnnnnnnngctccgctgggcaccaacaatgcgcagcagcagaaagaaaccggtgcacctaaccctgccgaatacttcaaataa

SEQ ID NO: 526730 - DNA, 930 bp, Stenotrophomonas maltophilia
atgacgaagaggaaagcgaagtcaccgatacttccgggaaaccttaaagacccgacgggtgccgaccgacttgagcgcggggcaatgagcgagttcgccaggcgaatgaagcgaattggcaaggcgtacaagggcattctcgaccgcattcctgcatcgccatcagtaaaccagcgttacaccttcgacctcgattccacccagctatcaatgctcctcagcaatgcctcattgctggttgatgagattttaggtgcagataacgagacaggattctggttctgggctgattacgtcaacccggcgtatcagcgcggcacggcgcaggagtttgccaatctggcgcagcaatcagccgtgtacgctgccggacaggaaagcgtatcgacaatccttctcagcgaaccgtaccgacgtaggctgattcttgttcgcgctcgtaccttcgaggaaatgaagaacctcagcgccagtgtgaaagcggatatggcgcggatactgaccgatggacttgggcgcggacaaaatccactggagatagctaagcgccttactgagcagacggggattgagtctcgccgggctaatcgtattgccaggacggagattaccaccgcgctgcgccgtgcgcgcctggacgaagacgacgaagccagagaacgatatggcatccgtacaaagcagatgcacatatcagcgctcagcccgacgacccgaagcacccatgccgcgcgtcacgcccatctgtataccgcagaagagcagcgggagtggtgggctaaggatgcaaacggcgtgaactgcaaatgctccacgatcgcggttatggtcgatgaaagcggcaagccgttaagtgacaccatcatcgataaagctcagaaaacatttaacacaatgaaagcccgtggctaccaatgggctaagggttaa

SEQ ID NO: 526731 - DNA, 1353 bp, Stenotrophomonas maltophilia
atgaacgataaattacagttggcggttaatcacgcgattaacgacgccaggcttgctcgcgcccgcatggggatgcttaacccttcgatggggctggacgccaagcgtaattctgcgtggtgcgaatatggattccctgagcaggtcacatacgaaaacctctacgccctgtaccggcgcggtggtattgctcacggtgccgttgagaagctggtgggcaagtgctggcagactaacccggaaatcattgagggtgacgatgccgacgagagtgaaaacgaaaccgcctgggagaaaaagtccaaacaggtattcaccaaccggttttggcgctcattctctgaggcggaccgtcgccgtcttgtcggtcgttatgcaggcatccttctgcacgtcaatgactccctcgcctgggatcagcctgtaacgaaaggcaagatgctccagaaggttactgtcgcatgggcaggctctctgacagttggtgattgggacactggcctgaactcgaaaacctacggacagccgaagatgtggcagtacgctgaacggttgccgaatggttcaagtcgccgcgtcaacatccaccccgatcgcgttttcatccttggtgattactcagacgatgctattggcttccttgagccagcttataacgcctttgtgagcctggagaaggtagagggcgggtctggtgagtcattcttgaagaacgcagcgcgacagttagcacttagtttcgataaagaaatcgactttgccaatctggcatcaatgtacagcgtcagtgttgacgagttgcaggacagattcaacgacgctgcacgcgagatgaatcgcggcaatgatgtgttgctttctctccagggtgccagcgtaacctccttggtttctccggtttctgacccgtcaccaacgtacgatgtaaacctgcagaccgccgccgcaggggttgatattccgacgcgcattctggttggtaatcagcaggccgagcgcagcagcaccgaagaccagaaatacttcaatactcgctgccagtctcgccgtggcgacctgtcattcgagattgaggacttctgcgacaagctgatcgaattaagcatcctcgatccggtcagtcagaagaccgttatctgggacgacctcaatgcgcaaagcgacagtgaaaaactggatgccgctcagaagatgtcgcaaatcaacagcgcttccatcggcacgggtgagcaggtgtttactggtgaagaaattcgcgtggccgccgggtatgagggttcgcccgaaccacttccagaggtagatgatgacgaagaggaaagcgaagtcaccgatacttccgggaaaccttaa

SEQ ID NO: 526732 - DNA, 1248 bp, Stenotrophomonas maltophilia
atgagtgaagccgttcaactgccgatccccgccaagcttgcgccgctgttcactgcggtgaataagcgttatcgatgctcgcacggtggacgtggtagcgccaagacgcgcaccttcgcactgatgactgcggtaaaggcttaccagtcgatgatgaacggtgaaagcggcgtagtgctctgcgcgcgtgagttcatgaactcgctggaagagtcgagcatgcaggaggtgaaacaggcgatcctgtctgttccctggctggccgccaactttgatatcggcgagaagtacatccgcaccatcgacaagagcgttaactacgtattctgcggtctgcggcataacctcgacagtatcaagtcgaaagcgagaatcttgctctgttgggttgatgaggctgaatcagtaagcgaaatagcctggcagaagttgagcccgaccgttcgtgaggaaggctcagagatttgggtgacgtggaacccggagcgcgacggtagcgccacggacaagcgtttccgcaaagaggctggcgacgactgcatcaccgttgaaatgaactatacggataacccgtggttccctgacgtgcttgaaggtgagcgacagaacgatcagcgccgcctcgacccggcgacatacgcatgggtgtgggaaggcgcttacctcgaaaactctgataagcaggttctggccggtaaataccggatcgctgagttctcggaaaacctctggaaagaagctgagcgcctgttcttcggtgccgacttcggtttcgccaaagaccctaacacactggtgcgttcgttcatcctgcacaaccggctgtacatcgaatacgaggcatacgggcagcagacagagctcgaccacatgccagagctatacgacacaatccccggatcgcgtgactggcccatcaaggccgactccgctcgacccgagacgatcagccatctcaagcgacagggcttcaacatctcagccgctgagaaatggcagggaagcgttgaggacggaatcgcgcaccttcgcggtttcgacgaaatcattatccatccacgctgcaagaacgtggcgcgagaggctcgcatgtggtcgtacaaaactgaccgcatcaccggtgaggtgttgccgaaactggctgatggtgatgagcatacgtgggacgccatccgctattcccttgatggacatatcaaacgtaaacagcagggtgtcggcatgatgattccgaaacgccttcgataa

SEQ ID NO: 526733 - DNA, 456 bp, Stenotrophomonas maltophilia
gtggcagcattatcgacagaggttaaagccttcatcgttcaatcgctcgcctgctacgagccgccagtaaaagtcattgagcttgtaaaggctgaatacggcatcgatgtctcgcggcagcaggtgtcgcaatatacgcccgggaacgcaatggcggccaagttgagccagaagtggattgacctgttcaacgccacccgtaaacgattccagaatgagatcgccgacatcccgatcgcaaataaagcgtaccggttgcgcgttctcgaccgaatggcgaccaacgctgaaaagatgaagaactacggcatgacctcgcaacttatcgagcaggccgccaaagaaatgggcgatgcctacactaatcgccagaaagtcgagcatacaagccctgatggcagcatgactccgcagccgacaatcatccagttactacctgttgagccgaaagcatga

SEQ ID NO: 526734 - DNA, 639 bp, Stenotrophomonas maltophilia
atggctaacgatgacgagcgcaggccttatccgccagttaacttcatcgcctccgacaactggcagccatacacccggctcattaccgccaatgaagtgcatgagtgggtaagccgccaaatcctcagcgattccggcagcatccataaccctgaccacgaacatctgcttgaagctgacctctgcttcatgtgggcgtctgactctttcgcgaagaaagggcgctacgtcctcggccaggccgagcaggtgatgctccgggtcggtggttggcagaaagccagaatggaacagcagatgtatgaatggttcgggcgaatcccgaagttcatcatcacgctggcagctgactactgctcgcaatgcagcgaccttgagttctgcgcactggtagagcatgagctttaccacattgcccaggccaccgatgatttcggtgcgccaaggttcaacaaagagaccgggcagccagtgcttacactgcgcggccacgacgtcgaagaattcactggtgtcgtgcgtcgatacggtgccagcaaagaagtacaggagctcgttgatgcggccaatgcgccagcagaagtggctcatatcgatatagccaggtcatgcgggacgtgcatgttgaagctggcgtaa

SEQ ID NO: 526735 - DNA, 207 bp, Stenotrophomonas maltophilia
atgtccgacatctaccaaatcacgctaaccacccaaacaggcgaaaccttcacgggcaagatgtcacgacgtcagcctgagctggtgaacggctttgtgccgctggcgaccgaaacggggcagtggctgtatttcgctcctgctgatgtgaagcgcgtggagttcacgccggtaccggatgagcagaccgaacaaaaaacggagtaa

SEQ ID NO: 526736 - DNA, 219 bp, Stenotrophomonas maltophilia
gtgccgaaacagatccacgttctgcatgaatcacagcaacagtccggcattggctccggtcttaatgaaggcgataccgtggtggtcagtggcctgttcctcattgactccgaagccaatattacgggcgcgctggaacgtatgcgccaccctgaaaaaacagaaaacagtatgccagcaatgtctgagcagcctgtaaatatgcattcagggcactga

SEQ ID NO: 526737 - DNA, 3147 bp, Stenotrophomonas maltophilia
atgattgaatggattatccggcgctctgtcgccaaccgtttcctggtcatgatgggcgcactgtttctcagcatctggggcacatggacgataattaacacgccggtcgatgcgctgcctgacctgtcagatgtgcaggtcattattaaaaccagctatcccggacaggctccgcagattgtagaaaaccaggtcacctatccgcttaccaccaccatgctgtccgtacctggcgcaaaaaccgtgcgtggcttttcacagttcggtgattcgtatgtgtatgtcatttttgaagacgggaccgatctgtactgggcccgttcgcgcgtgctggaatacctgaatcaggttcagggcaaactgcctgcgggtgtgagctctgaaatcggtccggacgccacgggagtgggctggatatttgaatatgccctggtcgatcgcagcggaaaacacgacctttcagaactgcgttctttgcaggactggtttctgaaatttgaactgaagaccatcccgaacgtggctgaggtagcctcggttggtggcgtggtgaagcagtaccagattcaggtcaatccggtaaaactgtcccagtatgggatcagcctgcccgaagtgaaacaggctcttgaatcgtctaaccaggaggccggtggttcatccgttgaaatggccgaagcggagtatatggtccgtgccagcggttatcttcagagcattgatgattttaataacatcgtcctgaaaacaggtgagaacggcgtgccggtttatctgcgggatgttgcccgcgtgcagaccgggcccgaaatgaggcgtggtattgccgagctgaacggccagggagaagtcgctggcggcgtggtgatcctgcggtcgggtaaaaatgcgcgcgacgttatcacggcagtgagggataaactggagacgctgaaggccagcctgccggaaggcgttgaaatcgtgaccacctacgatcgcagccagttaatcgaccgggcgattgataacctcagttccaaacttctggaagagtttatcgtggtggccatcgtctgtgctctgttcctgtggcacgtacgttctgccctggtggcgattatctctctgccgcttggcctgtgtatcgcctttatcgtcatgcacttccagggactgaacgccaatatcatgtcgctgggagggatagcgattgccgtcggtgcgatggtggatgccgccattgtgatgattgaaaatgcgcacaaacggcttgaggagtgggatcatcagcatccgggtgagcagattgacaacgccacccgctggaaggtgattaccgacgcctccgtggaagtgggacccgcgttgttcattagcctgctgatcatcaccctgtcctttattcctatctttaccctggaagggcaggaaggtcgtctgtttggcccgctggcattcacgaaaacgtactccatggcgggagcggccgcactggccatcatcgtcattcctattctgatgggattctggatccgggggaaaattcctgcagagaccagtaaccccctgaaccgggtgctgatcaaagcgtatcatcctttgctgctgcgggtcctccactggccaaaaacaaccctgctggttgcggccttgtccattttcacggttatctggccactgagtcaggtgggcggtgaatttctgccgaagattaacgagggcgatctgctgtatatgccgtcgaccttgcctggcgtctctccggcagaagctgcagcgctcctgcagacaacagacaagttaatcaaaagcgttcctgaagtggcttctgtatttggcaagaccggtaaagcagagaccgcaacggattccgcgccgctcgaaatggtggaaaccacgatccagctcaaacctgaggatcagtggcgtcccggcatgacaattgacaagattattgatgaactcgacaggacagtccgtttaccgggtctggcaaacctctgggtgccgcctatccgtaaccgtattgatatgctctcaaccgggatcaaaagcccgataggtatcaaagtgtccgggactgttctgtccgatatcgacgcgacggcgcagagtatcgaggcggtagccaaaaccgtgcctggcgtggtgtctgtcctggctgagcgacttgagggcgggcgctacatcgatatcgatatcaaccgggagaaagcctcccgctacgggatgacggtaggtgatgtccagctgttcgtctcttcagcaatcggaggtgctatggtgggtgagacagttgaaggggtggcccggtaccctattaacattcgctacccgcaggattaccggaacagtccgcaggcgctgaaacagatgccgatcctgaccccgatgaagcagcagatcacgctgggcgatgtcgcggatattaacgtcgtttctggaccaaccatgctgaaaaccgaaaatgcccggccagccagctggatttatgttgatgcccgcggcagggacatggtgtcggtggttaacgacattaagacggccatcagcgagaaagtgaaactgagaccgggaaccagtgtggcattctccggacagtttgaactgcttgagcatgccaacaagaaactgaagctgatggtgccgatgacggtgatgatcattttcatcctgttgtatctggcattccgccgggttgacgaagccctgctgatcctgatgagcctgccgttcgccctagttggcggaatatggttcctgtactggcagggcttccatatgtcagtggcgaccggaaccgggtttatcgccctggccggggtggcagcagagtttggcgtggtcatgctgatgtatctgcgtcatgccattgaagtgcacccggaattgtcccgtaaagagacgttcacaccggaaggtcttgatgaagccctttatcatggtgccgtgctgcgtgtccggccgaaagccatgaccgtggcggtgatcatcgcgggtctgctgccgatactctggggaaccggcgcaggttcagaagtcatgagccgtattgcggcccccatgattggcgggatgatcacagctccgctgctgtccctgttcattattcctgccgcctataaactcatctggctgcgcagacataaaaagagcgtgtcataa

SEQ ID NO: 526738 - DNA, 441 bp, Stenotrophomonas maltophilia; identical to SEQ ID NO: 19858

SEQ ID NO: 526739 - DNA, 2460 bp, Stenotrophomonas maltophilia; identical to SEQ ID NO: 19857

SEQ ID NO: 526740 - DNA, 414 bp, Stenotrophomonas maltophilia
atgtcgaaccaacataaccccgacgatttgaaaaaaaaccttacagagatgcagttttacgtaacgcaaaatcacggcacggaaccgccgtttaccgggcgtttgctgcacaataaacgggaaggcgtctaccactgcctggtgtgtgatgcaccgctgtttaactcccagactaagtacgattctggctgcggctggccaagcttttacgagcctgtcagcgatgatgcgatccgctatctgacggactcctcgcacggcatggtgcgcaccgaaattcgttgtgggaattgcgacgcccatctcgggcatgtcttcccggatggcccgcagccgacgggggagcgtttctgcgtaaattcggcttcgatgagctttaccgatgacgaaaacggcgaccagaccaagggttga

SEQ ID NO: 526741 - DNA, 996 bp, Stenotrophomonas maltophilia
atgactatcaaagtaggtatcaacggttttggccgtatcggccgtattgttttccgtgctgctcagaaacgttctgacatcgaaatcgttggtatcaacgatctcctggacgctgaatacatggcgtacatgctgaagtacgactcaactcacggtcgtttcgacggcaccgttgaagtgaaagacggccacctggttgttaacggcaaaaccatccgcgttactgctgagaaagacccagctaacctgaaatggaacgaaatcggtgttgacgttgtagctgaagctaccggtatcttcctgaccgacgaaactgcacgtaaacacatcactgcgggtgcgaagaaagttgttctgactggtccttccaaagacaacaccccaatgttcgttcgcggtgcaaacttcgaaacttacgctggccaggacatcgtttccaacgcatcctgcaccaccaactgcctggcaccgctggctaaagttatcaacgacaacttcggcatcatcgaaggtctgatgactaccgttcacgctaccaccgctactcagaaaaccgttgatggcccgtctcacaaagactggcgcggcggccgtggcgcggctcagaacatcatcccatcttctaccggtgctgctaaagcagtaggtaaagtactgccagaactgaatggcaaactgactggtatggcgttccgcgttccaactcctaacgtatccgttgttgacctgaccgttcgtctggaaaaagctgcttcttacgaagaaattaagaaagcaatcaaagctgcttccgaaggcccaatgaaaggcgttctgggttacaccgaagacgacgttgtatctaccgatttcaacggcgaagtgtgcacttccgtgttcgatgctaaagcaggtatcgcactgaacgacaacttcgtgaaactggtttcctggtacgacaacgaaactggctactctaacaaagtactggacctgatcgctcacatctccaaataa

SEQ ID NO: 526742 - DNA, 885 bp, Stenotrophomonas maltophilia
atgattaataaaatttttgcacttccggtagtcgaacaacttacccctgtgctctcccgccgtcagattgacggcgccgatatcatcgtcgtcgatcatccgcgcgttaaagcctccgtagcgctcaatggcgcccacctgctctcctggaaaccagaaggcgaagaagaaggcctgtggctgagcgaggccacctcgttcaaaaaaggggcggcgatccgtggcggcgtaccgatctgctggccatggtttggtccgtcagcgcagcagggattgccgtctcacggtttcgcccgtaaccagcagtggacgctgaaagcccacaacgaagatgataacggcgcggtgttgacctttgaacttcaggcaaatgatgaaacgcgcgccctgtggccacatgaattcaccctctatgcccgcttcaagctgggtaaaacctgcgagattgaactggaagcgcacggcgaattcgaaacaacgtccgccctgcacacctatttcaacgtaggcgacattcaggccgttaaggtgagcggacttggcgatacctttatcgacaaagtggacaacgcgaaagaaggcaggctggacgacggcgttcagagcttcccggaccgtaccgaccgcgtgtatctgcacccggaagcctgtagcgtcatccacgacagcgcgttgaaccgcggcattgacgtggttcaccaccaccatagcaacgtggtgggctggaacccgggccctgccctttccgtcagcatggcagatatcccggatgacggttacaagaccttcgtgtgtgtggaaaccgcgtgcgtgaccgccccgcagaaaaccagcgaagaaaaaccgtcccgcttaggccagacgatcaagattgtgaagcgctaa

SEQ ID NO: 526743 - DNA, 747 bp, Stenotrophomonas maltophilia
gtgaccaaactcaaacttctggcattgggcatccttgccgctaccgcagcgagcaccgtacaggctgagagccagtggactgttggcgcgggtactggcgtgatcaacagcccgtacaagcagtatgaccgcgacgtttatcctgtccccgttgtcacctatgaaggcgataacttctggttccgtggattgggcggcggctactatctgtggaacgatacggccgataagctctccatcatggcctattacgacccaacgtactttaaaccaggcgacagcgacagcaatgcgcttcgtcagctggacaagcgcagaagctcactgatggccgggctttcttacgtccataataccgagtatggcttcctgcgcacggcgctggcgggcgataccctggacaacagcaatggcttcatctgggatctggcgtggctttatcgctataccaacggcgcggtgaccctgacgccgggtatcggtgtgcagtacagcagcgagaattacaatgactactactatggcgtgtctaaggctgagtctcgccgcagtggtctgaagagctacagcgctgatgatggctgggatccgtacctggaactcaccgcctcgtataacttcctcggtgactggaacgtttacggtactggccgttatacccgtctgagcgacgaagtgaaggacagcccgatggtcgacaagtcctggtccggcatcttctccgtgggtgtgacctacaagttctga

SEQ ID NO: 526744 - DNA, 696 bp, Stenotrophomonas maltophilia
atgcagcactttgatcggtgctttaaacatctcgacaaattccataatcccctggttggcgcggcacagcgcaccggaatagccgtaggcatccgggtcgttttgcgcgtgatgttccagcttacggatatcgactttacccaccagcgccgagatgtcctggttgttctcgtcaccgggttcagttttagcaatggcgatctgctcgaggatagacggccacactttcacgacgcggaatttggtgatgtccccaccaaactcgtgcaggcgttttgccgcccacggcgacatgatcgtaccgagatagcgatgcggaatgccaaactctttttccagaatttgcgcatcctcttgcggattaaacaggcacagcggatggtcattaaccgggctgcgctcgccgttggcgctcagcacatagatcggcacgcgctgcatcagcgctttcagccgttcagccagggaggatttacccccgccgacgggacccagcaggtaaaggatctgtttcttctcttccagcccctgagcggcatgcttcaggtaggagacgatttgctcaatggcatcttccataccatagaactcttcaaacgccgggtatcgggcgactacccgattcgaaaaaagacgggaaagccgtggctccagggcagtatcaaccatgtttggctcaccgatagccatcaatag

SEQ ID NO: 526745 - DNA, 1011 bp, Stenotrophomonas maltophilia
gtgaccttccgtaacaacaaaaacaatgaggcgttccttgaccgtgtgtacatcgtcaaagtgccttattgcctgcggatctccgaggagatcaagatttacgaaaaattgctcaaccacagtgagctggtccatgccccttgcgcaccgggaacgctggaaacgctgtcacgcttctcgatcctgtcgcgcctgaaagagccggaaaactccagcatttactccaaaatgcgcgtgtatgacggcgaaagcctgaaggataccgacccgaaagccaaatcgtaccaggaataccgcgattacgccggggtcgacgaagggatgaacggcctgtcgacacgtttcgcgtttaagatcctctcccgcgtctttaacttcgaccacgcagaggtggccgccaacccggttcatctgttctacgtgctggaacagcaaattgaacgtgaacagttcccacaggagcaggctgaacgctacctggagttcctgaaaggctacctgatcccgaaatacgccgagtttatcggcaaagagatccagaccgcctacctggaatcctattccgaatacggccagaacattttcgatcggtacgtcacctacgctgacttctggatccaggatcaggagtaccgcgacccggataccggccagctgtttgaccgtgaatctctgaacgcagagctggaaaaaattgagaaaccggccgggatcagcaacccgaaagacttccgaaacgagattgtgaacttcgtgctgcgcgccagagcgcataacaacggccgcaatccaaactggaccagctacgaaaaactgcgcacagttatagagaagaaaatgttctctaacacggaagagctgttgccggttatctcgttcaacgccaaaacctcaaccgacgagcagaaaaagcacgacgattttgtcgaccgtatgatggaaaaaggctatacgcgcaaacaggtccgcctgctttgtgaatggtatctgcgcgtgcgtaaatcgtcttaa

SEQ ID NO: 526746 - DNA, 1284 bp, Stenotrophomonas maltophilia
atgacctggtttattgaccggcgtcttaacggcaaaaacaagagcacggtgaatcgccagcgcttcttgcgccgttataaagcgcaaattaaacagtcgatctccgaggccatcaacaaacgctcggtgaccgacgtcgacagcggcgaatccgtctccattcccaacgatgacatcagcgaaccgatgtttcatcaggggcgtggcggtcttcgccatcgcgtgcacccaggtaatgaccacttcgtccagaatgacagaatcgagcggccacaaggcggaggcggcggttctggcagcggtcagggacaggccagccaggacggtgaaggccaggatgagttcgtctttcagatttcaaaagacgaatatctcgacctgctgtttgaggatctggccctgccgaatctgagaaagaatcagcaccgtcagctcaacgaatacaaaacccatcgcgcgggttataccgcaaacggggtgcccgccaacatcagcgtggtgcgttcactgcaaaactcgctggcgcgacgcacggcgatgacggcaggcaaacgtcgcgaactgcgcgagctggaaaccaacctgaaagtggtggaaaacaccgaaccggcgcaactactggaagaggagcgcctgcgaaaagagattgccgaactgcgggcgaagatcgaccgggtgccgtttatcgacacgttcgacctgcgctataagaactacgaaaaacgtccggagccttccagccaggcggtgatgttctgcctgatggacgtgtcaggttcaatggatcaggccaccaaggatatggctaagcgtttttatattctgctctatctgttcctgagcagaacgtataagaacgtggaggtggtctacatccgccatcacactcaggcgaaggaggtggatgagcatgagtttttctattcgcaggagaccggtggcaccatcgtgtcgagcgccctgaagctgatggatgaggtggtgaaggagcgctacgacccggcgcagtggaacatctacgccgcccaggcatcggatggcgataactgggcggatgactcgcccctgtgtcatgaaattctggcgaagaagatcctgccggtggtgcgctactacagttacattgaaattacccgtcgcgcccaccagacgctgtggcgcgagtatgagcatctgcaagcgatgtttgataactttgcgatgcagcatattcgtgaccaggatgacatctatccggtattccgggaactgttccagaaacagagttctacaacctccaattaa

SEQ ID NO: 526747 - DNA, 321 bp, Stenotrophomonas maltophilia
atgggatttgcatcacctgcgactgattacgtcgagcgccagctcactcccgaaatactgtgtcacatgggcgctgatagcagggtgctcgaaactgatatggggtttgcggtcatagagccagcaacgaaaaagacgcctggagatgtgttgttaattttgtgcgacggccacacacaatttgcaaaactcatgggcaaggcgctcattacggatgatggtgaagcgattgagggagcagcgcttgaagaagtggaagtgctgggtagggtgacattcttcatcaatcgtgcattagatgatgattgccctgcaatatag

SEQ ID NO: 526748 - DNA, 240 bp, Stenotrophomonas maltophilia
atgcctcgtcaaccgaatattcgtgctgcttttattgcggccatagagcttaacccaaagggctaccgctacctgagaacagaccgcttcatacaaaagttgcgtggttttaactggcactttacccgtgacgatgcaaacaagtggatagagcgcaaccaacctggtttcgctgataaaacgacagatggtagcgaaaaccgttactggatcttgcgtaacatggggagggttcactaa

SEQ ID NO: 526749 - DNA, 267 bp, Stenotrophomonas maltophilia
atgtttgttgaactggtttatgacaaacgcaatgttgaggggctcgaaggtgccagaggaatcatactggccgagctgacgaagcgggtgcaccagattttccctgatgccgaagtgaaggtgaagccgatgcaggcgaacggcctgaacagcgatgccagcaaaagcgatcgggaaaaactgaaccgcttgctggaggagatgtttgaagagtccgatatgtggctggtttctgagttcccgaccgttcgccaggttggcctgtag

SEQ ID NO: 526750 - DNA, 420 bp, Stenotrophomonas maltophilia
atgaagaaaggcacagtactcaactcagaaatatcatcggtaatttcccgtcttgggcataccgatacgctggtggtttgcgatgcaggcttaccggttccgcgcagcacaacccgtatcgatatggcgttaacgcagggcgtaccctcgttcatgcaggtactggaagtcgtgacggcggagatgcaggttgaggcggccattctcgcggcggaaatcaaacaacataatccgcaactccacgaaacgttgctcagccacattgagcaactgcaacagcaccagggaaacaccatagaaattcgttacacaacgcacgagcagttcaaacaacaaaccgcagacagtcaggcggtgattcgcagcggggagtgttccccgtatgcgaatatcattctctgtgctggcgtcaccttctga

SEQ ID NO: 526751 - DNA, 1506 bp, Stenotrophomonas maltophilia
atggacgcattactgcaactcaaagggatcgataagtcgttcccgggcgttaaagccctctctggcgcggcgctgaacgtctattccgggcgcgtaatggcgctggtgggcgaaaacggcgcgggcaaatccaccatgatgaaagtgctgaccgggatctatcaacgcgatgccggttcgctgctgtggctgggtaaagagaccaccttcaacggcccgaaatcctctcaggaagcgggcattggcatcatccaccaggagctgaacctgatcccgcagctcaccattgcggagaacatcttcctcggccgtgagttcgtgaaccggtttggcaaaatcgactggaaaaccatgtatgccgaagcggacaaactgctggcgaagctgaatctgcgctttaagagcgaccgactggtgggcgacctttccatcggcgatcagcagatggtggagatcgcgaaggtgctgagcttcgagtcgaaggtcatcattatggatgaaccgaccgacgccctgaccgataccgaaaccgaatccctgttccgcgtgatccgtgagttgaaatcccaggggcgcggcattgtctatatctctcaccgcatgaaagaaattttcgagatctgcgacgacgtcaccgtcttccgcgacgggcagttcattgccgagcgtgaagtggccacgctgaccgaagattcgctgattgaaatgatggtgggacgtaagctcgaagaccagtatccgcgtctggacaaagcgccaggagagatccgcctgaaggtggataacctctgcgggccgggtgtggatgacgtctcctttaccctgcgcaagggcgagatccttggcgtcgcgggcctgatgggcgcgggacgtaccgaactgatgaaagtgctctatggcgcactgccgcgcaccagcggctacgttacccttgacggccatgaggtagtcacccgctcgccgcaggatggcctggcgaacggcattgtctatatctccgaagaccgtaagcgtgacggcttagtgctgggcatgtcggtaaaagagaacatgtccctgaccgcgctacgctatttcagccgcagcggcggcagcctgaaacataaagatgagcagcaggcggtcagcgattttatccgtctctttaacgttaaaaccccatcgatggagcaggcgattggtctgttgtccggcggtaatcagcagaaagtggcgattgcccgcgggttgatgacgcgcccgaaagtactgatcctcgatgagccaactcgcggcgttgacgtgggcgcgaaaaaagagatctatcagctgattaaccagttcaaggccgacggtctgagcatcattctggtctcttccgagatgccagaagtattaggcatgagcgatcgcattatcgtcatgcatgaagggcatctcggtggtgaattcactcgcgagcaggccacccaggaagttctgatggctgccgctgtgggcaagcttaatcgcgtgaatcaggagtaa

SEQ ID NO: 526752 - DNA, 966 bp, Stenotrophomonas maltophilia
atgactacccaggctgtttctggtcgccgctatttcacaaaggcatggctgatggaacaaaaatcgctgattgccctgctggtgctgatcgcgattgtctcgaccatgagcccgaacttttttaccgttaataacctgttcaacattcttcagcagacctccgtcaacgccattatggcggtggggatgacgctggtgattttgacctcgggtatcgatctgtccgtcggttccctgctggcgctcaccggtgcgattgccgcgtcgattgtcggtattgaggtcaacgcgctggtggccgttgctgctgcgctggcggcaggtgcggcaattggcgcggtaaccggcgtgattgtggcaaaaggccgcgtacaggcgtttattgccacgctggtgatgatgctgctgctgcgcggcgtcaccatggtgtacaccaacggtagcccggtgaataccggctttaccgaaaacgccgatctatttggttggtttggtatcggacgccctctgggtatcccgacgccagtctggatcatggctatcgtcttcctggcggcatggtacatgctgcatcatacccgtctgggtcgttatatttatgcgctgggcggtaacgaatcggcaacgcgtctgtccggtattagcgtcaacaaagttaaaattatcgtttactccctgtgcggtctgctggcatctctggcgggcatcatcgaagtggcgcgcctctcttccgcgcagccaacggcgggtacgggctatgagctggatgccatcgcggcagtggttctgggtggtacgagccttgcgggcggtaaaggtcgcattgttgggacattgatcggcgcactgatcctcggtttcctgaataatggcttgaatttgttaggtgtttcctcctattaccagatgatcgttaaggcagtggtgattttgctggcggtactggtagacaacaaaaaacagtaa

SEQ ID NO: 526753 - DNA, 891 bp, Stenotrophomonas maltophilia
atgaacatgaaaaaactggctaccctggtttctgctgtcgcgctgagcgcaaccgtaagtgctaacgccatggcgaaggacaccatcgcgctggttgtctctaccctgaacaacccgttcttcgtctccctgaaggatggcgcgcagaaagaagcagacaaactgggttacaacctggtggtgctggattctcagaacaacccggcgaaagagctggctaacgttcaggacttaaccgttcgtggtaccaaaatcctgctgatcaacccaaccgattccgacgcggtcggtaacgccgtgaagatggcaaaccaggcgaagatcccggtaatcaccctggaccgtcaggcgaccaaaggcgacgttgttagccatattgcgtctgataacgtactgggcggtaaaatcgccggtgactacatcgcgaagaaagcaggtgaaggcgcgaaagtgatcgagttgcagggtatcgccgggacttccgcggcccgtgaacgtggtgaaggtttccagcaggctgtagcggcgcacaaatttaacgtgctggcgagccagccggcagacttcgaccgtacaaagggtctgaacgtcatgcagaacctgctgaccgcgcatcctgatgtgcaggcggtattcgcacagaacgacgaaatggcgctcggtgcgctgcgtgcgctccagactgcgggtaaatcagatgtgatggttgtcggatttgacggcacgccggatggtgaaaaagcagtaaatgatggcaaactggctgcgaccatcgctcagctgcctgagcagattggcgcgactggcgtgcaaactgccgataaagtgctgaagggcgaaaaagttcaggccaaatatcctgttgacctgaaactggtcattaagcagtaa

SEQ ID NO: 526754 - DNA, 930 bp, Stenotrophomonas maltophilia
atgaaaaccgcaggcaacctcgtcgtccttggcagtatcaatgccgatcacattcttaaccttgaaacgttccccactccgggcgaaaccgtcaccggcaatcagtatcaggtcgcgttcggcggtaagggtgcaaaccaggcagttgccgccggacgcagcggggcaaatatcgcgtttatcgcctgtacgggtgatgacgataccggcgagcgcgtacgcaaacagctggcaagcgacaacatcgacatcgcacccgtcagcgtggttgcaggggaatctaccggcgtggcgctgattttcgtcaatgcggaaggtgagaatgtcatcggtattcatgcgggggctaatgccgcgttaacgactgaacgcgtcgaagcgcagcgtgggatcatcgccggagcggaagccctgctgatgcagctggagtcaccggttgaaagcgtgctggccgctgcgaaaattgcgcatgaaaatcatacgtctgtcgtacttaacccggcgcctgcctgtgtattatcagacgagctgctggcgctggtggatatcatcaccccgaacgaaaccgaagcggaaaagctgacgggtatccgtgtcgaaaatgatgacgatgccgcgcgtgccgcgcttgcgctgcatgataaaggcatcggcaccgtgatcatcaccctcggcagccgtggggtgtgggctagcgtcaatggcgaaggccgtcgcgtaccgggctttaaggtcaaagccattgataccatcgccgcaggtgacaccttcaacggtgcgctggtaacggcgctgctggaaggaaaagcaatggatgacgcgattcgcttcgcgcatgccgccgccgcgattgcggtgacgcgtaaaggcgctcagccttctgttccatggcgtaaagagattgatgaattcttaagtcagcaggggtaa

SEQ ID NO: 526755 - DNA, 984 bp, Stenotrophomonas maltophilia
atgaaagatgtcgcccgtatggcgggcgtttctacctcgactgtctcccacgttatcaataaggatcgcttcgtcagcgaggcgattcgggagaaagttgacgctgcaattaaagaactcaattatgcgccgtctgcgctggcccgcagcctgaagcttaaccagacgcgcaccatcggcatgctgatcaccgccagtaccaaccctttttattctgaactggtgcgcggcgtggagcgcagctgcttcgagcgcggctacagcctggtgctgtgcaataccgaaggcgatgagcagcgcatgaaccgaaacctggagacgctgatgcaaaaacgcgtcgacgggctgctgctgctctgtaccgaaacgcatcaaccctcgaaagagattatccagcgctacccttctattcctacggtgatgatggactgggcgccgttcgacggcaccagcgatctgatccaggataactcgctgctgggtggcgatatggcgacccagcatctgatagataaaggtcatacccgcattgcctgtattaccggcccgctggataaaaccccggcgcgcttgcgtctggaaggctatctttcggccatggaacgggcggggcttgccattcctgatggctatcgcatcaccggcgatttcgaatttaatggtggatttgaagcaatgcagaaactgctggcgcaagagccgcgcccgcaggcggtgtttatcggtaacgatgcgatggcattcggagcttatcaggcgctgtatcaggcgggattacgtgttccggacgacatggcgatcgtcggttatgatgatatcgaactggcgcgctacatgacgccgccgctgaccaccattcatcagccgaaggatgaactgggtgagctggccatcgatgtgttgatccaccgcatggctcagcccacgctgcaacagcaacgtttgcagcttactcctgttctgatggaacgcggttcggtttag

SEQ ID NO: 526756 - DNA, 1434 bp, Stenotrophomonas maltophilia
atgacagagaaaaaagcacgcagtatggccggattgccgtggattgcagccatggcgttctttatgcaggcactggatgccactatcctcaataccgcccttcccgcaatagcccaaagccttaaccgctccccactggcgatgcaatccgccatcatcagttataccctgacggtggcgatgctcattccggtcagcggctggctggccgatcgtttcggcacgcgcaaagtgtttatgctggcggtgacgctgttcaccctcggttctctggcttgcgccctttctacctctctgacggaactggttatcttccgcgttctacaggggataggcggcgcgatgatgatgcccgtcgcgcgtctggcgttattgcgcgcctatccgcgcagcgaactgctcccggtgctcaactttgtgactatgccggggctggtcggcccgatacttggcccggttctcggcggcgtactggtgacctgggcaagctggcactggatcttcctgattaatattccgattggtgtggcagggctaatctatgcccgcaaatatatgccgaacttcaccacaccacgacgcagcttcgatatgggcggcttcttcctgtttggcctgagcctggtcctgttctccagcgggatggagctgtttggcgagaaaatcgtagcgacgtggctggcgctggccatcatccttagcggtattctgctgttccttctatatatccgtcatgcgcgtcgccatccgacaccgcttatctctttatctctgtttaacacccgaacgttttccgtcgggatcgcgggcaatattgcctcgcgtctgggcacgggctgcgtaccgttcctgatgccgctgatgctccaggtcggtttcggctatccggccctgattgctggctgcatgatggcccccacagcgatgggctcaattctggcaaaatcgacggtcacgcaggtgctgcgctggtttggctatcgtaagacgctggttggcgtgacgatctttattggattgatgattgcgcagttctccctgcaatctgcggcgttacccatctggatgctgatcctgccgctgtttgtgctgggcatggccatgtcgacgcagtttacgtcgatgaacaccatcacccttggggacctcaccgacgagaatgccagcagcggcaacagcgtactggcggtcactcaacagctgtcgatcagcctcggggttgccgtgagcgcggcggtactgcggttttatgaagggtttgacggtacaaataccgttgagcagttccactatacctttatcaccatgggcgcgcttaccgtggtatcggcggtggtctttatgttgttaaaaccaaaagacggccggaacctgattaaagagcgtcataaagagaaggctaaaccgaaccgcgttccatcagaacaggagtaa

SEQ ID NO: 526757 - DNA, 708 bp, Stenotrophomonas maltophilia
atgccattaagcgcacaacagctggcagctcaaaaaaacctgtcctatgtgctggcagaaaagctggctcagctgatcttagcgggtaaatatgccccaggtagcatcctgcccagcgagatggagctgggggatcagtttggtgtaagccgtaccgccgttcgcgaagcggtaaaaacattaacggcgaaagggatggtgcttccacgcccgcgcattggcacccgcgttatgcctcaggggaactggaactttctcgatcaggagttactcacctggtggatgaccgaagataactttaatcaggtcgtcgatcactttctggtcatgcgcagcagtcttgagcctcaggcctgtctgcttgccgccacgctcggcacagcagagcaaaaagcgcagctcaatacttttatggaagagatggtggatctgaaaaagcattttaaccgcgagcgctggatagaagtcgatatggcctggcatgaacatatctataatatgagcggaaatcctttcctgacctcctttgcttctttattccattctgtgtaccacacttactttgcctctatcacacaggatgaggtggtgaagctggatctgcatcaggcgatagtcgatgccattcaggaaagcgacgggcagcgagccctgagtgcgtgccaggcgttgctggccgcgccaacccaccagcaggtaaataaatga

SEQ ID NO: 526758 - DNA, 303 bp, Stenotrophomonas maltophilia
atggttaatgtgtacggcggaagcgcacgagagcattgcgacgatctgattaataacatccgtaaaaccacatcaagctacctgatgcgcagagaaaaattcattatcgcaaacagcgcccaggttaacgaccttacaggtctgcgagatgaagcaaacttcgaagcgatggcgaatgtagaccttacattccgctacaccggcaagtacatggataacgtagggctcatagaaaccgttgatgcgacaggcgacatcggcggaatagaaacacacctcactatcgccgtcacatccgactaa

SEQ ID NO: 526759 - DNA, 348 bp, Stenotrophomonas maltophilia
atgagcaatccgtttcgcaggccttatcaggtatatactccatcgccgtcgactttggttaacggcgtgattgttgatggggtaatgacggagtcaaccgcttacttcagcgtgcaaagcatcaaagatacccaggagattgagagcctagaggaagggagaaggttaactgattatcgccggctgtacagcgacactaagcttcagattactgatgatttccccatggctcagcctgcacttgtcgttattgatggttttaactacgaagttaagcaccgtgaaccatggcaaaacggaatcataccccactataaatattatgtggtaaggaaacgcgatggctga

SEQ ID NO: 526760 - DNA, 204 bp, Stenotrophomonas maltophilia
atgaagattaccaacgcatcagcacgactgtattacatcgcaggccagaaactggctccgggtcagactgccgaagtagatgattcctggaaggacaataaaacggtgcaggcatccatcaccaaaggagatctgcgactcgctgataaagatgaagccgtaaccgccagtcaggtagagaaaaaagagaaggacaagaagtaa

SEQ ID NO: 526761 - DNA, 939 bp, Stenotrophomonas maltophilia
atggaacagatgaattacgacgaagcggacctgttcgctattgaacacggcgcggcggctaacggcattcgactggatgaaggcgagtcaatcttcctggctcgtgaactggactacgttaaaaccaaggtttacgaagtcgaataccctgcactgactgcgaccactcttttcccggtgacatcagaaatcccttcatatgccaaaacgttcacttacggcgtatgggatgcagtaggcatggcgcgcatcattgctgactactctgatgacctgccaaatgtcggcgttaactatcgtgaagaaactggcaaggtgttcagcctgggtaacttctacgaatacagcctgatggaaatccgagcatcacaggcaaccggtaagaatctgccaactcgtctggctaacgctgcccgccgagcacatgacgtgaaggttaatgacctggcgttctacggcgatgatgattatcagatcgtcggcgttctggaacatccaaacattccagtaaccacctctgctggctggactactggcgagatcgcgtctggtgagcttgaggacgcagtatctgctatcgagacaatcaccaaaggactgcatggtgcgaacgtaattggccttccgccaagcaagttcaagattttggctaaggcaatgccaaacaccaacacgtcttacatgacattcttcaacacccagtatccgggtatgcagtggattcgtgtaaacgagctggaagacatcgatggcgcaggcactaaggctgccctggtaatggagcgcaacgctgataacgcatccatggaaatcccgcagccgttcgaacaactgccacctcaggctaacaacctggcgttcaagattccatgccacagccgcgctaccggcgtacaggtttacctgccgctgaccctgcatctcatcaaaggcatttaa

SEQ ID NO: 526762 - DNA, 522 bp, Stenotrophomonas maltophilia
  misc_feature (130)..(139): n is a, c, g, or t
atgcctgttcagacttcctacgataacgacatgcagatcgccatgcctggcatgcgttcagattcaacccatcaaatcacagacggttgcaacgcagcaaaaggcgctatcaagcctggttatgtggtannnnnnnnnntagctcgcgtatcagtagctaacgacaagcgcgtagttaaacaggtatctgcggctggcgatgcagcaaacctgatgggtatctgccgcttcagccactacggctgtgtcacaggtcagtatgaagatggcgatgccgtcaacgtgatgacatggggccgaatctgggctgtaaccaccttatcagcagcaccaaccatgggtgcaggtgttaacgttctgacctctggcgcagacgctggcaaggttgcagcaactggtggctccctggctctgggctgggtgtttactggtaagttcaccactttcaaaaacagcgctggcgcaacagttaacctggctgaagttcaaatccgcaaccagaccacacagccaaccgcataa

SEQ ID NO: 526763 - DNA, 987 bp, Stenotrophomonas maltophilia
  misc_feature (168)..(177): n is a, c, g, or t
atgaaaacagtatctcgcttcgatgtgggagaactccgtgcgtccgtaaacgaggatggctatttggaggacgtgccggtagtaggtcgcgttggcatccagttatatcgaaatccagatggctcagtgcgtcgtgaattacgcccacctgaagaagtattcaacgcnnnnnnnnnngattcactggctagcttcaaaggcaagccgatcactatcggtcacccgggggcggttaattcccgcaatgcaaaaaagcatatggtcgggaccatgctcgagccaggcagacaggatggtgaaaacgtcaaagtaccaatcatggtgtatgacgagaacgccattaactcagcaaccagcggcaggacaaagcaactatccctcggctaccgactcgacctcgatgagactccaggcgaatggaacggtcaggcctatgacgccgttcagcgaaacatccgcatcaatcaactcgacaacgggcttgagtacgatgcttctcctgaagtcgtcgtggcgttcaacgcccttaaacaggatgcagaggacgctaataccaagctgtccgaagcgcaaacaaccatctccaccatcacagcagagcgcgacaccctgaaagctgacgcagcagagtttgaaaacaagctgaagcaggctcgcgaagatgcagagaaaaccattaaagctcgcacagaactcgaagcaaaagcagagaaacacggcatcaagtgtgatggcctggatgatattgccgtcaagaaagcggttgtagccaagctgaagccatctatcaagctcgacggcaaagacgacacctacatcaatgtcgctttcgacatggcgattgagtcagcacctatggagcagcagcgcaaaatcgtcaatcaggacaaagcccaaacccgcgatgactccgctgaaccaaaaggctctgccgctgctcgcaaaaaatacctcgaccgcctgcacggcaaaaaggagacagcataa

SEQ ID NO: 526764 - DNA, 807 bp, Stenotrophomonas maltophilia
atggctaaagtctggcttcatccctacggcatagaacgtgactacaccaacgcgcttgtaaaggctaccaggcagttcaacaaagaaatcaactcagcatacggcgatatccgcttcgacggctggcaggacgatatgtctgctgtgctggcctatctccgcaacgctggcaaccgcatctttcagccagtaattgaacggctgccgacattcttcgcgctaactagtcagtttaacgacaagcaatggcgtttggttgtgaagggtggaactggctatgacatcccaccttcgcaggctgttattgccggacagacaactgctcccgcctcatcaggtgtacttggcgtagatgcttatcgcgcggagccatggctgagagagatgcaggagttatgggtatcagagaacaccaggctgattaaatccattcctgctgacgaactttcggatatggaaggcatcatccagcgcggtgtaatgaatggctcaagcgctgaaactatcaggaagcagattcaggagcgctatggcgtcactgagagacgcgcaaagctgatagcagttgaccagataggcaaaggaaacgcggcgctcacaaagcagcgccaggctgatgctggggtgaagaggtataagtggcgaggcgtgttggatgaacgcgagaggccagagcacagagcgcgagagggaaactcctacaagtggagcaacccacctcccgatgggcatcccgggcaacctgttcggtgtcgatgttacgcagagcctgactggtctggttcagttttcgatatcggcgaataa

SEQ ID NO: 526765 - DNA, 1257 bp, Stenotrophomonas maltophilia
atggctaaacgcaacaacaggcagcaaaagaaaatcgacaagaagatgaacatggacagctatcagaacgtgttcatgaacatcggaacaggtggcgacaggtcagcctacagccgcatccgtttcgcacatctgctaaccagggcgacattagataatatctatctcggtgatgggctaggacgtcgcattgtcgacgtggtagccgacgaaatgtttcgtgcaggcttcacggttgagggtgctaacaacgagccagagatcatgtctcgctgggatgaacttaacctcacgcagcagtttacagatgccgtagcatgggctcgcttatatggcggttcgttgatgctattcggcgttaatgatggcggagaccttcagtcgccgattggagagggtgagcttgagtttgtacgtgtgtacgaccgctatcaggtgcagcctttcctgcgtgacctaaatccggaaagcattacttacggggagatcatccagtaccagatcaaccctatctctgggacgccttactacgttcacgccagcagatgccatgtgttcgacggagagcgactacctaaccagattcgccatcagaatcagggatggggcgcttcgtgcttgcagggagtctatcaggcgctgactgattacggcatgagccacgcacacgctacaagtcttcttgagcgtaaacagcagggcgtctggtctgctgctgaccttgctgacctgtgcaaagacggtgaggggcgcgacgctgttcaggctcgtctcaacatggtcgacatgacgcgcagtaacggcaacaccatcggcgtagatgcaaaaacagagaagtacgaactgctaaatggctctcttgagggtgtggtcgatgtacaggaccgcaagcagttacgcatatcagcgctgaccggcatcgatgagcaaatcctgttcaccaaaacgccatctggtcagggggcggataaaaccaccgtgcctgagtcatggaagcagctgattggccgcaagcagaaggatgaggcgagacctgcaatagaaaaggcggtcaacttcctcaccactgataaaacctggacgattaagttcaatcctctctcagtgccaacagagaaagagcaggcagagacggctaaccagtggtcacaggctgatgaacgttattcgcagcttggatgggtgagcaacgatgaaggtgtcgccacactgaaaaaacgtggaggctacgtctatccggagatgagtaatggctaa

SEQ ID NO: 526766 - DNA, 573 bp, Stenotrophomonas maltophilia
atggcacatggctcagtagttaaggatgttcaggagtggagtcgaggcgatgtcattgagtctgctaacagggttaatcagtacgcagactccattgctgcagacaaggtcatttacgactcgataggggttggcgctggcgtgaaggcgcaattgaaccgcatcgccagaagccaggtggagggattcaatgcggcggcggcagtttttgagccagaccgagaataccagccaggaaagaccaacagagacatgttcgcgaaccttaaggctcaggcatggtgggtagtgagaaatcgtttctataacacctggagagctatagagcatggcgagacgttccctgacgaccaactcatcagcctttcatctgacatcaaaaatctcgaatacctcaaggcagaactgtcacgccctcgcgtcgattacgacaacaacggcagggtaaaggtagagagcaaaaaggacatgaaaaaacgcggcatcccgtcgccaaacatggccgactctttaattatggcctttgcgccaacttctaatgctctggcgaggcttaaagcccttgccagttaa

SEQ ID NO: 526767 - DNA, 294 bp, Stenotrophomonas maltophilia
atggacggtcagcatgatgactttggtatcaacgaacatgcgcgcgattttgcgcgtggcttcaagcccgccaataccgggcatgttcatatccatcagcaccacgtctgcggagttcgcgcgacaccatttgacggcatcttcgccacagcacgcctcgccggcaactttaataccctttatatcttcaagaatgcgtcgtatccctgcgcgcaccagttcgtggtcatcaacaagaaggacgttgatcaaaggaaatgtctccagaatagggataacgctactgactgctaa

SEQ ID NO: 526768 - DNA, 225 bp, Stenotrophomonas maltophilia
atgagcacacctgaatttgccactgccgagaataaccaggaactggcacaggaagtaaactgcctgaagtcgctgctgacgcttatgctacaggcgatgggccaggctgatgctggacgtgtgatcattaaaatggaaaaacagatcgcgcagatggaagatcaggcggaatccgctgtttttgccaatacagttaagcaaattaaacaagcctaccgccagtaa

SEQ ID NO: 526769 - DNA, 522 bp, Stenotrophomonas maltophilia
atggcgcaatatcaatccgagaattatttcgccattgacccggtactgaagccggagaatttcattcagggtcatttgccctggacggatgaattattcacggatgcccagcaattatgggacggcgcgcgggaccacggtttacgtaagggaataacccagtgtctgatgctgccaaatcatgcgctcggcttcctctccgtgtcatgtactagcttacaggcacactcgatatccagtgaagaaattgagctgcgtttacaaatgctggttcagatggcgctcactacactgttgcgctttgaacatgagacggtgatgccgccggaaatgaaattcagcaagcgtgaacgggaaattctgaagtggaccgcagaagggaagacgtcggcagaaatcgccatcattctttccatctcggaaaataccgtcaacttccatcagaagaatatgcagaagaaattcaacgcgccgaataagatccagatagcgtgttatgccgcggcgactgggcttatttga

SEQ ID NO: 526770 - DNA, 237 bp, Stenotrophomonas maltophilia; identical to SEQ ID NO: 118945

SEQ ID NO: 526771 - DNA, 753 bp, Stenotrophomonas maltophilia
atgagtgcaattgacgtcaaaaacctggtgaaaaaattccacgggcaaacggtgctgcacggcatcgaccttgaggttgagcagggcgaagtggtggcaattatcggcccgagtgggtcagggaaaaccacgctgttgcgcagcattaatttgcttgagcagcctgaaggcgggacgatccgcgtgggcgatatcaccattgataccgggaaacccatcagccagcaaaaagggctgattcgccgcctgcgtcagcatgttggcttcgtattccagagctttaatctctttccgcaccgtacggtgctggaaaatattattgaaggcccggtcatcgtaaagggtgaaccaaaggaagacgcgacggcccgcgcccgcgagctgctggcaaaggttggcctggccgggaaggagacgagctatccgcgtcggttatctggcgggcagcagcagcgtgtcgccattgcgcgcgcgctggcgatgcgcccggatgtgatcctgttcgacgaacccacatccgcactcgatcctgagctggtcggggaagtgcttaacactatccgacagctggcgcaggaaaaacgcacgatggtgattgtgacgcatgaaatgagcttcgctcgcgacgttgccgatcgggcaattttcatggatcaggggcgaatagtagagcaggggccagctaaggcgctgtttgccaatcctcagcagcctcgaacccgccagttccttgaaaaattcttaatgcagtag

SEQ ID NO: 526772 - DNA, 669 bp, Stenotrophomonas maltophilia
atgcaagaaagtattcaactggttattgattcgctgccgttcttgcttaagggcgcggtgtttactttacagctcagtatcggcgggatgttcttcgggctggtgctcgggtttgtgctggcactgatgcgcatgtcgaacgtctggccggtgcggtggctggcgcggttttacatctccgtgtttcgcggaacgccgcttatcgcccagctgtttatgatttactacgggctgccccagttcggtatcgagctggatccgatcccggcggcgatgattggcctgtcgctgaatacggcggcgtacacctctgaaacgctgcgtgcggcgatctcgtccatcgataaaggacagtgggaagcggcggccagtatcgggatgaccccgtggcagacgctgcgccgggcgatcctgccccaggcggcgcgcgtggcgctacctccgctgagcaacagctttatcagcctggtgaaagacacctcgcttgcggcgaccattcaggtgccggagctgttccgtcaggcgcagctgatcacctcgcgcacgctggaagtgtttaccatgtatctggcggcctcgctgatttactgggtgatggcgacggtgctgtccgccctgcaaaactattttgaaaaccagcttaaccgccaggagcgagatccaaaatga

SEQ ID NO: 526773 - DNA, 987 bp, Stenotrophomonas maltophilia
atgtcactacagaatttaacgcgctttccccgtctggaatttatcggcgcacccacgccgctggagtatctgccgcgattttctgactatctggggcgcgatattttcattaagcgtgacgatgtgacgcccatggcgatgggcgggaataagctgcgcaagctggaatttctcgccgccgatgccctgcgcgagggcgcggatacgctggtcaccgccggggccattcagtctaaccacgttcgccagacggcggcagtggcggcgaagctgggccttcactgcgtagccctgctggagaacccgattggcacgcaggcagagaattacctgactaacggtaaccgcctgatgctggatctgttcaacgtccaagttgaaatggttgacgcgttgaccgacccggctgcacagcttgatgaactggcgacgcgcctggaagcgcagggctttcgtccgtacgtcatcccggttggcggctcgaatgcgcttggtgccctcggctatgttgagagcgcgctggaaatcgcccagcagtgcgaaggcgcggtgagtttgtcctcggtggtagtggcgtccggcagcgcgggtacccatgccggtttagcggtcgggcttgagcaactgatgccggacgtagagttgattggcgtgacggtctccagaagcgttgcggatcaaaagccgaaagtcgtcaccctgcaacaggcggtggcagaacagcttgcgcttcaggcgaaggcggaaatattgctgtgggatgactacttcgcgccgggttatggcacccccaatgatgaagggatggaggccgttaagctgctggcccgcctcgaaggtattctgcttgaccctgtctataccggtaaggcgatggcgggccttatcgacggtatcgcccgcaagcgctttaaggatgaaggacccattttgtttgttcatactggcggggcgcctgcgctgtttgcctatcatccccatgtctaa

SEQ ID NO: 526774 - DNA, 801 bp, Stenotrophomonas maltophilia
atgaaattagcagttctgggtcgtcaggcgctgatggggatgatggccgttgcgctggtcgcggggatgagcgtgaaaacgttcgcggcagataatctgctcaacaaagtcaaagagcgcggcacgctgctggttgggctggaaggaacctatcctccgttcagcttccagggcgacgacggtaagctgaccggttttgaagtggagtttgcgcaagagctggccaagcatctcggcgtcaaagcctccctgaaaccgaccaaatgggatggtatgctggcgtcactggattccaaacgtatcgacgtggtgattaaccaggtgaccatttctgacgagcgtaagaagaagtatgacttctctacgccgtacaccgtgtccggtatccaggcgctggtgaagaaaggtaacgaaggcagcatcaaatccgccgcggatctgaaaggtaagaaagtcggcgtcggtctgggcaccaactacgaagagtggctgcgccagaacgtgcagggcgtggacatccgcacctatgatgatgacccgacgaaataccaggatctgcgcgtaggccgtatcgacgccattctggttgaccgcctggcagcgctggatctggtgaagaaaaccaacaataccctggccgtcgcgggcgatgcattctcccgtcaggagtccggcgtggcggtgcgtaaaggtaacgaagatctgctgaaagccattgatgctgccattgctgaaatgcagaaagacggcagcctgaaggcgctttctgagaagtggttcggcgcagacgtgacgaaataa

SEQ ID NO: 526775 - DNA, 552 bp, Stenotrophomonas maltophilia
atgacggtgcagcaatctaaaagacggcctttaagccgctacctgaaagactttaaacacagccagacgcattgcgcccactgtaaaaaattactcgaccgcatcacgctggttcgtcgcggtgaaatcgtgaataagattgcgatttcccgcctcgacacgctgatggatgaagccgcctggcttgaagagcaaaaagagtgggtagcgctttgccgtttctgtggcgatctccactgcaaagagcaaagcgacttcttcgatattatcggcttcaagcagttcctgtttgaacaaacggagatgagtcacggcaccgtgcgtgaatacgtggttcgcctgcgccgcctgggtcagcatttgaccatgcaaaatatctcccgcgatctgctgacgaccggatacctggatgaaaatctggagccctggctgcccgccaccagtaccaacaattaccgcatcgcgctgcgaaagtacgcgcaatataaagtccagatgccgggcgtcataaagcagaaagtccacgccggaacaacttctgatatatattaa

SEQ ID NO: 526776 - DNA, 720 bp, Stenotrophomonas maltophilia
gtgaattcactctataccgctgaaggtgtaatggataaacactcgctgtggcagcgttatgttccgctggtgcgtcacgaagcattgcgcctccaggtgcgtttgccggcgagcgtggaactggacgatctgctacaggcgggcggtatcgggttattgaatgcagttgaccggtacgacgctctgcaaggaacggcatttacgacttacgcagtgcagcgtattcgtggtgcgatgctggacgagctgcgcagccgcgactgggtgccgcgcagcgttcgccgcaacgcgcgcgaagtggcgcatgcgatggggcagctggaacaggaactggggcgcaacgcgacggaaaccgaagtggcggagcgtctgggcattcctgttgaagagtatcgccagatgttgctcgatactaataacagccaactcttctcttatgatgagtggcgcgaagagcatggcgatagcatcgagctggtgacggatgaacatcagcaagaaaacccgttacaccacttactggaagggaatttacgccagcgcgtgatggaagcgattgaagctttaccggaacgtgagcaactggtgttaaccctctattaccaggaagagctcaatctcaaagagattggcgccgtgctggaggtgggcgagtcacgggtgagccagctgcacagccaggccattaaacgcctgcgcacaaaactgggtaagttatag

SEQ ID NO: 526777 - DNA, 1239 bp, Stenotrophomonas maltophilia
gtgaacgtgctggcaaaagacggctccatgaaaattcaggttggcgcgaacgatggccagaccatcaccatcgacctgaaacaaatagactctaatactctgaaactgtccggttttaacgttaacggtaaaggtggcgtagccaacgcagttgcaactgcagccgatatgaccgctgctggctttaccctggctggtaatacgtacacaggttctgcaggatttaaagctgcatcttctgcagatgtattaggtagcctggcaaatggtgacactgtcctcagtgctggcactgttgctgatggtctctcaggagcagcaaatacctacacctacgataaagcaaacgacaagtttactttcggtgtaacaggcgcgacctctgcacaggttctgagctacctgaacccatctgcgggcgacactacctcagctaccgttactatcggtacaactaaacaagacgtcatcattgctaaagacggtactttaaccgctaaagatgatggtgctgctctgtatctggatactaccggcaacctgaccaaaaacagcgcgggtaccccaccagttgcaacactggctggtctgcaggctaacggcggtggtactgcgattgcttcttctattaccactgcatctggcgaaaccctgactctggcaggcggtacggctggtactatcgatgttactaatgcctctatcagcgctgacaaactgcagagcggtgctgctgcagcaggttatacaacatctaccggctatgccgttgacaacgccggtgcggttaaaaacggtgctgcggatgtgtatgttgataacaacgctgcattaaccaccacaaatacagctacttattttgttcagactgatggctctatcaccaatggttctggcaaggttgcgcacaaagatgcgaatggtaagatcaccactgacgctcagactgctactactgccactactgacccactgaaagccttggacgacgctatcagctccatcgataaattccgttcttctctgggtgcggtacagaaccgtctgagctctgcggtaaccaacctgaacaacaccaccaccaacctgtctgaagcgcagtcccgtattcaggacgccgactatgcgaccgaagtgtcaaatatgtctaaagcgcagataatccagcaggctggtaactccgtgttggccaaggctaaccaggttcctcagcaggttctgtctctgctgcaaggctaa

SEQ ID NO: 526778 - DNA, 732 bp, Stenotrophomonas maltophilia
atggctgaattactgttaggcgtcaatatcgatcacatcgccacgttacgtaatgcacgcggtaccgcgtatcccgatccggttcaggcggcatttatcgctgagcaggctggcgccgacggcattaccgtccacttgcgtgaagatcgtcgccacatcactgaccgcgacgtgcgcatcctgcgtcagacgctggatacccgcatgaacctggagatggcggtgacagaagagatgctggcgattgcctgcgagaccaaaccgcatttctgctgcctggtgccggaaaagcgtcaggaagtgaccaccgaaggcggtctcgatgtggccgggcagctcgacaaaatgcgcgatgcctgcaaacgcctggcggatgccggtatcctggtatctttatttatcgacgctgatttcacccagattaaagccgctgccgacgtgggtgcgccgtatattgaaattcacaccggctgctatgccgatgccgaaaacgacgcagcgcaggcgaaagagctggagcgaatcgccaaagcggcaacctacgccgcgagcctgggactgaaggttaacgccggacacggcctgacctatcacaacgtaaaagccattgctgccctgccggaaatgcatgagctgaacattggccacgccattattggtcgtgcggtgatgagcggcctgaaagaggcggtgtccgagatgaagcgcctgatgctggaagcgcgtcagtaa

SEQ ID NO: 526779 - DNA, 708 bp, Stenotrophomonas maltophilia
atggatggatggcagcgcgcctttgtcctgcatagtcgtccctggagcgaaaccagcctgatgctggacgtcttcacggaagagtccggtcgcgtgcgccttgttgccaaaggcgcacgttccagacgttctaatctgaaaggtgccttgcagcctttcaccccgctgctggtccgctttggcgggcgaggggaagtcaaaaccctgcgcagtgctgaagccgtctccctggcgcttcctctttctggtatcacgctctacagcggtttgtatgtcaacgaactcatttcacgggttcttgaacatgagacccgcttctctgaacttttctttgattacctgcactgtattcaggcacttgctggcgcaaccggcacccctgagcctgtgctgcgtcgtttcgaactggcgctgctggggcaccttggttacggcgttgattttctgcactgtgcgggaagcggagacgaggtagaagacaccatgacctatcgctatcgtgaggaaaagggctttattgccagtgtcgtcgtcgataacagcacttttaccgggcgccagctccgggcactgtatgaacgcgagttcccggacgccgacaccctgcgtgcggcaaaacgctttacccgaatcgcgctcaagccgtatcttgggggcaaacctttaaagagccgcgaattattcaggcagtttatgccgaaacgctaa

SEQ ID NO: 526780 - DNA, 891 bp, Stenotrophomonas maltophilia
atgagcgaagaaaaaacgtattgcggatttattgccatcgtcggacgtccgaacgttggcaaatccaccctgttgaataatctgcttggacagaagatttccattacctcgcgtaaggcgcagaccacgcgtcaccgcatcgttggtatccatactgaaggcgcgtatcaggcgatctacgtcgataccccgggcctgcacatggaagagaagcgtgccatcaaccgtctgatgaacaaggcggcgagcagctccattggcgacgtagagctggtgattttcgttgtggaaggcacccgctggacgccggacgacgaaatggtcctgaacaagctgcgtgacggcaaaacgccggtgatcctcgcggtcaataaagtggacaacgtgcaggaaaaagccgaactgctgccgcatctgcaatggctgggcagccagatgaacttcctggacatcgtcccgctgtctgcggaaacgggtctgaacgtcgataccatcgcgggcatcgtgcgtaaacatctgccggaagcgactcatcacttcccggaagactacatcaccgatcgctctcagcgttttatggcgtctgaaatcatccgtgagaagctgatgcgtttcctgggcgctgaactgccgtactctgtgacggtggagatcgagcgtttccagagcaacgagcgtggcggctacgatattaacggtctgatcctcgttgagcgtgaaggtcagaagaagatggtgatcggcaataaaggtgccaagatcaaaactatcggaatcgaagcccgtaaagacatgatggacatgtttgaagcaccggttcacctggaactgtgggtgaaagtgaaatctggctgggccgatgatgagcgtgcgctgcgcagcctcggctaa

SEQ ID NO: 526781 - DNA, 681 bp, Stenotrophomonas maltophilia
atgaaccccatcgtaattaatcggcttcaacggaagctgggctacacttttcatcatcaggagttgttgcaacaggcattaacccatcgcagtgccagcagcaaacataatgagcgtctcgagtttttgggcgactctattttaagtttcgtgattgcaaatgcgctttatcatcgttttccgcgtgtggacgaaggtgatatgagccgcatgcgcgccacgctggtgcgcggcaacaccctcgctgaaatcgcacgcgagtttgagctgggtgagtgtctgcgtctggggccgggtgagctgaaaagtggtgggttccgtcgtgaatccattcttgccgatacggtcgaggcattaatcggtggcgtgttcctggacagcgatatccagaccgtagaaaagctgatcctgaactggtatcagacccgtctggacgaaatcagcccgggcgataaacaaaaagatccgaaaacgcgtctgcaagaatatttgcagggtcgtcacctcccgctgccatcctatctggtggtgcaggtacgtggcgaagcgcacgatcaggaatttaccatccattgccaggtcagtggcctgagtgaaccggtggtccgcacgggttcaagccgtcgtaaggctgaacaggctgccgccgaacaggcgttaaaaatgctggagctggaatga

SEQ ID NO: 526782 - DNA, 228 bp, Stenotrophomonas maltophilia
atgtactaccagcagccaggccagcagctggcgacctggattgtgccgccgggacactacttcatgatgggtgacaaccgcgataactctgcggacagccgttactggggctttgtgccggaagcgaatctggtcggtaaagcaaccgctatctggatgagtttcgagaagcaggaaggcgagtggccgaccggcgttcgcctgaatcgtattggcggaattcattaa

SEQ ID NO: 526783 - DNA, 693 bp, Stenotrophomonas maltophilia
atggcgaacatgtttgccctgatcctggtcatcgctaccctggtaacaggtctgttatggtgcctggataagtttatcttcgccccaaaacgccgtgaacgtcaggctgccgcgcaggctgccgcgggcgatacgctggacgcgaaaaccctgaaaaaagtcggcccaaaaccgggctggctggaaacaggggcatcggtcttcccggtgctggcgattgtgctggtggtgcgttcatttatctatgaaccgttccagatcccgtcaggatcgatgatgccaacgctgctgatcggtgatttcattctggttgagaagtttgcctatggcatcaaagatccgatctaccagaaaacgctgatcgaaacgggtcatccgaaacgtggcgacattgtggtgtttaaatatccggaagatccacggctggattatattaaacgcgcggtaggtctgccgggcgataaagtaacctacgatccgatagcgaaggaagtgaggattcagccaggctgtagctctggaactgcatctccaacgttgagccaggtgattttgtgcagaccttcgcccgccgtaatggcggtgaagcgaccagcggattcttccaggtgccaaaaggtgaaaccaaagagaacggtattcgtctggttgaacgcaaagagacgctgggcgatgtcactcaccgcattctga

SEQ ID NO: 526784 - DNA, 1806 bp, Stenotrophomonas maltophilia
atgaagaacatacgtaacttttcgatcattgctcacattgaccacggtaagtcgacgctgtctgaccgtattatccagatttgcggtggcctgtctgatcgtgaaatggcagcccaggttctggactccatggacctggaacgcgaacgcggtattaccattaaagcccagagcgtgacgctcgactataaggcttccgatggtgaaacctaccagctgaactttatcgacaccccagggcacgttgacttctcttatgaagtgtcacgctcgctggcggcctgcgaaggcgcgctgctggtggtggatgccgggcagggcgtagaggcccagacgctggcaaactgctataccgccatggaaatggatctcgaagtggtgccggttctgaataaaatcgacctgccagccgccgatcctgagcgcgtagcggaagaaattgaagacatcgtcggtatcgatgcgaccgatgcagtgcgctgctcggcaaaaaccggcgtaggtgttccggatgtactggaacgtctggtgcgtgacattccgccgccggaaggtgacccggatgcgccgctccaggcgctgatcatcgactcctggtttgataactacctgggcgttgtctcgctggtgcgtattaaaaacggcaccatgcgtaaaggcgacaaaatcaaggttatgagcaccgggcaggtctacaacgctgaccgtctgggcatcttcacgccaaaacaggttgaccgtaccgaactgaaatgcggcgaagtgggttggctggtctgtgcaattaaagacatcctcggcgcgccagtgggcgataccctgaccggcgcacgtaacccggcagataaagcgctgccaggcttcaaaaaggtgaaaccgcaggtttatgcgggtctgttcccggtcagctccgacgattacgaaaacttccgcgatgcgctcggaaagctgagcctcaacgatgcttccctgttctatgagccagaaagctcaacggcgctgggcttcggcttccgctgtggcttcctcggtctgctgcacatggagatcattcaggaacgtctggagcgtgaatacgatctggatctgatcaccaccgccccgacggttgtctacgaagtagaaaccacgtcgaaagaggtcatctacgtcgacagcccttccaagctcccgccgctgaataatattcaggaactgcgcgagcctatcgcagagtgtcacatgctgctgccgcaggagttcctcggtaacgtgatcaccctgtgtattgagaagcgtggcgtgcagaccaacatggtgtaccacggtaaccaggtggcgctgacctatgaaattccgatggcggaagtggtgctcgacttcttcgaccgtctgaagtctacctcccgtggctatgcgtcactggactacaacttcaaacgcttccaggcctccaacatggttcgcgtggacgtgctgatcaacggcgagcgtgttgatgccctggcgctgatcacccacaacgataacgcaccgtaccgtggtcgtgagctggttgagaagatgaaagagctgatcccgcgtcagcagtttgacattgcgattcaggcggccattggtaaccacatcattgcccgttcaaccgtgaagcagctgcgtaaaaacgttctggctaagtgctacggcggcgacgtcagccgtaagaaaaagctgttgcagaagcagaaagaaggtaagaagcgtatgaagcaggtcggtaacgttgagctgccgcaggaagcattccttgccatccttcatgttggtaaagacggaaacggtaaataa

SEQ ID NO: 526785 - DNA, 477 bp, Stenotrophomonas maltophilia
atgattaaagagtgggcgacggtcgtatcctggcaggatggagtagcgcttgtcagctgtgacgttaaagcatcatgcagcagctgcgcttcgcgagccggttgcggcagccgcgtattgaataagctggggccgcaaacgtcgcacactattgctgtgtcgagcgatcagccgctggtggcagggcaaaaagtggagctcggcatcgctgaaggcagcctgctcacttccgccatactggtttacctctctccgctcgccggactgtttgtgatgggcggggttttccagatgctgttcggcacagatttggccgccatgtgcggtgccgccttgggcggtgtgggcgggttctggcttgctaaaggcgtttccccaaggcttaccgcccgggaagcctggcagcccgtcattctcagcgttgcactggcacccgaccaacttcgtgttgagacgctctcttctgaggcccggtga

SEQ ID NO: 526786 - DNA, 933 bp, Stenotrophomonas maltophilia
atgtctttgatggcgggtagcctgttcttctctgctaacgcctcggctgatgtttcatccggggcgttgttgcagcaaatgaatctggccagccagtcactcaattacgagttggcatttattagcatcaataagcagggtgtcgaatcgttacgctatcgccacgcccgccttgataatcagccgctcgcccagcttttacagatggatggcccgcgtcgggaagtggtccagcgtgggaacgaaatcagctatttcgagccaggccttgagccgtttacgctcaatggtgactacatcgttgattccctgccatcgctcatttacaccgattttaaacgtctcgccccctactatgattttatctcggtggggcgaacgcgtattgccgacaggttgtgcgaagtgatccgcgtagtcgcgcgggatgggacacgttacagctatatcgtctggattgacgcagagacgaagctgccgatgcgcgttgatctgctcgatctcgacggtgaaacgctggagcagttccgcgtgatctccttcgacgtgaacggtcaggttggcaacagtatgcagaatctggccaaagccagcctgccgcctttgctttccgtacctgccggcgattctgtcaatttcaactgggtaccttcctggatcccgcaaggattcagcgaagtatccagcagccgtcgccagctgccgactatcgaaacaccggttgaatcgcgcctctattccgatgggctatttagcttctcggtgaatatcaatcgcgctacggcgaacagttccgaacagatgctccgtaccggtcgccggacggttagcacgacggtacgcgataatgcggaaattaccattgttggtgaattaccgccgccaacagcaaaacgtatttcagacagcattaaattcagggctgcgcaatga

SEQ ID NO: 526787 - DNA, 249 bp, Stenotrophomonas maltophilia; identical to SEQ ID NO: 114643

SEQ ID NO: 526788 - DNA, 186 bp, Stenotrophomonas maltophilia
atgggaaagatgacgttcgtctttgaatatgaggacggtaaagagccgccggttagcgctggtatggaatttatgggcgggaagattgttgcagcagcttttcgtgatgctctcgaagagccagaagtatgtgatgagatagtgcccgaccctgaatggctggaaaaaagcctcagccggttatga

SEQ ID NO: 526789 - DNA, 192 bp, Stenotrophomonas maltophilia
atgcgcatcactatgacggttaactcaacgctggatattgagagcgccatcgccgcactgcgcaagttcataagcgagaagaaaccgaatgatgggacgagcgaggtgtggggtatcggcattaccggcggcagctactttacagtgggtataaagccgaacgtcagttatacagttaagcagcaggattga

SEQ ID NO: 526790 - DNA, 201 bp, Stenotrophomonas maltophilia; identical to SEQ ID NO: 132242

SEQ ID NO: 526791 - DNA, 375 bp, Stenotrophomonas maltophilia; identical to SEQ ID NO: 156724

SEQ ID NO: 526792 - DNA, 198 bp, Stenotrophomonas maltophilia
atgccgggaaaagtcattaagggtgagcgcttccagattggcgaggtatggcagtcgccacgcggcttcctctacaaagttgtcgatgttgcagggaaagaggcggtccttcgcttgggggctcatggccttgggcgaaaaacgaagcgatgggttgacgccatcagtggttggtcgctgtatgtgaaggaggagtga

SEQ ID NO: 526793 - DNA, 216 bp, Stenotrophomonas maltophilia
atggacatcatcgacaccgcagcagagattgaagagcttcagcgtaacgccgccctttccgctcaccggctcaaccgcaacgccgtatcagctgagcgttgtgaagaatgcgacgaaccaattcctgagccacggcgcgctgccgttcccggctgccagacttgcgcggagtgccagggcgttatcgaattgaggaataagcagagggggatgtaa

SEQ ID NO: 526794 - DNA, 510 bp, Stenotrophomonas maltophilia
atgattactcaggcaagacttaaggagtgcttagattacaacccgcttactggatcgtttacttggataaaatccaccgcttattgcataaagccgggaatgccagctgacagcttgacctgcaatggttacatcgggattaagctcgacgggaagaattacttggcgcacagattggcctggctttacatgtttggcgaattccctcctggtcatcttgaccatatcaactgcgttcgtaccgacaatcgcatcgcaaatctacgcccagcgactcacacccaaaacatgcacaaccaaaggctgcgcaagaccaacaaaagcggtcacaaaggtgtcagttggtgcaataaaaccaagaaatggcactcccagtgcatgtttgagagaaagaaatatcacttgggtaaatttgaaaatattgaagatgcaattcaagccgttgagtcatttagaaatgcacgacatggcgaatttgctaatcacggacaaaccgcgagaaaggagtag

SEQ ID NO: 526795 - DNA, 192 bp, Stenotrophomonas maltophilia
atgaaccgagcctcgcccgttgatttgaggaaaagcatcgaaattgccaataacctggcgcacatcgggattcgctttgtgccgatcccggtggcgaccgaagaagaattccagacgctggccgccgagctatctcgacggcttgagcagatggcagtcgaagccgagaagaatgaaggcggtgcagcatga

SEQ ID NO: 526796 - DNA, 612 bp, Stenotrophomonas maltophilia
atgaatatgaaaactgaaaaaatcgtgatgatggacagcgatgaagcggccagcatccaaactgtgactggctgggtggaccgccaaggtcgtttctggggcggtgacgagcaccaggcgcgctggtgcggcgctactcatcgcaagtgtaaaaacaaacctgacgagcacccgattcacagcactaatggctattgcgaagaatgccaccgcgaaagccgccaggcgaagttcgccacctatgaacgcgcggtatgggccggagagccgctagttatctttgatgatgaccagtactttttcgacgctgaatcgctggccgactattgctatgagcactccctgctgccgagcgagttgcagttaatgatctgcgaacctaactacccgccggagttcgacctggaacagcactgcgaagagataatgcctgatggtgatgactattactgcttgccgcaagctgtgcgtgatgctgctgaggtgctcaataaggcgctgaaagaaagtgctccagtatcgtggagcgcaagcaaccgagtggcgatcgtctcagacgacatgctcaacgatgagcagaaggccgaaattatggcggagcgcgccgcatga

SEQ ID NO: 526797 - DNA, 219 bp, Stenotrophomonas maltophilia
atgagaccagaatcagaaaacgccgtccgcgccgcctgccgccgctgcaccgaagaaatccagcaggccatgcgcaagaagccaaagccaaactggaacgaaacagtgcctcccatcatcaacaagcatcacaagaaaattgaagctctgggagttagcctcctggagttcgtcgtatacacagggcggcttaatcgccgcttcggagcagaacaatga

SEQ ID NO: 526798 - DNA, 660 bp, Stenotrophomonas maltophilia
atgacagcgaaatactcacttctgtatgtcgatccaccctggtcttacggcaacaccatcagcaacggcgctgccgcagaccactacaccacaatgaagttaatcgacatcaagcgccttccggtgtgggagcttgccgccgaaaatgcggtgctggcgatgtggtacaccggcacgcataaccaggaggctatcgagctggccgaagcctggggctttaccgttcgcacaatgaagggctttacctgggtgaagctgaatcagaacgctgaactgcgcatcaacaaggcgctgaccgagggtgaagtcaccgacttttacgacttcctcgatctgcttaacgccgagacgcgcatgaacggcggcaatcacacccgggccaacaccgaagacctgttgattgccacccgcggcgccgggctggaacgtaagcacgccgggattaagcaggtggtctacagcccgctcggagctcacagcgaaaagccgtgggaagtgcgccaccggctggagctgctttacggagatgtgccgcggattgagcttttcagccgcagcgcggctccaggctggcaccactggggaaatcagtgcgccaccgccgctgtagaactgctgcccggctgcgccatcgatgttgtgaaaacggaggccgcatga

SEQ ID NO: 526799 - DNA, 153 bp, Stenotrophomonas maltophilia
atgacccacgctcacgacgacatcagggtcggcgcactgtgccttcccttcattggtaacggctggctaatgccatggggtgaagtggtcagcaatccattaaaggcccagcggctcgctgaggaatatcgggaaaggcaggaggcggcatga

SEQ ID NO: 526800 - DNA, 222 bp, Stenotrophomonas maltophilia
atgaacaaatttacccccgaatatcgaaaacatcttctccggccaatccctgaccggaaacttagcccgcaagaacgcgccgatcgcaaagagctttaccagatcatccgtgaggagcgtgataacgatacatcaccggcaaaaccatcgacttacaggccatgtgatccatatctgaatgacaaccgcaaaggtcttggcggtgcttcaaggagtgactaa

SEQ ID NO: 526801 - DNA, 627 bp, Stenotrophomonas maltophilia
atgacagataaaaaagtatacgccgccattagcggcgttgcttcagcgcttgctgagaagggtatcagcaaagaaaggaagcaaggtagtcaggtcaattacgcgtttcgtggtatcgacgacatttacaacgcgctggccccggagttggtaaaaaacaaactcctgatcctaccccgctacaccgaacgcaccagcgtcgagcgaaccagcaaaaatggcggtgcgctgttctacatcacggttcgtggtgacttcgatttcgtcagcaccgaggacggcagcatccacaccgtcaccacctatggtgaagcgatggatagcggcgacaaggctacaaacaaggccatgtcgatagcatacaaatacgcggcgtttcaggcgttttgcatcccaactgaggaaactgcaatcgacgcggatgccgaaacccatcaggtgcaaccggcagatgccgatcaaattctcgctgaatttactcagtacgccagtactgaaaacgacagcaaaaaattgcaggcgcaatacgcgacaacatggtcacgtctgaatggttttgctgatcaccaggctaaatgcaaagacgtcaccggcattcgactaaaagaacttaaacaggcggcttaa

SEQ ID NO: 526802 - DNA, 159 bp, Stenotrophomonas maltophilia
atgacggccgcagaacggtgggatgaagagtcattcctgcgccttatgcacgacgagataccggaaaagccggagaacgacaacgagccagtcaacctggccgccgagcggcagaacccgatcattagttgggatgaatttgcggggaactacacatga

SEQ ID NO: 526803 - DNA, 198 bp, Stenotrophomonas maltophilia; identical to SEQ ID NO: 140262

SEQ ID NO: 526804 - DNA, 600 bp, Stenotrophomonas maltophilia
atgcacgaagaagcattggtgatgaacaagatgttcgatgaccagctcgccgcgcagatcgaagcagaccacgaaatggctctgctgatgaacgacaagtttgaccgtgacggagaagagcagcgccgccaggcggaacaggctcagcgtgaacgtgacgagcggctgaagcaggaagcggcagagcaagcccgccgcgatgccgaagcgaaacacaaagctgagattgaagccgcagcacgccgtgaagctgaagagaaagcacgtgcagagctggcggaacgccagcgcattgaagcggaacagcgtgcggcacgcgagaagcaggaagcagaagcccgggcggaaagagaaaaagctgcggcagtggaagctgagcgcctcaaagcaaaacaggcagaagagaaacgcctggcagaagagaagcgaatcgccgatgagcaggcaaagcgtgaagccgatgtgaagcaccgcaagacggtcggcaccaacatcgttaacgcgctaaccagccacaccagcatcacgcgagaacaggctatcgaagtgcttaccgttctgaaagatgacctgatcccctgcgcgaaaattcattactga

SEQ ID NO: 526805 - DNA, 1440 bp, Stenotrophomonas maltophilia
atgacagtacccgtacaacatcctatgtatattgatggacagtttgttgcctggcagggtgatgcctggattgacgtgatcaatccggccacggaagaggtcatttcccgtattcccgatggcaccgccgaggacgcccgcaaggccattgacgcggcagagcgcgcgcaggctggctgggaggcgctgccggccattgaacgcgccagctggctacgcaaaatttccgccgggatccgcgagcgcgtcagcgaaatcagcgcgctgattgtggccgaagggggcaagatccagcagctggcggaagtggaagttaactttacagctgactatatcgactatatggccgagtgggcgcgccgttatgaaggggaaatcattcagagcgaccgtccgggcgagaatattctggtgtttaagcgcgcccttggcgtcaccaccggcattctgccgtggaactttcccttcttcctgattgcccgtaagctcgctcctgcgctaatcaccggcaacaccatcgttatcaaaccgagcgaatttaccccaaacaacgccattgcgtttgccaaaatcgtcgacgagattggcctgccgaaaggcgtcttcaacctggtgctgggccgcggtgaaaccgtcggacaggagctggccgggaacccgaaagtggcgatggtcagcatgaccggcagcgtcggggccggtgaaaagatcatggctgcggctgcgaaaaacatcaccaaagtggggctggagctgggtggtaaagccccggccatcgtgatggacgatgccgacctcgagctggccgtgaaggccattgtggattcacgcgtcatcaataccggacaggtgtgtaactgcgcggaacgtgtctatgttcagaaggggatctatgaccgctttgtgaatcgtctgggcgaggcaatgaaagccgtccagtttggcaatccggctgagcgaacggatattgccatggggccgctgatcaacgccgccgcgctggagcgtgtggagcagaaggtggcgcgcgcggtgcaggaaggggctaaagtggtccttggcggtaaagcggcagagggtaaagggtatttttatcccccaacgctgctgctggacgtacgtcaggacatggccatcatgcacgaagagacctttggcccggtgctgccggtggtggcttttgacaccctggaagaggccctgaaaatggccaacgacagcgactacggtttaacctcgtctgtatatacgcaggatctgaatgtcgccatgaaagccattaaagggcttaagttcggcgagacctacattaaccgtgaaaactttgaagcgatgcagggcttccatgcgggctggcggaaatccgggatcggcggggcggatggcaaacacggtctgaatgagtatttgcagacgcaggtagtctatttacagtcgtaa

SEQ ID NO: 526806 - DNA, 795 bp, Stenotrophomonas maltophilia
atgacaatggcacttttcccctgtctgcctggcacaacactcgacgccgtgaataccgttggggcgtggcttgctcaggacgactatcaggacaaccagcccgttgatctggtgattctggcgggtaacgcggtgatccccgcgattgatgctgcctgtaaaatcgcggctgaacagggggttcctctgatcatcagcggcgggatcggtcactcgacgaccttcctctacgccgcgattgctaagcacccccgctataacaggatacccaccaccgggcgggcagaggcggctattctggccgacatcgcccgtgaattctggaacattccggctgagcatcttcacgttgaggatcagtcgaccaactgtggcgaaaacgctcgcttcagccgggcgttgatgaaacagtccggactgaatgccgcccgggtgctggtagtgcaggacccgacgatgcagcgtcgcacaatggctacgtttgcccgcgtttgccgcgacgaggctgcatcgcccgcatggatgagtcatcccggcctgacgcccgtgctgcaaaacagtgacgacggtctggcgttcagcggcccggtcgaggggttatggccggtagaacgttacctgtcgctggtgctgggtgaatttccgcgactcagggacgacatcaacggctacggtccggcgggacgtgatttcattgcccatgtcgatatccctgccgacgtggacgccgcgtggcagatcctgcgaaacgacgtcattctcaccgacgcgctggtgagccgttctctgctgtaa

SEQ ID NO: 526807 - DNA, 606 bp, Stenotrophomonas maltophilia; identical to SEQ ID NO: 147199

SEQ ID NO: 526808 - DNA, 723 bp, Stenotrophomonas maltophilia
gtgctggtaatattggggctttggatccggaaagatattgacgaaacgcctgatttccagaaagtgaaaaaatccggccaggttgcgaaagctccgctgcgcgacaccataaaacaccactggcgtgaagtgctaattgccgccgggcttaaggttgttgagacagcaccgttctatattttctccacgtttgtggtgagctacgccactaccaccctgacctatcagaaatcccaggcgctggaggcagtaactcttggcgcactggtcgccactatcatgatcccgctgatggggctgctctccgacagggttggccgccagcgtatgtacgccgtcagtgtcttcgtgctcggcctgtttatcgtgccctggtttatgctgctgaataccggtaccacctggggaattgtgctcgcgaccgttatcgcttttggcgtactgtgggcaccggtgacggcagttctcggcacgctctgctctgaaattttcagtgccaacgttcgctacaccggtatcacgctgggttatcaacttggggccgcgctggcgggcggaacggcaccgctaatagctaccggactgctggcgaaatacgacggcgactgggtacccgtggcctggtatctgggcgtgacggtcgctatctccctcattgcaattttttgtgccagccgcatcaaccgtgaacgccaccttcaggcgcagccggaacagcgataa

SEQ ID NO: 526809 - DNA, 1653 bp, Stenotrophomonas maltophilia
atgcgcctgccccaacgcgatccttatgctcctcgcgagtggcagccacacgagaaacccgctctgctgggttccccttccaccccggaacatccaacgtcgaaacggatcgcctatggcgtggtcggcctgctggtgtgcctgaccggggcgctgggtaacgcggtcgtcaccgccaatctgcaaaatctgcaaggcaccttcggcgcctggtcgactgaaatcgcctggctgcctgccgtctatgtcatgaccaacgtctccatcaacctgctgctggtaaaatttcgccagcagtacggtttgcgcgcgtttacggaaggcttcctggtgctgtatgtgctggtcacctttttccacctgtttgtgaacgatctcagctcggcgctgatggtacgggcggcacacgggatggtcgccgccgcgctcagctcgctcggcatttattaccagatacaggcctggcccgcgaagcaccgactgaaggcgctgaccatcggcattaccggttcgtcgctggcgataccgctggcgcggctgttctccaccgagctgttgcagcttgatgagtggcgtgggctgtacttcttcgagctgggtttggccctgatctcactggcctgcgtgatggtgctgaaactgcccccgggcgatcgacgcaaagttttcgagaagaaagatttcatcaccttctttttgcttgcgcccggtatggcgctgttgtgcgcggttctgtcgctagggcgtctggaatggtggtttgaaacaccgtggatcggctgggcgttggctctctcgctggtgctaattgtctgtgcaatcgtttttgaacataaccgcagcaacccgctgctcaatacccgctggctgtccagcggcagcatcgtacgcctggggttgattatgctgctgatccgcatcgtactggcggaacagaacaccggcgtcatcggctggctgcaatatgcgggcctacagaatgaacagatgacccatctggcgtggtctattttcgccggaatcgtctgcggtatcgtcaccagctgtctgacgatcaaacccactaagctggcctggccgattatcacctcgctggcgctaatgattgttgcttcgctgctggacagccagtccaacaacctgacccggccggatcaactgatgttcagccagttcctgcttggtttcggcagcgctttcttcctcgcccctgcgatgctggccgccattggcggggtgatcgccgatccacgcaatctggtcagcttttccgtgatgtttggcatgagtcagaaccttggtggcctgctgggttctgcaatccttggtaccttccagacctggcgcgagaagtaccattccagcctgctggctgaccagctcaccaccctcaacccgctggtgaacgaacgcattcagctttacacccagatgtataaaagcttggttggcgacagttccctgttgggaacccaggccattattcagctacagacggtgacgacgcttgaggcaaacattctggcttacaacgatacttatctcctgacggcgagcattgccacagccacgctggtctggattttatggcgcttgctgcgcctgcgcatcaccgcccgtatggcccttaagaacgccactggcaataagtaa

SEQ ID NO: 526810 - DNA, 1083 bp, Stenotrophomonas maltophilia
atgagtcagcaggatgccgccaaagagcaggccaacacccgcaaaaatgtacgcgtcgtttccattttcaccgccgcggctatcggcattgtcggggtgctggtgatcctttatgcctggcagttgcccccgttcacgcgtcatacccagtttactgataacgcctacgtgcgcggccagaccacgttcatcagtccgcaagtcaacggctacattactgaggtccatgttcaggattttgtgcaggttaaaaaaggcgacctgctgttgcagattgatgaccggatctatcgccagcgcgtccatcaggccgaggcgcagctggcaatgaaaattgctgcgctgaacaacaacctgcaacagcgtaaaagcgcggaagcggtgattgccaaaaacgaagcggcactgaaaaacgcccgtgcccaaagtctgaaaacccaggcggatctgaaacgcgtgaaggatctgaccgcagacggctccctgtccattcgcgagcgcgatgcggcgctggccagtgccgcccaggggagcgccgatatcgaccaggcgaaagcaacgcttgagatgtcgcgccaggatctacaaacggttatcgtcaatcgcgcttcgctggaggcggacgttcaaaatgcgaaagccgcgctggagcttgcgcagatcgatctgcaaaacacccgcattgtcgcgccgcgtgacggtcagctcgggcagattgcggtgcgtcttggagcgtacgtcaccgccgggacgcaccttaccacgctggtcccgccgcagcactgggtgatcgccaatatcaaagagacgcagctggcgaatttacgcgtcggacagccagtgaaattcaccgtcgatgccttaaacgataaagcctatcagggccgcgtggagagcatatccccggccacaggcgtcgagttcagcgctatcaccccggataacgccacgggcaactttgttaaaatcgcccagcgcatcccggtacgcattgaggtactcggtgagccggaggcgtaccggctgctgcgccctggcatgtcggtgcaggtcaccatcgacacgcgggaggcgaaacaatga

SEQ ID NO: 526811 - DNA, 183 bp, Stenotrophomonas maltophilia
atgaatggtaaaaatgcgccgcacagtttacgttacgcttactcccgcgatgctgtaaatcaccatattaaaaatggaatgagtcgcgatgaatccgaggcattagtttcaatggacctgggccatggagatggtcgggggcgttatattaaacaagtttattttcgtaaggaaaaagaatag

SEQ ID NO: 526812 - DNA, 207 bp, Stenotrophomonas maltophilia; identical to SEQ ID NO: 193620

SEQ ID NO: 526813 - DNA, 1149 bp, Stenotrophomonas maltophilia
atggcgcaaaacatttcgtggtatggcatgatagcacccgaagagagtcaattcagggtggtaaatgtgaaaccagtaacgctatacgatgtcgcagagtatgccggtgtctcttatcagaccgtttcccgcgtgatgaaccaggccagccacgtctctgcgaaaacgcgggaaaaggtggaagcggcgatggcgcagctgaactacattcccaaccgcgtggcacaacaactggcgggcaaacagtcgttgctgattggcgttgctacctccagtctggccctgcacgcgccgtcgcaaattgtcgcggcgattaaatctcgcgccgatcaactgggtgccagcgtggtggtgtcgatggtagaacgaagcagcgtcgaagcctgtaaagcggcggtacataaccttctcgcgcaacgcgtcagtggtctgatcattaactatccgctggatgacgaggatgccattgctgtggaagctgcctgcgctaatgttccggccctatttcttgatgtctctgaccagactcccatcaacagtattattttttcccatgaagacggtacgcgactgggcgtggagcatctgatcgcattgggtcaccagcaaatcgcgttgttagccggtccattaagttctgtctcggcgcgtctgcgtctggcggactggcataaatatctcacacgcaatcaaattcatccgatagcggaacgggaaggcgactggagtgccatgtccggttttcaacaaactatgcaaatgctgaatgagggcatcgttcccactgcgatgctggttgccaacgatcagatggcgctgggcgcaatgcgcgctattaccgagtccgggctgcgcgttggtgcggatatctcggtagtgggatacgacgataccgaagacagctcgtgttatatcccgccgttaaccaccatcaaacaggattttcgcctgctggggaaaactagcgtggaccgcttgctgaaactctctcagggccaggcggtgaagagcaatcagctgttgcccgtctcactggtgaaaagaaaaaccaccctggcgcccaatacgcaaaccacctctccccgcacgttggcagattccttaatgcagctggcacgacaagtttcccgacttgaaagcgggcagtga

SEQ ID NO: 526814 - DNA, 3072 bp, Stenotrophomonas maltophilia
atgacaatgattacggattcactggccgtcgtattacaacgtcgtgactgggaaaaccctggcgttacccaacttaatcgccttgcggcacatccccctttcgccagctggcgtaatagcgaagaggcccgcaccaatctcccttcccaacagttgcgcagcctgaatggtgagtggcaatttgtctggtttccggcaccagaagcggttccggaaagctggctggagtgcgatcttcctgacgccgatactgtcgtcgtcccctcaaactggcagatgcacggttacgacgcgcccatctacaccaacgtgacctatcccattgcggtcaatccgccatttgttcccacggagaatccgactggttgttactcgctcacatttaatgttgatgaaagctggctacaggaaggccagacgcgaattatttttgatggcgttaactcggcgtttcatctgtggtgcaacgggcgctgggtcggttacggccaggacagccgtttgccgtctgaatttgacctgagcacatttttacgcgccggagaaaaccgcctcgcggtgatggtgctgcgctggagtgacggcagttatctggaagatcaggatatgtggcggatgagcggcattttccgtgacgtctcgttgctgcataaaccgagcacgcaaatcagcgatttccatgtagccactcactttaatgatgatttcagccgcgctgtactggaggcagacgttcagatgtacggcgagctgcgcgatgagctgcgggtgacggtttctttgtggcagggtgaaacgcaggtcgccagcggcaccgcgcctttcggcggtgaaattatcgatgagcgtggtggttatgccgatcacgtcaccctacgtctgaacgtcgaaaacccgaaactgtggagcgccgaaatcccgaatctctatcgtgcggtggttgaactgcacaccgccgacggcacgctgattgaagcagaagcctgcgatgtcggtttccgcgaggtgcggattgaaaatggtctgctgctgctgaacggcaagccgttgctgattcgcggcgttaaccgtcacgagcatcatcctctgcatggtcaggtcatggatgagcagacgatggtgcaggatatcctgctgatgaagcagaacaactttaacgccgtgcgctgttcgcattatccgaaccatccgctgtggtacacgctgtgcgaccactacggcctgtatgtggtggatgaagccaacattgaaacccacggcatggtgccaatgaatcgtctgaccgatgatccgcgctggctacccgcgatgagcgaacgcgtaacgcgaatggtgcagcgcgatcgtaatcacccgagtgtgatcatctggtcgctggggaatgaatcaggccacggcgctaatcacgacgcactctatcgctggatcaaatctgtcgatccttcccgcccggtacagtatgaaggcggcggagccgacaccttcgcaaccgatattatttgcccgatgtacgcgcgcgtggatgaagaccagcccttcccggctgtgccgaaatggtccatcaaaaaatggctttcgttgcctggagagacgcgcccgctgatcctttgcgaatacgcccacgcgatgggtaacagtcttggcggcttcgctaaatactggcaggcgtttcgtcagtacccccgtttacagggcggcttcgtctgggactgggtggatcagtcgctgattaaatatgatgaaaatggcaatccgtggtcggcttacggcggtgattttggcgatacgccgaatgatcgccagttctgcatgaacggtctggtctttgccgaccgcacgccgcatccggcgctgacggaagcaaaacaccagcagcagtttttccagttcagtttatccgggcgaaccatcgaagtgaccagcgaatacctgttccgtcatagcgataacgagctcctgcgctggatggtggcgctggatggcaagccgctggcaagcggtgaagtgcctctggatgtcgctccacaaggtaaacagttgattgaactgcctggactaccgcagccgaagagcgccggacaactctggctaacggttcacgtagtgcaaccgaacgcgaccacatggtcagcagccggacacatcagcgcctggcagcagtggcgtctggcggaaaacctcagcgtgacactcccctccgcgccccacgccatcccgcaactgaccaccagcgaaacggatttttgcatcgagctggataataagcgttggcaatttaaccgccagtcaggctttctttcacagatgtggattggcgataaaaaacaactgctgacgccgctgcgcgatcagttcacccgcgcaccgctggataacgacggcgtaagtgaagcgacccgcattgaccctaacgcctgggtcgaacgctggaaggcggcgggccattaccaggccgaagcagcgttgttgcagtgcacggcagatacgcttgccgacgcggtgctgattaccacggtccacgcgtggcagcatcaggggaaaaccttatttatcagccggaaaacctaccggattgatggaagtggtcaaatggcgattaccgttgatgttgaagtggcgagcaatacgccacatccggcgcggattggcctgacctgccagctggcgcaggtagcagagcgggtaaactggctcggattagggccgcaagaaaactatcccgaccgccttactgcggcctgttttgaccgctgggatctgccattgtcagacatgtataccccgtacgtcttcccgagcgaaaacggtctgcgctgcgggacgcgcgaattgaattatggcccacaccagtggcgcggcgacttccagttcaacatcagccgctacagtcaacagcaactgatggaaaccagccatcgccatctgctgcacgcggaagaaggcacatggctgaatatcgacggtttccatatggggattggtggcgacgactcctggagcccgtcagtgtcggcggaattccagcttagcgccggtagctaccattaccagttgctctggtgtcaaaaataa

SEQ ID NO: 526815 - DNA, 756 bp, Stenotrophomonas maltophilia
atgttcaccatcaataatcagtttgttttctggctgggttctggctgtgcattcatcctcgccgttttactctttttcgccaaaacggatgcgccctcttctgccacggttgccaatgcggtaggtgccaaccattcggcatttagccttaagctggcgctggaactgttcagacagccaaaactgtggtttttgtcactgtatgttattggcgtttcctgcacctacgatgtttttgaccaacagtttgctaatttctttacttcgttctttgctaccggtgaacagggtacgcgggtatttggctacgtaacgacaatgggcgaattacttaacgcctcgattatgttttttgcgccactgatcattaatcgcatcggtgggaaaaacgccctgctgctggctggcactattatgtcagtacgtattattggctcatcgttcgctacctcagcactggaagtggttattctgaaaacgctgcatatgtttgaagtaccgttcctgctggtgggcagctttaaatatattaccagccagtttgaagtgcgtttttcagcgacgatttatctggtctgtttctgcttctttaagcaactggcgatgatttttatgtctattctggcgggcaatatgtatgaaagcatcggtttccagggcgcttacctggtgctgggtctggtggcgctgggcttcaccttaatttccgtgttcacgcttagcggccccggcccactttccctgctgcgtcgctag

SEQ ID NO: 526816 - DNA, 210 bp, Stenotrophomonas maltophilia
atgacggatggctggccgctgtatgaatcccgcctgaagggaaagctgcacgtaatcagcaagcgatatacgcagcgaattgagcggcataacctgaatctgaggcagcacctggcacggctgggacggaagtcgctgtcgctctcaaaatcggtggagctgcatgacaaagtcatcgggcattatctgaacataaaacactatcaataa

SEQ ID NO: 526817 - DNA, 348 bp, Stenotrophomonas maltophilia; identical to SEQ ID NO: 6026

SEQ ID NO: 526818 - DNA, 828 bp, Stenotrophomonas maltophilia; identical to SEQ ID NO: 28366

SEQ ID NO: 526819 - DNA, 858 bp, Stenotrophomonas maltophilia; identical to SEQ ID NO: 101532

SEQ ID NO: 526820 - DNA, 789 bp, Stenotrophomonas maltophilia; identical to SEQ ID NO: 101531

SEQ ID NO: 526821 - DNA, 879 bp, Stenotrophomonas maltophilia
atgcagcatctgcaaaatacgcaaccacaagagaagtcagagagcggggaagtgattgtcctgcctccgctacaggttcgccgtcgtgcgccagcgtttacgcgtcggatgaatgagtttttacagcgcgtcatcccggcgctgctcggtctcggtctgctggtggtgctctggcagctggcggcgataaacagtaaaggtttcccgacgccgctcagcacgctcgattcggccatgaccctgtttgccgatccgttttatcgcgacgggccaaacgatatgggcattggctggaacgtgctggcgtcgttgcagcgcgtcgccatcggcttcggtctggcggcgctggcgggcattccgctgggctttttgattgggcgcttcacctttttctcccgcatgttcaacccgctgatcgcgctcctgcgtccggtcagcccgctggcctggctgcctatcggcctgctgctgttccagaaagcggagcccgcgtcgagctggaccattttcatctgctccatctggccgatggtcattaacaccgccgaaggggtgcgccgtattccgcaggactacctcaacgtggcccgggtgctgcaactctcagagtggaccatcatgcgccgcattcttttccccgccgtgctgcctgcggtgttgaccggggtacgtctctccattggcattgcctggctggtgattgtcgccgccgagatgctcaccggaggtttaggcattggcttctggatctggaatgagtggaacaacctcaacgtcgaaaacattctcatcgccatcgtcatcattggcgtggtcgggttgctgctggagcaggggctgatgctgatcgcccgtcgctttagctggcaggaaaaataa

SEQ ID NO: 526822 - DNA, 1248 bp, Stenotrophomonas maltophilia
atggcggatttgtcgagacggcgtttattgcaggccagcatgctggcgagtggtgcgatgctgttgccgggtgtcatgcaggccgcatgggcggcggggtcagataagccggagcaggattccgtgcgtatcgggtttatccccctgaccgattgcgcgccagtggttatcgcggccctgaaagggttcgataaaaaacacggcattaccattgtacctaccaaggaggcgagctgggcggcggtgcgcgacaagctggtggcgggggagctggacgccgcacacattctttacggcctgctgtacggactggagctgggtatcgcgggcaagccgcagcagatggcgaacctgatgactctcaaccagaacggtcaggccattacgctctccagcgatctggcggagaagggcgttcgtgatctcgacgggctgaaaaagctgattacacagcaggcaccgggaacctacaccttcgcgcataccttcccgacggggacacacgctatgtggctctactactggctggccagtgcgggcattaacccgtttgacgacgtgcgcactgtggtggtcccgccgccacagatggtgatgaacatgcgcatcggcaacatggtcgggttctgcgtcggcgagccgtggaacgcgcgggcgattaacgaccgcatcgggtttaccgccgccacgtcacagtccatctgggccgatcacccggaaaagatcctcggcacccgacgcgactgggtggtgaaaaatccgcacaccgcacgggcgctggtgagcgccgtgatggaagccgcgcgctggatcgaggcgtcagcggaaaacaaacgtgaaaccgcgcagatcctctcgcgccgcgcatggctcaactgcaaggaacagtacctcaccggacgcatgctcggcgaatacgacaacgggctcggtcagcgctggcaggatgcgcacccgatccgtttcttcaatgagggtgccgtgagctacccgtatctctccgacggcatgtggttcttaacccagttccgccgctggggtttgctcaacgccgcgccagattatgcgggcatcgcacagcgcattaaccagaccgcggtctggcaggatgccgcgaccgccgtgggcggcatgtccacaccgtcatcaccgtatcgcagcagtaccctgatggacggcaccgtctggaacggcaccgatccggaagggtacgccaaccgcttcgccattcaccgtaaaggggcctga

SEQ ID NO: 526823 - DNA, 1173 bp, Stenotrophomonas maltophilia
atgacgatagtggctggcagttcgcctggcgcgaccgaatggttccagcgtgcaagaatgctgcgggaggaacagctcggcagattagcgcagctgggcgcactggtgaacggcatcagtcgactggtgcatatgctacagtgcgaacgcggtgcgtcaaatgtctggctctgctcgcagggtaaattgtacgggcctgaatgcaaggccagcagggctttggtggatgaaaaccttgcggcattgcacctcctgtttagcgaaccgctgccgggcagcgccctctgcgaacgtatcgccagtgcactgcacggccttgaaacgctgatggtgctgcgtgatggcgttacaggtcaacgcgtcaccgcgccgcaggcgatggaacactacagccgcatactgcggcatctgctcaatatcgtacctcaactcagcgacagcattgacgatccgcacatcgcgggccgatttgtggccctttacagcctgatgcagggcaaagaacttgtgggacaagagcgggcgttaggggctattggtttcacccagggattctttgacgatgaaactcgccagcggctggtggatcgcattgatggccagcaggcctgctttgaggtttttatctcccattgcactccagacgtgcaggagacgtttaccctcaactgtcagccgggtctggagactgaaaaactcaggcgtgaagcgtgcacccgccagcctccggcagataatggcgataccgccctcaaatggtttgccctgcaaaccgcgcgccttgagcatctgcgcacgctggaggaggtagccattgccgatctgatgacggcagttgaggagcgtcgctatagcgaaaacctgcacgtagacgatgagtacgacgatatcctggcgcgatttccggatagaccactgctgccgctggtgcgccagcaggcgcgtgaaattgagcaactctcccgtcagcttgcttccctgcgcgacacgctggaggagcgcaagaccatcgacaaagccaaaagcgtgctaatgacgcatcagaacatgagcgaggagcaggcgtggacagccctgcgcaaaatggcgatggataaaaaccaacgcatggtggatatcgcccgtgcgctccttacggtgaaaaatctgtggaatgtaccccctggggagtag

SEQ ID NO: 526824 - DNA, 354 bp, Stenotrophomonas maltophilia
atgcagaagattgtgatcgtcgccaacggtgcggcctacggcagtgaatccctttttaacagtctgcgcctggcaatcgcgctgcgcgataaggagagtgagctggagctgcgcctctttttgatgtccgatgccgtcacggccgcgctgaaggggcagaaacccgctgagggctacaacatccaacacatgctggagatcctgaccgcgcaaaacgttccggtcaagctgtgcaaaacctgtaccgacggtcgcggcattaccgggctgcccctgattgatggcgtggaaattggcacgctggttgaactggctgaatggactcttaccgctgataaagtattaactttttaa

SEQ ID NO: 526825 - DNA, 1785 bp, Stenotrophomonas maltophilia
atgttcagatccattcgcgcccgcattattgcggcgacgacaggctgtatggtcgtcgcccttcttcttaataccattatcaactttcaggtcacgcgccaggataatcagcagtcgcagcgcgatatactgaccagcaccagcgccagccacaatatggcgattgccgactgggtcaaaagcaaaatgacggtgattgcctccgcgcagagcatcgcgctggctgacgatccggttccggtgtttaagcaattagcccaggcgggcggcttcaccaacgtctacgcaggctacgccagcaagacggcgaaattctccgatcctgcgggggtcccggcggattatgacccaaccattcgtccctggtatcagcaggtggtgagcacggacggcccggttgtgacggcgccctacgttgatgccgggaccgggaagctggtggtgacgtttgccgtaccggtgaaggagaatggtactctgaaagcagtggtagcgggcgatgtcgccatggatagcgtggtggcgaacgtgcgcgggatccacccaacgcctgccagcagcgggttgctcctgaacagcgacggcacggttattgccgccaacgagccgaccctgacgctgaagccgtttaccgggacgatcaaaggcatcgaccttgcggcgctgaagagcggtaatccggtcgacgggacgctgaatgatgaggaaaaaacctttatcgcctcagccgtgccgggcacgaactggctgctggtcgtcgccctcgacagcagcgacgccacctccggcatgcgttccttgctgaaagcgtcggcaatctcgctggtgattctggcgcttctgagcggcgccattgtccacctcctgatagcccgcctgcttaagcgcctgtccgacattcgcgacgcgatgcacagcattgccaacggcaccaacgatctgtcccagcgtctgccggatagcggtgatgacgaagtggcgcaaattgcgcaggcgtttaacgccttcagcaataagctctcggtggtgatggtccagcttcgcgacgccagcgcctcagtgaaaaacgccgcgcaggagattgcggcaggcaaccaggatctctccggacgtaccgagcaggccgcgtccagcctgcgtgagaccgccagcgccgtggaagagataaccgcctccgttacccagtcgaatgaatcggccgaagaagccaacgaccaggccagtaaggcctctgcggccgcagcgcgcggcggcgaagttgtctcgcaggcaatcagcaccatgcagtccatcgaagtggcttctgcaaagattggcgatatcaccagcgtgattgacggcatcgccttccagaccaacattctggcgcttaacgcctccgtcgaagcggctcgtgccggtgagcagggccgtgggttcgcggtcgttgcgggggaagtgcgtaatctggccagccgcagcgctcaggcggcgaaagagatcaaatcccttattgactccactaccgaaagcgttgcaaccggctcccggtttgtgcaccttgcgggcgacagcatggatgagatccgcgccagcgtcgggagcgtgtctggcattatgcgtgaaatatctattgccacccgcgagcagatgaaagggatccatgaaattaaccacgcggtgactcacctggatcgcatggtgcagcagaacgctgaactcgttgtacagtctgctgcggcggccagcgcgctgcaaagccaggcgggcgaccttgctgagaccgctggccatttccgcatataa

SEQ ID NO: 526826 - DNA, 240 bp, Stenotrophomonas maltophilia
atggcacgagttaaaacgagtctgaaactgtttggcggggatacggtagtggtgcgttgctcagaacgttgccgcatccatctgatgagtacaaaagggcaaaagcaatcgcaggcagatatccttaccgtccaggatgataaggcctggctgacggtgccttacaccggcacctgggatgtgctgatcgacagccacagccagtcgctcgaacattccgtaagttacgtggcagcataa

SEQ ID NO: 526827 - DNA, 696 bp, Stenotrophomonas maltophilia
gtgttaacgcgtgatttcttgatgaaggcagattgtaagacggcatttggtgctattgaggaatcgcttctgtggtcggctgaacaacgtgcggcgtcgcttgcggcaacgctggcctgccgcccggatgatagcccggtctggatttttggttacggctcgctgatgtggaacccggcgctcgagtttgttgaatcggcaaccggaacgctgcctggctggcaccgcgccttctgtttgcgcctgaccgccggacgcggcagcgcgtgtcagcctggacgtatgcttgcactaaaagagggcgggcgcaccacgggcgtggcataccggctgccggataccacgctggaagatgagctgatgctgctgtggaagcgcgagatgatcaccggctgctatatgcccagctggtgcaagctggaactggacgacggccgcaccgtcaacgcgctggtgttcattatggatccgcggcacccgctgtatgaagccgacacccgaacccaggtgattgccccgctgattgccgccgccagtggaccgctgggcactaacgcccagtaccttttctcgctcgatcaggagctgacgcgtctcggtatgcaggacgactgtctgagtgagctggtggtgaaggtaaaagcgctgctggaagggaacccgctcagcaatacgctgcgcccgggttttgcctga

SEQ ID NO: 526828 - DNA, 231 bp, Stenotrophomonas maltophilia
atgccatacaaatcgaaaagcgaattaccggataacgtgcaaaacgtactgcctgcccacgctcaggatatctacaaagaagcctttaacagcgcctgggatcagtacaaagataaagaagatcgccgggacgatgccagccgtgaagagacggcgcataaagtggcctgggccgccgtaaaaaatgactatgagaaaggggatgatgacaaatggcacaaaaagaaatag

SEQ ID NO: 526829 - DNA, 876 bp, Stenotrophomonas maltophilia
atgatccgaaaaattgatgtctacggcgaccgcctccgctcgcgggcgcaccagctgacgccgcgcctgctgcaggtggcgagctatatcaatgaaaatcgtgaagcggttatggagcagacggcaatggagattgccgctgtgctacacacctcggacgccaccgtggtgcgtgccattcaggcgcttgggtttggcgggctgcgggatctcaagcagaccctggagcagtggtttggcccggtggtcacctccagcgagaagatgtccacgacggtaaacacgcttaccagcgacgtcgacgcgagcatcgattttgtgctggaaggccatcaacacacctgcgcggtgttgtccgaaccgggcaaccgctacgcgatggcgcaggcggtgtcgctgctggcgcaggcgagacaggtcgctatttttggcattggcgcatccggcattctggctgagtacacctcgcgactgtttagccgtataggcctgcctgcgatcccgctcaaccgcaccggtattggcctcgccgaacagctgattgccctacagcgcggtgacgtgctggtaatgatggcgcaaaaatccgcgcaccgggagggacagaccacgctgcgcgaagcgaagcgcctgggtattcccaccattttgctgaccaacgccacggactcgcgctttagcaaagaggcaagcgtagtgatccacgtcccgcgcggcggcgagaagggcaaaatcccgctgcacggcacggtgctgctgtgcctggagatgattattctgtccgtcgcctccaccgagccgcagcgcaccatcaagtcgatgaagcgcatcaacgagttacaccgcggattaaagccgggcaagaagagcggttga

SEQ ID NO: 526830 - DNA, 951 bp, Stenotrophomonas maltophilia
atgcgcgtattttttgcaatgctggtgctggtgggttttgctgcaggagccgcagagccaacgcagacgtttactgacgacctgaaccgcaaagtggtggtgccggttaacccgaagcggattgtgtccctgcacgacctggatatcaccattccgctgatcgagcttggcgtaccgccggttgccagccatggccgtacccgaccggacggcagccattttctgcgctccagcggcatgctgacgggcatcgattttgataattccgacatcacattcatcggcaccgccgatatcgatattgaagccatcgccgcggcgaagccggatcttatcatcaccgagccgacccgcaacacgccggtcgaacagctggaaaaaattgccccgacggtgagtatcgatcacctcgacggcggcgcgccggagatctaccgcaagctggcgcagcttaccgggacagaggcgcggctgaagattctggagcgtcgctatcaggagcagatcgaggcgctaaaggcgaccatcgatacgagcaaactgaccgtctcggtgattcaggccaatcagggcaaaatcaacgccatgcacagctaccactcgcttgggcgcgtgctgcgcgacgcagggttcaggttcccgccgctgattgagagcatcccggagggcgggcgcatcgacgtcagcgccgagcgcctgccggagctggatgctgattttgtctttgcaacctggcgcggggacaccggcggaaaaccgcaggacgagctggcggcgatggatgcggtgatgccgggctggtgtcagtttctcaacgcctgccgaaccgggcattacgtgctcatctcccgcgaggaagcgatctcaaattcatttgcctcgctggggctgatggccgcgcaggtgcagtcgcagatagcgggccgtccgctgccggaggccgcacgatga

SEQ ID NO: 526831 - DNA, 1041 bp, Stenotrophomonas maltophilia
atgaaccgggctggattgagggcagtacgattttcctccttctcggcgctggttcgcccgagggcgctgctgtatctgaccgttttaacccttgccgttttactgctgctaagttttggcctgacgcacggctcgctgcccattcctgcttccgccatcggacgtgcgctgttttatcctgaacgtctgacggcggatgcgcattacattgtgatggatatccgcctgccgcgcctgctgatggcggtgctgtgcggcgcgatgctcggcatggcgggggcggccatgcagtccattacccgcaacggccttgctgaccccggacttatcggcgtgaaagagggctgtagcgcggcggtgctgctgctgatttttcagtttccgggattggggccgtactggcgtccacttatcggcatggccggtgggctgctgaccgcgctgctggtagtggcgctggcgcgtgatatctcgcgcccgcgattcatcctgatcggcatcggcgtgtcatgggcgtttgccgccgcgatgggggtctttatgacgaccgccgacgtgcgcgacgtccagacggcgatgctgtggctggcggggagtctgcatgcggcaagctggacgctggtcagcatcgctgctgcctggacagtgccggcgtttgcgctgctgctctttaccgcgcgcgccgcagacgtagccttgctcggcaaccacattgcgacggggctgggcgtgcggacttcacgcctcgcgctgctgcgcgtgtttgcccccgtggtgctcaccgcggcctgcgtctcctgcgtggggagtatcggctttgtcgggctgattgccccgcacatggcgcgcctgctgctgcgcggagggcaaacggcactgctgacgggaagtgccgtactgggcgcgctgctggtgctgctggcggataacgtcgggcggctggcatttctcccgttgcagctgccggcgggaattgtcatttcactgattggcggaccgtttttcctgctgctgctctggcagcgtcgggatcgattttag

SEQ ID NO: 526832 - DNA, 984 bp, Stenotrophomonas maltophilia
atgatgcgcacgtctgtggcctttattctctttacgctgctgcttctggcaggcgcgattgcgcacctgagcatcggggcgcgcgttatcgccccccggacggtagtagacgcatttttccacttcgacccgcgcaattttgagcatagcgtgatcgtcaggctgcgcttgatgcggctgtgcgccgccctggtgacgggcgcggcgctcggcgtcgcgggcgtgctgctgcagtcagtgatccgcaacccgctcggcgagccgcatatcctggggctaaatgcaggggcggcgctggcggtggtgctgacgagtgccctcgggctgtcgctgccgtttggccgccctctgatagccgcagccggcgccgccgcgctctttttgctggtgctaacgttctcctcatccgggcgtaccggtctcacgccgatgaaggtcacgctgtgcggcgtggcgatgtcggcatttgcctcatcgataaccgccacggtgttgattctggatgaacagacgctgctggccatgcggacctggcttgcgggggatgtggcgggagtcatcggcgagacgaccgctagcgccgcgggggccgctgccgtgggttttgcgctggcgctctggctgtcgccgtcgctgaacatgctggcgctgggggacagaatggcgcaggggcttggcgtgtcactgctgaaaacgcgcctgctcgcgctgctggccatcgccctgctgtgcggcgcggcggtttcagttgccggaccgatcgggtttatcggactcgtggtgccgcagctgattcgccgtctggtatcggtggacctgcgcgtgatggtgccgctctcagccctctgcggggcgctggttctgctgatggcggatatcgccgcccgcacgctgtttacgccgtatgagctggcaaccggcgtgatgactgcgctggtcggcgcgccggtctttatccttatggcgtcaaggatgttcaaatga

SEQ ID NO: 526833 - DNA, 813 bp, Stenotrophomonas maltophilia
gtggctcactacatcaaaaagccgggactggttcttgagaacctctccgcgggttaccagaaaaaaatcatcgttgatgatatctcccttgcgatcccccagcagaaaatgactgttctggtgggcgcaaacggctgcggaaaatcgacgctgttaagtaccctcgcgcgactgcttcagccgctcggcggcagcgcggtgctggacggcaaagccatccactcgcagccaaccaaagcggtcgcccgccagctcgggatcctcccgcagtctccgctgcttccagaagggttaaccgtatttgagctggtctcgcgcggacgtttcccctggcagaacgtgatgcgccagtggagcgaagaagacgagcgggccgtggaagaggcgttacgcctgaccggaacggcagagtttgcccatcatctggttgaaagcctgtccggcggccagcgccagcgctgctggatcgccatggtgctggcgcagcaaacgccctacatcctgctggatgaacccacgacgtacctcgatcttcgctaccaggtagagatcctcgaactgctgcacacgctgacgcgccggcacgggcgcaccgtggtggtggttctgcacgatctcaacttcgccgtgaactacggtgattcgctggtctttttacgtcagggaaaggttgagggggtactgcatgagggcgacgcctgcacgccggagctgatcaaagcggtgtttgatgtcgacgtgcatatgtcggttaacccgctgaccggcaagccgttctttatgccgttccgtcaggctgtcgacaaaccatga

SEQ ID NO: 526834 - DNA, 210 bp, Stenotrophomonas maltophilia; identical to SEQ ID NO: 491571

SEQ ID NO: 526835 - DNA, 594 bp, Stenotrophomonas maltophilia
atgcttgtctcctccaatacctattaccagaacatctccattctgcgcaaagggctcaaaaagattggttttgaaactgaccctatcgttaccattccccgtattgggctgacgctggcaagcgacacgcaaataaccgtcagagagtcttcgcctgtcgcgcctcaacccgcagagggacaatgtgtggaggcgccagcgatcgaggaggtctctgcatcctccgcgccagcagcgcccgttgccaggaagcccacgcgctggctggctgtcgttatggggctattggtcatcctggccggggcaggcgtgacgggatatatgagcgccagggaaaaccgttttgttgaggattaccgttttgcggcatccatcggggcctgtcgcgtttatcttgcgaacgacattcagactcacgctgaacgcgcttccgcgctgacctatgtagaacaattcaaggctgaatgcgcgcaatatccctggatgtacatcagctggtacgccctgcttcctcgtgcgtcggttattcgctgcgaccggccaatgaaagaaccgaaccgctgtatatctgattatttcctgaaggatagctag

SEQ ID NO: 526836 - DNA, 480 bp, Stenotrophomonas maltophilia
atgactcgttttcggcagatgctgtatgtcatcgtgacgggcctcgtcacggcaggcgtgctgacgggctattacctgtggcaccgatcttacgttcagcctttttcatgccaggctaatctggtacagcaccatccggatgagacgctgacggtctggctgaattacaccttcgacgggaaattcggcaccctgagcatgaatggccgggcaaagagcgatccgggtaaaaccatcgacaggaaaatttcctttcgggtggagagaaaagatcgcctctatttgctgacgtcagaaaaaaatatgacgttcccggacgataatgtcgaagacagctggctggaaaaatatgaaccgcaattttttgtttatccgggcaagagtatttatatgcgtatcaatgaacaacataatggtaactatatctttaccttaggaacattaccgacatatgtgtgtcgtggttcaaaaaaagaatga

SEQ ID NO: 526837 - DNA, 990 bp, Stenotrophomonas maltophilia; identical to SEQ ID NO: 147212

SEQ ID NO: 526838 - DNA, 300 bp, Stenotrophomonas maltophilia
gtgaaaaccttaaatgaagtgattgcgtcacgctcaccggaaagccaacagcgcattcaggagatggcagaggaaatgttcctcgaaaccggtctgcaacttctgcgtgaagagctccagctttcgcaaaaacatgtcgccgatcttatgggcgtaagtcaacctgcggtaacacagctggagcagcgtggaaacgatctgaagattgctacgcttaagcgttacatcgaagcgatggggggaaaacttagcattaacgtggaactacccactggcaagcaggttgcgtttcatctctag

SEQ ID NO: 526839 - DNA, 342 bp, Stenotrophomonas maltophilia
atggctgattcgcattctaccccagacaccgaccaatccggaaccgagcattcgttaattgtgggataccgcccgaatgtttacgacaaatctacgccgaaaatcatcctttccggcaagtggctgcgcgcggcggggtttgatactggacagcaggtcacagtaaaggtcatgaaaggatgcatcgttctggtggcgtataacgagcaggagcagaggttgcaggacgactataaaaggacgaaggcaaagctcaccgagatagaagacgcgcttgcagcgattcaaacacagcttcctggaaagcacctcgcaaaatcaaatacaaaccacctggcttag

SEQ ID NO: 526840 - DNA, 198 bp, Stenotrophomonas maltophilia
atgaacatccaaagatgttatccaaggttcttgatcctgccaggagaaacccttctggtcaatgcgcacaagctcgaatcgttccacaaggaaattaacagcatcagtaagattcactccagcctctatatgttcctgaatcgtcgtatcgttactgaacggtgtatcgttgatcgtgaggccgtaatgatgctctaa

SEQ ID NO: 526841 - DNA, 366 bp, Stenotrophomonas maltophilia; identical to SEQ ID NO: 81270

SEQ ID NO: 526842 - DNA, 222 bp, Stenotrophomonas maltophilia; identical to SEQ ID NO: 81269

SEQ ID NO: 526843 - DNA, 471 bp, Stenotrophomonas maltophilia
atgtctacgatcaatttatccccggtatttcctgcgaacgaacagcgagtcatccagcgagcattacgtctgctggagaaataccagcgtcaaccgagtgagtcatttacctctgccagccttacaaaaacctggctgcaactgcagatggctcacttggagcgggaagtcttcatcgtaatgtatctcgacaatcagcattgcttgctggagcgagaaacactgtttaccggcacgctcagccataccgaagtgcatccccgcgaagtggttaaatcagccctgaaacataacgctgctgcggtcattttggcgcataaccacccgtccggcacgacagaaatcagccagcaggataaacatgtcactcagcgaattgctaaagccttggctctggtggaagtgcgtgtgctggatcatcttgtggtcgggaacgaagtggtgtcttttgctgaatgtggcttgttatga

SEQ ID NO: 526844 - DNA, 822 bp, Stenotrophomonas maltophilia
atgacccgtttagtcagtcgctttggtgcagtcaacctggttcgtcgtgaccgcccgttaactcgcgacgaactggctcattatgtgcccagtgtcttcagcgaagaaaagcatgaatcccgtagtgatcgctatacctacatcccgacaattacccttctcgataacttgcaacgcgaaggcttccagccattcttcgcgtgtcaaaccagagtccgcgaccagagcaaacgagagcatacgaagcacatgctgcgcctgcgtcgtgaaggccagattactggcaaacaggttcccgaaattattctgctgaacagccacgacggctccagctcatatcagatgctaccggggttattcagagcagtttgccaaaatgggctgatttgcggtgagagttttggcgaagtacgcgtgccgcataaaggcaacgtagtagagaaagtcatcgaaggggcctacgaagtactgagaatatttgaccgcgtagatgagaaacgcgatgccatgcagtcgcttttgttgccgccgcccgctcagcaggctatggcgaaagcggcgctgacatatcgcttcggcgaggagcaccaaccggtgacagagacgcagatactttccccacgccgctggcaggatgagagtaacgacctgtggaccacttatcagcgcattcaggaaaacctgattaaaggcgggctatcggggagaacaaccaaaggaaagcgcgcccatacccgagcagtgaaaggtattgacggtgatgtgaagctcaaccgggccctctgggtgatggctgagaatatgctgcagcttgcttcatga

SEQ ID NO: 526845 - DNA, 192 bp, Stenotrophomonas maltophilia; identical to SEQ ID NO: 81268

SEQ ID NO: 526846 - DNA, 1740 bp, Stenotrophomonas maltophilia
gtggagggcaaagcgcaagaactcacgctgaccgtacaggaagcgggaaggtatcacctgacgggcgaaaacattgaggcagacggccaggtgggtaaaacgctggttacgcaagggatcgtgctgcgggtgacctcgattgaggcgacgccaggcacacagttttcgcttaagtcgttgacgcgcctggagacgatcaatgcactgaagaagcgtctgacggtcgtggaatcggagaaacagagcagtattgtgaccttaaccctgacgggtgaagatcctgacaaaatcgcccgggtgctgaatgcgatagctgaaaattatcttcagcaaaatatcgcgcgccaggaggctcaggattcgcgtagtctggattttttaccgaaaatcagagcggacctggatcaggctgaagcgcggctgaatgcctaccgggcgcagcgcgactctgtggatctgtctttagaggcaaaatccgtcctggatcaggttgtgaacgttgagaatcagctaaatgagctgacgttccgggaggcagaaatttcccagctctttaaaaagagtcaccctacctaccgtgcattgcatgaaaaaagacaaacccttgtgcgggaacgggatcgtcttaataaccgtgtgtcctcgatgccctccacgcagcaggagattttacgcctgagccgcgatgttgagtcgggccgcacgatttatttacagcttttgacgcgtcagcaggagctgaatatttcccgctccagcgctgtcgggaacgtgaggatcattgatgaggcggttacactcccggatccgataaaaccgcgaaaagcgctaatcattgtgcttggcgcgctgttcgggctcatcctttcaatggggaccgtactggtacgtcaggcgttcaaacgtgggatcacgctttccgaacagctggaagcgcaggggatgccggttctggcgacgttaccacgttcacagtggctgtggagtaaaacgcatttgcgcagaaaaaatccgttttctcgtcgctggacacacaaaacctcggatgtgcctttcctgccagtcgatcgccctgctgatatgtttgttgaagcggtacgcgggctgcgaaccagtctgcatttcaccatgatggaggctgaaaatcgcattgtgatgatttctggccccacgcaggactgcggaaaaacactggtggcgacgaacctggcggccattgccgggcagagcggtcagcgggcgctgtttattgatgcggatatgcgccagggttatgtgcataatatttttggcctggagaaccgccacggattatcctgcctgctggaagggaagcgcgactttggggaggtcattcagcatgctgaaaaagggggaattgacgtcatcacctgcggcccggaacccctgcgtccgttagaaatgctgttaagcgaacggttcattgacatcatgtcctgggttaacgagcactatgacattgtcatcatcgatacacccccagttcttgccgtcaatgatgctgcgctggttgccagagcagccggaacaacgctaatggttgcccgttacgataaaaccagcgtgaaagagatggagaataccgttaaacgtctacagcacgttggcgtgaaggtcagcggcacaatcctcaacgatattgttaaatccgcagcgctgttttacagctcggggtacagccagtatgactacggttatgcttcgaggaaaaaaggatag

SEQ ID NO: 526847 - DNA, 1467 bp, Stenotrophomonas maltophilia
atgtctgattcaaacccaattttgttctcctctgcccaaagcattgaagcttaccagcaggcgattgaacaaagcactcaggctgtgatgcattggctgaaacagcctgagatgtaccagggcaaaacggtcgcggagctgcgcgaccgtattaagctggatttcaacccgaaagggctgggcaacgaagcggcgattgaacgcgccgtggagttcttcctgaaagacagtttgtccgttcatcacccgcagtgcgtggcgcacctgcactgcccaagcctggttgtaagccaggcggcggaagtgctgattaacgccaccaaccagagtatggactcctgggatcaaagcccgtccgcaaccattattgagatcaagctgatcgaatggctgcgtacccgcgtgggttatcaggctggcgacgcaggcgtcttcaccagcggcggcacccagagtaacctgatgggcctgatgctggcgcgtgatgcgttcttcgcgcgtcaaggccactcggtacagcaggacggtctggtgggcgatctgcgcaaaattcgcgtgctgtgctctgaaaacgcccacttctccgtgcagaaaaacatggcgctgatgggtctgggctaccagtccgtggtgcaggtgaaaactgatgaattctcccgcatggatctcaccgatctggcggcgaaaatcgaacagtgcaacgcgaacggcgaacagatcctggcgattgtggccacggccggcacaacggatgcgggtgctatcgatccgctgcgtgctattgctgagctggctgcgaaacagaatatctgggtacacgttgatgcggcctggggcggcgcgctgctgatgtctgagcagtatcgtcactatctggacggcattgaacttgtggactccgtaacgctggacttccacaagcagttcttccagaccatcagctgcggtgcgtttctgctgaaagaagcgcgtcattatgagctgatgcgctatcaggcagcttatctgaactccgagttcgatgaagaagcgggtgtgcctaacctggtttccaaatctctgcaaaccacccgtcgtttcgacgcgctgaaactgtggatgagcctggaagcgctgggtcaggagcaatatgccgcaattatcgatcagggcgtgacgctggcacagcaggttgcggcttacgtaaaagagcagtctgctctggaactggttatgcaaccccagctggcaagcgtgctgttccgcttccgtccgcagacccagatggctgacgccggtatcgccctgctgaaccagaaaattggcgatgcgctgctggaatccggccgcgcaaacgtcggggtgaccgagcataacggcgtcacctgcctgaagctgaccctgctgaacccaaccgtgacgctggaggacgttaaagtcctgctgtctctggttgagcgtaccgcgcaggaagtgatggcgaagtaa

SEQ ID NO: 526848 - DNA, 1374 bp, Stenotrophomonas maltophilia
atgacggataaagtccgtattgacaccgtagatgcccacaaaagcaacgaaacctatctggcccgtcaggccgagtttgaatctaacgtcaggagttatccgcgcaaactgcctttagcgatcacgaaagcagaaggcgtgtggatcaccgatgcagataataaagaataccttgactgtttagcaggcgcaggcaccctcgcgcttggccacaatcatcctgatgtgctgaaaagcatccaaaatgtcattaccagcggcttgccgttacataccctggatctgactacgccgttgaaagacgcgttttcagaatacctcctctctctgttgcctggtcagggcaaagagtactgtctgcaattcactggcccgtccggggctgacgccgttgaagcggcgctgaagctggcgaaaaaagtaaccggtcgcagcggtatcatcagtttctctggtggttaccacggtatgacccacggtgcactgtccgtcaccggtaacctgtctccgaaagaagcggttgacggtatgatgccagaagtccagttcatgccttacccacacgagtaccgctgcccactgggtatcggtggtgaagcgggcgtgaaggcgctgacctactacttcgataacctgatcaacgacgttgaaagcggcgtgcgtaaacctgccgcggtgatcctggaagctgttcagggcgaaggcggcgtgaacccggctccggctgagtggttgcagcgcatccgtaaagtgactcaggaacacggcattctgctgatcctcgacgaagttcaggctggctttgcccgtaccggtaaattctttgccttcgaacacgcaggcattgagcctgacatcatcgtgatgtccaaagcagttggcggcggtctgccactggctgtgctcggtatcaagaagcagttcgatgcgtgggcgcctggtcaccacaccggtaccttccgcggcaaccagctggcgatggcaaccggtctgacgacgctgaagatcctgaaagaccagaatatcgcgggcaaagtggccgcacagggcgaatggctgaaaggccagctgaaagagatggcgaaacgctatccggttatcggccacgttcgcggtctgggcatgatgatcggtattgaaatcgttaagccacatgaagccgccgaccacatgggttgcttcccgggcgatggcgagctgtctgcactgatccagaagaagtgcttcgaagcaggcctaattctggagcgtggcggccgtaacggtatcgttctgcgtctgctgccgtcactgctgatcagcgatgacgagctgaaagtcttcctggataaattcgagcaggcactgcttgctgcgggcgttcgcccggcgtaa

SEQ ID NO: 526849 - DNA, 444 bp, Stenotrophomonas maltophilia
atgaaaaaatcaatgatgctagtgttaagcgctgccgtacttgctgggtgtatttcgcctgcacacgccattagcgcacactatcgtgctcagttagagcgctcgggatgcacgcaaattagcgctggcgatggatcttgcgatatcagcaaaaccaaagcggaaaacgcggcacaacacgaaccaacggcatccgttcacgatccccttcgcgaagcctcgttctcgtcggatacggttaacgctaccctttctaacggcttttttagcgctaccgtgaacggcaaaaaagccagcgttaaacgtctgaatgcgaatttctatgagatccatggtaacggttttgtgatatcgataagtctggatgaaaacggtattacggacgcgtcatggaataaaacaaagggacgtgaacacggcgttttacgcgttacccaaaaataa

SEQ ID NO: 526850 - DNA, 1287 bp, Stenotrophomonas maltophilia
atgaaatgtattaacaaatcagtaatggttattactgtttttggcatcctgttatctagtgttgctaaagctgctacacccgctagtgatgtagttctttccagtggtcaggatctggaaacagcacatagtaatttgcaaggtcaagttgatggtctatcgaatgatattgctgatgtgtattttaacaaaatccctgcaatcaatcaggtaaatagtcaacaagatacagctattaatgctgcttcctctgctgcttctactgcacaagatacggcggatcaggctaaaacattagctgataaaaacgcttcccatattgcggcttctgatactgttgtaattgagcaaggtaaacgccttaccactgttgaaggtaatcaggctagtgatcacgttgaaatcctgcgtaatgcacaaacagcaaatagtgcattaactactgcaacagctaatacttctgctattgataacgtcaacagtgacttacaaggggctaaacagcttcttgctgataaagcacagattgcgcaagatacagctaatcaagccgatacaaacgctaacactgctcttatcatggctggtaataactccacccgtcttacagcattagaaaacactcctaagccgactaacggcgtagatggtaaagatggtgttgatggtaaaaacgggatcgatggtaaagatggtgctacaggtgcgcaaggtttaaaaggtgatacaggcgcacaaggtatagctgggaaagatggtgctccaggtgttaagggtgagaaaggagataaaggagattccatcaaaggtgataagggcgacactggcgctaaaggtgataaaggggatgcaggtaaagctggctctaacggaatcacaactaccatcactaagaaagaagttgatactaaaactatcaatctggttaagtcactcaatacccaaactacagcacaagctaaagatctgaaagctgctcaacaagtgttcgcacaagcgcaagctaacactaactctcaattcaagagcctgaaagatgaagttgatagcaataagaaagaagcccgatcaggtgctgctagcgctgtagctatcgcctctatgcctcaagtagagaaagatcaggctgtcatgttctctgctggtgtaggtagctttaaagacgagcaagctgttagtgtgggtgcatccttccacgttggtagcaacaccatcgttaaagctggcgtaagcgattctacaaataatgatcttgctatgggcgcaggcatcgggattggcttttaa

SEQ ID NO: 526851 - DNA, 933 bp, Stenotrophomonas maltophilia; identical to SEQ ID NO: 246248

SEQ ID NO: 526852 - DNA, 987 bp, Stenotrophomonas maltophilia
atgaaaaaaacgacttcacgcaaggcggctcgccgtccggcaaaaccgactgacctttatcgccagatcaccgaccgcattgttgtcgcgctggaaaacggcgtagcgccctggcgtaagccgtggcgcgcggctgccggcagcggtctggccggtctgcccctgaatgccacaaccggacgtcactacagcggcgtgaatgtcctgcttctctggatgtcagcggaagagcagggttttcgcaataaccgctggatgacttaccggcaggcgcagcaggctggcgggcaggtgcgtaagggtgagaaagccaccctggcggtggtttataaggactggacgaagcaggcagaggatcgcgaaggcaaccgcctttatgacagtgacggtaaaccgctgatggaaaccgtgccgatgctcaaacccctgcagctgttcaacgctgagcagtgtgaggggttgccggcagaggttgcggcttcacctgagcaaccaccgacggtggatgaggacggcatactctgtccggacgtgatgaacagggtgatccggatgtttaacgccactggggttaaaaaccggatgctgcctcagaaccgggcatattaccgcccgctgacggatgaaattgtgatgccgatggctgagcagttttttacggaagcggactgctggtccacgctgttgcatgagcttgtacacagtaccggtcatgcgaagcgacttaaccgggaggggataacctcctcatcccggcagttcggggacccggtgtatgcctttgaggagctcatcgccgaaatgggcagcgcgtttttgtgtgctcagctcggcgtgttcggtgaggttcagcacgacagctatgtggaccactggctgaaggtgctgaaatctgacaaaaaggccctgttccgcgcctgccggcatgcccgggaagcgtcggaatatctgctggcactgcctgaaagtcaggctgtggcggcgtaa

SEQ ID NO: 526853 - DNA, 348 bp, Stenotrophomonas maltophilia
atgggactggatatttttctctacagccagcaccggcagatcgtcgcagtaccggcaccgtatcatccggtgtgtgaactgagccgcgatttttcactgattacctggctggataagcacgtcggtgaggtggaaaacgcgacctgtctggaactgtcacgcgagcatattcagcaactgaaagagaggctggactgtgcgattgcgacatttacagaggggaatgaggataatccgcttcttcagcgccggctgcagtacgttttcaccctgcgtgacaggctggaaagcctgctcagtgattttgactttgaacatgaatacctgtggttttatgccgcatggtaa

SEQ ID NO: 526854 - DNA, 222 bp, Stenotrophomonas maltophilia
  misc_feature (210)..(219): n is a, c, g, or t
atgctttttttcgacaataaagacctgactaacgtcctgctaaccgcccgtatgcagggaggccagcttcacctggcaaaggatgagggtgtttatcttatgccggccaccggtgcctggcagggcaacgatccggtgccgcgtattgcgtatgccgcagggtgtcaccctcagaaaaatgaggactggtacgacacggcacgcctgctnnnnnnnnnntga

SEQ ID NO: 526855 - DNA, 648 bp, Stenotrophomonas maltophilia
atgaaaaaccagttttcttcgccggcttccatgtcggttgtctacaccatcgagcatgtcagcacggttccgttgcgacactggcatgctttcgttctggccgtcacagaaactttctggcaactgccggtgcgtctgcgtccggggaatacgtatctgccgtcgcttaatcgcgcggctgacctgtttccggttgctgatgtcatggcgtttcgtggcgacacaggcggcagtgtctggccggtcaacatgactatagagcgggagcgcaaccgcaatacgctgagtatccaggagctggattttcagcatcagccctgcgatttctttgcacgtattgtgatggtcctgctgcataacctgtgtccggacagcttccggatacattcttcagacgagggtcgcagctgggcgttaccgttacgctggattgaacaacatctcggtctgcctgagcagccgacgctgaccgcgcctcagtcggtactgaaaacaccggtaggcgagggcgcgtttgattccctgctgctgcagctgctctccggtggtgagcgggtgctgagcaatgaggactggaatgccttcgtgctggcggaattccatctgtacgaactgaagcgggtcgcggaaaaatctgactcgttttaa

SEQ ID NO: 526856 - DNA, 366 bp, Stenotrophomonas maltophilia; identical to SEQ ID NO: 246249

SEQ ID NO: 526857 - DNA, 369 bp, Stenotrophomonas maltophilia
atgtctgtcatctcttctgcgattttccctgaacatatccttactcagcttcagcagtctgctgacgcagctgtccggaaattgaaatctttcatttatctgcatcgcaacagcaactggtatgtcaacggctcgggcaattatgccgtccgtgctcatatctcttctgtcaaagaccagggcgttaacgtctttcttaccgttcgtacaggctgccaccgcgccgagtatgtttttcaccgcctgccggtttcctttcctgagggaataacaggtcgtcgaaacgcataccgccatgcctgccgccaggcacagcatctggcacacctgcgctaccgttttctttccggagggcattctcatgactga

SEQ ID NO: 526858 - DNA, 303 bp, Stenotrophomonas maltophilia; identical to SEQ ID NO: 82781

SEQ ID NO: 526859 - DNA, 1998 bp, Stenotrophomonas maltophilia; identical to SEQ ID NO: 83369

SEQ ID NO: 526860 - DNA, 618 bp, Stenotrophomonas maltophilia; identical to SEQ ID NO: 83370

SEQ ID NO: 526861 - DNA, 324 bp, Stenotrophomonas maltophilia; identical to SEQ ID NO: 83371

SEQ ID NO: 526862 - DNA, 1269 bp, Stenotrophomonas maltophilia
atgtctctcaacgacacgaaaatccgcagtctcaaaccttctgaaaaatccttcaaagtctccgattcacacggtctatacctcttggtcaatccaggcggctcacgtctctggtatcttaagtatcgaattaacggtaaagaatcccgccttggcttaggcgcttatcccgatgtatccctttccgacgcccggcaacaacgagacggtatccgcaagttgctggcgcagaacattaaccccgctcagcaacgtatagccgaaagagccgcccgctcaccggaaaaggtctttaagacagtggcgctggcgtggcataaaagcaataaaaaatggtcgcagaataccgctgaccgtctgcttgccagcatgcacaatcatatttttccggttatcggacatctgtccgtcacggaacttaaaccccgtcatttcattgacctgctgaaaagcattgagaaaaaaggtctgctggaagtcgcgtcccgcacgcggcagcacctctgtaacatcatgcgtcatgcggttcatcagggattcattgacagcaacccggcggcaaaccttgacggcgtgacagcgccccccgttaagcgccactaccccgccctgccgctggaacgcctgccggaattgctggggcgcattgatggttatcagcagggacgagggttaacccgtcaagcggtccttctgacccttcacctgtttatccgttccagtgaactgcgtttcgcccgatggagcgagtttgatttcaggaactgtatctggaccatccccgctacccgcgaagctcttcccggtgttcgttattccggacgcggagccaaaatgcgcacgccccacattgttccattatcccggcaagccatcgttatcctgaaacaagtagaggaaatctcaggtcatctggaactagtgttcccctgtgaccataacccttacaggccaatgtgtgaaaatacagtcaacaaggcactgcgactgatgggctatgacacaaaaatggacatttgcggccatggctttcgggcaatggcatgcagcgccttaatggaatccggactctggtcgaaggatgctgttgaacgccaaatgagtcatcaggaacgcaacagcgtgcggatagcttatatccacaaagctgaacatctggaagcccgtaaagcgatgatgcagtggtggtctgattatctttatacgtgccgggaaaactatgttcccccatatatatatagtaaaaatatcagtcatgaagctacctga

SEQ ID NO: 526863 - DNA, 1419 bp, Stenotrophomonas maltophilia
atgcgcacgccctggtatgcaaaacgtaagagttatcgagttctgttctggcgtgaaatcaccccccttgctgtgcctattttcctggagaatacctgcgtcctgttgatgggggtgttaagcaccttcctggtgagctggctcggtaaagaagccatggccggggtagggctggcggacagtttcaacatggttgtgatgtccttctttgccgctatcgatctcggtacaacggtagtggtggcgtttagtcttggaaaactcgatccaaaacgcgcccgggaggcggccagacagtcgctgatgatcatgaccctcttttcgatcatccttgcggcggttatccattattacggcaaagaaattatcgacatcgtcgcgggtgaagcgacaggtgaagtgaaggatctggcgctcacctatctggaaatgacggtgctgagctatccggcggctgccatcgcgctgattggtagcggtgcgcttcgtggcgcagggaataccaaaattccgctgctaataaatggcggcatgaacatcctgaacatcattatcagcagtgttttgatttacggtgtcttttcctgggaggggctgggctttgtcggcgcgggattagggctgaccatttcccgttatattggtgcggcggcgataatcggcgtgctgatggcgggaattacgccatcgctgcgcctgacgcttaaaagctatttccgtccgcttaacttcgccattatctgggaagtgatggggatcggtattccggccagcatcgaatccgtgttgtttaacggtgggaaactgctgacgcagatgtttgttgccgggatgggaacagacgtcatcgccggcaactttattgccttctccatcgcctcgctcattaacctgcccggaaacgcactgggatcggcgtcgacgatcatcaccggcagacgcctcggaaaggggcagatagggcaggcggaacggcagcttcggcatgtcttctggctttcaaccattggactgacggcgattgcgtggggaactgcgcctttagccgggctaatggcctcgttctatacgcacgaaaatgacgtgaaagaggtcgtgaaggtgctgatttggctcaacgcggcgtttatgccaatttgggccgcgtcctgggtacttcctgccgggctgaaaggggcgcgcgatgcccggtttgcgatgtgggtctccatgctcggcatgtggggctgccgcgtcgtggcgggctacacgctgggggtaatgttaggtatgggcgttgtcggcgtctggctggggatgttccttgactgggccgtgcgcggggcgctgttctactggcgcatggtgagcggacgctggctgtggaaatatccgcgaaaaaaaccggagcaggaggtttcggaaacggcaagtgcctga

SEQ ID NO: 526864 - DNA, 579 bp, Stenotrophomonas maltophilia
  misc_feature (504)..(513): n is a, c, g, or t
gtggcaaaaggcagcggaagaattacctggggtcaactggggcgcaactggctcaacgtctacgttggcaacctgattggctgtctgctctttgttctgttgatgtggctttctggcgagtacatgaccgccaacggcggctgggggcttaacgtcctgcaaaccgccgaccacaaaatgcaccatacatttatcgaagccgttgctctcggcatccttgcaaacctgatggtctgcctggcggtctggatgagctactctggtcgtagcctgatggataaagccatgattatggttctgccggttgcgatgtttgttgccagcggctttgagcacagtattgcgaatatgttcatgatcccgatggggattgttatccgcaactttgcaagcccggagttctggactgctgttggttcaaccccggaaagtttttcacacctgactattatgaatttcattactgataacctgatccccgtcactatcgggaacattatcggnnnnnnnnnnggtgggggtctgttagttgggttgacatactgggtcatttacctgcgtggcggcgatcatcattaa

SEQ ID NO: 526865 - DNA, 1893 bp, Stenotrophomonas maltophilia
gtgcattgggttagcacctgggccgaatggcgcgccagcacgacgaccgtctggggtgttaccggttttcttaccatacacaacgttagaggtgatggtcagaacagactgagtcgggatagcgttacgataggtagtgagtttctgaattttcttcatgaaacgttctaccaggtcaaccgccatgtcatcaacgcgagcgtcgttgttaccaaactgcggatattcgccttcgatttcgaagtcgatagccagaccatcttcgtcacgaattggtttaactttcgcatatttgattgcagacagggagtcagccgcaacggacagacctgcgataccacacgccatggtgcgaacgacgtcacggtcgtgcagcgccatcagagaggcttcgtagctgtacttgtcgtgcatgtagtggatgacgttcagcgcagtgacatactgcttagccagccagtccatgaagtgatccatgcgctccatcacttcgtcgaagttcagaaggtcgcctttgatcggttcagacttaggaccaacctgcattttcagtttttcgtcaacgccgccgttgattgcgtacagcatggttttcgccaggtttgcacgcgcaccgaagaactgcatttgcttaccaacaaccattgggcttacgcagcacgcgatagcgtagtcgtcgttgttgaagtccggacgcatcaggtcatcgttctcgtattgcagagaagaggtgtcgatggacactttagcggcgaatttcttgaagttcagtggcagtttttcagaccacagaacggtgatgttcggctccggagaaggacccatggtgtacagggtgttcaggaagcggaagctgtttttggttaccagcgtacggccatctacgcccataccgccgatagattcggttgcccagattgggtcaccagagaacagctcatcatattctggagtacgcaggaagcgaaccatacgcagtttcatgaccaggtggtcaatcatttcctgagcgtcttgttcggtgattttgcctgctttgatatcgcgttcgatatacgcatccaggaaggtagatacgcggccgaaggacattgctgcaccgttctgagacttaaccgcggccaggtagccgaagtaggtccactggatagcttcctgagcgttggttgcaggaccagagatatcacagccgtatttagccgccatctctttgatctgacccagcgcacggtgctgttcagcaatctcttcacgcagacggatagtcgcttccaggtttacgccgttttccaggtcagactggagagagacgaactgcgcgtatttgtctttcatcaggaagtcgataccgtacagcgcaacgcgacggtagtcaccgatgatacggccacggccataggcatctggcagaccggtcagaacgccagatttacggcagttcagaatgtctttggtgtaaacatcgaatacaccctggttatgggttttacggtattcggtgaagatttttttcagcattgggtccagctcgcggttatacgctttgcaggaaccttcaaccattttaatgccaccgaacgggatgattgcgcgtttcagtggtgcttcagtctggagaccaacgattttctcaagggctttgttgatgtagccagcatcgtgagaagtgatggtagaagcaacggaggtgtcaaaatcaactggcgcgtgagtgcggttttccagtttaacgccttccattacgctgtcccacagcttggtggttgcatcagtcgcaccagccaggaaggattcgtcaccttcatacggggtatagtttttctgaatgaagtcacggacgttgacttcattctgccagtcacctttcgtaaaaccttcccaggctgtggctaa

SEQ ID NO: 526866 - DNA, 741 bp, Stenotrophomonas maltophilia
atgtcaattattggtcgcattcactcctttgaatcctgtggcaccgtcgatggcccggggatccgctttatcactttcttccagggctgcctgatgcgctgcctgtactgccataaccgtgacacctgggacacccatggcggtaaagaagtcaccgttgaagatctgatgaaagaggtggtgacctatcgccacttcatgaacgcgtccggtggtggcgtgacggcatccggcggtgaagctattcttcaggctgaatttgtgcgcgactggttccgcgcctgccataaagaaggtattcatacctgcctcgacaccaacggctttgtgcgccgttacgatccggttattgatgaactgcttgaagtgaccgatctggtgatgctcgatctcaagcagatgaacgatgagatccaccagaatctggttggcgtctcaaaccaccgtacgctggaatttgccaaatacattgccaacaaaggcgtcaagacctggatccgctacgtggtggtaccgggctggtcagatgatgatgattctgcacatcgtctgggcgaatttacccgggatatgggtaacgtggagaaaattgaactcctgccctatcacgagctgggtaaacacaaatgggtggcaatgggtgaagagtacaagctcgatggcgtgaagccgccgaaaaaagagacgatggagcgcgtcaaaggtattcttgagcagtatggccacaaggtcatgtattaa

SEQ ID NO: 526867 - DNA, 522 bp, Stenotrophomonas maltophilia
atgtctactcgtcgtttttccactaccgcacttgccgtagtgttggctttaacgtttgcaacggctccggccatggctaatcctggaaacgggaatggcggtggccacggaaacggtggcggacaaggtaatagcggcaatcatggtaacgggaacgctggtaaccatggtaataagcacaataccggccaggataatccaggaaaatcggataagagctttaaaaacagcaacgatgttggtcatgatgttgacgtccgcgtgagcttcgatcatgcccgccatctggcactgaattacggcttaacgggctacgactctctgcctccgggtattgcgaaaaacctggcgcgcggtaagccactgcctccgggcattgcgaagaaaaccgtgccagccgatatgctgggtcagcttccttcttatccgggctatgaatggcgcgtggtgggtgacgacctggtcttaattgcgctgagtaccgcgattgtgacttccgtgattaacggcgtctttaaatag

SEQ ID NO: 526868 - DNA, 1149 bp, Stenotrophomonas maltophilia
atgaccacctatacccgcccggtgcttttgttgctctgtggcctgcttttgctgaccctggcgatcgcggtgttgaacacactcgtcccgctatggctcgcccatgaaaacttaccaacctggcaggtgggtatggttagctcgtccttttttacgggcaatctgctgggcaccttattaacgggcagccttattaagcgctttggttttaaccgcagctattatctggcgtcactgatctttgccgtcggatgcgccggtttaggactgatggtcggcttctggagctggatggtctggcgctttattgcgggcgttggctgcgccatgatctgggtggtggttgaaagtgcgctgatgtgcagcggcacgtcccgtaatcgcgggcgtctgctggcggcttatatgatggtttactacgtcggtaccgttctgggacaactgatggtcagcaaattcccaaccgacctgatgagcgttctgccatgggtaacagggatggtgctggccgcaattctgccgctgctctttacccgtatcgtgaaccagagcagtgagcatcaggaggccacgcacgtttggccgatgctgagactgcgccatgcgcgcctggggattaacggctgtattatttccgggattgtgctggggtcgctctatggcctgatgccgctttatctcaaccatcagggcgtcagcgattccgggatcggtttctggatggcggtgatggtcagcgcggggattgtcggccagtggccgattggccgcctggcggaccgctttggtcgtctgctggtgctgcgcgtccaggttttcgtggtcatcatgggctgtctcgccatgctcagcaacgccgcgatggcgcctgcgctgttcattctgggggctgcgggttttacgctctatccggtcgcgatggcctgggcctgtgagaaagttgagcatcaccagctggtggcgatgaaccaggcattgttgctgagttacaccatcggcagtttactggggccgacttttaccgctatgctcatgcaaaattactctgataatctgctgtttatcatgatcgccagcgtatcgtttatttatctgttaatgttgctgcgcaaagtgggcgagcacccaacgccagtggcacatgcctga

SEQ ID NO: 526869 - DNA, 864 bp, Stenotrophomonas maltophilia
atgggaagtggatggcatgaatggccgcttatgatcttcacggtctttgggcagtgtgttgcaggcgggtttatcgtccttgcgctggcgctgttaaaagggaacctcaatgctgaacagcagcagcgtttagtgttgagcatgtttggcctgtgggtgttgatggggattgggtttatcgcctctacgttgcacctgggctcaccgatgcgcgcgtttaactccctgaaccgcgtaggtgcctcttcgctgagtaacgagattgccagcggcgcaatcttctttgcagttggcgggctggggtggttactggcagcgctgaaaaagctgccgtcagggttacgtgcgttgtggctcatcgtcaccatggtactgggcgttgtctttgtctggatgatggtccgggtgtacaacaccattgataccgttccgacctggtacagcgtctggacgccgatgagcttcttcctgaccatgtttattggcgggccgctgctgggttatctgcttctgcgtgtagctggcattaatggttgggcgatgcgcctgctgcccgcggtctcgctgctggcactggtcatcagtaccgttgtagcgcttatgcagggagcggagctggcgacgattcacagctctatccaacaggcttcggcgctggtaccggattacggttctctgatggcctggcgtgtggtgctgctgacggcggcgctggtgtgctggattgcccctcagcttaaaggttacgcgcctgcgctaccgttgctgtcactggcctttgtgctggtgttggcaggggagttaattggtcgcggcgtattttacggtctgcatatgacggtcggtatggctgtcgccagctaa

SEQ ID NO: 526870 - DNA, 1128 bp, Stenotrophomonas maltophilia
atgcaaagaaaagtactggcactgatgatccccgctttgttaatggctggagccgctcacgcagctgaaatttataataaagacggcaataaactggatctgtatggcaaagtagatggtctgcattatttctctgacgatgcgtcaaaagatggcgaccaaacctatatgcgtctgggtttcaaaggtgaaacccaaatcaacgacatgatgaccggttacgcgcagtgggaatacaacattcaggcaaacaacaccgaaggctctgacaatcagtcctggacgcgtctggccttcgcgggtgtgaaggtaggcgactacggatccttcgattacggccgtaactatggcgtcctgtacgacgtagaaggctggaccgatatgctgccagaatttggtggcgactcttatacttatgccgataactttatgaccggtcgtgcaaacggcgtggcgacctaccgtaacaccgacttctttggtctggtgcagggtctgaacttcgcggtgcagtatcagggtaataatgaaggtaataactgcgatgagaatttctgctctaccaatgaagggaccaacaacggtcgtgatacacgtcatgaaaatggtgacggttacggtatctccgcaacctacgatttcggcatgggcttcagcgcaggcgcggcatatgcttcatctgaccgtactaacgatcaggtaaattacactactgcgggcggtgatactgcggatgcatggaccgcaggcctcaaatacgatgccaacaacatttacctggctgcaatgtattccgaaacccgcaatatgacgccgtacggcgacaatgcagatgcggttgcaaataaaacccagaactttgaagtgaccgcacaatatcagtttgacttcggccttcgtccggctgtttcctatttacagtccaaaggtaaagatctgggcaatggacaggacgataaagacctggtgaaatacgctgacgtcggtgctacctactatttcaacaaaaacatgtccacctatgttgattataaaatcaacctgctggatgaagatgattcattctacaaaaacaatggcatcggtacggatgacatcgtagcgttaggtctggtttaccagttctaa

SEQ ID NO: 526871 - DNA, 423 bp, Stenotrophomonas maltophilia
atggctgaaattcgtcatgcacagtgtcattgtggggcggtgaaatttactgttgagctgacggacggcctgaataccgcacggcgatgtagctgctcgttttgcaggatgcgcggggcagtagtggtttccgcgccgttgacgggtattaaggtgacgcagggcgcggacacgctcacagagtaccgtttcaacaccggcacggcgcgccatttcttctgctcggtttgcggtatttacacgttccatcaacgacgttccaatcccaatgaatatggtgtgaatgtcgcctgtctggaaaatgttacgccattcgacttcccggaagtggcggtaatggatgggataaatcaccctatggatggcgacagcggggtaattggctatctctcttttcgcaaagaacaggcgaaacagagataa

SEQ ID NO: 526872 - DNA, 198 bp, Stenotrophomonas maltophilia
atgaaaaataaagacgaacagacaggattagttgggctggcgattggtgccgccgttatcgggctggtttcagcgcagaagatcatcaaccgtgaaagtattgtcgatgagctggtgaggctcggcaggcagaagggggatggtgtcgaagatgaggtctttttaaaagcggctgagttagtgagaaaaggggtataa

SEQ ID NO: 526873 - DNA, 936 bp, Stenotrophomonas maltophilia
atgcaacaaaatcaagagattaacaagaaagaacagtacaacctgaataaactgcaaaagcgactgcgccgtaacgtgggcgaagccattgcagacttcaacatgattgaagaaggcgatcgcatcatggtctgcctgtcgggcggtaaagacagctacaccatgctggagatcctgcgcaatctacagcaaagcgcaccggtgaacttttccctggtcgcggttaacctcgatcagaaacagccaggattcccggagcatatcctgccggagtaccttgagaacctgggcgttgagtacaaaatcgtagaagagaatacctacggcattgttaaagagaagatcccggagggcaaaacgacctgctcgctttgctcacgtttgcgtcgcggcattctgtaccgcaccgcaaccgaactgggcgccactaagattgcgcttggtcatcaccgggacgacattcttcaaacactgtttctgaatatgttttacggcggcaaaatgaagggaatgccaccgaagctgatgagtgacgacggcaaacacatcgtgatccgcccactcgcctactgtcgcgagaaagacattgagcgtttctctcaggccaaagccttccctatcattccgtgcaatctgtgcggttcacagccgaacctgcaacgtcaggtcattggcgacatgctgcgtgactgggataaacgctatccgggtcgcattgaaaccatgttcagcgccatgcagaacgtggtgccttcgcacctcgccgatgttgaactgttcgatttcaaagggattaaccacggttcagaggtggtgaacggcggggatctggcgtttgaccgcgaagagatcccgatgcagcctgctggctggcagccagaggaagaggatgcgcaattcgatgaactgcgcctgaacgtggtggaagtgaaataa

SEQ ID NO: 526874 - DNA, 1362 bp, Stenotrophomonas maltophilia
  misc_feature (1079)..(1088): n is a, c, g, or t
gtgaccgctttttccacgctgaacgttctgcctgaagcccaactgacaaacctgaatgagttgggttacctcactatgacccctgtccaggccgccgcgctgccggctatccttgaaggccgggatgtgcgcgtgcaggcgaaaaccggtagtggaaaaacggctgtatttggactcggcctgttgcagcatattgatgcaaccctgtttcagacccagtccctgatactctgcccgacgcgcgagctggccgaccaggtcgcgggtgagttgcgtcgtctggcgcgttttttgcctaatactaaaattttaacgctctgcggcgggcaaccgttcggtgcgcagcgcgattcccttcagcacgccccgcatatcattgtggcaacgccgggccgtctgctcgatcacctgcaaaaaggcaccgtttcactcgatgcactgcaaacgctggtgatggatgaagctgaccgcatgctggatatgggcttcagcgatgcgattgacgacgtgatccgctttgcgcccgccacacgccagacgctgcttttttctgccacctggccagaggcgattgcggcgatcagcgggcgcgtgcagaagaacccgctgaccattgaaatcgatactgtcgatgcgttaccagcgattgagcagcagttcttcgagacgtcgcagcagggcaaaattccactgctgcaaaaattgcttagccaacaccagccagcgtcctgcgtggtgttctgtaataccaaaaaagattgtcaggcggtgtgcgatgccctgaatgatgccggacagagcgcattatcgctgcatggcgatctggagcagcgcgatcgcgatcagacgctggtgcgtttcgctaacggcagcgctcgcgtgctggttgcaacggatgtggcggctcgtggcctggatattaaatcgcttgaactggtggtgaatttcgaactggcatgggatccggaagtgcatgtccaccgcatcgggcgtaccgcgcgtgcgggtaacagcggtctcgcgatcagcttctgcgcgcctgaagaggcgcagcgcgctaatattcttgcggaaatgcnnnnnnnnnngaatgcccccggtaatatcggcatcgctccgctggcggcggaaatggccaccctgtgcatcgacggcggaaaaaaagccaaaatgcgacccggtgacgttctgggggcgttaacaggggatatcggtctcgacggggcagatattggcaagatcacggtccatcctgcacatgtctatgtagcggttcgccagtcggttgcgcataaggcctggaaacagttgcagggcgggaagattaaagggaaaacctgccgcgttcggctgctgaagtaa

SEQ ID NO: 526875 - DNA, 309 bp, Stenotrophomonas maltophilia
atgggcgttgcgctccatattgtcttacttcctttttttgaattactgcatagcacaattgattcgtacgacgccgacttcatagtcggcttttttttgcctcctttttatctgcgtctaccctttaggggtaagcacccaaatctggaggaaaagatgagtatgctacttgccctgcaacgcctgaacacatggcagtccgatccggtgcccaccgatccgaccccaattcccgatcccatcccgcgtccgcagccgatgccggatccgccaccggacgaagaaccgattaaattgtcgcatcgttag

SEQ ID NO: 526876 - DNA, 984 bp, Stenotrophomonas maltophilia
gtggagagcattaaagggtctgaagttaacgtacctgacgcggtttttgcatgggtacttaatgggcacgggggcgcaaggccgcttgaagatcaggatcacatcgacaacgaacacccatgctggctgcacctcaactacacgcacccggacagcgccgagtggctcgcgtccacgccgctattgcccaacaacgttcgggatgcgctggcgggagaaagtctcagacctcgcgtcagccggatgggtgaggggacgttaataacactgcgttgcataaacggcagtacagatgagcgtccggatcagctggtggcaatgcgtgtctacatgaatgaacgattgattgtttccacccgtcagcgaaaagtgctggcgctggatgacgtcattaacgatctgaaagagggcacggggcctacggattgcggaagctggctggtggatgtatgtgatgcgctgaccgatcatgccagcgagtttattgaagaactccacgataaaatcatcgatctggaagacaacctgctcgatcagcaaattcccccacgtggttttctggcgttgttgcgaaaacagcttattgttatgcgccgctatatgaccccgcagcgcgacgtctatgcgagactggccagcgaacgcatgatctggatgaatgacgatcagcgtcgcagaatgcaggatattgctgaccggctgggacgtggtctggacgaaattgattcgtgtatcgccagaacggcggtcatggcggatgagatagcacaggtaatgcaggagtcattagccaggagaacctataccatgtcgctgatggcgatggtttttttgccaagtacgttcttaaccgggttgtttggcgtcaatcttggggggatccccggcggtgaatatcactatggcttcaccacgttttgcgtcatgttagtggttttgattgggggtgttgcatggtggttgcatcgtagtaaatggctgtaa

SEQ ID NO: 526877 - DNA, 288 bp, Stenotrophomonas maltophilia
atgcacgacatcgttaccggctcgggcaacgtcagcagactgatggatgaaatttccgcctcaacatcggaacaagaaaaagggatttcacaaatcacgctggcattgtcagagctggaacgcgtaacacagagcaatgtgtcgatggttgaagaactcaacggctcgtcagatgtgttgcgcaatcaggtgattgaacttcagacacgaacacgtaatttccgtctgaagaacgagtaccaggctgataatgcgttaataagccgcgaatgggtggtgaattcctga

SEQ ID NO: 526878 - DNA, 270 bp, Stenotrophomonas maltophilia
atgaactatctgatcatcatcccaatcgtgcttatccttgccgccgccgcgctggcgcttccgtggtttatggttcgtcagggctaccgtgaacaagttcagctgggcggcgcgtgtactaccgtgctggggctggccgcatcaacaggcgttttcagctatgccgataatatgccgctggcgttactgtatgggtctgcgtcggttgtgtcattcctgtatgcgcttgattgcttcctgccgctttatctttcacgtaaatctcactaa

SEQ ID NO: 526879 - DNA, 792 bp, Stenotrophomonas maltophilia
atgactactttaactgtcggccagtgcctcacctcttttaaaaacgagtatgtagtaagcgcgattaatctggctgacgacaaaatcagctataccatcctcggcctgaatgccccgacctgcgccccgctgctggaaacctccctgcgcttttaccaggtgatcgacaagaccctttcactcgatgaactccgcgcccgccgtcaggttgtgcagagtgtgaccgaccagcgagaagcgagacaccaggcgaaagaagatgcccgccagctggcgaacgaacgcgccagcgctgacccggaaaacgccggattgctgaccacggccaccgaaagcaacaccaccaagctagccgctaaaaacatccgtattctgctgaaaaagcatttccccggcgtgaagttttctgtccgtatgcgtgactataacgcgctctatgtttcgtggacggatggcccaaccaaagaggctgtagaagcgattacagacaagtttgaggaaggcagcgttaactcaatggaggacatttacgaatacaacattacgggcttccaccgtgtttatggtggcgtgaaatacctgttttgctcacgcgacctgaccgacgcgctgatcgctgaatctatcgaactgctgcgcaaagaatacggcgaaaccactatcccggctgatgtgacgcttgaggcgtacaaatccggggcgctggcggggcgcgggcatgaccgctttacctgggggcttgcaacgcaaatacgcatcaatgcgggaaaggtggataaatccagccgctga

SEQ ID NO: 526880 - DNA, 411 bp, Stenotrophomonas maltophilia
atggttaatttgttttatgccgccaggggattatggcgcatggctgtaaattttattcgtgaagccgtccgtagttcgctacttgccgttatgcacatggttagtgtccatatccccgtactcatttttttagctgtgttcgttctggccgtcagtggttttgggcttctggtgatcaaagtactcgctatcatgatgcactcaggagcacaggggccaatagctggaagtattgcaaacgtgctagatgctctgaatcagacgttttcgccaatggtctattttaaaattgccgtgcctgtcttttgtgtggtggtcgttgcggcactgtttggcgctgttagattcaaccggaaggagatagcgatcaagtggcggcggttggttgaagtcgggaaatataagcgttga

SEQ ID NO: 526881 - DNA, 552 bp, Stenotrophomonas maltophilia
atggctttcgacttcaaaaaagaggatgcggccaagtatggccgagaggtttaccgggcgtttcgtagtaagggtaatcaccgctgggatacgtgtgttttcgtgaaggaatccggggcttactctgccgtattccggcattcgttccgcaaaaaggttatcgaggatggcaaagaaatccgccgcaacgttattgatgatgaaatcgtggtggccgcgccggacgcgggcagctttaccagggcaaaattcccacaattggccgacgcgaaagagctgaagcaatcaggctttttcacccgcttacggtttgccgctgaagcagctgcttatcgtgaagcatggccggggcatgatggcggcgtggtgctgatatgggaagggaaagcctatggctggaaaaattgcctgcgtgatgccgggtgtgagcgccctggcgcgatagctatcgacactgacggccatgtttttattgctgaaggtggaaacgagtatgatggtgcaaaaggctgggttgcgatgactgacagggagaatgaaaaaaatggttaa

SEQ ID NO: 526882 - DNA, 177 bp, Stenotrophomonas maltophilia
atgcagccaacgaaagagcagttaatagcacacgcaaccgaaaaactggggagaatttcggtcggatcggtgccggaacgctaccgcctggaggcacgaatgaatcagcagttgcttgaaatcgcgattgcgacgctgacgggtgaatacatacaggtatttgagaaaaaggactga

SEQ ID NO: 526883 - DNA, 423 bp, Stenotrophomonas maltophilia
atggctaataccgtcaccgcaaaaatctatggccccgctcagaaaatgcgtttccttccttacgcattcgcggagttttatcctcaatcagaaagctacgtttacagcttcatggcaaaatatgcagttggctatgatggtggctgctgggagtacatcacctatgaaaacggcgcgtgtgcgtttatcgcgccggatggctaccagctcacgcttcctaactattttgatgaacctgtaagcgcgaaagaagccgggattatcgttgcgctgtatgcctacagccacttttgctgcgtggcatttgagcggggctggcagcgtgtgaatgagacgatggccgaacgctaccacacgctgcgggactttaccgaaacactccccccggagtcacagagccgtatttttcgggcaatagattaa

SEQ ID NO: 526884 - DNA, 789 bp, Stenotrophomonas maltophilia
atgacattgccaacacccgaaacctacgaagaactccagcacgcctacgatttttttgatgaacggctttttaataacgagctgccgccatgcctgatcaccctgcaacgtgaaaagcgtacttacggctattgctcgtttcagcgcttcgcgggccgtgagagcgggcaaatggtcgatgaaatagccatgaatccggtgtacttctccatacgcaccatcaaggcgacgttatccactctggtgcatgaaatggttcaccagtggcagtttcatttcgggaaggccggaagacgtggctatcacaataaagaatgggccgcgttgatggaaagagtcgggttaatgccctccgatacaggacaagcagggggaaagaaggtagggcaaagcatgacgcactacatcattaccggcggtccgtttgaccaggcttgtgatgaactgttgacgcgtaatttccagctgtcctggatggaccgatttcctccgtatcagccaaaacccggagcgccgcagtcacccagcggaaaaggttacatcgatgatgaagatgatgatggggaatatccgccggacgacgactacaccgacgaacccggcgaactggatgatgaaatcatcgaggcaatgaggtttgtttcgccgccgccagaatccccggtgaacaagtccaaccgcgcaaaatacacctgcccggtgtgtcatgtgaacctgtggggcaagcctggtctggtcgtgttctgtggcggggagcattgcgaaaaggccgagcttcagccctcataa

SEQ ID NO: 526885 - DNA, 534 bp, Stenotrophomonas maltophilia
atggcttcacgcggtgttaacaaagtaattctcgttggcaatttaggccaggaccccgaaatgcgctatatgcctaatggcggcgcggtcgctaacctgcgccttgccacatctgaatcatggcgagataaagccactggcgagcagaaagaagtcacggaatggcatacggtagttatcttcggcaagctggccgagatagcaggcgaatacctccgcaaaggttctcaggtgtacattgaaggccagttgcgcacccgcaaatggcaggataaggaccagcaagatcgctactcaacggaagtagtggttagcatgaacggcgttatgcagatgctgggcggtcgtcagggtggcggcgctcccgctggtcagggtggacaacaacagtttagcggaggcggtgcgccagctgctgcaccgggagtgcaagggcagcaaccacaacagggcgcgatgccggactttggagatgatattccattcgccccggttacactctccttccctaaccatgcgattcacgcgctgtaa

SEQ ID NO: 526886 - DNA, 339 bp, Stenotrophomonas maltophilia
atggcccggaaacagactcgcagcatgacgcaagaagaatgggatttgctcatgcccgcattgcagacatttactcatctttctaccgagatcggccactcagtgctggttaacggagaaagcaataaagaagtggccgagcgtgtcggacggacgaagcaaaacgtaggttccactgtgaaacgtatttgggatttgtaccagtccgtcaccatagatgcaggcggtgagaaacttcgtaaagtggacgtgtggctccctgaagcaatggccctgaaggtgctgaaggaagccgaaaaatacaccatcaaccagaacaaagctgaacaatccgaataa

SEQ ID NO: 526887 - DNA, 450 bp, Stenotrophomonas maltophilia
atggccgattcatttcagcatgaggtgcccaaggcacgcataaatttaaagctggcgctgcatacaggcggcgcgcagaagaaagtcgaactgccgcttaaacttctcacagtcggtgatttcagtaatggaaaagagaatcgtccattgtccgaaaggaagaaaatcaacgtcaacaaaaataactttaatagcgtactttcggaatttaacccggaggttaatctgacggtgcctaacaccatggctgtcgatggttcggaggaaagtataaaactgaatttctccgatattaaggatttcgaacctgaacaggttgcccgccagatcccccagctccgcgccatgctggccatgcgtaatttattacgcgacctcaaatccaatcttctggacccggcgctgtctcaggaattacgcgacgaaatgagtgcactggccccgaaataa

SEQ ID NO: 526888 - DNA, 1290 bp, Stenotrophomonas maltophilia
atgtctgtgaatagtgaaaccgcctccgcgcaggggcagaccatcgtactggaaaaagagggcgtttacgcctccctgtttgaaaaaatcaacctgactccggcctcgagcctgggtgatatcaatgcgtttctggatgatgccgcgctttctgacgcgccggcgggtgaacgcctgacggcggcgatgcaggtgtttatggactgcatccgcaaatccggtcagcccgtggagaagctcgacaaaacgctgattgaccaccatatcgccgaactggatttccagatcagccgtcagctggatgccgtaatgcatcaccaggcgttccagaaggtggagtccctgtggcgcggcctgaagcagctggtggacaacaccgactaccgccagaatgtgaaaaccgaaattctggacgtctccaaggacgacctgcgccaggattttgaggatgcaccggaactgatccagagcggcctctactggcacacctataccgccgaatacgacaccccgggcggcgagccgattggttccgtgatttcatcctatgaatttgacgccagtccgcaggatgtggcgctgctgcgcaatatctctaaagtatcagctgccgcacatatgccgtttattggctctgtcggcccgaaattcttcctgaaagactcgatggaagaggtcgctgcaattaaggatatcggcaactacttcgaccgcgccgagtacatcaagtggaaatctttccgcgacaccgacgacgcccgctacatcggcctcgtgatgccgcgcgtgctggggcgtctgccgtatggcccggacaccgtaccagtacgcagctttaactacgttgagcaggtgaaaggcccggatcatgagaaatacctgtggaccagcgcgtcgttctccttcgcgtcaaacatggtgaagagcttcatcaataacggctggtgcgtgcagatccgtggcccgcaggcgggcggggcggtgaaagatctgcctattcatctgtacgatttgggtaccggcaaccaggtgaaaatcccgtctgaggtgatgatcccggagacccgcgagtttgagtttgccaacctcggctttattccgctctcgtattacaaaaaccgcgactatggctcagctgcaggagcagttcccgcgccagtgcaaggttggcagccccgatcatgtcagaagtatcgtcaattcatcgcgggtgggcgtgccgctgaccccgctgcgccatgtgccggcagccattccgttacgtctggaaaatcagtatttcagtcttga

SEQ ID NO: 526889 - DNA, 690 bp, Stenotrophomonas maltophilia
atgagtgagcgtaaacgcggcgctgccgcggccattgatattgatgccctgctgcaggatacctggctgcaggtgatcagcctgcgtcacggtccgaaatttcaggatggagaagggcgcacgctgtgggagcgttgcattgctgatgtcgaacgtgtgcagcgtgagctgaaagcgggcgaacttgatgaagccagctgccggcatattctcaccgcacaatgtgcgctgctggatgaggcggttaagagtcgcggtgtggaggatgatgcctgcgtgcagtggtatgacattcccctgcaggggcacttccttggcaccatggacgccggtgacacgctgtgcgatcggatgcgcgatgtgctgcgtgaaccggctcctgaccacgctgtcgtgacctgcttccagcgggtcatgatgctcggattcctcggcaacttccgctccctgaacgatcctgagcggcagaaactcatgaatgcacttaatgaacatgttgcgccgttcagctattcacaaccccatcccgttctggcggaaagccatgccggacgggggatagggggttggcttgcatcatggcccatgcgcattggcctgagtgtggtggtggtcaccgcattatggtggggactggattgctggctggatcagacactgcttaccctgctgccgggagccgtgaaatga

SEQ ID NO: 526890 - DNA, 381 bp, Stenotrophomonas maltophilia
  misc_feature (204)..(213): n is a, c, g, or t
atgagccctgcacaacagcgcgggcttgcgctctgggctgccctgctgagtgcagtggtcggcctgtggtttctgccagcatcccggctggtttccgttctcgtcctgctggcggtactggggctaatcatggcgttctgggctgtcgcctgccgtcgcgtgcagcacgatttcaccctgtgtctggaggacctgcctgaaacnnnnnnnnnntgtgtctggaggacctgcctgaaaccagttattgccagcccgtggtactggtctgtggcgatctgccgcttgcctggccgcatcagtcaccggtacttactgtcacgcagggctgctggatccgtgtggaggatcatctggaactggagcaggccgcccgtcaggtaa

SEQ ID NO: 526891 - DNA, 456 bp, Stenotrophomonas maltophilia; identical to SEQ ID NO: 160580

SEQ ID NO: 526892 - DNA, 1332 bp, Stenotrophomonas maltophilia
atgacaataaattctgaacgccaacttaaaaccggcggggatccgcgcacgcttgcggattatgctgccttgcgcgaagaaatgaacaagctcacccatccggcacgcccggatgtgaactggcaacacgcggaaacgctctgtctgtcactgttcgggcataacggtgtggagctacaaacggctgcctggtatacgctcgcccgtacgcatctggccggattgtacggtatgaatgaggggcttgcgttacttgctgcactggtagcccgccagtggggaaacctctggccacagcctgtccatgcgcgaatcgaaatcctcagtgcactcagcaagcgcctgcaacaggtagtacgaacgctatcgctgacgtacgctgacttagggcagctgtatcagtctgaagagcatctgagcgctttgggggaagtcttgcagcgtatggaactcaagcatgctactcagcttgatgctctgcgcacgatgatgcagaacgcagcagtgcgtctggaaaacagcgaaaatacggacatgagtctgcacggtgacgcattgggtgctacggaaattcacctcgtcgaaccgactgagcgtagtaaatgggtttatgtggttgagcccgagccggtgctgaacgttggggtggttaaagaacctccggtgtcgatgaaaccctggaagccatttgctgctggtatgttgaccatgctggtggcagccagtgtcgtcgcaggaggatggcagatgttgcatgcgccagattcggcacaagcgcagctagccgcggctctggcccctctacctcaagggctatctacagggcaattagaggcgctgcaacaaacgtcaccgtcaccggaaccggggattggcaagacacaacagctgttagcgcagcttttacagttgaaaccagactgggcagtgagcttcggcgaccgtctggtgcagcaggcgctgacgctgtggccggaagaggccaaacccctggcgcagcattggcagaaacagatgagtatcgctgcgctagcagatttagatctgaatggatggcatcagggtatggcgcagttgcagcaattgacgaacaagctgaacgcactggatgaacagaaggggaagtacatgacggtgagtgaactgaaatcagacgtgtttgccatgtcgcagtcatttagccaaaccataccgcttgaggagcagcttcgtctgctttccactctacctgccgggcaaccccggtcagcagcgcagcaaaacaaggtcgaacaacatcttcagcagttgattgttagctacgccctgctgaagcacaaaaaagaacaataa

SEQ ID NO: 526893 - DNA, 489 bp, Stenotrophomonas maltophilia
atgtcagtaagagagcgtttttttaagaaagtgcagcagaataacgtaaataaaccgattcatattaatacggctgaagccgaagtcagggctttttgtcagcggatggatgatcttgcacagcaaattattgtttggtttgagggttctggtattgaagtcctgttatcccaaaagcatatcaccgatttgagtacggtcggctacagcctcagtagcagtatatgtcgttatgtcatcacgactgtcattctgcgaaatggagatcgcagcgtcagcattataccagaacagatcatcaggggatcagagaaggggtgtatgacaatgtgcattaatgcccccggcagtatatcgggggagaggatataccatttaagcatggcgcctgaaacaggctggtatattcgtcgcggacatcaaagtgtgaaagagaatgttctcatgacggaggactattttttccagtcagtcgactgtctggcctga

SEQ ID NO: 526894 - DNA, 189 bp, Stenotrophomonas maltophilia
atggggcaggtcgcgaacaatatgcaatcaattaccgactgcgcccagcaaatgacagagattatctcgctgattgacggtatcgctttccaaaccaatatactggcgcttaatgctgccgtttgcaccagcgaagctgactgctgttctgttttaacggaaagctgcgcgctgcgtgaagaaagctga

SEQ ID NO: 526895 - DNA, 675 bp, Stenotrophomonas maltophilia; identical to SEQ ID NO: 83364

SEQ ID NO: 526896 - DNA, 1275 bp, Stenotrophomonas maltophilia; identical to SEQ ID NO: 100204

SEQ ID NO: 526897 - DNA, 345 bp, Stenotrophomonas maltophilia
  misc_feature (279)..(288): n is a, c, g, or t
atgactgaagataaagataaaaacggcccacaggatatggacagggctctggataacacgaatgcaaaaccggatagcggtgataaaaaaaagcatcgccgtaaattattcgctttgtttggtggcgtcctgattcttatcgccatcggttatgccatctggctgattttctttgccggtaaatccgtctcaacggataacgcctataccgctgccgaagtcgcagacgtcacgccgcttgtcggcggaccggtgaaaaaagtaaatgtggtcaacacnnnnnnnnnncggcggacaggtgaagaaagtaaatgtggtcaacacgcagcttgtgcatgccggtga

SEQ ID NO: 526898 - DNA, 948 bp, Stenotrophomonas maltophilia
gtgaagaaagtaaatgtggtcaacacgcagcttgtgcatgccggtgatgtactggtcgtgcttgatgagacggacgccagaattgcggtgtcacaggctgaagctgagcttggcagcgcccggcggaaggtgatgcagattatggccaatgacaccgctctgagcggacagcttgattcgcgtgaagcaggtattcagagcgccgaacatgatgtggcgagggcacgagcccggtttgataaggccacccttgatgagcgacgtcgccggaatctggtgaaagccggggccgtatctgagcaggattttacggatgcgcagacagaattacgggaggcaacggccgcgctgggagaagcggaagccagtctgaaagctgctcgcgctggcagtgtcgaagcaaaaggatcccggcaggcgaacgaggccctgtttctgaacagtaccgttgaaactaaccccattgtggtggcggccagaacccgtctcgatcaggcccgtataaacctggcgcgtatggttatccgggccccggtggatggagtggtaacacagcgctcagtggatatcgggcagcatgttcaggctggaaaccggctgatgcgggttgtgcccatcgaggatatttatgttgatgcgaatttcaaggaaggtcagctcagcgacgtcagaccgggccagaaggtagagctgacttcagacctgtacggcagcggtgttgtttatcacggtgtggttcagggatttgacggaggctccggttccgcgctttcactgataccggcgcagaatgccacgggtaactggattaaggtcgtgcagcgactgccggtgcgtgttcgtctggagcgggaagaactgcgtaaaaatcctctgcgcatcgggctgtccatggaagtgacggtggacctgacatcgaatgccagagatgaccacacggagaaataa

SEQ ID NO: 526899 - DNA, 1533 bp, Stenotrophomonas maltophilia
atgtctggttcagcatttccacctctgtccggattcaaactggttgttgcggcaatcgtgctctcgctcgggaattttatggtggtactcgataccaccattgctaacgtcgcgatgcccacaatatccggttacctgggcgtgtcgacaacagaaggaatctggatcatcaccgcctatgcggtggctgaagccatcacggtgccgctgaccggctggctggcgatgcagttcggtcaggtgcgcgtattccttttttctgttgttgcatttgtgattttttctgtctgctgcggtctttcctggtcactaccgagcctggccattttccgtgtgctgcaggggcttgccggtggcccgctgatcccgctttcttccacgttgctgcttgcagccttcccgaagaaacaggccaacattgccgtggcgctctggggaatgatgacggtagtagcgcctatattcggtccgatactgggtgggcttatctcggataactggagctggcagtgggtattttacatcaatatcggctttggtctgattgtggggtttgggacctggtgggtgctgaaggggaaagaaacacatatcagccgttcccggctggacagcgtggggctgggtctgctcgtcatctttgtggcagcctttcagatcatgctggataaaggacgtgaactggactggttttcctcggatattatcattgtctgcgccattgtggccgctattgccctgatctcgctgattatctgggagctcaccgctgagcaaccggtgctggatctgagcgtatttaagtcacgtaactgggtggtatctaccgtcacgctctgtctgatgttcggtattttcttcgggaatatcgtgctgacccccctctggttacagcaatggatgggatacacggcaacctgggccgggtatgcgacgggccccatggggatcctggccgtcctgagctcgcccataattggtcgtctgctgccgaaggtcgatccccgtctgctggtgagctatggcatgggggtactggcggtctcctttgtgatgcgtgccctgctgacgtcgcaggctgactttatgtcagttgccgttcccatgttcgttctgggggccggagttcccgcctgccttatcacgctcacctcgctgggcgtgtccgaactgccgccggagaaagtggcagccggttccgggctgcagaacttcctgcgtgtcatgtgcatggcggtaggctcttccctgacccagacctactgggaacatatgacaaaatttaaccgagcggagctggtgacggcaatcaatcctgacgtgccagggattgtcagcaacacgctgggcgcggccggtattccgacagacacgtcagcggctctgttttcgagaatgatcgacagtcaggccatcatgctggcaacgaacgatttctatcagtcggccaccgttctgatgctggggtccataggcattatctggctaatcaaaaaaccgaaagggccgcttcagaagatgtcgggccattaa

SEQ ID NO: 526900 - DNA, 294 bp, Stenotrophomonas maltophilia
  misc_feature (245)..(254): n is a, c, g, or t
atgcgatatcataaatataagaccattgtgaaatgcctgccggtaataacagggacgttattactaagcggatgtcatgctgttttacttgatcccaaagggcaaatcgctattgaacaacgggcgctaatcattacggctttttgtctgatgttagtggtcgttattcccgtggttctgatggcagttgtgtttacctggaaataccggaccacgaataccatggcgaaatatacgcctgactnnnnnnnnnnttctggccgtgctgacatggaagtccacccatgcgcttga

SEQ ID NO: 526901 - DNA, 633 bp, Stenotrophomonas maltophilia
atgaaaccggcatccgttatcattatggacgaacaccctatcgtcagaatgtcgatagaagtcctgctacagaaaaataaaaacatccaggtcaaactgaagtcaggcgacagccacgaagtgcttgactgtatacgcaaccaccccatcgacctggtcattctcgatatcgaaatgacaggcacggacggcttcgtattattgaaaagaatcagaaacttaaataaagatattaagattctcttcctctcttcgaaatctgaagccttctacgcagggcgcgccatccgcgccggggcaaatggttttgtcagtaagcggaaagatctgggggaaatttataacgcggtggaaatgatactgacgggctattcttttttcccgtcagaaacattgagttttataaaccatataggctcccggacaggcgccgctgtggatatgccattatcgaatcgtgaagtgacggttctgcgatatctggcgaacggattatctaataaggagattgcggatcaattattacttagcaacaaaacaattagcgctcataagtctaatatcttttccaagctgggcgtacaaagtatcgttgaattaattgattacgcgaaagcgcacgaattactgtaa

SEQ ID NO: 526902 - DNA, 522 bp, Stenotrophomonas maltophilia
atgcgaaacggaatgcggtatttagccgtcgcgctctttgcgctttgctcccctgcgcacgcagagacggcgcttggggaaattaacattcagctttacggcaatatagtggactttacctgcgtggcggagggggacgacagcaataaaaccgtcacgctcggcacctggcccacgaaacagctccgcacaacgggaagccggacgcagcctgtaccgttcaccctgaagctgaccggatgcccgccgggggcggcttcgatcacatttacggggaagatggacgggcatgataacagcctgctggcgctgaatgatgccagcgcggccagtaacgtggccgtggagatcctcgaccgggataaaacgcgcctcgcgttgcagcaggccagccagacggtgtcggtggatgcgcagggaaatgccgaactgtcgttttatgccaattatatcgccacggcggataacccgcagccgggccgggctgatgccgatgcaactttcatgattaattataattaa

SEQ ID NO: 526903 - DNA, 1008 bp, Stenotrophomonas maltophilia
gtgaataaaatccattatctggggctatcccttctggcatttttgccgctatctgaggcgttcgccaccgtctgcgtcaatgaaaatggcgtgccgacggaggtgtattacgacctgacggataaattcaacagctccaataaccaggtggggcagattgttacactcagcgagaagtcccagtgggtgggcgtcaacgccgtctgccctaagggaacgtccgggaacaccaccaagcgtagctatgtgaccgaattcccggtcacaggcaccagcgatggctaccagtatctgaagctaaacgactatctggacggggcgatgaaaatcaccgacagctacgctggcacgttctatccacccagaaagtacattcagatggggagccatccgaacgtgtctaaaaacaaaccgtttggagtacaggattccagcctcgtctttcggcttaaggtgacccgacgctttatcaatatggtggtgatcccccgggcaatcatgttccgggtttacgtcaccacgacctccacggatccgctcaccacgccggtttataccatcagctacagcgggaccattcaggtgcctcagagctgtgagattaatgccggaaatgtggtggagttcgatttcggagacatcggcgcctctctgttcagtaaagcgggcatcggaaataagccggaggggatctcagcgcaaagcaaaaccatcggcataaaatgcaccaacgtcgaggcgaacgccatgctcacaatgcgtgttgaagcggagaaggtttcaggcagtacgctggtctctgataacgcggatgtgggttttgtgattgccaacagtaatggcgtgccgctgacgccgaacaacctgaccagcaaaatcccgttccgtctggacgacagcgcacaggcacaggtggggatccgcgcgtggcccgtcagcgtgaccggtaaaaaacctgccgaggggcgttttacctctcgcggctatttacgcgtcgactatgactaa

SEQ ID NO: 526904 - DNA, 2559 bp, Stenotrophomonas maltophilia
atgaacactcaatggcgttactgcccggttgcgctggcactgatggcaacgctctggccacacgctggctggggcgaaagctactttaacccggcgtttctctccgatgacgcggcgaacgtggcggatttgtcgcgttttgagaaaggccaccagcaggcaccgggcgtctatcgcgtcgatatctggcgtaacgatgagtttatcggcacccaggacgtgcggtttgagcaagccgacaacacgccgccggtcgcgggcggtttgtcgccgtgcattacgcgcgcgatgctcgatcgctttggcgtcaatatcgccgccttcccggaactgagcaacgtgcagggcgagacctgcgttccgctcaccacggctattccgggcagcgaaacggcgttcaacttcgcctcgttgcgccttaacgtcagtctgcctcaggtggcgatgcaaaacagcgcccgcgggtatattccgcctgaacagtgggatgaaggcatccccgccgcgctgctgaactacagcttcaccggcaaccggggcagcgacgacgacagctactatctgaacctgcaaagcgggttgaactatggcgcctggcgattacgcaataacggcgcgtggcgttataccgaaagcaacggccagcggcacagcagctggcaaaatattggcacctgggcgcagcgtacggtcattccgctaaaaagcgagctggtgctcggcgacagcaacaccggtaacgatgtcttcgacagcgtcggttttcgcggtggtcggctctattcgtccgacagcatgtatccggacagcctgcaaggctacgcgcctaccgtacgcggaatcgcccgcacccctgccaaagtggttatccgccagaacggatacgtgatttaccagagctatgtgcagccgggggcttttgcgataactgaccttaacccgacctcctcaagcggtgacctggaggtgacggtggaagagaaggacggcagccagcagcgctacaccgtcccgtattccaccgttccgttgcttcagcgtgaaggacgctggaaatacgatctggtggcaggggactatcgcagcggcaacagcgagcaggacacgccgttctttactcagggtacgatgattgcgggtattgccgacggctacacgctgtacggcggaacgcagctggcctcgcgctataccgccatcgccattggcgcgggtaaaaacctcggtgactggggggctgtgtcacttgacctcacccatgcccgcagccagcttgccgatgacagccgccatgaagggcagtctctgcggttcctgtacgcaaaatcccttaacggattcggcaccaacttccagctgctgggctatcgctactcgaccaaaggcttctacaccctcgacgatgtggcctggcgcacaatggaaggctaccagtatggcgacgatcaggacgatgacggcgtgccggacgtgcagagctatcacaacctgacgctgaataaaaaaggacgtttccagctcaatatctcccagtctcttggcgattacggctcggtgtacgtgtcgggcagccagcaaagttactggggcaccagcgagtccaacgtctggtatcagctcggctacgccggcggggtgaacgggatcagctacgccttatcctggtcatggaacaaggccgtcggcattgaaggaactgaccggatcccctcgtttaacgtctccgtcccgttcagcctgttcacccgtcacggctaccgtcgcgataacgcgatcgaccgggcctatgccacggcctcagccagccgcaacagcgacggtgataccagctggcagaccgggatcagcggaacgctgctccaggatcgtaacctgaactacagcgtcacgcagggtcacaccagcaataacggtgccagcggcagcgccagcgccaactggcaggcaacgtacggtacgctgggtgtgggctacaactacacgcgggatcagcacgacctcaactggcagctctccggcggcgtggtagggcattcagacggcatcacattcagtcagccgctgggcgataccaacgtcttgatcaaagcgccgggcgcgtcaggcgtgagcgtcgaaaaccagaccggcgtcaaaacagactggcgtggctatgcggtgatgccgtacgccacggtgtaccgttacaaccgcgtggcgctcgacactaacaccatgagcaacaacaccgacattgaaaataacgtttccagcgtcgtgccgacgaacggtgcgctggtgcgcgccagttttgacacccgcatcggcgtgcgtgcgttgctcaccgtgaagcgtgataaccagcctgtgccgtttggggcggtggtgcgtgagacgcagagcggcgtaaccagcatggtgggagatgacggtcagatttacctgagcgggctgccgctgagcggggaactgctgattcagtggggagacgggaagcagtcccagtgtcgtgcgccctacagcctgccagaacagagcctgcaacaggcgatcacacttaaggggatccgctgtgaataa

SEQ ID NO: 526905 - DNA, 366 bp, Stenotrophomonas maltophilia
atgaacgtcaaagcgattccctccgtcagcaaaaaacatcaggacggcaacaacgtcctgcaactggccattctgtcacgcatcaagctgtttgttcgcccggctaacctggcgatgccgccggaagaggcgctctcacagctgcgttttgagcgcgtcggcaaccatcttaaggtgagcaatgcctcgccgtattacgtcacgctggtcaatctgaagctcggcggtcagacgctggagaacctgatggttgctcctaaaagctcggcgcagcaggtgctgcctgccgcagcgagcggcacgctctcctggcagagtgtgaatgactacggtgccattacgccggcgcgtagcgtcagcctgtga

SEQ ID NO: 526906 - DNA, 210 bp, Stenotrophomonas maltophilia; identical to SEQ ID NO: 491571

SEQ ID NO: 526907 - DNA, 1740 bp, Stenotrophomonas maltophilia
atgtcgcgtggtctggaattactgatagcccaaactattttgcagggcttcgatgcccagtatggccgctttctggaagtcacatccggcgcgcaacagcgttttgagcacgccgactggcatgcggttcagcaggccatgaagcagcgtatccatctctatgatcaccacgtaggtctggtggtggaacaactgcgctgtatcaccgacggtaaaagcccggatgcggaatttttactgcgcgtgaaagagcattacacccatctgttacccgactacccgcgcttcgagattgcggagagctttttcaactccgtctattgccggttatttgaccaccgctcattatctcctgagcggttatttatcttcagctcccagcccgagcgacgcttccgtaccattccgcgtccgctggcgaaagatttctttcccgatcgcggctgggaaaagctcctgcaccgcgtcttaacggatttgccgctgcgcctgccgtggcagaataaaccccgggatatcggctatatccacgcgtatctcagtgaaaccttcggcgaggcggtgctcagccgcagccatttgcaggttgccaacgagcttttctaccgcaataaggccgcctggctggtgggcaaactggttacgccgacagccatcgtgccgtttctgctgcccattcaccgtaccgacgacggcgaactgtttgtcgatacctgcctgactaccagcgctgaggcgagtatcgtatttggcttcgcccgctcctatttcatggtctacgccccgctgcccgccgccctggtggagtggctgcgcgagatcctgccgggcaaaaccaccgccgagctgtatatggcgattggctgtcagaagcatgccaaaacggagagttatcgggaatacctgcgttatgtcaccacggctgatgagcagtttatcgaagcgccgggtatccgcggcatggtgatgctggtcttcacgctgccgggctttgatcgggtgtttaaggtgattaaggataaattcgccccgcagaaagagatgaccgcagcccacgtccgtgcctgctatcagctggtaaaagagcacgatcgcgtcgggcgaatggccgatacccaggagtttgaaaactttgtgctggataagcagcagatcgatccggcgctaatgacgctgctcatgcaggaagcgccgacgaaaattaccgatcttggcgataagattgcgatcagccatctctacattgagcgccgtatggtgccgctaaatatctggctggaacagtcagagggccaggctttacgtgatgccatcgaagagtacggcaacgccatccgccagctcgccgctgccaatattttccccggggatatgctgtttaaaaacttcggcgtcacccgtcacgggcgggtggtgttctacgattacgatgaaatttgctacatgaccgaggtgaacttccgcgatatcccgccgccgcgctacccggaagatgaactgtccagcgagccgtggtacagcgtctcgccgggcgatgtgtttccggaggagtttcgccactggctgtgtgcggacccacgcatcgggccgttatttgaagagatgcatgccgatctgttccgcgccagctactggcgcgggctgcaagcgcggatcaaaaacgggcacgtggaagatgtctacgcttaccgccgcaagcagcggttttgcatccgcttttctccctctcccgcagggtaa

SEQ ID NO: 526908 - DNA, 1305 bp, Stenotrophomonas maltophilia
atgaaaacccgtacccaacagatcgaagagttacaaaaagagtggacccaaccgcgctgggaaggcattcgccgtccgtacagcgcagaggaagtggtgaagttacgcggctcggttaacccggagtgtacgctggcgcagaacggcgcggcgaaaatgtgggatctgctgcacggggggtctaaaaaaggttatatcaacagcctcggcgcactgactggcggtcaggcattgcagcaggcgaaggccggcattgaagctatctatctttccggctggcaggtcgcggcggatgctaacctggcctccagcatgtatccggatcaatctctttatccggcgaactcggtgccgtcagtggtagatcggatcaacaataccttccgccgtgcggatcagatccagtgggcggcgggcatcgagccccacgatccgcgctttactgattatttcctgccgatcgtcgccgatgcggaagccggtttcggcggtgtgctgaacgcctttgagctgatgaaatcgatgattgaggccggtgcagcggccgtacactttgaagatcagctggcgtcggtgaagaagtgtgggcatatgggcgggaaagtgctggtgccaactcaggaagcgatccagaagctggttgccgcgcgtctggctgctgacgtgctcggcgtgccgacgctggtcattgctcgtaccgatgcggacgcagcggacctgatcacctctgactgcgacccgtacgacagcgaattcatcaccggcgaacgcaccagcgaagggttctatcgcacgcatgccggtattgaacaggcgatcagccgcggcctggcgtatgccccttacgccgacctggtctggtgtgaaacctccacgccggatctggcgctggcgaagcgctttgccgatgcgattcatgcgaaatatccgggcaagctgctggcctataactgttcaccgtccttcaactggcaaaaaaatctggacgacacgaccatcgccagcttccagcagcagctgtcggatatgggctacaagtaccagttcatcaccctggcgggtatccacagcatgtggttcaacatgttcgacctggcgcatgcctacgcacagggcgaaggcatgaagcactatgttgagaaggtacagcagccagaatttgcggcgggcaaagagggttacaccttcgtttcgcaccagcaggaggtgggaaccggctatttcgataatgtgaccacgattattcagggcggggcctcctccgtcacggcattaacgggctcgacggaagaagcacagttctaa

SEQ ID NO: 526909 - DNA, 1602 bp, Stenotrophomonas maltophilia
atgactcaacaggcaacaacggtcgatggactgacctttacccagccgaatggcgagcaagaacagcaagttttgacggcagaagcggtagagtttctgactgaactggtgactcgctttacgccacagcgtaataaactgctggcggcacgcattcatcaacagcaggagatcgataacggcaagttgccagggtttatttcggaaaccgcttccattcgtcatggtgaatggaaaattcgcggaatccctgaagatttacaggatcgtcgcgtagagatcaccggcccggtagagcgcaaaatggtgattaacgccatgaatgccaacgtcaaagtatttatggcggacttcgaagattccctcgcgccggactggcagaaagttatcgacgggcagatcaacctgcgcgacgccgtcaacggcaccatcagctataccaacgaagccggtaaaatttaccagctcaaaccgaatccggcggtgctgatctgccgcgtacgcggtctgcatttgcctgaaaaacacgtcacctggcgcggagaagccattccgggcagcctgttcgactttgcgctgtacttcttccacaaccataagaacctgctggcgaaaggcagcggcccctatttctatctgccgaaaacccagtcctggcaggaagcggcgtggtggagtgaagtcttcagctacgcagaagaccgtttcagcctgccgcgcggcaccattaaggctacgctgctgattgaaaccctgccagccgtattccagatgcatgagatcctccatgcgctgcgtgaccatattgtgggcctgaactgcggccgctgggattacatcttcagctacatcaaaaccctgaaaaaccatgccgaccgggtattgccggatcgtcaggttgtgaccatggataaaccgttcctcagcgcctactcgcgcctgctgattaagacctgccacaaacgcggcgcctttgcgatgggcggcatggcggcgtttatcccgagcaaagacgcagagcgtaacaaccaggtgctcaacaaggtgaaagccgataaagagctggaagcccgtaacggccacgacgggacgtggattgcccaccccggtctggccgacacggcgatggaggtcttcaaccgcgtactcggcgataacaaaaaccagctgtttgtcacccgtgaagacgatgcgccaatcgcagaagaacagttgctctcgccgtgtgcgggcgagcgtacggaagagggcatgcgcgccaatattcgcgtcgccgtgcagtacatcgaggcatggatctccggcaacggctgcgtgccgatctacggcctgatggaagatgccgccacggcggaaatttcacgtacctccatctggcagtggatccatcatcaaaaaacgctcagcaacggcaaaccggtcaccaaagccctgttccgtcagatgctggccgaagagatgcgggtcatccaggacgaactgggcgagcaccgcttcagcagcgggcgttttaatgacgctgcgcgcctgatggagcaaatcaccacctctgatgacttaatcgacttcctgaccctgccgggctaccgcttcctggcgtaa

SEQ ID NO: 526910 - DNA, 210 bp, Stenotrophomonas maltophilia
atggctgccgagaagggggtgagcattgaaactgagctgctgaacttccgggactatcacctttcccgtggcacgcagctaatcgactggaattcggctttcagagtctggatccggaatgccagggttaacccgctggctaagcgtggtcgtgccgagcaggaaacgcctcactggaacagccgcgagggatgggaggacttcctgtga

SEQ ID NO: 526911 - DNA, 291 bp, Stenotrophomonas maltophilia
  misc_feature (277)..(286): n is a, c, g, or t
gtgaataatcagattatgcaagccgttaacggccgtgatggcgcgctactttccagaatggcgaacggaagtaccgaccagcagaaggttatcaaccctgaggctgaggggcttgttgattctctctttcggcagctgaagcagattttccctgcgtctacgcagacaaacctgaaaactgacgcagacgagaaaacggcaaagcgtcagtggatcgcagcgttttcagagaatgggatccgcacacgcgaacagctttctgccggagtacggcacnnnnnnnnnnagtga

SEQ ID NO: 526912 - DNA, 432 bp, Stenotrophomonas maltophilia
gtgcttggcattggcctggctgatgtgatgaatgagtttcatcggtatagccgcgaaaaagggctgcataccggcggagcagaagctttcccgtggtctcatgacgtcatgtactggattgtgaccgatacgcgcagagcgatgtaccagcgccagctgagcgaggctgaaactgaaaaatacgcgtcaaaaaaacttgaggaatgggcgctgaaagttgctggcggggaaaaaataccatctcccgtcctggcgctcgagaattctgatgaagtgatcccgacaaatcacgtgagccgtcaagccggttatcacccggaaggaaaaagcttcgggtgcatgccaaatgcggcgactctcggcgctctcaccccggcccaatggctttgggaagagtatcagcgcgggaaagagagagggcttattcaatga

SEQ ID NO: 526913 - DNA, 300 bp, Stenotrophomonas maltophilia
atgaaaggcaaacaggcaattctgcgttatctcgaaacgcaccggaccttcaccgcgaaggatgtggccacagagtgcggcatgaccatcaactgcatcacgaagaacgctctcgatcaggaaaagtctcgaaaaattatccgggtgagcaaggtctggcgaacggtgacatatcgcctggcgacgccggaagagcaggctggtaccgcacgcagctgcaccaacggaatatttcaggaatgccgcaacagtccggcgatgagaagggtattgatggtttgtgggagggtaggagtatga

SEQ ID NO: 526914 - DNA, 453 bp, Stenotrophomonas maltophilia
atgaaacagaaatttatcgagtggtttaccaagaacaacaacggctgctcgccagcgatggaagacgacagaagctttgtgtacgagatgacgcagcacatgttcgaagcgtaccaggctggcgtggctgaaggtgaagccaagtgcgcggcgctggctgcggaaatgagtgcagtcgaagaaatccacaacgaggcagtgttcattacagacgatcactatgagcagtgcccgccggaagtgcagaagataattaggtcactggctgtgatgcaggttcctgcgtaccaggctttcctggctgaagtgcgggccgccgcagtagatgaagtttgcctgaaaattagcaatgcaattattaattgctatcaggacgaacaaattgggcttgatgcagcagcaactatctgcggtgacttcaccgcccagcttcgcaaaggagtgcagtcatga

SEQ ID NO: 526915 - DNA, 261 bp, Stenotrophomonas maltophilia; identical to SEQ ID NO: 139866

SEQ ID NO: 526916 - DNA, 543 bp, Stenotrophomonas maltophilia
atgagcaacatcgacaaacacatcgacaaacaggcgctgcgtgatcaaagcgttgaaggatcattttacctggtggaatgctgcaattgcggtgaaatgtaccccagcaaccttctggatggtggagaagcaattgctgactccggggattacggcgattgctactgccatctgtgcggagcagatgacacggaacgggcggattggggagacgtaaattcgaatgaagcaaaggcgtggaattttcagcagaagcgcattgaggcgctgctggatgagctggaagccaaagactcaaccatagccactcagcagcaggagatacgaacgcttcttaatgcgttagggcaatcatcagagaagagaaattctgaccttcctgaccagaagcgaattattggttggcgagcatcagactacaccgacgagacatctgaccctgagctagctaaaaactgggccgctgcaattggtgtgctgcctatttttgaaggagacgtgaacaccaaactaagcgccgccgcagccggtaaaggagagtga

SEQ ID NO: 526917 - DNA, 249 bp, Stenotrophomonas maltophilia
  misc_feature (178)..(187): n is a, c, g, or t
atggctaaatttacagacgtacacgacctgttaaccgcttatcagaaacaggctcggaagataccccctaagggtgtttatgcctcaaggcatcgtcaggttgaagtgcaggcggcacacgtacgcaagttaatgcgcaagcgtcggcggtctgtcggcaagtcaaataagcttggcnnnnnnnnnngcggaaatgcgcgtagcgctgatttgcgatatgaatttctgggcgctgatttgccgctctaa

SEQ ID NO: 526918 - DNA, 1017 bp, Stenotrophomonas maltophilia
atgagcactattaccaaagagcagttacgcgaacgtgcgcgccaaaaagttaagtcgctggagcttgcggtaacacagaccgcctttgccgattcacgcgcagagcttgaagaagaactggagctggcgcgtatcgcgctggcatcgatcgaagcggagcctgtggcattacgtgacgagcgttcaggtagtggcggtatcagcaaaaagcctggctttaatgacctacagcatggcacaccgctatacaccgccccgccagcgccggtatctgtgcctgatgagcgttatcagcatctgagtgagctttatcacgcgcaggagaaacggctgttcaagctcgcacagcgaatcaagggggcgtcattcgataaatacgcgtactcaccatcgcaggctatcgatgtcctggagtcagcaatttttggtgagcgcgaagatgaatgccgcgccgccattcttcatggtgccgatcgaccacaaaacgaaccgcaaaatattccggaaaatattccagccacacagtttgagccggtagcagacctgtacggcttaacctcgccaaccggcagcgaaacatctttcactttcgacgctgttgaagctcgcgatttcattgatggcggttggtcatgtcaggagtacgtggagcttggacgctttcaggtatccatgcttcagggtgccgaaaacgccgagtcgccaaccactatgcagaccgcgccagaactggattattcaccaaaaaacgccgagtcgcccaccggcataaatcagggtaaatccgaacctgtaacgacggcttacaagatgccagaagggtgggtggcggttccggttgagccgacagaagacatgatcgtcaatgggttagaatcagagcctaatgagagctttagtgacgagaaggtatgggaagcgtacgacgctatgagtgggtgccagcaggcggcgcaccgcgcgaagctgtgctgggcggcgatgatttcggcagcaccaaagccagatgtacggtaa

SEQ ID NO: 526919 - DNA, 450 bp, Stenotrophomonas maltophilia
atgaaacagcaattccacctcatcaacgatgccatcaagcaaaacgctatcaacttcatccgggagctgccggtggacgacaaacgcccattagttctcgatatcaaggagatgacccgcaccctcgatcagaacaaaaaaatgtggccactgcttaaagacctttccgaccaggttacgtggtttggcaataagtacgattctgacgactggaaagacctgatcaccgcaatggttgccaagtccaaaaagcaagagcagcgcatggctccgggtctcgatggtggtgttgtgatgttcgggcagcgaaccagcaagatgaccgtccgccagatggttgaggtgattgaggctatctactggttcggaactcagcagaacgtcaagttcagcgaaaaatcacgcctcgaaattgaatgggcaaaacgctggggtgagcacaatgagtag

SEQ ID NO: 526920 - DNA, 171 bp, Stenotrophomonas maltophilia
atgagtagcccactttcccgcgtcatcacgaacgaaatcttccgcgttccggcacgccgcaagcgtaagcccgcggttaagccgtccgacatcccgaccttgaaaggctacaccgcccgcctggtggatcagaaatggctgcgtctcgcgtcgaggagaggtcatgcgtaa

SEQ ID NO: 526921 - DNA, 633 bp, Stenotrophomonas maltophilia
atgcgtaaaccatcccgccgtaagtgcaaagtgtgcggtgaatacttcgtgccgaaattccacgacatccggatccgctggtgcagcccggaacacggagcaatcctcgcaatggaagaacgcgaaaaggagaaggtgaaagccgcggctaagcgcatcaaggagcacaaagagaaagagcgcgcggaacgccgggatctgaaagcgagaaaggtggcgctaaaaacgaaaccgcagtggagatcggaagcgcaggcggcattcaaccggtacgtccgtctgagggatgcaggtaagccgtgcatcagctgcggcaggctgccagagcagaagtttggcggaaccatggactgcggacactatcgcacccgtggcgctgccgcgcatctggctttcaaccttcacaataccgctgcccagtgtgtctattgcaaccgggatcgggacggcgcgcaaaaggcatttgaacagggtcttattgagcgcatcggtgccgaaaaagttgaggcgataaacaacgataactctgtccgccggttcgacatccaatacctgcaacgcatcaaatctattttcacacgcaaagcccgcgcgctggaaaaacgccgggcccgccgacaggaggccgcatga

SEQ ID NO: 526922 - DNA, 1869 bp, Stenotrophomonas maltophilia
atgagcactgataataagcaatcattacccgcagtaacgcttgcagcgatcggggttgtctacggtgatatcggcaccagcccgctttatacgcttcgtgaatgtttgtccggtcagtttggttttggtgtagagcgtgacgccgtatttggtttcctctcgctcatcttctggctgctgatcctggtggtctcccttaagtatctctctttcgttatgcgggctgataacgcgggcgagggcggaattctgaccctgatgtcccttgctgggcgcaatacgtctgcaagaatgacctccgtgctggtcatcattggcctgattggcggcagcttcttctatggggaagtcgtgattacgccagcgatttcggtgatgtcggccatagaggggctggagattgtcgcgccacagcttgatacgtgggtggtgccactcgctattatcgtgctgacgttgctgtttgctatacaaaaacacggtaccgggctggtgggtaagctgttcgcgcctattatgctggcctggttcctgatcctggcggcgctgggcttacgcagtattattgccaacccggatgtcctgcacgcgctgaacccaatgtgggcggtgcatttcttcctggaatataaagtggtgtcgtttgtggcgctgggcgcggtagtgctttccattaccggtgttgaagcgctgtatgcagatatgggccacttcgggaaactcccaattcgcgtcgcctggtttagcgttgttctgccttcactggtgctgaattacttcggccagggcgcgctgctgcttgcccatcctgaagcgattaaaaacccgttcttcctgctggcgccggactgggcgctggttccgatgctgatcctggcgacgctggcgacggtcattgcctctcaggctgttatttccggcgtattctccctgacgcgtcaggccgtgcgtttgggttatctctccccaatgcgcattatccatacctctgagatggagtcaggccagatctacattccgttcgtcaactggctgctctatttcgcggtggtgattgttatcgtcagcttcgagcactccagtaacctggcggcggcgtacggtatcgcggtaaccggaacgatggtgttgacctctattctctccaccaccgtggcgtaccgtaactggcactggaataagttcctcgtggggctgatcctggttggcttcctctgtatcgacgtaccgctgttctcagcgaacctcgataagattgtctccggtggctggctgccgctgacgctgggtctggtgatgttcatcgtgatgacgacgtggaagagcgaacgtttccgcctgctgcgtcgtatgcatgagcacggtaattctctggaggcgatgatcgcctcgctggagaaatccccgccggtgcgagtgccgggtacggcggtgtatatgtctcgtgcgctgaacgtgatcccgtttgcgctgatgcataaccttaagcacaacaaagtgctgcacgagcgcgtgatcctgctgacgctgcgtaccgaagatgcgccgtatgttcacaacgtgcgacgcgtacagattgagcagctgtcgccaaccttctggcgcgtggtggcaagctacggctggcgcgaaacgccgaacgtggaagaggtattccaccgctgcggtctggaagggttgagttgccgcatgatggagacatcgttctttatgtcccacgagtcgctgatcatcggcaagcgcccatggtatctgcgcctgcgcggcaagctgtatctcatcctgcaacgtaacgccctgcgtgcgcctgaccagtttgagatcccgcctaaccgcgtgattgagctggggacgcaggtcgagatttaa

SEQ ID NO: 526923 - DNA, 1449 bp, Stenotrophomonas maltophilia
  misc_feature (1434)..(1443): n is a, c, g, or t
atggctcactcacatttattagcagaaagaatttcccgcctcagcagtgcgctggagaaaggcctttacgagcgtagccacgccattcgcctctgtttactggcggcgctgagcggggaaagcgtgtttctgctgggtccgccgggcattgccaaaagtctgatcgcacgccgcctcaaattcgctttccagaacgctcgcgcattcgagtatttgatgacgcgcttctccacgccggaagaagttttcggcccgctctccattcaggcgttaaaagatgagggacgctatgaacgtctgacggcgggctatctcccggaagctgaaatcgtctttcttgatgagatctggaaagccggcccggccattctgaataccctgctgacggcaatcaacgaacgccgcttccgcaacggcgcgagcgaagagaagatccccatgcggttgctggtggccgcgtctaacgaacttcccgaagccgacagcagccttgaagcgctgtatgaccgcatgctgatccgcctgtggctggataaagtccaggacaaatcgaacttccgctcaatgctggtaagccagcaggacgaaaacgaaaatccggtggcaccatcattacaggtcacggacgaagagtatgaccagtggcaggaagagataggcaaaattaagctgcccgatgccgtctttgagctgatcttcatgctgcgccagcagcttgatttattgccctccgcgccttacgtctccgaccgtcgctggaaaaaagccattcgtctgcttcaggcaagcgccctgttcagcggccgcgatgctgtcgcccccatcgatctaatcctgctgaaagactgtctgtggcacgacgcagaagggatgaatctgatgcagcagcagctggacgttttgatgaccgggcacgcgtggggtcagcaatccatgcttaatcaactgggggcgattgcccaacgtcgtcttcagcttcagcagcagcaaagtgacaaaaccgcgctgaaggtgaaccgtcttggcgggatgtttgcccgtaaaccgcactatgaactgccagccgagctgactgacgcctcgctcacgcttcttcttcagcagccgctgaagcttcatgatatgcaggtggtgcacgtgacgatcgaacgcgttgcgctggttcagtggctggataagggcggcgagatccgcggtaaactcaacggtatcggctttgcacagccgctgtcgatggaagtcgacagcagccagcaccttgtgatccgcgacgtcagccttcagggatcgcgcctggcgctgccgggcacggcctctgacagtcttccggaggagatcaaacagcagctcgaagcgctggataacgaatggcatcagcagcacacgcgcttcagcgagcagcagaaatgcctctttatccatagcgactggttnnnnnnnnnncattga

SEQ ID NO: 526924 - DNA, 1452 bp, Stenotrophomonas maltophilia
atgctaacgctggacacgcttaacgtcatgctggcggttagcgaggaagggttgatcgaagaggtcgtcattaccctgctcgcttcaccgcagctggcggccttctttgaaaaatttccgaagctcagaaaagcaatgacggacgatcttccccgctggcgcgataacctgcgccagcggtttaaggagacggaagtcccgcaggaactgacagaggaagtggctggttaccagcagtgccagcggctttcaacgccgcagtttattgcccagctacagcaaaccctgacgctgctagataacgttcactctccgtttgccagccaggccagagcgctggtcacggacaaccccagctttactcccgccctgcatacgctgtttttacagcgctggcggctcagtcttgtcgttcaggccacctctctcaaccagcagttgctggacgaagagcgcgaacagctgttaagcgaagttcaggagcggatgacgttaagcggccagctagaacaggtgctggtggagaatgaaaacgccgccggtcgactctgggatatgagtgccggtcagttaaaacgtggcgattatcagttgatcgtgaagtacggcgactttctggcacaacagccggagctgatgaagcttgctgaacagcttggtcgttcccgggaggccaggtcagttccaaagaaagatgcgccgatggaaacctttcgtacgctggtacgcgagccgtccaccgtaccggagcaggtggacggcttacagcaaagcgatgacatcctgcggctgttgcctacggaactcagcacgctgggaatgaccgaactggagtatgagttttatcgccgtctggtggaaaaacagcttcttacctatcggttgcatggcgaagcctggcgcgaaaaaatcagccagcgcccggtggtgcatcaggactttgatgagcaaccgcgcggtccattcattgtttgcgtagatacatccggatcgatggggggatttaacgagcagtgtgcaaaagcgttctgcctggctctgatgcgcgtggcgctcgccgatcgtcgtcgctgctacatcatgttattttccagcgaagtggtggggtatgaactgaccagcccacaggggctggaacaggcgatccgctttttaagccagcgctttcgcggcggcaccgatctggccagctgttttcgcagcatcattgagcgcatgcagggcggagactggtacgacgcggatgcggtggtgatttccgattttattgcccagcgactgccggacgacgtcgtgaataaagtgaaggagatgcagcgcgtgcatcagcaccgcttccatgccgtggcgatgtctgcacatggaaaacccggcatcatgcgcatcttcgatcacatctggcgctttgataccgggttgcgtagccgcctgctcagacgctggcgacgttaa

SEQ ID NO: 526925 - DNA, 627 bp, Stenotrophomonas maltophilia
atgggtgacggagagcgtcacgtcggtacgctgaaatctaccgttgaggcgatctacgccgggatcaaagcgaccgaagcggccgtgagcaaagagtttggtctggcaccgttcctgccggaaacgatccactttgttcacagtcaggagttgctgagccgtttcccggatctggatgccaaaggccgtgaacgcgcgatcgccaaagagctgggcgcggtattcctgatcggcattggcgggaaattgtctgatggtaaacgtcacgacgtccgtgcgccggattacgatgactggagcaccgtgggcgagagcgaatatgccggtctgaacggcgatattctggtctggaacccggttctggaagatgcgtttgaactctcttcgatggggatccgcgtggatgctgaagcactgaagcgtcagctggccgtgaccggtgatgaagatcgtctgcaactggagtggcaccaggcgctgctgcgcggtgaaatgccgcagaccatcggcggtggtattggccagtctcgtctgaccatgctgctgttgcaactgtcccatatcggtcaggtacagtgtggggtctggccgcagcaggtacgtgagagcgtcggttctcttctttaa

SEQ ID NO: 526926 - DNA, 225 bp, Stenotrophomonas maltophilia
gtggtacaggagctggagcgccgggcggtgctggcgggttacagccacatctacctgactacggggtttcgtcagccggaggcggtgcggctctatctcagtcaggggtatcagccgcagttcgatctcaaccgcgacccggaagagtatagccagccgccgttcgacggtcggctgcgtttcaccaagacgctgatccgcgaagcgctcagcaaaaccgcataa

SEQ ID NO: 526927 - DNA, 927 bp, Stenotrophomonas maltophilia
atgagcaacgttgaaaccataaaagtggtcccggcacgttatccgctgcgcgctgctggcgccgtggtggcgctgtttgtgctggctgtcgtgatccagtccgtggcctttaatccgcgctgggagtgggcggtatttgcccgctggttctttgacccggtgatcctcgaaggcgtcggacagacgctgctgctgacgttgataagtaccgtactgagcgtggtgattggcggcatgctggcgctggctcggctctcgtcatcatggctgttgaacagcctggcgtggggttacatctggctgttccgatcgctgccgctgatcgtggtactgattatcctctataacttctcctatctctacgacacgctctctctcggcgtgccttttaccggcattacctggggcagctttgaaaccatcaacgttctcgggcagttttctaccgccatcgtggggctgacgctggtgcagagcgcctatacggcggagatcattcgcgggggcttccttggggtcgaccacggtcagtatgaggcggccgctgcgctgggtctgccggcgtggcgtcgcaccgtgcgcataattctcccccaggcgctgcgcaccatcctgccgtccgggtttaacgaaatcatcagcctcgccaaagggacggcgatggtttacgtgctggcgatgccggaactgttctacacgatccagatgatctacaaccgcacccaggaggtgatcccgctgttgatggtgggggccgtctggtatctggtgatcaccaccgtactgtctgccatccagcatgttattgagcgtggactcgcccgcagcgagcgccgctccgccgtaaaccagagccgggcgaccagccgcgcgcgttccgtcaccacttcgtcagcacaggagcccgttcatgcaagcctctcctga

SEQ ID NO: 526928 - DNA, 774 bp, Stenotrophomonas maltophilia
atgcaagcctctcctgaaggacacatttccataaccggcgtcagtaagttttttggccgacataaagcgctcgataacgtcacgcttgagatcccaccgggctccgtgacggtgatcctcggaccctctggatcgggaaaatcgacgctgctgcgcactattaaccatctggagcgcgtagacgaaggctttatccagattgacggggattacatcggctatcgccgtcagggtgacaaactttacgagctcaaagagaaagagatcctcaaacagcgcgtcaacgttgggtacgtgtttcagaacttcaatctttttccgcatctcacggtgctggaaaacctgattgaagcacccatcgcgcataaaaagttcagtaaaaaagaggctgttgaaaacgcctacagccttctggatgtggtaggtctgcgcgataaagccgatgcctggtcgcgtcacctctccggcggccaacagcagcgcattgccattgcccgcgcgctggcgctgcgcccgcgcgtgatgctgtttgatgagccaacttcggcgctggatccggagctggttggcgaagtgctggacgtgattaaaaagctcgcccgctccggcactacgctggtggtggtcacccatgagatcggctttgcacgggaagtggcggaccaggtggtatttatggtcgacggtaaaattgtggagcagggcagcagcgacgacgtgttaaaccgaccgtcgcatccgcgaacgcgccagttcctctcaaaagtgctgtaa

SEQ ID NO: 526929 - DNA, 888 bp, Stenotrophomonas maltophilia
atgaaatatggactcctggcggggctggtcttcacgacagcgagccacgccagcattgatttaaaggccaacgaacagccgctgccagtgacggttgatcaacaggcagtggcgaaaatcccggcgaactataaatttgttgagccgggtaccctcacggtggcgatttcagccctgaattctccgccgctggcgctgctggccagtgataaccgcacccgtattggcagcgacccggatatcgcccggttgctggcgggcagtctggggctgaagctgaagctggtgccaacggcgtgggaagactggccgctggggatcacttccgggcgctatgacgtggcgttggtgaatatcgccgtcaccgagcaacgtaaggagaagttcgattttgcaacctatcgcgtcgattccctggccttctcggtgaaatccaccagcaacgtacagtcgatcaccagtgcgaaagatctggccggtaaaaacgtgattgtcgggtcaggcaccaatcaggaacgtattctgctgggctggaacgaagagaataaaaaggccggacgcgagcctgcgttgccggtttatctgaccgacgacgcctcaggcaatctctatattcagtccggcagggcggatgtcttctttggaccgcagtccgtttcggcctacaaagccgcgttaaccggcaaaacccgcgtcgtgggattaggcccgaagaaagcctatgtcgccaccacaaccaaaaaaggcaatgggctggtgtatgcgttgcaggctgcgctggacggtgcgattaagcgcggggattatcaaaaggtgctggcgcgctggggggaagcgggcgaagcggtgacgtcttcagacgttaatccgcccgggataacctactaa

SEQ ID NO: 526930 - DNA, 618 bp, Stenotrophomonas maltophilia
atgatcaaactctatggcgtacccggctggggatcggcaatcagtgaggtgatgctgactctggcagacatcccgtatcagttcgtcaacgtggatgggtttgaccagcccggcccgcagcgcgaattgctgttgaaactgaacccgctgtgccaggtgccgacgctggagctggaaaatggggcgatcgtgacggaaaccgcggcgatcgccctgatggtgctcgacagacgacccgacctcgcgccgcccgttgggcaggccgagcgccagcagtttcagcgcctgctcatctggtttgtggcgaacgtctatcccacctttacgtatgcagattacccggaacgctgggtgcctgatgccccggaacagctgaagaaaaactgtattgagtaccggaaatccctctatctgtggtttgacagccagctcagcgcctcgccttatgcctttggccaacagcttacgctgcttgacgtctatattgccgtcgtgcgtacctgggggccaggtcatgagtggtttaccaccaacgcacctaatatcaccgccatcgcggatgccgtctgcgcgttgccagaactgcacaaggtgctaaaagctaacgacataatctga

SEQ ID NO: 526931 - DNA, 231 bp, Stenotrophomonas maltophilia
atgcctcacgttgatatcaaatgttttccacgcgatctgactgacgaacaaaaaacggccctggcggcggatatcgccgaaacgatagtccgtcatctgaacagcaaagatcgctcaatctccgtggcgcttcacgaagtccaggaagctgactggaaggcgcaggtctgggataccgagattggacctaaactggatgaactgattaagaagcccggctattcgatgtaa

SEQ ID NO: 526932 - DNA, 1002 bp, Stenotrophomonas maltophilia
atgacaaaattacctcggttttcactcgcctttattcatcctcgttactggctcagttgggcaggcatcgccgcactctggtgtacggtccagctcccatattcgcttctgttaaaagcagggcacggactcgggcgtctggccatgcgtctgcttccacgccgcgtggaaatcgccagacgaaatcttgagctttgctttccggagatgaaagagggtgagcgcgagcgtttgcttgagcgtaattttgaatcggttggaatgggcgtcatcgaaacgggcatcgcgtggttctggcctgactggcgcgtgcgcaaacacttcagcgtgaccggctacgaacatatggaacaggcacgggcgcaaggaaggggcgtggtgctcattggcatgcattttctcacgctggaattaggcgcacgcatctttggcatgctcaacgcgggtattggcgtctatcgtcccaacaacaatgcattgctcgactggctacagacgcgcggtcgtctgcgttccaataaaaccatgctcgaccgttacgatttgaagggcatgatccgcgcgcttaagcaaaacgagatcctgtggtatgccccggatcacgactatggaaaaacgaatagcgtgtttgtgccgttttttgccgtcccggacgccgcgacaactgccgggagctatatgctggtgaaaagtgccggaccggccgtgatcccgtttgtaccacgcagaaaagcagacggcacagggtatgagctgattatcctggacgatattagcgataccttgcagggaggcgataaagtggccgtggctacgcagatgaacagggcgattgagcgtgcggtgatgatggcacccgagcaatatatgtggctgcatcgtcgcttcaaaacgcgtcctgaagggcaaccggaccggtatgcgcgaaaaaaacaggtccagtcctcagtcagaactttctctgccagcgatatgtcggatcggtcgagtatccagcagtag

SEQ ID NO: 526933 - DNA, 564 bp, Stenotrophomonas maltophilia
atgaccggaagagtcgactatcaccttgaaaaatatctcctcaccgaagtcgccgagccagaacgtctgacccgccagtgggcagaagtgatgcgcgagtgtcgcgagcaaaaatccggtgcggaagagcgtttgcgtctcgcgctgctgaatgtggattatgtgaccagctttgagcttcccttccggttactcctcacccgcgccccgcagttgattgatgggatcagaaatgagttccagctcagtcaaaaaaatgtcctgttcaacggcaagcggtttggctgcgtttacagccttaaacaggacctggaaggcgttcctgatgaatttacctatcacctgaaaacgcggatccagcgaagcgacagcactggcggaagtgaagtacctgtaacggcgctcgacgggcttttctggtttggcattcagcgcatcgcggccgatgtgcagaggctaagaaaaacgggcacgaggattgtgacgtcagagactgaggtgtttgatacgctaacgatgacaacccggcgaatccccgtctacagcctgacgcagccggaatga

SEQ ID NO: 526934 - DNA, 273 bp, Stenotrophomonas maltophilia; identical to SEQ ID NO: 145060

SEQ ID NO: 526935 - DNA, 762 bp, Stenotrophomonas maltophilia
atgaacaacatcgtagaaaataataacctttccacttttccggctgtaacgcagcgggcactggaaaccctgaacacagccagaaacgcatggcttgatgcacgtcgtaagcagaaagcggcgtcggataatattgcgacaatccgccagcgtcgcgctgaaatggaagccataacgaacgcactgaatgaggagtggcgtacgctgtttcgcaaaagtcagggcgtaatctcaaaggaaatgaaaaagctgcgcgcggaaattgcgctgggacgtgaaacgcttgaggattttgacgatctgctggcggctcaggaatccgagaatgcacttttgccgcaggaggctgcggaattagccggaaagtacatccacgcgcacgatgcccttgtgggtattcgcgcaaaacaaatctgggaggattttatgcagttgcatggtaaagccctaatccagacactgagcctgctgaaatccacaatgggccgggaagccagcgcagttgtcggtgtggtgcattcagttaatgacccggacacagtgctgaaagactttattcataaaaatatcatcaaaccggctctcactaacgatgcgatgccggaacaggatcctgtgtttaaactggcgggcgtagccccggattatgcggcccgtctggatttcagtaagcaactatcccctgcagccctgcataagatgaagatacgtcaggaacagatgttgctgcaaaaaaacaatagtgtatcggagggtatgtaa

SEQ ID NO: 526936 - DNA, 2673 bp, Stenotrophomonas maltophilia
atgacaacacagacggttacgcagatttcagccgccgcgcgggggaaatggcccgttattctacagatgctgcgtattgatgtacctgaaaatggcaggcacggtccctgcccgaaatgtgggggcaaggatcgttttcgcctcgatgaccttgacgggcgcgggacgtggatttgcagccagtgcggcaatggtgacggtctggatctggttaagctcatgaccggttacggcgtcagaaaggccgcgcaggaggtggcgcaggtgcttaatgtgccggatgtgcaggaactacccgttaagcctgccaggcaaaaagcccctaaacgtgacatgagccttaccgttgcgacgctgatgaaagagagccacacgggagaaagcccctatctgaccggaaaagggttcgccggatacccggcctccctgaccgggagcgttcagcatatcagcggtaaggattttcctgccggttccctgctgttaccgctcaccaccaacgccggagccgtgaccggtgcgcagcttatcgccccgacgggtgaaaaaagcatactgcccggcagcacgatgaaaggcgcgtttgtggcgctcagcccgttaccgtctgaaccgccggtacaggtggtgattaccgaaggttacgccacggcgctgacggtaagccagctcaccgccgggtgcgtagtggctgccatatcggcgggcaacctgcccaacgtggcgcagtcgctgcgggcacgctggcctgaggtaaaaattatcatcgccggtgataacgattttcaggacggaggcgagaatcccggcagatcctttgctgaacgggcggcaaaagccgtcggcggctggatgacgctgccacctggagagattaaggctgactggaatgatttccatcgggagcacggtattacccgtgcccgtgaagcatttcgtaacggtctggtgctgtgcggggaaggccgcacgcagctgccgcacgggttccgtcttacccaggaatatctctggtatgaaaaacaggtacagcgcaacggtgagacggagatccagaacgtcaaaatatgcaacccgctgcgcgtgacggcaatcacctgcgatgccgatggcggtaacttcgggcgacttctggagtgggaagatacgtggggtgagcgccgccgctgggcgatgccgatggaaatgctgagcggcagcggtgaggagctgcgccgggtactgctggtcaacgggctgtcctatatcagcaccaccggtgaggcccgcgcccgcctgatggaatatatctctctgtgtaaaccggaacgccgcgtgacctgcgtaagccgtaccgggtggcatggtcaggtttacgtcctgcaggatgaggtcagtggtgaaggcgcggaaagtgtcattctccagaccacttccgtgcaggggcgcgatttccgcgtgtcgggcacaacggaggaatggcgggagcacgtttcacgttactgcaccggcaactcccgcgtggcatttgccgtcagtctggcttttgctgcaccactattacggctggttggtatggacggcggcggttaccacctcaagggggaatcgacggacggtaagaccaccaccatgaaagcggcaacctccgtctgcggcgggcctgactactggcagacgtggcgggcaaccggcaacgcgctggagggatgcgccagccgccgcaacgatgccgccatgatgctcgatgagatccgggaggtagacggacgcgaggcaggcaatatcgcctacatgctggcaaatggtcagggcaagggccgtgccggtacggacggtgagctgcgcacccgtaagcagtggcggctgctgttcttttcaaccggcgagctgtcactgactgaacatgcggcaaaagccggagagcgtacctttgccgggatggaagtcaggatgatccagatccccagcgattccgggaagtttggcgtatttgaggagctgcacggcttcgacagcggaaaagcgctggcggagcatcttgaatgggccacgtccagttactacggttcgccgttccgggagtggctgaaagccctgaccgctgatcttaacgggctgacggcacaggcaaagtcactgatgaaggaatataccgccgccctgaccccgaaagatgcgggtaatcaggtaggccgggctgtgaaccgctttgcactggtggcgatggcgggcgagctggcaacccggctgggtatcaccggctggcctgagggtgaagcgctgcgggcaacccgcgtctgcctgaacgcatggctgaaagatcgtgggcacaccgccaatcaggaagatattgccgcactggagcaggtacgcagcttctttaccgcgaatcagtacagccgctttgctgactggcacgacgagcgcaaccgccccggcaatatggtgggctggcgcagggtggagaaaggcagtaccgcgcagggcacggaagccgtcaccacgttctacgtcatgccgtccggctggaaagaaatctgccggggatttgacccgcgcaaggtggcgcgtctgtgcgcggatcgtggatacctgctgccctccaccgatggcaagctgcagacaactattcgcccgccagagatgaatccccgcaggctctatgtcttcaacagcgaggtgccgggttaa

SEQ ID NO: 526937 - DNA, 384 bp, Stenotrophomonas maltophilia
atgaaccagccgcaggtttccattttcccggcagaaatgactaccgcgctgtaccggcgggctattgcatcggcatggcggcagaaaactctgaacgaaaccggcagcgatcagtatggtccgcacagcctgacggttgagcgtattgaaatggccattgcgctgcatatcgaatgcgcactgattaacgagtacggcgaagcacagggagccgctgctgcgctggcactgctgaccgacatgctggagccgtcactgctgaccgcgccgccggtactgaccgcgcgcggctctgaagtgatggcggagctgtaccgcacgcttccggcggcctttgatgacttctgcagcacaggtgtggcgctgtatcagggggaagtatga

SEQ ID NO: 526938 - DNA, 285 bp, Stenotrophomonas maltophilia
atgaatatttcaaacgggcacaacggtgctcagggccacgctttgcctaaaaaacacaatagcggtgcttttgcgtatgggttgtcagaggacggtttcggaaagctggaccgcgccagaaaggcctgcgacatgctgcagcttctcttttctgaatacccctcgcagggcggaactctggatgcagactgtgcgccaggtgtcgccgcgctgatggagtacctgcgggcggatttgacggatattgcacacagttgcgcactgattgaaggaggtgccaaatga

SEQ ID NO: 526939 - DNA, 360 bp, Stenotrophomonas maltophilia
atgcgtaattatccgcaacccggcgaacgctggcagcatgaacgtggctggaccatcacaatcatccgattaattgaagcctcgccctccgtggcgctggttaatcctgaattcagctgtgaagtgctgatacgtcatgacagcgacaaccagctttcttcctgccctctggcatggtttgaacagcggtatacacgcctgtttgatgcgccgctctttaaaccttcgccagctccggcgggtggtagtggttccggcccgctgacgctgcattcgtctgtggtatttacccgctggcgggagcgcagcattcggcattctgctgaacctgacgacagtcactattcaaagtttctctga

SEQ ID NO: 526940 - DNA, 588 bp, Stenotrophomonas maltophilia
atggagcctgagagaacgtttgttagcttctctattcagcctccttgctctggcttaactttcctgcgctggcggcgtttgatctcactttgcatggatgtaatgatgaattgtgacgtactttcgtcctcttctttcaccatttccatcgcttcaactacatcatgtggcactcgtgcctttaaggcttgtgatttagcattctttgtaccggtagccattactgaatctccgtatgtttggtgggccacagtatacacgggaaaagaacaaagaaaagcattgacgtgggccacacctaatatttatagtgggccacaccttaggtgttctggggtgaaaaaggcgaagcccggcagtgcagcaacactaaccgggcctctgaccaatccgctgtatgaggaaacgaagatggctaaacagaagtgtacctggttatttgctgcgatcaaccgcagtcaacgcaatgcccgtcctgtgatgttaaggatcaccgcagataacgagcgctcagcgcggcgcagactggccccggactacgtgctgagctttgccggtcgcattccctgcggaggtgaacatgcgtaa

SEQ ID NO: 526941 - DNA, 276 bp, Stenotrophomonas maltophilia
  misc_feature (125)..(134): n is a, c, g, or t
atgcagaaccaaagaatccgtatccgccttaaagcgtttgatcatcgtctgatcgatcaatcaaccgcggaaatcgtcgagactgctaagcgcactggtgcgcaagtccgtggtccgatcccgcnnnnnnnnnntaacaaagatgcgcgtgatcagtacgagatccgcactcacaagcgtctggttgacatcgttgagccaactgagaaaaccgttgatgctctgatgcgtctggatctggctgccggtgtagacgtgcagatcagcctgggttaa

SEQ ID NO: 526942 - DNA, 630 bp, Stenotrophomonas maltophilia
atgattggtttagtcggtaaaaaagtgggcatgactcgcatcttcactgaagatggcgtttcaatcccagtaaccgtaatcgaagttgaagcaaaccgcgttacccaggttaaagatctggctaacgatggctaccgcgctgttcaggtgaccactggtgctaaaaaagctaaccgtgtaaccaaaccagaagcgggtcacttcgctaaagctggcgtagaagctggccgtggtctgtgggaattccgtcttgctgaaggcgaagagttcaccgtaggtcaggacattagcgttgagctgtttgctgacgttaaaaaagttgacgtaaccggtacctctaaaggtaaaggttttgctggtaccgttaagcgctggaacttccgtacccaggacgctactcacggtaactccttgtctcaccgcgttccgggttctatcggtcagaaccagactccgggcaaagtgttcaaaggcaagaaaatggcaggtcagctgggcaacgaacgtgtaaccgttcagagcctggacgtagtacgtgttgacgctgagcgcaacctgctgctggttaaaggtgcggtcccgggtgcaaccggtagcgacctgatcgttaaaccagctgtgaaggcgtaa

SEQ ID NO: 526943 - DNA, 309 bp, Stenotrophomonas maltophilia
atgtaccgcggcgcgctgaaaagcatcctgtccgaactggtacgtcaggatcgtctgatcgttgtcgagaagttctctgttgaagcgcctaaaactaagctgctggcacagaaactgaaagacatggctctggaagatgtgctgatcatcaccggtgagctggacgagaacctgttcctggccgcgcgtaacctgcacaaggttgacgtacgcgacgcgactggtatcgacccggttagcctgatcgccttcgacaaagtcgtaatgactgctgatgctgttaagcaagttgaggagatgctggcatga

SEQ ID NO: 526944 - DNA, 303 bp, Stenotrophomonas maltophilia; identical to SEQ ID NO: 118414

SEQ ID NO: 526945 - DNA, 279 bp, Stenotrophomonas maltophilia; identical to SEQ ID NO: 118416

SEQ ID NO: 526946 - DNA, 333 bp, Stenotrophomonas maltophilia; identical to SEQ ID NO: 118417

SEQ ID NO: 526947 - DNA, 702 bp, Stenotrophomonas maltophilia
atgggtcagaaagtacatcctaatggtattcgcctgggtattgtaaaaccatggaactctacctggtttgcgaacaccaaagaattcgctgacaacctggacagcgattttaaagtacgtcagtacctgactaaggaactggctaaagcgtctgtatctcgtatcgttatcgagcgtccagctaagagcatccgtgtgactattcacactgctcgccctggcatcgttatcggtaagaaaggcgaagacgtagaaaaactgcgcaaggtcgtagcggatatcgctggcgttcctgcacagatcaatatcgctgaagttcgtaagcctgaactggacgctaaattggttgctgacagcatcacttctcagctggaacgtcgtgttatgttccgtcgtgctatgaagcgtgctgtacagaacgcaatgcgtctgggcgctaagggtatcaaagttgaagttagcggccgtctgggcggcgcggaaatcgcacgtaccgaatggtaccgcgaaggtcgcgtaccgctgcacactctgcgtgctgacatcgactacaacacctctgaagcgcacaccacttacggtgtaatcggcgttaaggtatggatcttcaaaggtgagatcctgggtggtatggctgctgttgaacaaccggaaaaaccggctgctcaacctaaaaagcagcagcgtaaaggccgtaaataa

SEQ ID NO: 526948 - DNA, 411 bp, Stenotrophomonas maltophilia; identical to SEQ ID NO: 118419

SEQ ID NO: 526949 - DNA, 192 bp, Stenotrophomonas maltophilia; identical to SEQ ID NO: 118420

SEQ ID NO: 526950 - DNA, 255 bp, Stenotrophomonas maltophilia; identical to SEQ ID NO: 118421

SEQ ID NO: 526951 - DNA, 372 bp, Stenotrophomonas maltophilia; identical to SEQ ID NO: 118422

SEQ ID NO: 526952 - DNA, 981 bp, Stenotrophomonas maltophilia
gtgattgccgtcctgattgtcaacctgacgcagcgtaagcgtcagcgtggtgagttacgcattacccgcctgagcgagcagtataaagagatgcgggaagagatgtctctggcgctgcttgacgatcatcaacagaaactgtggctaaaagcccataagaaaaaacataagcaggacgccaaagccgcgaaggcgaaagctaagctcgccacgccacaggctgtcgcaaaaccgcgcgtctatgtgctcgattttaaaggtagcatggatgcgcatgaagtatcctctctgcgtgaggaagtgacagcggtgctggccgtggcgacagcccaggatcaggtggtggtacgccttgaaagcccgggcggcgtagtgcatgggtatggactggcggcttcgcagttacaacgtctgcgggataaacagatcccgctcaccgtggcggtagataaggtcgcggcgagtggcggctatatgatggcgtgcgtggcggataaaatcgtcgcagcaccgttctccattatcggctcgattggggtggttgcgcagatccctaacttcaatcgtttcctgaaaaataaagagatcgacatcgaattgcatacggcgggtcagtacaaacgtacgctaacgctgctcggcgaaaataccgaagagggacggcagaagttccgggaagatctgaacgaaacccaccatctgttcaaggatttcgtgcaccgcatgcgcccaacgctggacattgagcaggtggctacgggcgaacactggtacggcacgcaggcgcaggagaaagggctggtggatgaagtgggtaccagcgacgacctcctgctcaacctgatggaaggccgtgagctggtgggggtgcgcttcacccgacgtaagcgcctgcttgaccgttttaccaatagtgcggcagaaagcgcggatcgcctgctgatacgctggttgcagcgcggacaaaagccgctgctgtaa

SEQ ID NO: 526953 - DNA, 252 bp, Stenotrophomonas maltophilia
atgcagaatacgacccaacccattgaccgagcttcactgcttatcgaagcaaacaaactcattcgcgaccatgaagacaccctggcggggattgaagcgactggcgtggaacaacgtaatggcgtgctggtgttcagcggtgaatacttccttgatgaacaagggttaccaaccccgaaaagcaccgccgtgtttaacatgtttaaatacctggcgcataccctctcagagaagtaccacctggtcgattaa

SEQ ID NO: 526954 - DNA, 2598 bp, Stenotrophomonas maltophilia
atgggtaaagctctcgtcatcgttgagtccccggcaaaagccaaaacgatcaataaatatctgggcaatgactacgtggttaagtccagcgttggtcacattcgcgatttgccgacaagtggctcagccagcaaaaagagcgcagactctacctccaccaaaggggctaaaaagcctaaaaaggatgaacgtagcgcgcttgtcaaccgcatgggtgttaacccatggcacaactgggatgcacaatacgaagtgctgccaggcaaagaaaaagtcgttaacgagctgaaacagcttgctgaaaaagcagaccacatttatctcgcaaccgaccttgaccgcgaaggggaggccatcgcatggcacctgcgggaagtgattgggggtgatgacaaacgctacagccgtgtagtgtttaacgaaattacaaagaatgcgattcgtcaggcgtttgaaaagccgggtgaactgaatatcgaccgtgttaacgctcagcaggcgcgtcgctttatggaccgcgttgtaggctacatggtttcgccgttgctgtggaaaaaggtcgctcgcggcctgtctgcgggacgtgtgcagtctgtggctgttcgtcttgttgtcgaacgtgaacgcgagatcaaagcgtttgtcccggaagagttctgggaagtggatgcgaatgtcaccacgccgggcggcgatgcgctgccgttgcaggtgagccaccacaacgacaaaccgttccgtcctgaaaatcgcgatcagaccatggccgccgtagcgctgctggaaaaagcgcgttatcaggtgctggatcgtgaagacaaaccgaccagcagcaagcctggcgcaccgtttatcacgtcaacgcttcagcaggcggcaagtacgcgtctgggttacggcgtgaagaaaaccatgatgatggcccagcgtttgtatgaagcgggttacatcacctacatgcgtactgactccaccaacctgagccaggacgctgtcagcatggtgcgtggctatatcgaggacaacttcggtaagaaatacctgccggacagtcctaatcagtacgccagcaaagagaattctcaggaagcgcacgaagcgatccgtccttctgacgtttccgttctggcggaatctcttaaagatatggaagcggacgcccagaagctgtatcagctgatctggcgccagttcgtggcctgccagatgacgccagcgaaatacgactccactacgctgaccgttggcgcgggtgatttccgcctgaaagcgcgcggccgcattctgcgtttcgacggctggacaaaagtgatgcctgcgctgcgtaaaggtgatgaagacagaacgctgccttccgtcaacaaaggcgacgagctgtcgctggttgatctggtaccggcccagcacttcaccaagccgcctgcgcgtttcagcgaagcgtcgctagtaaaagagctggaaaaacgcggcatcggtcgcccgtctacctatgcgtcaatcatttcgaccattcaggatcgtggatacgttcgcgttgagaaccgtcgtttctatgctgaaaaaatgggtgagattgttaccgaccgtctggaagctaacttccgtgagttgatgaactatgacttcaccgcgcagatggaggacagtctcgatgaggttgccagccataaggccgagtggaagaaagttctcgatagcttcttcagcgattttaccaaccagcttgagaaagctgagaaagatcctgaagaaggcggcatgctgcctaaccagatggtactgaccagcatcgactgcccaacctgtggccgtaaaatggggatccgtaccgcaaccacgggcgtgttcctcggctgttctggttatgcgctgtcgccgaaagagcgttgcaaaaccaccatcaacctcgtgccggagaacgaagttctcaacgtgctggaaggtgacgatgcggagaccaacgcactacgcgccaagcgccgctgtaagaaatgcggcacggcgatggacagctacctgatcgatccaaaacgtaaactgcacgtttgcggtaataacccaacctgcgacggttatgagatcgaagaaggtgagttccgcattaagggctatgacggtccgatcgttgagtgtgagaaatgtggttccgaaatgcacctgaaaatgggacgcttcggtaagtacatggcatgtaccaacgacgactgtaaaaacacgcgtaagatcctgcgtaacggtgaagttgcgccgccgaaggaagatccggttccgcttcctgagctgccgtgcgagaagtcagatgcgtatttcgtgctgcgtgacggcgctgccggggtattcctggcggccaacaccttcccgaaatcgcgcgaaacccgtgcgccgctggtagaagagctgtaccgcttccgcgaccgtctgccggagaaactgcgttacctggccgatgcgccacagcaggatccggaaggcaacaaaaccgtggtgcgctttagccgtaaaacgaagcagcagtacgtggcggcagagaaagagggtaaagcgaccggttggtcagccttctttgtcgacgggaaatgggttgaaggcaagaaataa

SEQ ID NO: 526955 - DNA, 636 bp, Stenotrophomonas maltophilia
  misc_feature (590)..(599): n is a, c, g, or t
atgaaattacagcagcttcgctatatcgttgaggtcgtcaatcataacctcaatgtctcttccaccgcagaaggtctttatacctcgcagcctggcatcagtaagcaggtgcgtatgctggaggatgaattaggtattcagatatttgcccgcagcggtaagcacctgactcaggtcacgccggcagggcaggaaatcattcgcatcgcacgagaagtgctttccaaagtcgacgccattaaatccgtcgccggggaacatacctggccggataaaggctccctttatattgccaccacgcacacgcaggcgcgttatgcgcttcccggggtgatcaaaggtttcatcgaacgctatccccgcgtttccctgcatatgcatcagggctcaccgacgcaaatcgcagaggccgtgtctaaaggcaatgccgattttgccatcgcgacggaagctcttcatctgtacgatgatctggtcatgctcccgtgctaccactggaaccgctctattgtcgtgacccccgatcatccgctggcggggaagggcgaagtgacaatcgaagagctggcgcaatacccgctggttacctnnnnnnnnnnacctatacgttcggatttacgggccgttctgagctag

SEQ ID NO: 526956 - DNA, 276 bp, Stenotrophomonas maltophilia
gtgcgtctgggtctgggcgtaggcgttattgccagcatggcggtggatcctgtatcagacccggatctggtgcgtctggacgcgcatgatatcttcagccacagcaccaccaagataggttttcgtcgcagcacgttccttcgcagctatatgtatgattttattcagcgcttcgcaccgcatttaacgcgtgacgtggtcgacacggccgtggcgttacgctccaatgaagacatcgaagagatgtttaaagacatcaaacttcctgccaaataa

SEQ ID NO: 526957 - DNA, 558 bp, Stenotrophomonas maltophilia
atgtttatcaaaaaggacggtcgccgccggttgttcatccttgatgaggcatgggagtatattcgcccggataatgcttcaggctccagtaatcagtcaaatcagtttttctcatctttccttgaagctgcctggcgccgattcaggaaaacgaactgtgctggtatttgtattacccagtcctttgaagattacttcacctcctcggtaggtcgagccctgacggccaactcgccgtggaagatcatcatgaagcaggaaaaggagagcatagaagccatgaaggctaataactacttctccacgactgatgctgaatatgagcgtatgaaaaacatacgaacgataaagcgtgcattttctgagatgctcgtccgattcgagaatttccaggagatatgtcgcctctatgtagacaggaaaatggagctttgttttacgactgacagtaccgaccgtggaaagctatgggaaatacaaagccgtcttgattgctcttacggcgaagcaattgagatactgtatgaacaggaagttgctagcaatgcagctgcataa

SEQ ID NO: 526958 - DNA, 549 bp, Stenotrophomonas maltophilia; identical to SEQ ID NO: 144585

SEQ ID NO: 526959 - DNA, 1254 bp, Stenotrophomonas maltophilia; identical to SEQ ID NO: 199515

SEQ ID NO: 526960 - DNA, 1005 bp, Stenotrophomonas maltophilia; identical to SEQ ID NO: 144586

SEQ ID NO: 526961 - DNA, 846 bp, Stenotrophomonas maltophilia
atgtccccatttctgagtgcttattttgcccgcacgggctggcagcagcccgtacaggttaatatcgataccctgcgggggctccatttacaccataactgcgcgatcccttttgaaaatattgacgtcgttttgccgcgggaaattcatctggacgacgggtgtctggtggataaactggtcaccgcgcgtcgggggggatattgcttcgagcaaaatggcctgtttgagcgggtgttgcgcgaagttgggtttacggtacgcagcgtgctggggcgggttgtactggcgaatccgtcgcagatgccgccgcgcacgcaccggttgctcctggttgagctgaacggcgagcgctggatcgccgatgtgggatttggcggacaaacgctgacggcgccgattcgtttgatcgccaacgaggagcagaaaaccccgcacgggagttatcgtttgctgagcgagggtaatgactgggtactgcaattccgccatcacgagcactggcagtcgatgtaccaatttgacctggggacgcagtacttcaacgattacgtgatgggtaacttctggtcggcgcactggcctcagtcccattttcgtcatcacctgctgatgtgtcgccacctgccggacgggggcaagctgacgctgaccaactttaattttacccactggcagaacggtcatgtggaggagcagatccatttgccggatgcggaggcgctatataagctgatgcaggagcggtttggcctgggcgttgatgacccgaagcacggctttacgctggcagagctgacggccgtgatggcggggtttgatacgcatccgcaggcagggaaatag

SEQ ID NO: 526962 - DNA, 573 bp, Stenotrophomonas maltophilia
atgagccactttcgtcctgttgaattacgtcatgccagccgtcttctgaatcacggtccaaccgtgctcatcaccagtcgggatgagaccatcgatcgtcgcaacgtcatggccgccgcatggtctatgccggtggaatttgaacccccgcgtatcgcgattgtggtagacaaaagcgcgtggtcacgggagttgatcgaacgcagcgggaaattcggcattgtgatccccggcgtggcggcagccaactggacctgggcggtcggcagcgtcagcgggcgcgacgaggataaatttaactgctacgggatcccggttattcatggccctgagcttggtctgccggttatagaagagaaatgtctggcgtggatggagtgtcggttattacctgtcacttctgcggccgagaaatatgacaccctgtttggcgaagtggtttccgccgcggcagatgaacgcgcatttgtcgccggacgctggcagtttgacggggataagctgaatacgctgcatcatctgggggccgggacgtttgtgacgagtgggaagatggtgaaggcgctggattaa

SEQ ID NO: 526963 - DNA, 2100 bp, Stenotrophomonas maltophilia
atgccccgacccattccactcgaacgttatcgcaacatcggtatctccgcgcatatcgatgcgggcaaaacaaccaccactgagcgcatcctgttttacaccgggatgagccacaagctgggtgaagtacacgatggcgcggcaaccaccgactggatggcgcaggagcaggagcgcgggatcaccattacgtcggcggcggtgagctgtttttggcccggcatggacagaggctttgaaccgcaccgcatcaatattatcgacacccccgggcatgtggatttcaccattgaggtggaacgttccatgcgtgtgctcgacggcgcggtgatggtttatgactccgtcggcggcgtgcagccgcagtcggaaaccgtctggcgtcaggcgaataaatatcacgtcccgcgtctggcattcgtcaacaaaatggaccgcccgggtgcggatttcttccgcgtggtgcggatgatgcaggagcggctgaaagctaatccggtcccgattgtgatccccgtgggcgcagaggaacacttcaccggcgtggttgatctcatcaagatgcgcaccattctttgggatgatgcgacccagggcatggcgttcacctacgcgccggtgcccgacgatctgctgagcaccgcgcagacgtggcgagaaaaaatggtctcgtctgcggcagaagccagcgatgagcttatggataagtaccttgagacgggtgaactggatgaagtggaaatcatcaaagggttacggatccggacgatctccggtgaaatacagcccatgctgtgcggcagcgctttcaagaacaagggtgtgcagcgcatgctcgacgcggtgattgaattgatgccgtctccactggacgtgcccgctattgatggggtagacgaagatggacagcacgccgagcgccacccaagcgatgatgaaccattctctgcgctggccttcaagctgatgagcgatccgtacgtcggacagttgacctttattcgcgtctattccggcatactgcgcaaaggcgacgcggtttataacccggtgaagggcaaaaaagagcgaatcgggcgcatcgtgctgatgcatgccaacgaccgccatgaggtggacgagttgcgcacaggggatatcgcagcctgtgtcgggctgaaagacgtcaccaccggtgacacgctgaccgacccgaatgcggtgatcacccttgaacggatggagttcccggacccggttatttcgctggcgattgagccgaaaaccaaggccgatcaggagaaaatggggatcgccctacagcgcctggcggcggaggatccgtctttccgtctgcacacggacgaagagtccggtcagaccattatctccgggatgggcgaactgcatctcgaaatcatcgttgaccgcatgaagcgtgagtttggcgttgaggcaaacattggtcgtccgcaggtcacctaccgtgaaaccctgcgtaaagcggtgaaggatattgaaggtaaatttgtccgacagtccggcgggaaagggcagtacggtcatgtggtcctgagtctggagccgttagcagccggaagtggttttgtgtttgaagatgccaccaaaggcggggtagtgccgcgggagtacatcccgtcggtggaaaaaggcttgcgagaagccatgaatacgggtgtgctggcgggctatccggttgtcgatgtgaaagcgaccctgacgtttggttcctaccatgacgttgactcctcggagatggccttccgcatggcggcgatcctcggcttcaaagagggcgcgcggcgggcggatccggttattcttgagccggtgatgcacgttgaggtggaaacgccggaagagtatgccgggaacattatgggcgatctctcctcccgccgcggcatggtgcaggggatggcagagcagtacggcagccagattattcgcgctgacgtcccgctggctgaaatgtttggctacgccaccacgctgcgctcgatgtcccaggggcgcgcgacgtatacgatggagttccatcattttgcggaagctccgcggaatgtggcggatgagattattgcgaagcgcgttaagtaa

SEQ ID NO: 526964 - DNA, 312 bp, Stenotrophomonas maltophilia
atgaaaacgatgatcccaaaccacccggaacctgaacaaatactgctggaaaatgtgctgttcgccctcggcaatccgctgcggctggcgattattcgacggctggccgacggcagtgagctgagctgcaacgcgctgcgcccggacgaggtggtgaaatcaaccatgactcaccactggcgtgtactgcgcgacagcggcgtgatctggcagcgcccgcaggggcgcgagaatatgatttcactgagaagagaagatctggacgcccgctttccggggctgatggcgatcctgttacagtcgaaatcataa

SEQ ID NO: 526965 - DNA, 825 bp, Stenotrophomonas maltophilia
atgagcacctcggcgctcagccatgccctgtcacggctgcgtgtttcgctcaacgacccgctgttctaccgggaaggacatcgaatgtgtcccagcgtctatgccacccagcttgcgccagttattgcatcggccctgaaatatctcgacgaggagctgtcgccgcagccggaatttgatcctgctattagtacagcgtgtttgcagatcgcgataacggactttaccgcgttctgcatattccctgcgctcatgaatacgcttcaacatgcggcgcctggcttgcgtctggaattacgatatttgccgcacagcccggcgttgacggaattactggcaggcgaggtggatttggccctgggattcagcaccattgaggatcgccggtacccggagctggaagagatcagctggttcgaagatgaatatgtggtgattagcaatgcgagccggagcgcgctcacgctggaggattatctcgccgcccggcatcttgtggttacgccgtggaatgagaagcagggggtgctggatttgcagctggaacgcatgggttatacccgacacattgcgatcaaaaccccgtctatgctcagcgccccgtttgttattgcagaaagcgatctgctgatggcgttacctcgattcgccgctgaaaagctgctgccagctacccgtattaaaatttttgatttaccgttccacatcagtccgtttgaagtaaaaatttattcgcacaagcgcagcgggaaacgaggcgtcacgaactggctcaaagctacgctgcgcgcgctggccgaaaggcaacagtcagtgcgcttatga

SEQ ID NO: 526966 - DNA, 351 bp, Stenotrophomonas maltophilia
atgctactaacatccttacaactcttcaaaaatctctccgatgaaacccgcttgggcatcgtgctgctgctcagggagatgggagagctgtgcgtgtgcgatctttgcgcggcgctggagcagtcgcagcccaagatctcccgtcatcttgcaatgctcagggaaagtggtctattgctggaccgtaaacagggcaagtgggttcactaccgcttatccccgcatattccttcctgggccgctcaggtgattgagcaggcctggttaagccaacaggacgacgtacaggccatcgcccgtaagctggcatcggcaaactgctcaggtagcggtaaggctgtttgcatctaa

SEQ ID NO: 526967 - DNA, 363 bp, Stenotrophomonas maltophilia
atgaagacgttaacggtgtttgacccggcaatgtgctgcagtaccggcgtatgtggctcagatgtcgatcaggttctggttgatttttctgctgatgtgcagtggctgaaaggacgtggcgtacaggttgaacgttacaacctggcgcagcagcccatgagctttgttgagaatgagaaagcgaaagcattcctcgaagcatctggagcagaagggcttccgctactgctgttggacggtgaaactgtgatggcagggcgatacccaaaacgtgcagagctggctcgctggttcggtattcctctggagaaggtagggttagctcccaccagttgctgtggtggtaatacttcctgttgctga

SEQ ID NO: 526968 - DNA, 1758 bp, Stenotrophomonas maltophilia
  misc_feature (1448)..(1457): n is a, c, g, or t
atgaaattcttacagaatatcccgccttacctgttttttaccggtaagggaggtgtaggaaaaacttctatttcctgcgcgacggcaatccgccttgctgaacagggtaagcgggttttgctggtcagtaccgatccagcctccaatgtaggccaggtattcgatcaggctatcggtaacaccattcgccctgtggcagcagttcatggactttccgctctggaaatcgacccgcaggaagccgccaaacaataccgctccagaatcgttgatcctatcaaaggtcttttgcctgatgacgttgttaacagtatcagcgagcagctttcaggagcctgtaccactgagattgcggcgtttgatgagttcaccggcttattgacagacgcttccctgctgacccgcttcgatcatatcatttttgatacagcgccgacgggccacacgattcgccttctccagcttcccggagcctggagtagcttcattgaaagtaatccagatggtgcttcctgtcttggcccaatggccgggctggaaaagcagcgtgagcagtatgctcatgcggtagaggcgttatccgatcctgaacgtacccgcctggttctggttgcgcgactgcaaaaatctacgctgcaggaagtcgcccgcacccatgaagaactcgccgcaattggcctgaaaaaccaatacctggtgattaatggtgtgctgcctaaagccgaagctgaacatgacgccctggccgctgcgatatggcaacgtgagcaggaggcactggcaaatcttcctgccggtttatctgagctaccgacagataccctattactacagccagtcaatatggttggtgtttcagccttgaagggactgctggataccggttctgaggcattaccgctcccggtaacgaacatccagtacacgcctgaaaacttatcgctctctggcctggtcgatgatattgctcgcagtgagcacggcctgattatgttgatgggcaaaggtggcgtaggtaaaaccacgatggcagcggctatcgccgtcaggctggcagacatgggatttgacgtgcatctcacgacctctgatcctgctgcgcacctgagtaaaacgctgaacggcagcctcaaaaaccttcaggtcagccgcatcaaccctcacgatgaaaccgaacgctatcgccagcatgttcttgagacgaagggaagagatctggacgaagcagggaaacggctactggaggaggatttgcgctctccctgtactgaagaaattgccgtgtttcaggccttttccagggtgattcgtgaagcgggtaaacggtttgttgtcatggataccgcccctaccggacacacgctgttgctgctggatgcgaccggggcttaccaccgagagattgccaaaaaaatggggagtaaaggtcattttactaccccaatgannnnnnnnnngcttcaggatccggatagaaccaaagttctgcttgttacgcttcctgaaaccacaccggttctggaagcggcaaacctgcgggctgaccttgaaagagcggggattcatccgtggggctggattatcaataacagcctttccattgcggatacgcgttctccgttgctttgccagcgcgcccggcaggaacggcctcagattgaggctgttaagaatcagcacgctgagcgtatagcgcttgttccggtgctggcgtcagagcccgccggtattgaaaagctcagagagttgatgagttaa

SEQ ID NO: 526969 - DNA, 1290 bp, Stenotrophomonas maltophilia
atgttactggcaggcgctatttttgtcctgaccattgttttggttatctggcaaccgaagggattagggatcggctggagtgcaatgctgggcgcgggactggctctgatatcaggcgttgtgcatgtgggcgatattccggtggtgtggaatatcgtctggaacgcgacggcgacctttattgccgtaattattatcagcctgctgcttgatgagtccggttttttcgaatgggcagcgctgcacgtttcccgctggggtaacggtcgtggacgtttgctctttacgtatatcgttctgctcggtgcggcggtggcggcactgtttgccaacgatggtgcggcacttattctgacgccgatagtcatcgccatgctgcttgcattagggttcagcaaaggcaccacgctggcattcgtcatggctgccggttttattgccgatacggccagcctgccgcttatcgtgtcgaacctggtgaatatcgtctcggcggacttctttggactgggcttcactgagtatgcgtcggtaatggtgccggtggatattgccgctattatcgccacgctggtgatgctgcatctgttcttccgcaaagatattccaccgacttacgacctggctctcctgaaagcaccggcaaaggcgattaaagatctggcaaccttcagaaccggctggatagttttaattcttctgctggttgggttctttgtcctcgagccgctcggtattcccgttagtgcaattgcggctgttggagctgtgatcctgtttgcagtagctaaacgaggccatgccattaacaccggcaaagtgctgcgcggtgcgccatggcagatcgtcatcttctcattggggatgtacctggtggtctacggtctgcgcaacgccgggctaaccgaatacctttccggtgtgctgaacgtactggcggataaaggactctgggctgcgacgctgggtactggcttcctgacggctttcctgtcttccatcatgaacaacatgcctaccgtactggttggcgctctttctatcgatggaagcaccgcaacaggcgttatcaaagaagcgatgatctacgccaacgtgattggctgcgatctgggcccgaaaattacacctattggtagcctggcaacgctgctctggctgcatgtcctttcacagaagaatatgaccatcacctggggatactatttccgcaccgggatcgtcatgactctgcctgtgctgtttgtaacgctagccgcgctggcgctacgtctctctttcactttgtaa

SEQ ID NO: 526970 - DNA, 426 bp, Stenotrophomonas maltophilia
atgagcaacatcaccatttatcacaacccagcctgcggcacgtcgcgtaatacgctggagatgatccgcaacagcggtaatgaaccgacagtcattcattaccttgaaaatccaccgtcacgcgatgagttggtcaaacttatcgcagatatggggattacagtacgggcgctgctgcgtaaaaatgtcgagccttatgaagaactggggcttgccgaagacaagtttactgacgatcagttaatcgattttatgcttcagcatccgatcctgattaaccgcccgattgtggtgacaccgttgggaacgcgcctttgccgcccttccgaagtggtactggatattcttccggatgcgcaaaaaggcgcatttgctaaggaagacggcgagaaagtcgttgatgaaacaggtaagcgattgaaataa

SEQ ID NO: 526971 - DNA, 474 bp, Stenotrophomonas maltophilia
  misc_feature (451)..(460): n is a, c, g, or t
atgcacattatcaaagctgaagaacagcacattaccgcgatacgcaatatctatgctcaccatgttctgcatggtacaggtagcttcgaaaccgaacctccggatacgcaggaaatgcttaaccgactgaggaacattcagtctcgaggattcccatggtatgtcgccctgcagggcgataaggtcatcggctactgttatatttcccgttaccgcgaacgccatgcttatcggttcacggttgaaaattcgatatatattgatccggcttatcagcgacagggcgtcggaaaagcactgctcgatcatgcattaaaatgggccgaatctcagggatatcgtcagatgattgctgttgtgggtgacagcgctaacgtcgcttctgttgcgctgcatatccgcgcaggatttactgaaataggcacgttaaaggacattggtttcaaacatnnnnnnnnnntttgctgcaaatga

SEQ ID NO: 526972 - DNA, 438 bp, Stenotrophomonas maltophilia
atgagtgatgtaacagcattcaacaactgcatgagcgtgttctggcggcaacatgaagccgaactctctcgctttctgacatcaaagactggcgatagcgaaaaagcagcagaccttctgcaagagctattcctgcgtgcccgcgctcattcagacagtttctgcgagatggataatccgcgagcctggctgtaccgggcgtcgaggaatctgctgattgatgagtaccgcaccaccagggagtttgttgatctggaagaagatgccccattaacagacgcatcccctgatgcaatctcaacgctggatatctgcctgcctgaaacattacaggctttaaatgacgttacagagcaacatgcaaagcgtattgcattaacaccactgcagaacgaagaaccagtgggtgcagctctgctggcaaaaatggcagactaa

SEQ ID NO: 526973 - DNA, 540 bp, Stenotrophomonas maltophilia
atgcccaccttaaccaccgcgcgtctcacctgcttgccgctgcaagagcaagactggcccttttttctgtcgctacagcaaaatcctgacgtgatgcgttttgtcgcccctgcgcgtagcgaggctgacattcgggaggcctttgagtctcgtctgttgccgtgggcaccgggcagctcgcactggctctgccttgtggtgcgtgagacggccagccagacgccgatgggcgtaaccggctatgtgcaccgggaagcagcttgtgccgaagtcggttttctctttgcgccctctgcgcaggggaaaggttacggctttgaatctctgcgggcggtgtgtgatttcgcgctgacccagggcaatatccgtcggctcaccgcgaccgtgacggcgggaaatatcgcctcaaggcgactgctggaaaaaacaggttttcagctggaaggtgagttgcgcgagagttatttcctttcagggcaatggcataacgactggctattcggtttactgaaaaaggaatatccgttcagtaaaacctga

SEQ ID NO: 526974 - DNA, 339 bp, Stenotrophomonas maltophilia
atgacgggttatgcaatgcagatatcttctgctgcaatcgcattaattaaaaaacagcagggtctttccctggagaaataccgtgacgaaaagggaatatgggttataggttacggtcacgtgattcgccagtgggaaaaatttaacggcctcatcacgccgactgaggcggagaatttgcttttcaatgatattcatttatgtgagtcgctgctgcgggaaatgaacaaacgcccattaacccaacagcagcatgatgcactggtattaacgctcttcagttttggggaagattcccctctgccagagaagatccttcaggccgtcgcccgggtatag

SEQ ID NO: 526975 - DNA, 603 bp, Stenotrophomonas maltophilia
atgcgagtaatcatgtttgacaggcagtcattatttattcatggagcgaagtgcagtttgcagaaattaattccggaaatagatttgacaggaactcgtcagactgatgaattatgggcacacttatccgcgtcgccttccgctatcgtcatgatagatgggtatttaattcatgataacggtgtggctttaccggaagagattatgaatcgttttccaacagcgcgcgtggtgctggtgttaacgaaaaaagagcctcgctgggttgagcaaatgctacagcgcaacgtggtggcaataatccctcgtaatgcgaatcccgaacgcttttccgccgtgctggattctgtatcgcgagggatggtctgttttcccggcgagtggatgaaccagcactcctctcatgatgagctgtcattgttaagtgagcgccagcgtgaggtattgaaattactggcggccggagagtcaaataaagagataggtcgtaatctcaatatcagtgcggcaacggtaaaagcccatcttgagacgcttttccgtcgtcttgatgtcaaaaaccggacgcaggccgcgatgtactatacccgggcgacggcctga

SEQ ID NO: 526976 - DNA, 759 bp, Stenotrophomonas maltophilia
atgcgtgaacgtattgcattagtgacgggcggtagccgcggcctgggtaaaaatgcggttttgaagcttgctgcggaagggacagatatcatcctgacctggaacagcagtcagcaggaggcgcaggaagttgtacgcgaaattgagggaaaaggtagaaaagcggcagcattgcagcttaacgtcggcgatacggcaagttttgcgcgcttcgctcaacaggtgaaggaaacccttacacacgtctggcaacgtgacacctttgactatttagtgaacaacgcaggtacagggttatacgcaccctataccgagacgacagaagcgcaatttgatgatgcggtgaatattcacttcaaaggtccgtttttcctcacacaacagctgctgccgctcataaaagacggaggacggatcctgaatgtctcaagcggactggcccgttttactcagccaggttcagggacttacgcggcaatgaaaggggcgatggaagtgctgacccgctatcaggcaaaagagcttggcgtgcgcggaatttccgtcaatatcatcgcgcctggcgcgattgaaaccgactttggaggcggacgcgtaagggataatgcggagcttaaccagctgctggcctcgcagacggcgctgggacgggtgggcctgcccgatgatatcggtgacgccattgcggcgttgctcagtgacaaactgggctggatgaatgcgcaacgtattgaagtttcaggcggtatgttcctgtaa

SEQ ID NO: 526977 - DNA, 900 bp, Stenotrophomonas maltophilia
atggataaaatatacgcaatgcagcttttccttcgcgtcgcggaactggagagttttacccgcgcggcggagacgttaagcctgccgaaggggagtgtctcgcggcagatccaggcgctggagaacgcgcttggcactcaactgctgcaccgcactacccgccgcgtcagcctgacgcaggacggcatggtttattacgaatgcgcaaaagatctgctgatgaatctggacgaactggacggcatgtttctgcacgacccttccaccatcagcggtcggctacgtgtggatatgcccgttgccattgcacgaaatgtcgtcattccgaaactgcctgcatttttacaacagtttcccggcattgagcttgagctgagcagcagcgatcgtctggtcgatgtcatccgcgaaggatttgactgcgtggttcgcgtgggaaacttgaaggactccgggcttatcgcccgcccgcttgggaagctttcagtgattaactgcgccagcccggattatctcacgcgattcggctaccctgagacgctggatgatttgggctcacacgccctcattcattactccgccacgctgggcacccgtcctctgggttttgagtatttcaacggcagcgcgacccagtggataaaaacgggaggcgttttgacggttaacagcacggaaacctaccaggccgcctgtatcgccgggcttggcattattcaggtcccgcgcgtcggggtgcgtgatgccctgcgcacgaaaaaactcgttgagatcctgccgcaatatcgggctgaaccaatgcccgtctccctcatttatccccaccgccgtaacctctcccgtcgggtgcatgtgtttatggagtggcttaccgaactcacaaaaagttacgtggactag

SEQ ID NO: 526978 - DNA, 1026 bp, Stenotrophomonas maltophilia
gtgacgccggaaaataacccgcaacgaccgactcaacatttagattatgaacccatcaaaaagatggataacgagcctgaagcgccgaaggagcctggaacgaccagcaaagcgctgggcaccgtgaccggcatagccgaaaaaattcagcagatacccgcgattgctcacctgatccgcgccgctgagcgctttaacgaccgcatgggaaatcagtttggcgcggcgatcacctacttctctttcctgtcgatgatccccatcctgatggtgtcgtttgctgccgccggttttgttctggcgtctcacccgacgctgttgcaggacatcttcaataagatcctgaccaacgtcagcgaccagacgctcgccacgacgctcaaaagcaccatcaataccgccgtgcagcagcgtaccaccgtgggtatcgtcgggttgctgattgcgctctattccggggttaactggatgggcaacctgcgtgaggccattcgcgcccagtcgcgtgacgtctgggagcgtacgccgcaggatcaggagaagatatgggtgaagtatttgcgcgactttatctcgctgattggtctgctggtggcgctggtcatcacgctctctatcacctcggtcgccggttctgcgcagcagatgattatctccgcgctgtatctggactacattgaatggctgaaaccggcctggcgcggtatagggcttgctatctccatctttgctaactacctgctgttcttctggatcttctggcgtttcccccgccatcggccgcgcaagaaggcgctgatccgtgggacgttgattgccgctattggctttgaggtgatcaaaattgtgatgacctatacgctgccatcgctggtgaagtccccctccggcgcggcctttggttcggtgctggggctgatggccttcttctatttcttcgcacgcctgacgctgttctgtgccgcgtggatcgccaccgcagagtataaagacgacccgcgcatgccgggaaaaacccaccactga

SEQ ID NO: 526979 - DNA, 267 bp, Stenotrophomonas maltophilia
atgaaaaagtcacgattcaccgaagagcagattgtttttgccctgaagcaggctgaactgggtacgtcagtgccggacgtctgtcgcaagctgggcatttcggatgccactttctatacgtggcgtaaaaaatacggtggtatttctccttcggagctgaagcatatgcggcaactggaagaggaaaatctgcggctgaagaggctggttgccgatctgagcctcgacaaggcgatgctgcaggacgtgctggcaaaaaagagctga

SEQ ID NO: 526980 - DNA, 729 bp, Stenotrophomonas maltophilia
gtggccgccgacgacagcgcactgcggctacgcatccgtgagataaccgaaacccgggttcattacgggtaccgccgggtacacgtgatgctcaggcgggaaggctggcgcgataatcacaaacggatctaccggctttacagcgaacaggggctgtcactgcgtctcaaacggccacgccgcaataaatcggcccagcgccgacaaccgcagcctcagggtctgtatccgaatcacgtctggggcatggattttgtctctgatgcgttgtttgacgggcgacgactgcgcctgctgacggttatcgacctgtacacccgcgaatgcctggggatctgcgtggggcagaatttgcgttcaacagaagtggcagaaatgctgaacagcatagcgctcagacgtcctttacctcagttgctgaaaaccgataatggttctgaatttgcaggtaaaatgctggacagatgggtgtacgaaagaggcatcagaatcgacttctcacgcccgggaacaccgacggacaatgcgacggtggagtccttcaacggcaggttacggcaggaatgcctgaacgaaaactggttcatgtccctggaggatgcacggtgcaaaatcgaggcctggcgcatacactataaccagagacgtccccattctgcgctgggctggatgacgccatctgaatttgctgaaaagtctgccggttgcctgaatatgcagccaacatga

SEQ ID NO: 526981 - DNA, 1509 bp, Stenotrophomonas maltophilia
atgacgacaaacagctatcttgagtattttctcacgctgctcggctgggtgatcaataacggcctgtggaatgtcctgctgagtaccgggctttttgtcctgccgctggcgtttaaggtggtgggggtttggctcagggtccgcgaagagggggaggatgaaggcaacaaggggatgctgtcgttgccccgtatcgagaacgcgctgtatgccggtttcctggtgatgattgcctgctgcgtaccgctgattaatgtcagcctcagtacgatgcagtacgacacaacccgggcaaagagctgtggtgtgtggacgccaaaagcgccggatgaaagcggctatgccggcgtggtcaccagtctcaacggccagacggctgcagcaccggtatggtgggtgctgattcataaactctcaaaaggggtaacccaggcagccgtggcgaccattccctgccgccctgacatgcgccagatccgctttgaagtgcagcatacgcgtatcgacaacaaagcgctggcgcaggaactgcaggacttcaccaacgactgctattcggttgcgttgtatctgtggaagcaacaggatcagggccagacaaaggacaaaaccacgctgcgtgatatcgaatggattggcagcagtacattcctgagccggtattatccttcgttgcagtccaaactgccccgggctgcgttcccgtggaccgacagccgggacagcggccggcccaatacaggaagaggaggctatcccacctgcagcgagtggtggagcagtacggacaccggactgaaagcacgggtgaaggaccaggccgaccccgatatgtggctgcgtatctcggccgcaatgaaaatgtcaggctttaacgacagtgactatcaggaagccgtcatccgtcgtctggtcagcccggaaagcctgacggtctcacagaatggtcacgtgtatgccggctatggcggcaacgccgattttaccctggataatgccgcggcgcgcgtggcctccattggcggtacggccctcggcagtctggccgcgttcccggcgttcgatgcgatgcggcaggcgctgccaatggtgcaggccatcctgctgatggcaatatatgtcatgctgccgctgatcctggcatttgcggcctacgaattcaaaaccgttattacgctgacctttgtgatatttgctcttaacttcctgacattctggtgggaactggcgcgctggctcgacagctggttgttaaccgcgttgtacagttcagacactcacagccgctttaatatggcagggctgcagaacagtaccgatgaccttattatgaatctggttatgggagcgatgtttattgtactgcctgccgtttggttaggagcattatcttgggcgggagtaagaataggcgatgtaatctctggggcacttaaaactggggttgctaaacctcaagaaaccgggggagcagctgtagattcagttaaaaaaagtgttcgtttataa

SEQ ID NO: 526982 - DNA, 339 bp, Stenotrophomonas maltophilia
atgcgtaaaaaaacgactgtcaggaaagtcctgacccgtgccggcattttcctcgcctgcatggcgctgttcatggtggtctcactgatggtggctgacaccgccatgaaacatccgactgaagctgctgcattccggagctggatgcagtcgacgcgctacggctggctgatatggcgactggcgctgtatgcgctggttgcgtggggcctcttgaaaatccggcatgcgccgggtttgcaagagtcgtacaggcgaccactgctgcgcatcagtgtggtcagtgtactttttatcgcgttatgtgagtacgcgatgtttaccggtccgggagcctga

SEQ ID NO: 526983 - DNA, 390 bp, Stenotrophomonas maltophilia
gtgccggtgacggccggcgtgattaaagccctgcagcgtgatccggataacgcggccctgaccgcccgccttgcaggcgagctggccatgtctgacacggtggaaacggcgctgctgatgcgtcgcatgatggttaccggtatgtcggagccgaatgctgccgctcagccaaaggccattgataccgccggccagcgtattgaggcgctggatcgggaaatcgcggcgctgaaaaacgagatggagatgaagcgtgaactgtcacgtaattcggtgctgaccattatcgacagggagaaccagcgcgtcgaaaccaacccgcagacccagtctgatgacaataccgacagtcgcttcaaccagatggcagcgccgcagtcggctgaatga

SEQ ID NO: 526984 - DNA, 546 bp, Stenotrophomonas maltophilia
gtgttccagaaccattcgctgctgccgtggttaacctgcttcgacaacgtggcgctggcggtggatcaggtcttccgtcgcaccatgagtaaggccgagcgcaaagagtggattgagcacaatctcgaccgggtgcagatgggccacgcgctgaataagcgccccggggagatctccggcggtatgaagcagcgcgtcggtattgcccgggcgctggcaatgaagccgaaagtgctgctgatggatgagccgtttggcgcgctcgatgcgctgacgcgtgcccatcttcaggactcggtgatgcagatccagcaggcgctgaacaccaccatcgtgctcatcactcacgacgtggacgaggcggtactgctctctgaccgcgtaatgatgatgaccaacggcccggcggccaccgtgggtgagatcctgcgcgtcgatctgccgcgcccgcgcaaccgggtgcagctggcggacgatagccgctatcaccacatgcgccagcagatcctccatttcctctacgaaaaacagccgaaagcggcgtaa

SEQ ID NO: 526985 - DNA, 3987 bp, Stenotrophomonas maltophilia
atgcgactggtcattatcggtaatggtatggcggcaacccggctgattgcatcgctcaccgggcgtgtgcccggtctttttgctatcaccgtcatcggtgacgagccggagcaggcgtacaaccgcatccagctttcgccggtgctgagtggtgaaaagcaggcggagcacatctgtctgcacgatgaagactggtacacggcacgaggcgtgacggtgctgcgaggagaaacggcgctcgcagtagacgtcaacgcgcgtgaagtgcatacctctgctcgcacgctgggctgggatgcgctggtgtttgccaccgggtctacccctgtagtgccgccgatccccggcggcgatgcgccgcatgtgttcacctttcgcaccctggcagagacccgcgccatccagaacctctccggtccggcggtagtgctgggcggtggcgtacttggcgtggaagcagcggcagcgctggcgcgcaacggtgacaacgtcacgcttatccatcgtggtccctggctgatggaacagcagctggatcagcaggcgggactgctgcttgaagaggcgctggctgcgcggggtgttagctgtgaattcgcctctggcatcgcggcgattaacggcaagagcgtgacgctactcaacgggcacagcgtcaccgccgcgcgcgtggtgctggccacgggtgtacaacccaacgttgcgctggcaaaagccagcggcattcactgcgcgcgcggcatcgtggtggatcaccagatgcaaacctccgtgccggatatctacgccatcggcgagtgctgtgaaattgacggccagacatttggcctggtcgccccttgtctggcgcaggcggatattctcgccgcgcggctggccggggagatcaccgcgccgtttacccggaccgacaacggcgtgcgtcttaaggtgaccggcgtggagctgttcagcctcggacgcgcgacggcgcaggcggacgatatggtatggagttcatgggatccgctgacccgtcactatcgacgtttactgatccatcaggggacgctggctggcgtgctgctgctgggtgactgccgcagcgcggcaacctttaccgatttactggcaacggctgcgcccgcccacgcggactggctgttcgatcgtttcacaacgcaaccgcaggttgcaggacagaacgctatgacaaaacctactctggtggtggttgggcacggtatggtcggccatcatttcctcgaagactgcgttaaccgcaatttgcatcagcagtatcagattattgtttttggcgaagagcgctatgcggcctatgaccgcgtgcatctgtcggaatattttggcggacgcagcgcggactcgctctcgctggtggcgggggagttctttgccgataacggtatagagctgcgcctctcgcagcagattgtcgctatcgatcgtgatgcacacgttgtgcgtaccgccagcggccatgaaacccactgggataagctggtgctggcgaccggctcgtacccgttcgtaccgcccgttccgggcagcgatctgccgggttgttttgtctaccgcaccctcgacgatctggacaacattgcggcccatgcggcaggctctcgccgcggcgtggtaattggcggcggcctgctggggctggaggcggcgaatgcgcttaagcagctagggctggaaacccacgtggtggagtttgcgccgaacctgatggcggtgcagctcgacagcgacggtgcggcaatgctgcgcaagaaaattgaggcgctgggcgtaggggtacacaccagtaaatcgacgacggagattgccaccgcagacgacgggctggtactgcgctttgccgatggtgaacagctggaaacggacatggtcgtcttctctgccggtattcgtccgcaggacgcgctggcacgcagcagcgggctggctattggcgagcgcggcgggatctgtattgacgacggctgccggacctccgatccggacgtgcttgccatcggggaatgcgcgctgtgggaggggaaaatctttggcctggtggccccgggctaccagatggcgcgcgtggctgccgctgtgctggcgggtgaggagaagcgcttcaccggcgcggatatgagtaccaaactcaagttgctgggggtggatgtggcgtcgtttggtgatgcccacgggcgcacgccgggggcgctgagctaccagtggacgcacgggccgcagcaaatctacaaaaaaattgtggtcagtcacgacagcaaaaccctgctgggtggcgtgctggtgggcgatgccagcgaatacgccacgctggtgcagatgatgcttaacggcattagtctgccaaaagagccggaaacgctgatcttacccgcgtcgtcaggctgcgcgccgaaagcgctgggcgtggcggcgctgccggaaagcgcgcagatctgttcgtgtcataacgtcagcaaaggggatatctgcctggcggtaagtgcgggcgcaacggatatcggcgccattaagcagtgcaccaaagcggcgaccggctgcggaggttgtagcgcgctggtgaagcaggtgatggagttccagcttgcggagcagggcgtggaggtgaaaaaagatatctgtgagcacttcccgtactcgcgtcaggagatataccacctggtgcgcgtcaaccatatccggaccttcgaccagcttatcagccgttacggacaagggcacggctgtgagatctgtaaaccgctggtgggatcagtgctggcctcctgctggaacgaatacctgctgaaaccggcgcatctgccgctgcaggacaccaacgaccgctactttgccaatattcagaaggacggaacgtattccatcgtgccgcgcatgcccgccggggaagtgacggccgacgggctgatcgccatcggccagattgcgaaacgctatagcctttacagcaaaatcaccggcggacagcgtattgacctgtttggcgccacgctcgaacagttgccggaaatctggcaggcgctggtggaggccggatttgagaccggtcatgcgtacgggaaatccctgcgcacggtgaaatcctgcgtcgggtcgacctggtgtcgctatggcgtgcaggactccaccggccttgcggtcaaactggagcatcgctacaaggggttacgtgcgccgcacaaaatcaaaatggcggtctccggctgtacccgtgagtgcgcagaggcgcagagcaaagacgtgggggtgattgccacggacaagggctggaacctttatctgtgcggcaacggcgggatgaagccgcgccacgcggatctctttgccagcgatctggacgacgaaacgctgatccgcaccgttgaccgtttcctgatgttctacattcgcacggcagatcgtctgcaacgcaccagtacctggatggataatctggaaggcggcctcgactatctgcgcgaggtgatcctgaacgacagtcttgggatcgcccacgagctggagcaggagatggcccgggtggtggagacctatcagtgcgaatggcaaaccaccctcaacgatcctgatcgcctggcgctgttccgcaccgcggtgaatgtccctgccgcggcggagagcaagcgctggcaggaaatttgcggcatcgatgatatccccgagcaggcgggcatcggcgcgcggcttggccgaaaaccgattgcgctgttccgctttggaacgtccgtttatgccctggacgaccaggagccgggcagcagcgcgaacgtgctttcgcgcggcatccttggcgatgcagcgggcgagccggtggtgatttccccgctttataagcagcgcatacgtctgcgcgatggatgtcaggtggagaacggcgaacccgtggtgcgcgcctggccggtaaaaattgaaaacggcaaggtttgggttggaagccaagagctggtgatgcgtgcggaggcctcatga

SEQ ID NO: 526986 - DNA, 300 bp, Stenotrophomonas maltophilia
atgccgtatgacgtggaatggaagcagggagccatcgaggacgtaacggcactgtttgactacatcgcggaaaattcatctctgtgggatgcgcggaacgtcaccgatcgcgttcttgcggccgcagacaagctggcagactttccgcgtctctacgaagtggactcacgctatggcgaggacgttcgccggataagcctgatgggacagcatgtcctctatgatgtgaatgacccggcgcagaaaatccgggttctggccgtagtcggccagcgccagaatccccactccgtccgctga

SEQ ID NO: 526987 - DNA, 264 bp, Stenotrophomonas maltophilia
atgagcaataccacacactacgaaaacgccaacttcttgcgggaactggccgaaagtctgccccgcatactgccggaaggtggcccggacaaggcagcactgttgcagcgcctggctaacgaagaactggcacaggccgagtatgaagatcaggttcgcgccaaagtgactgcagcccgcgctgatacacgcccgggcatgaccacggaacaactccgccagcggctgcatggtcgctatcaggaactgcgtgatgccgtatga

SEQ ID NO: 526988 - DNA, 282 bp, Stenotrophomonas maltophilia; identical to SEQ ID NO: 133516

SEQ ID NO: 526989 - DNA, 222 bp, Stenotrophomonas maltophilia; identical to SEQ ID NO: 95298

SEQ ID NO: 526990 - DNA, 495 bp, Stenotrophomonas maltophilia; identical to SEQ ID NO: 219329

SEQ ID NO: 526991 - DNA, 462 bp, Stenotrophomonas maltophilia; identical to SEQ ID NO: 219328

SEQ ID NO: 526992 - DNA, 150 bp, Stenotrophomonas maltophilia; identical to SEQ ID NO: 120984

SEQ ID NO: 526993 - DNA, 507 bp, Stenotrophomonas maltophilia; identical to SEQ ID NO: 95294

SEQ ID NO: 526994 - DNA, 261 bp, Stenotrophomonas maltophilia; identical to SEQ ID NO: 95293

SEQ ID NO: 526995 - DNA, 558 bp, Stenotrophomonas maltophilia; identical to SEQ ID NO: 95292

SEQ ID NO: 526996 - DNA, 267 bp, Stenotrophomonas maltophilia; identical to SEQ ID NO: 95291

SEQ ID NO: 526997 - DNA, 1077 bp, Stenotrophomonas maltophilia; identical to SEQ ID NO: 97051

SEQ ID NO: 526998 - DNA, 837 bp, Stenotrophomonas maltophilia; identical to SEQ ID NO: 16864

SEQ ID NO: 526999 - DNA, 399 bp, Stenotrophomonas maltophilia; identical to SEQ ID NO: 16863

SEQ ID NO: 527000 - DNA, 1110 bp, Stenotrophomonas maltophilia; identical to SEQ ID NO: 113667

SEQ ID NO: 527001 - DNA, 276 bp, Stenotrophomonas maltophilia
atgcccagtactcctgaacagaaaaaaaaggtcctaacccgggttcgccgtatccggggtcagattgatgctctggaaagagcacttgaaagtggcgctgaatgccgttccgttctccagcaaatcgccgccgtccggggcgccgctaacggactgatggcagaggtgctggagagccacatacgggaaacctttgaccagaatgacagctacagtcatgaagtcagtaaatcagttgacgatacgattgagctggttcgtgcctatcttaaatag

SEQ ID NO: 527002 - DNA, 294 bp, Stenotrophomonas maltophilia; identical to SEQ ID NO: 190812

SEQ ID NO: 527003 - DNA, 129 bp, Stenotrophomonas maltophilia
atgccgtcaggaagtgaagaaccgcaaagggatcccgcgcttaagcgtaaagcctggctggcggtctttctcggctctgccctgttctgggtggttgttgctcttctcgtctggaaatattggggttga

SEQ ID NO: 527004 - DNA, 690 bp, Stenotrophomonas maltophilia
  misc_feature (481)..(490): n is a, c, g, or t
atgtcgttaaccctacgcgaagccagtaaggacacattacaggcggaaaataaaacctggcgctactacagcttaccgctggctgccaggacgcttggggacatttcgcggttacccaagtcgttgaaagtactattggaaaacctcttgcgctggcaagatggcgactcggttaccgaggaggatatccaggctctggcagggtggctgaaaaatgctcacgcagacaaagaaattgcctaccgcccggccagggtattgatgcaggatttcaccggcgtgccggcggttgtggacttggccgccatgcgtgaagctgttaagcgtctcgggggcgatacggctaaggtgaacccgctctcaccggtagacctcgtcatcgaccactccgtcaccgtcgatcactttggtgacgacgatgctttcggtgaaaacgtccgtctggagatggaacgtaaccatgaacgctatgtcttcctcnnnnnnnnnnacgtaaccatgaacgctatctcttcctcaaatggggtcagcaggcgttcagccgcttcagcgttgttccaccaggcaccggcatttgtcaccaggtcaacctggaatatctcggcaaagccgtctggagtgaattgcaggataaagagtgggtggcttacccggatacgctggtgggcaccgattcacacacgaccatga

SEQ ID NO: 527005 - DNA, 2073 bp, Stenotrophomonas maltophilia
gtggcttacccggatacgctggtgggcaccgattcacacacgaccatgattaacggccttggcgttctgggctggggcgtcggtggtattgaagcggaagcggccatgctcggccagccggtatcgatgctcattcccgatgtggtgggctttaagctgaccggtaaattgtccgaaggcattaccgccacggatctggtcctgacggtcacccagatgctgcgtaagcatggcgtggtgggtaaattcgttgaattttatggtgatggtctggattcactgccgctggcggaccgggccaccatcgccaacatggcgccggaatatggtgcgacctgcggctttttcccgattgatagcgttacgcttgagtatatgcgcctcagtggtcgcagcgaggagcaggtggcgctcgtagaggcctacaccaaagcgcagggcatgtggcgtaacccgggtgacgagccggtatttaccagcacgctggaactggatatgggcaccgttgaggcaagcctcgcagggccgaaacgaccgcaggaccgcgtcgccctgagcaacgttccgaaagcctttgccgccagcaatgagctggaggttaacgccgcgcaaaaagatcaccgtcctgtggactatgttctgaacgggcatcagtatcagctccctgacggcgccgtggtgatcgccgctatcacttcctgtaccaacacgtccaacccgagtgtgttaatggctgccgggctgctggcaaaaaaagcggtagaactgggactcaagccacagccgtgggttaaggcgtccctggcgcctggttcgaaagtggtttccgattacctggcgcaggccagactcacgccgtacctcgacgagttgggctttaaccttgtgggctacggctgtacgacctgcatcggtaactctggtccactgcctcagcctattgaagtggcgatcaagcagggtgatttgaccgttggcgcggtactttccggtaaccgaaactttgaggggcgtattcatccgctggtgaaaaccaactggctggcctcgccgccgctggttgtagcctatgctctggccggaaacatgaacattaacctggcgaccgatccgattggtcacgatcgcaaaaatgaacctgtctatctgaaagacatctggccatcatcgcgtgaaattgcgcgcgcggtagagaaagtttccaccgagatgttccgcaaagagtatgcggaagtgttcgaaggtacagcggaatggaaagcgattgacgtggtgggttccgatacctatgactggcaggatgattccacctatattcgtctgtcgcccttcttcgatgagatgctggcggagcctgcaccgctgaaagatattcacggcgcgcgcattctggcgatgctgggcgattccgtcaccactgaccatatctcaccagcggggagcatcaaagcggacagtccggcaggtcggtatctgcaaagccgtggcgtggaacgtcgcgattttaactcctacggttcgcgccgcggtaaccacgaagtgatgatgcgcgggacatttgccaacatccgcattcgtaatgaaatggtcccgggcgtggaagggggcatgacgcgccacctgccagatacagaggtcatttcaatttatgacgcagccatgaagtatcagcaggagggtacgccactggccgttattgccggtaaagagtacggctctggttccagtcgcgactgggcggctaaaggtccacgtctgctcggggttcgcgtggtgattgccgaatcctttgaacgtatccaccgctcaaacctgatcgggatggggatcctgccgctggagttcccgcagggcataacgcgtaaaacgctgggtctgaccggggaagagcagattgatatcagcggtctgcaaaatctgcaaccgggtaaaaccgttccggtgaagttaacgcgggcagatggtacaacagaagtgctggattgtcggtgtcgtattgatacggcaacagagctaacctattaccagaacgacggcattttacattatgtgattcgaaagatgctggattga

SEQ ID NO: 527006 - DNA, 591 bp, Stenotrophomonas maltophilia
atgcagcttaaacgtgtggcagaagccaaactgccaaccccatggggcgatttcctgatggtgggttttgaagaactggcaaccggacaagatcacgtcgccctggtatacggtgacatttcggggcagacgccggtactgtcccgcgttcattctgagtgtctgaccggtgacgcgctcttcagcctgcgctgtgactgcggtttccagctcgaagccgctctttctcatatcgcagaggaaggacgtggcgtgctgctgtatcaccgccaggaaggacgcaatatcggtctgctgaataaaatccgcgcctacgcgttgcaggatcagggctatgataccgtcgaagcaaaccatcagctcggctttgctgctgacgagcgcgatttcaccctctgcgcagatatgttcaagctgctgggcgtggacgaagtgcgtctgttgaccaataacccgaaaaaagtggagatcctcactgaagcgggcatcaatatcgttgaacgcgtgccgctgattgttggccgcaatccgaaaaacgcgcactacctcgataccaaagctgcaaagatggggcacctgctgagcgagtaa

SEQ ID NO: 527007 - DNA, 801 bp, Stenotrophomonas maltophilia
atgattgtggtgcttagtgaaaaaggagaggacatgctttcaattgccagacgcacggccgcaggcgccgccgtattgcttgttatacccctgatcgtttggttctccggctggatgtggaagcccggacaaaacgagacgtggctgaaagccttatactggataactgagacggtcacccagccctgggggattattacgcacgtgctgctctgtgcctggttcctgtggtgcctgcgctttcgtcttcgcgcggcgctggtattatttgccattctcggaggtgccattcttgtcgggcagggggtgaagtcgtgggtgaaagatcgcgtgcaggaaccccgtccctttgttatctggctggaaaaaacgcaccatattccggtagatgagttctacactttaaagcgtaaggatcgcggggcgttggtgaaagaacagcttgcggaacagcaggatatcccgacatttttacgcaaacactggcaaaaagagaccggctttgcgtttccttccggacatacgatgtttgctgccagctgggcgctactcggcgtggggctgctttggccacgtcgacgtaccctcacgattgcgattttgctggtctgggcgacaggcgtaatgggcagccggatgctgctgggtatgcactggccgcgtgatttggtggtggctacgctgatttcgtgggtactggttacgctggcgacctggcttgcacaacgtttctgtgggcctctgacgccaccgcaggaagagaaggaagaaatagccgaaagggagtcaggcggaacctga

SEQ ID NO: 527008 - DNA, 669 bp, Stenotrophomonas maltophilia; identical to SEQ ID NO: 129932

SEQ ID NO: 527009 - DNA, 1350 bp, Stenotrophomonas maltophilia
atggctggtttccaaaagcgagtgaaaaactctctgaagctacagctctcggtagccctgagcgtcgccattttatttaccgcagttatttcctgtggtcttaccttctattttgcactcgacgaagcccatgaactacaggatggcaccctgacccaaatcgccagtgtgatatatgacaaccctgactcgcagactcttgttaagcaactggatggtgataatgattcccgagtggtggtggaattcatatcggaaaacggtaattccctgcaggcccgcgaccccacttttcagctggaaacgcccatgcatgaaggttttcagaacgtaatttccggcggagaatcgtatcgtgtattggtgcatcgactttcacccacccaattggtcgccattggtcagcagcttgacgtacgcgacgaaatctcatttgaaagcgcactgcgcacgttgatcccgctcagtctgctgttgccgatactgttgctggttgcgactgatctgatccggaaagcctttcgccccgtttcactccttgccgatgaggtgcatcagcgagatgaacgcaatttgacgccgttccctgaagatgccattcctgatgaaattcgtccatttgtgggtggtatcaataaattgttgcacaaagttaacgatgccatgcagacacagtcacgttttatcgccgatgcggcccatgagttacgtaccccgctaacggcattgtcgctacaggcggagcggctgtcggcgagcgaaatgtcgcccgaagcgcaattccggctgaacagcctgcaacaagggttaagccgaaccaaaaacttgttagaacagctgcttctgcttgcccgcgaacagcaaaatacgcggcaaggaaataatcagcctctgctcattacacagttattcagggaggtgattgaatccctgcatccacttgctctggaaaaaagtattgatattggcgtactggaaactgccagtgcgagtcagctggtttacaccgataaatacacactcactattatcgtgaaaaatctggtagaaaacgcaatccgctatataccggaacacggacaaattgatctcagcgtgatggtatcgcagcacgaagcgatcattaaagttgaagataacggtcccggtattgccgcagaagaaaggatgcgcgtgttcgatgcattttatcgccctgaaggcgtgacccaacccggctctgggttgggcttagcgatagtcaaagcatgcgtcacgcggctgggtgggaaagttactttagcccctgccagccagtttacctcaggcgtactggtcagcattgtcctgccactgcaatctgcgcgataa

SEQ ID NO: 527010 - DNA, 477 bp, Stenotrophomonas maltophilia; identical to SEQ ID NO: 32316

SEQ ID NO: 527011 - DNA, 435 bp, Stenotrophomonas maltophilia
atgcccgaatgtgcacgtagcgatatcgaaaactgtactcaggaacaattggtcaacacctacgacaacacccttcgttatacagactatgtattagctgagatgattgaaaagctaaaaaattacagcgatcagtacaacaccgtgctgctttatgtgtccgatcatggtgaatcattgggcgaaagcgggctatatctgcacggcacgccgtacaaactggcaccggatcagcagacgcatattccgatgcaggtctggatgtcaccgggctttatcgccgggaaacacatcaacatgtcttgccttgaaaataatgcggcgaaaaaatcatattcccacgacaacctgttctcatcgattttggggctgtgggacgtaagcaccagcgtctataatcctgaccgcgatttgttccgcgaatgccgtggctaa

SEQ ID NO: 527012 - DNA, 141 bp, Stenotrophomonas maltophilia; identical to SEQ ID NO: 131154

SEQ ID NO: 527013 - DNA, 210 bp, Stenotrophomonas maltophilia; identical to SEQ ID NO: 491571

SEQ ID NO: 527014 - DNA, 927 bp, Stenotrophomonas maltophilia
atgtctttaccgccattgtatgcactgcgtgcgtttgaagttgctgcgcggttgaactccttcagtaaagccgctgaaacgctcaatattacgccgggcgcggtcagcagacatgtccgtacccttgaactgtggttcgactgcgagcttttcaaaaggcaaggtcctcgcgtggaggtcactgaagccgggcgagtgcttgccggacagctgaacgaaagcttcacgagcattgaatgggcctgccgggcatttcgcagtgaaaaccatctgctgcggttaaaaacacccagcaccctgaccatgagatggcttctcgacgtgctgcgatcttttcgcaacaaccatccaaaaccgcaggtggagattgccagcgtctggatggacattgacaccgttgatttcaatcttgagccatacgactgcgccatccttctcggtaatggccgttttggtgagacaacggaaagccagctgctttttcatgaatggcttatcccggtttgcaccccatcgcttatcgaaccggcccggcagcagctttcgcaatgcgatttgatccatccttcaccggacagacgtgactggcggcgctggctgcgaagaacaggattgtttccggggctcgatatgagcagcggcatggtgtttgatacccttgaacagggaagtatcgccgcgatgaacgggcacggcatcgctatcgccgacctgcatctcacgcttgatgccctgaaaagcggcctgctgggcctgccgttcagggaagctatcgcgacgggagatggttactacctcgtctggccaaaaaattcgctcaaaagagagagcatccagcaccttctgggctggctgcaaaaccataccccggtcgttccggctctggatatcgattaccttgaaaacgatgaaagccgggtttattaa

SEQ ID NO: 527015 - DNA, 324 bp, Stenotrophomonas maltophilia
atgtctcaagagttagaattttcgcttcatccacctgtttggcctgccgtggcctatttcattgtatctattgcaatttttctcttgctttatctcggcaaactaaaagttaacaggctgcataaatacccgctatttatcgcgtatagggtgtttgtaatcgctattgcagccgttcagataaacatctttgccaatggctacgagtttgtcagcagctttttgcatatagattttgacccctatcgctatgactcggtatattggggctcattgtttttctccataatttacttgctggcattgccccggaacaagttttag

SEQ ID NO: 527016 - DNA, 549 bp, Stenotrophomonas maltophilia
atgcgatttaatatccctacgttgcttactctctttcgcgttgtgctcattccgttcttcgtcctggcattttacctgccggtcgtctgggcgccttttgcctgtgcgcttattttcctgattgccgccgtgacggactggtttgacggttatctggcgcgtcgctggaaccagagtacccgctttggcgcgttcctcgatccggttgcggataaggtgatggtggcaatcgcgatggtgctggtggcggaacattatcatacctggtgggtgacgctgcctgccgcgaccatgattggccgtgagattattatctctgccctgcgcgagtggatggcggagctgggtaaacgcagcagcgtggcggtgtcctggatcggtaaagttaaaaccactgcgcagatggcggcgctggtgtggatgctgtggcgtccgaatgcttgggtagagtgggccggcattggtctgctgtgggttgcggcggtgctgacattgtggtcaatgttgcaatacttgaacgctgcgcgcggtgatttgcttgaacagtga

SEQ ID NO: 527017 - DNA, 1833 bp, Stenotrophomonas maltophilia
gtgagtgaagcgttcgattcaaaagcatttctgaaaaccgtcaccagccagccaggcgtctaccggatgtacgatgctggcggtacggttatctatgtcggtaaggcgaaagatctgaagaaacgcctttcaagttatttccgcagcaaccttgcctcccgtaaaaccgaagcgctggtcgcacttatacacaacattgatgtcaccgtaacgcacacggaaacggaagcgctgctccttgagcacaactacattaagttgtatcagccgcgctacaacgttctgctgcgtgatgacaagtcctatccgtttatcttcctgagcggcgacacgcacccgcggctggcgatgcatcgtggcgctaagcatgcgaaaggtgaatatttcggccccttcccgaatggttatgccgtgcgggaaacgctggcgcttttgcaaaaaatcttccctgttcgccagtgcgaaaacagcgtttatcgcaaccgctcccggccatgcctgcaatatcagattggccgctgcctgggaccatgcgttgaagggctggtgagcgaagaagagtacgcgcagcaggtggaatatgtccgcctgtttttagccgggaaagacgatcaggtgctgacgcaactgattacccgcatggaaaaagccagcgcggcgctggaatttgaggaggccgcacgcatccgcgaccagatccaggcggtgcgcagggtgaccgagaagcagtttgtttccaatacgggcgacgacctcgatgtcatcggcgttgcctttgacgccggcctggcctgcgttcacgtgctgtttattcgtcagggcaaagtgctcggcagccgcagttacttcccgaaagtgccgggcgggactgagatgggtgaagtggtggagacctttgtcggccagttttatttgcagggcagccagatgcgtacgctgccctcggagatcctgcttgacttcacgctggacgataaaaccctgctggcggactcactttcagagctggcaggtcgccgggtgaatgtccagacgaaaccgcgcggcgatcgtgcgcgttatctgaagctggcgcgaaccaatgccgccacggcgctgaccaccaaactttcccagcaatcgaccgtcagccaacgtttaaccgcgcttgctgcgctgctcaagctgccggaagtgaaacgcatggaatgcttcgacatcagccatacgatgggtgagcagaccgtggcgtcgtgtgtggtctttgatgccaatggaccactgcgggcagagtatcgtcgctataacatcaccggcattacgcccggtgacgattatgccgccatgaaccaggtgctgcgccgtcgctatggtaaagcgattgaagagagcaaaatcccggacgttatccttatcgacggcgggaaagggcagttggggcaggcgaaggcggtattcgaatcgctcgacgtggagtgggataagaaccatccgctgctgctaggggtagcgaaaggggcagatcgtaaggctggcctggaaacgctgttctttgagccggaaggcgagggctttagcctgccgccagattcccctgcactgcacgtgatccagcacatccgagatgagtcgcacgatcatgccattagcggacaccgcaaaaaacgggcgaaagtgaaaaataccagtacccttgagacgattgaaggcgtcgggccaaaacgtcgccagatgctgttgaagtatatgggcggattgcaaggattactcaacgccagtatggaagaaattgcaaaagtgccgggtatttcgcaagggctggcagaaaagatctactactcgttgaaacattga

SEQ ID NO: 527018 - DNA, 186 bp, Stenotrophomonas maltophilia
atgctgatgatcactaaaggtcagaaggtgaatgagatttctgagcagttgaatctcagcccgaaaacggtcaacagctatcgctatcggatgttcagtaaactgaacattcacggtgatgtcgaactgactcacctggccattcgccatggtttgtgcaatgcggagtcgttaataagtcagtga

SEQ ID NO: 527019 - DNA, 837 bp, Stenotrophomonas maltophilia
atgaatataacagtggccgggttaaccgtaacccgccaggcgcagacggtgcttaaggatatcgatctcgacctgccatccgggcagattgtcggcctgttagggccaaacggctcaggcaagtcgacgctgctgcgctgcctcgccgggctgtttccacgacacagcgaacgtgttgcgcttaatggcacaacgcttggcttgatgccgctgaaaatacgggcgcagcacatggcgtttgtcccgcaacatgctgtggtcgacggggaactgaccgttgaggatattgtcaggctggggcgtacgccctaccggaaaacattccagagaaccacgcgcgacgatgaggctgcggttgaacaggcgattggcctgatgcagttatgcagcttacgccagcggcgatggcactctttgtcaggcggagaacgacagcgaagtcagatagcccgcgcgctggcccagcagccgcaggtgctgttgctcgatgaaccgacaaaccacctggacattcagcaccaactggagctgatgcggctcgtttcacagctgccgcttacggtggtggttgcactgcacgatctcaatcttgcggccaattattgccagcgtctgatcctcctgaaggccgggcagatcgcagccacgggtgcgcccgaagcggtgctgacgccctcgaacatcgcggatacctggtgcgtaaaagctcaggtctgtaaggccgacgccgggatcacgataagctataacatgggtgacatggcggagagccagaacaaaagcaaaaacccctgcgatattgctatcgcaggggttttgaatttggcggaagcgtag

SEQ ID NO: 527020 - DNA, 978 bp, Stenotrophomonas maltophilia
atggcgctgccgctaatgctggtttttgccgccagtatcggtgatatgccggtgtcgtatgccagtaccgggaaagcgatcctcaacggactgggtttgacctcttatgcgttgccacaaacggaggagggtatcgtctggcaatatcgcatgagccgggcagtgatggccgcgtgcagcggcggtggcctggcgctgtgcgggctggtgttacagtcgatcctgcgtaaccctctggctgagccttatctgctggggatttccgcgggcgcctcgctgggggccgtctgcgtgatgcttctcggcatggggggaagcgtgattggcgtgagcagcggtgcgtttgtcggctcctgcgccgcctttgcgctcatcatggtgattacaaacggcatgagtgaaagcccgtcgcgcattttgctggccggtattgcgggcacccagctcttcaacgccatgaccgcgtacgtagtcagcacgtccgccaatgccgagcagtcttgtagcgtcatgttctggctgatggggagtctgagcggcgtgcgctggcctgacgcgctgctggcgctggccgttacgcttgcgggtttactggtggtattgctcttttcccgggcgctggacaccttcaccttcggggatgaggtctccaccacgctggggatcccggttaccgccgtgcgtattgttttattgctgacctgtgccgttgtcaccgccacgttggtgagcgctacaggcgcagtggggtttgtcgggctggtcattccccatgtgacgcgcatgctatgcgggccgggccatcgccgctcgatcccgctgacgtttctcatcggcgcccactttatgatccttgccgatatcgtctcacgcacgttgatcgtgcaccaggttctgcccatcggggtggtgactgcgctggtgggcgcccccgtctttgtggcgttgctttatcaaaaccgaaaggagcatccatga

SEQ ID NO: 527021 - DNA, 1008 bp, Stenotrophomonas maltophilia
atgttacttaaaaaagggttatttctggctttattgctctccacggcgcctgccgctttctcagcaacctcctggcccctcacgattgaaaattgcggcgtaaagcagacctttgcgcaggctcctcagcgcgtcgtgaccgtgggacagcatgaaacagaattactgctcgcactggggctggagaaaaagatcgccgcaacgtcggtctggttcggcaagctcccggatccgctggcagatgccgggaaaaatatcccccggcttgcagataattccccctcctttgaagccgtggtgggacagaaacctgagctcgttctcgcgcagtatcactggcacattggtccgcagggagaagtgggcacccgtgagcagtttgcctcgctggggattaatacgtggatctctcctgccgactgcacggataaagcggtgacggaaaagtcaaacgcagacggagcacgcagcgcgccgttttcgctggccgaaatcacacgggaagtgacagatctggcgacgatatttgatgtttccgcgcgaggtgagcagcttaatcatacgctgacggaacgtatcaaaaaggccaaggcgcgcgtctcagcgaaaccgcttcgcgtcgtattctggttctcaagtagccgtctgaatggcgatccctgggtggcggggaattacggcgcgcctggctggatcagccgcacgctggggttgaagaacattattgactctcatgacgaatggccggctgtaacctgggaacatattgcccagtcgcagccggacgtgattgttatcgccgggatgtcccgcaggctctaccctgccgatgacgttaaggtaaaaaaagcattcttgcgtaatgacccggtgacgaagaacatgcctgcggtcaggaacaaccacattattgtggtgccggcgatgtcgttaaacccttcattacgtaacgtcgatgcggttgagcttatcagcgagcggctggcttctttccgggatgaacaatga

SEQ ID NO: 527022 - DNA, 1614 bp, Stenotrophomonas maltophilia
atgaaaaagatcctgctcgcgtttgcgttctgttttgcctccctgagcgccttctcatcgtatgccgctgagccccgccaggcgccttctgagcaggagcgcgcccggacggtctatatttttcatcagccgatcgtcatgcttcaggcgaaatttggcctgaccacgccggaggagcgcgttttacgcatccgcaacaccctgcgcaattttaccgaggcggacgtgcgtgagccgctcactatcgtccccgtgacccgctataaccagcaggggcggctgatcgtgatgaacggtaagcccgtgatgctgctgacggaaggggatttggacgaaggggacgatctgaccctcgatcaggccgcgcagcgcgtgctggcgcgcatggaagcgcagagaatggcgctgcgcgatcaatacgataccggctggctggcgctgtcgacggtaaaagctgccgctggcctgctggcgcttttgctgctctgctatggcgcctggcgatcctggcgctggtttcgacgcgtctaccgtctgcgtattgtggagaatcgcagccgggtgccgcaaagctggcggcggtacattggcgccattgagattcggctttacgccttgctgatgttcctgctgggtttgattggcttttacgtctggctgagctgggcattcagtctgtttccgtggacgcgggtgtggggcacgtcgctgggagactggtcgcttcgcgtggtgcagcaaattgccctggcgattgtctcggctttgccggggctgacgattgttctgatcattttcctcattaccgcttttattctgaagcttctgaggatggtgctgaatcaggtggaggctggtcgtctgcaacttcccggcgtacatccggaaaccgtgggggcaacccgtaagctcatttccgtcgccgtctggctatttgctctctccgctgcctggccgtttctgcccggcgcaaactcactggcgtttaaaggtattagcgtcttcttcggcctgatgttaacgctgggttcggcaggggtgatgaaccatgccatgagcggtctggtcctgatttactcccgcgcactgcgtaaaggcgatgtcattcgggtggcggataacgaaggtaaggtcagtgaaataggcatgctggcgaccaaaattattacccgggaaaattatgtcgttaccgtgcccaatgcggtggtggtgagcggtaagatcaccaaccttagcgcgctacagcccgatggcagcctcaatctgacggtcagcgtcactattggttatgacaccccatggcgtcaggtgcatgccatgctggagctggccgcgaaacgggcaaaagggattgatctttctgagccgccgctggtgcgccagttagggttaatggactggtatattgcctacgagttgcaggttcgtctgctgcccgaccagtccctcgcggttgcccgcaatgagctgcatagccagatacaggatgtatttaacgaatttaacgtgcagatcatgtctccgaattttgttatgcagccagagggcagcgtaatggttgccaaagagaactggtataccgcgcccgccaaaccccctcagggcgaaacctga

SEQ ID NO: 527023 - DNA, 315 bp, Stenotrophomonas maltophilia
atgcatgagatagaagccaacagcgcggtgagaattgataatattatctattcgtcgatgcattttactgctcacccttttcagcagctgatgcgcttttatcgggcgctcaggacacactcctttacccgacgcgaatatgacgtgctaaagcttttccatatggaaaatcatgaaatcgcgaaaaagctgcaactgtcacaaaaaacgaccagcacctaccgcgtgaggatcctcgagaaattgaatatgcgttcaaaaaacattctggcgatgacccgtataaaatcggcgattgtcgatcagaaactgtga

SEQ ID NO: 527024 - DNA, 930 bp, Stenotrophomonas maltophilia
atgtctaagaaaattgccgtgattggcgaatgcatgattgagctgtcccagaaaggcgcggaagtcagccgcggttttggcggcgatacattgaacacctccgtttacattgcccgtcaggtcgcccccgacgcgctgagcgtgagctacgttaccgcgctgggaacggacagcttcagccagcagatgctggaggcctggcagggtgaaaacgttgaaacttcgctgatccagcgaatggaaaaccgtctgccgggtttgtactacatcgaaaccgacagtaccggcgagcgcaccttctattactggcgtaatgaagcggctgccaaattctggctggaaagcgatgccgccgctgcgatttgcgaagagctggccaccttcgattacctctacctgagcgggatcagcctggcgatcctgagccagcagagccgtgaaaagctgctgtcactgctgcgcgaatgccgtgccaacggcggtaaggtgattttcgataacaactaccgtccgcgcctctgggccagccgcgaagagacgcagcaggtgtatcagcagatgctggaatgcaccgatatcgccttcctgacgctggacgatgaagatgccctgtggggtgaaaagccggttgatgaggtcatcgcccggacgcaggccgctggggtcagcgaagtggtgattaagcgcggggcggagtcttgcctggtggcggtggcgggtgaagccgtgacagaggtgccggcggtgaagctggcgaaagagaaagtgattgataccactgcggcgggcgattctttcagcgcggggtatctggcggtacgtttgacgggaggtacgccagaagcggcagcgcagcgcggacacttgacggccagcacggtgattcagtatcgcggagcgattattccgcgcgaggcgatgcctgcttaa

SEQ ID NO: 527025 - DNA, 774 bp, Stenotrophomonas maltophilia
atgaagtcagagcaggttatccagcggctgagcactacgcctgaggcaagtattgagaacttgcaggagcatcgctactggctgcaatgtgagcgagcgtatacctatcagcctatctaccgtactgacggtcggttaatggcaattgaggtgttaacggtcgtcactcatccatcgaacccttcgcagcgtatcgcgccggaccgctattttgcggaggttgccgtgcgtcagcgcatcgacgtgctggaagagcagttgagaatgctggcgacgaagcaggcgttcttcgagcagcacggtattctggcttcggtgaacgtggatggcccaaccctgatggcgttacgtcagaatgcgacgctgcaggcgctgattgccaccctgccgtggatgcgcttcgagctggtggaacatgttcagctgccgcaggactcctcatttgcctcgatgtgtgagtttggcccgctgtggctggatgatttcggtaccggtatggccaacttctccgccctgagcgaagtgcgttatgactacatcaaagtggcccgcgatctgtttatcatgctgcgccagacaccggaaggacggaacctgtttacgatgctcctgcaactgatgaaccgctattgccagggcgtcattgtggaaggcgtagagacgctggaagagtggcgcgacgtgcaaaattctccggcagcggcggcacagggttatttcctctctcgtcctgtccccatggataccctggaaaaggtgataaccaccctctga

SEQ ID NO: 527026 - DNA, 2043 bp, Stenotrophomonas maltophilia
atgacaaaaacaaccagggtgatttcctggacagcagggattttcttgttgctgatcgtggtcttaatcatcattatcgccacgtttgactggaaccgcctcaaaccgaccatcaaccagaaagtctcgaccgagctaaaccgccccttcgcaatacgtggcgatttgggggtcgtgtgggagcgtcagaaagaggaaaccggctggcgaagctgggtgccctggccgcacgttcacgctgacgacatcattcttggcaacccgccggacatccccgaagtgaccatgatccacctgccgcgcgtggaagccacgctggcgccgttagccctgttaaccaaaacggtgtatctgccgtggatcaaacttcagcagcccgacgcgcggctgattcgcctgtcggagaaaaccaacaactggacgttcgatctcgccagcagcggcgataaagatccgaatgcgcagccctcttcgtggtctttccgcctcgacaatattctgttcgatcgggggcggatcgccattgacgataaagtaagtaaggctgacgtggagatcctcgtcgatccgctgggcaagccgctgccgtttagcgaagtgacgggcagcaaagccaaaggcgatgacagcaaagctggcgattacgtcttcggcctgacagcgaaagggcgctacaacggccagccgctgaccggtaaaggcaaaatcggcggcatgctggcgctcaggagcgagggtacgccattcccggtgcaggcggacttccgctcgggcaatacccgcgtggcgttcgtgggcacggttaacgacccgatgaacatgggcggcgtagacctccagcttaagtttgccggggattcgctgggtgaactgtacgatctcaccggcgtgctgctgccggataccccgccgtttgaaacggacgggcggctggtcgcaaaaatcgacgctgaaaaatcgtccgtctttgactaccgggggttcaacggccgcatcggcgatagcgatatacacggcacgctgacctacaccaccggaaaaccgcgcccgaaactggagggggacgttgaatcccgccagctgcgtctggccgatcttggtccgctgattggcgtagattcgggtaaaggcacgaagtcaaaagaggtcaaaaaggacgctcagcctgcgggtaaagtgctgccctatgaccgcttcgaaaccgacaagtgggacgtaatggatgcggacgtgcgcttcaaaggacgtaaaattgagcatggcagcacgctgccgttgagcaacctctcgacccatatcatcctgaaaaacgccgatctgcgcctgcaaccgctgaagtttggcatggccgggggaaccatttcctcgaatatccacctggagggggataaaaagccgatgcagggaagggcggagatccaggcgcgtcgtctgaagctgaaagagctgatgccggacgtggagttgatgcagaaaaccctcggtgagatgaacggcgatgcggacattcgcggcacgggtaactctgtggccgcgctgttaggcagcggaaacggcaacctgaagctgctaatgaacgacgggctggtgagccgtaacctgatggagatcctggggctgaacgtcggtaacttcatcgtcggacaaatcttcggagacgatgaagtgcgcgtgaactgcgcggcggcaaacgtggacctggtcaacggtgtggcgcgtccgcagattttcgcattcgacacggaaaacgcggttatcaacatcaccggtaccgccagcatggcgtccgagcagctggatttaaccatcgatccggaaagtaaaggcattcgcatcatcaccctgcgctcgccgctctacgttcgcgggaccttcaaagatccgcaggcgggcgtgaaggccgggccgctgattgcgcgcggtgcggttgccgccgccctcgccacgctggtcacccctgcggcggcgctgctggcgttgatttcgccgtcagaaggcgaagcgaatcagtgtcggacgattttgtcgcagatgaagaagtaa

SEQ ID NO: 527027 - DNA, 744 bp, Stenotrophomonas maltophilia
atgagctggggctggcgtattccgttcgtcttctctgccgtgctggtgctgattggcctgtacgtgcgcgtgtcgctgcacgagacgccggtcttcgctaaagtcgccgcggcgaaaaagcaggttaaagttccgctggggacgctactgaccaaacacctccgcgtgaccgtgctgggtacgttcatcatgctggcgacctacacgctgttctatatcatgaccgtgtactccatgacctacagcaccgccgccgtaccggtcggactgggcctgccgcgtaacgaagtgctgtggatgctgatgatggcggttattggatttggcgtgatggtgcccatcgcgggcctgctggcggataaatttggccgtcgttcaagcatgatcgtcatcacctcgctgatcatcctgttcgcactgtttgtcttcccgccgctgctgggttcaggtagccctgcgctggtgatggcgtatctgctgattggtctgagcctgatggggctgacctttggcccaatgggcgcgctgctgccggagctgttcccgactgaagtgcgttataccggcgcgtcgttctcctataacgtttcgtctattctgggcgcctcggtggccccgtatatcgccacgtggcttcaggcgaactatggtctgttctatgtgggtgtctatctggcggcaatggcagcgttgacgctgattgcgctgctgctgacgcacgaaactaagcatcagactctgtaa

SEQ ID NO: 527028 - DNA, 690 bp, Stenotrophomonas maltophilia; identical to SEQ ID NO: 161592

SEQ ID NO: 527029 - DNA, 240 bp, Stenotrophomonas maltophilia; identical to SEQ ID NO: 119323

SEQ ID NO: 527030 - DNA, 420 bp, Stenotrophomonas maltophilia
atggaatttatcagacctacagaactgcgtgagattatcgcgcttccacttttcagcgatttagttcagtgcggattcccaagcccggctgccgattatgtggagcagcgcattgatcttaatgaacttctggttgcccaccccagctcgacgtatttcgttaaagccgcgggtgattcaatgattgaagggggaataagcgacggcgatttactggtggtcgatagttcccgaacggctgagcacggcgatatcgtcatcgccgcggtggaaggggaattcaccgttaagcgcctgcaactgcggcctaatgttcaactcaatccgatgaacagcgcttattcaccgattatcgttggcagtgaagacacgctggacgtttttggtgtggtcacttttattgttaaatcggccagctga

SEQ ID NO: 527031 - DNA, 1191 bp, Stenotrophomonas maltophilia
gtggttgtcctctcaaataacgacggttgcgtgatagcgcgcagcgcagaggccaaagccgctggcgttaccatgggggcgccatactttaagcagaaagacctgttccggcgcgccggcgtggtttgcttcagcagtaactacgaactttacgctgacatgtccagccgggtaatgaccacgctggaagaaataagccctcgcgtcgaaatatattccattgatgaggccttttgtgatctcaccggggttcgtaattgccgggacctgactgattttggcaaggagatccgcgaaacggttttgaagcgtacgcacctgagggtcggcgttggcatagcccagacgaagacgctggcgaagctggcaaatcacgcggcgaagaaatggcagcagcagacgggtggggtggttgatttatccaatatcgaccgccagcgccggttgttggctatcgtgcctgtagaggacgtatggggcgtgggcaggcgcatcagcaagaagctcaatgcgatgggtatcaaaacggcgctggatctctcagagcagagcacgtggattatccgcaagcacttcaatgtagtgctggagcgaacggtccgggagttgcgcggcgagccgtgcctcgatctggaagagtttgcaccgacaaagcaggagatcgtctgtagtcggtcattcggtgagcgcgtgacagaatacgagcaggtgcgccaggctatatgcagctatgcggcccgtggcgctgagaagttacgtggcgagcaccagtattgccgctttatctcggcgtttgtaaagacctctccgttcgctctgaacgaaccctattacggcaacagtgcctcaatgacgcttctcacacccactcaggactcccgcgacattatcaacgccgcggtaaagtgcctcgacaaaatctggaaggagggccaccgctaccagaaagccggcattatgctcggggacttcttcagccagggcgttgcccagctcaatttgtttgacaatagcgcgccgcgtgccggaagtgaaaagctgatggaagtgctggatcgtctgaacgcgaaagatggaaagggtacgctttattttgccgggcagggcatacagcagcaatggcagatgaagcgtgaaatgctttcgccgcggtatacgacccggtattcagatttactgagaattcgatga

SEQ ID NO: 527032 - DNA, 549 bp, Stenotrophomonas maltophilia
atgaaaccattatcgcttttattattgtcgagcctgacgttagtgggttgtggcgcgaacaataccccttcaaatacgcctcttccgggtgtaaaaacctccgtcgggacgagcacgcttgaagccggtgctcagcttatccagtcccgtccgcccattgatgcaatgagtgcctaccttgacggtttccatttttatagcggggataaaaatggccagatggaagcccatcattatgtaaccgtgttgaatgaagacgtgatgcaggcggtgatctacgacggtaacaccaaagatgcccgtttaatgggcgttgagtacatcattagtgagcgtttgtttaacactctgccgccggaagaaaaaaaattgtggcacagccatcaatgctttgacgtgagcacgcaagccatcaaagaagaacgtaaggatattgtggcgcacccagttgctaagggagcggatgcctggcaacgtggtgaagagatccagcttaagcgggttagaggttcaggtgagcatggccagggcgacacaagccatttttga

SEQ ID NO: 527033 - DNA, 372 bp, Stenotrophomonas maltophilia
atgtcatggagagtcattagctcggtaatttgtcctaacacgggaatcgtttattcaagcatcttgggactcaagttcttgaaactcatcatttggtatgaaagcgatgtctatttgtaccccggcgataggatatatccgacaaagaatggcgtcttcattaatggtgttttcaagccaatatcgatatacaacatctccccttacaacgagatgttatggagtgaaattaaaaacaagatggcctgcccatacaatcgaaaccaggaagaggagatatgtacctacgcggtgcattgcaacgcgcgtaagtgtccgcataggtttatcacgaatccactgattgtcagcacagtcaaatccagacattaa

SEQ ID NO: 527034 - DNA, 1299 bp, Stenotrophomonas maltophilia
atgaagaagctgtttgttcagttttatttactgctgtttgtctgctttctggtgatgaccatgctggtcgggctggtctataagttcaccgcagagcgtgcgggcagacaatccctggacgatctgatgaaaagctcgctctacctgatgcgtagcgagctgcgcgaaattcctccgcatgactgggcacgtacgttaaaagagctggatctgaatctgtcgtttgatctgcgtatcgaacccatgaaggattttgatttagcgccgccggcgatgcagcgtttgcgcgacggagacatcgtcgcactggacgagaaatataccttcattcagcgtattccgcgcagccactatgtcctggccgtcgggccagtgccctatctctattacctgcaccagatgcgcctgctggatctcgccctgctgggctttattgccatctcgctcgctttccctgtgttcatctggatgcgaccgcactggcaggacatgctgaaactggaatccgccgcacagcgttttggggagggtcatttaactgaacgcatacatttcgatagcggttccagttttgaccgtctcggtattgcctttaaccagatggccgataacatcaacgccctgattgccagcaagaagcagcttatcgacggcattgcgcatgaactgcgcactccgctggtacgcctgcgttatcgcctggagatgagcgagaacctcaccgccgcggaatcgcaggccctcaatcgggatattggccagcttgaagcgctgattgaagagctgctgacctatgcccgcctcgatcggcctcagacggagttgcacctcagtacgccggatcttcccgtctggctacagacgcatattaacgatgtgcagagcgttaaccctcagcgaaaactgctgacagccattacccccggcgcgtacggcgcgctggacatgcgcctgatggaacgcgtgctggataatctgatgaataacgccatgcgctacagcgaaaccacgctgcgcataggtttagatttgcaggggagccaggcaattctgtgtgtggaagacgatggccccggtattgagccagcggagcgtgaaaaagttttcgagccgtttgtgcgcctcgaccccagccgcgaccgtgctaccggcggctgtggtctggggctggctattgtccgttctattgcccaggcgatgggcggttcggttcgctgcgaagcgagcgagctgggcggggcccgtttcgactttagctggccgatctatcacaacattcctcttcccgtacctgcctga

SEQ ID NO: 527035 - DNA, 930 bp, Stenotrophomonas maltophilia
atggcgacttacgatctcatcgaaaggcttaacaccacatttcgggaaatagagcaggcgttactgaccctgacggcgcaactacagggctgccgcctgctggccgcccgcgtcttttccctgcccgaggtggcgaaaggcgcggaacacgacccgctgaacaccattgaggtaacgcagcatatcggtaaagtggcgctggaactgacgttgcagcactatcgccgccttttcatccagcagcagtccgaaaatcgcagcagtaaggccgccgttcgcctgcccggcgtcatctgtctgcaaacggataccgcaacgcgtgaagccattgaggcgcaaattacgcatattaatacgctgaaagccgccttcgagaaaatcgtgaccgttgaatccgggctggcaccggctgcccgttttgaatgggtgcatcgccagcttccggggctgatcaccctgaatgcttaccgcacgctgacggtactgcgccaccccgccacgctgcgcttcggctgggccaacaagcacatcattaaaaacttcacgcgcgacgagatcctggctcagctggagaaaagcctgaaatcgccgcgaacggtcgccccgtggtcgcgggaacagtggattgaacggctggagcaggagtaccacagcattgcctccctgccggctgatacccgtcttaaaataaagcgtccggtcaaggtgcagcctatcgctcgtgtctggtatgcgggacagcaaaagcaggtgcaatacgcctgcccgacaccgctgattgcgctctacgatgccgatcagggtgcggtggtgccggatataggagaactgctgaactacgatgctgaaaacgttcagcatcgctataaaccccaggcacagccgctacagctgattatcccgcggctgcacctgtatgtggcgcagtga

SEQ ID NO: 527036 - DNA, 1395 bp, Stenotrophomonas maltophilia
atgacaatgcatcgccgcgagaaagactccatgggcgccatcgacgtcccggccgacaagctatggggcgcgcaaacccagcgttcgctggagcatttccgcatttcgacagagaaaatgcccgtctcgctaatccaggcgctggcgttgaccaaacgcgctgccgccaaagtcaatcaggatctgggcctgctggatgccgataaagcctccgccatcatcaatgccgccgacgaagtgctggagggcaaacatcccgacgaattcccccttgccatctggcagaccggctcaggcacccagagcaacatgaacatgaacgaggtgctggcgaaccgcgcaagcgagctgcttggcggcgtacgcggcatggagcggaaggttcacccgaacgatgacgtgaataaaagccagagttccaacgacgtgttcccgacggccatgcacgtggcggccgtcatcgctatccgcgagcagcttatcccgcaactcaacgtgctcaaatctacgcttaacgagaaagcgcaggctttcggcgacattgtaaaaattggtcgtacgcacctgcaggacgccacgccgctgacgcttggccaggagatctccggctgggtggcgatgctggagcacaatcttaagcatatagacaacagcctgccgcatctggcggagctggcgctcggcggaacggcggttggcaccgggttaaacacccatcccgagtacgcggtgcgcgtggccggagagctggcgaagatcaccgggcagccgtttgttaccgccccgaataaattcgaagcgctggcgacctgtgatgcgctggtccatacccatggcgcgctgaaagggctggcagcctcgctgatgaaaatcgccaacgacgtgcgctggctggcctccggcccgcgctgcggcatcggcgaaatcagcattccggaaaacgagccgggcagctccattatgccgggtaaagtaaacccgacgcagtgcgaagccatgaccatgctgtgctgtcaggtgatgggtaatgacgttgcggtcaacatgggcggcgcgtcgggtaacttcgagcttaacgtctatcgcccgatggtgatccacaacgtactgcaatcgattcgtctgctggccgatggcatggagagctttaacgagcactgcgcggtgggcattgagcctaatcgcgagcgaatcagccagctgctgaatgagtccctgatgctggtcacggcgctaaacacccatattggttatgacaaagcggccgaaatcgctaaaaaagcgcacaaagaggggcttaccctgaaagcctctgcgctggcgctgggctacctgacggacgccgagtttgatgcctgggtccgcccggaagcgatggtcggcagcatcaggtaa

SEQ ID NO: 527037 - DNA, 1176 bp, Stenotrophomonas maltophilia
atgacactcctgaacaccgaagttgccgttgttggcggcggtatggtcggcggcgcactggcgctggggctggcgcagcagggatttgacgtaaccgttattgaacaggcggctccgccggtattcgatccttccagccaaccggacgtgcgtatttccgccatcagcgcgtcctctgttgatctgcttcgcgggctgggcgtctgggaggcggtgctggcgatgcgcgcgcacccttacagccgtcttgaaacctgggagtgggaaaatgctcacgtctcgtttgacgccgccgagctgaaactgccgcgcctgggctatatggtggaaaacaacgtgctccagcaggcactctggcaggcgctggaggcgcacccgaaggtgacgctgcgcgttccggactcgctgaaagccctgcatcgtcatgaaggtggatatctcctgacgctggataacgacgatgagctggccgtaaagctggtggtgggggcggatggcgcgaactcgcaggtcaggcagatggcaggcattgggatccatgcctggcagtatcagcagtcctgcatgctgatcaccgtgcagtcagaaaacgcgccgggcgaaagcacctggcagcattttacgccgaacggcccgcatgcattcttaccgttgtttgataactgggcttcgctggtgtggtacgacaagccggcgcgcattcgacagttgcaggggctgtccatggatcagttgcagcgcgaaatccgccagcacttcccgcgccgtctgggtaacgtgaccccggttgccgctggcgcattcccgctgatgcgacgccatgcgttgcagtatgcccgtgaagggctggccctggtgggagacgcggcgcacaccattcatccgctggcggggcagggggttaacctgggataccgtgacgtcgatgcgttactggatgtgctgggtaacgctcgcgcccacgcggaagcctgggccagccatcaggtactgaagcgctaccagacgcgccgtatggcggataacttcattatgcagtcggggatggatctgttctatgccgggttcagcaatgacgtgggtccggtgcggatattgcgaaatatcggactgatggcggcggagcgcgccggtggtctgaagcgtcaggcactgaaatacgccctcggactctaa

SEQ ID NO: 527038 - DNA, 1425 bp, Stenotrophomonas maltophilia
atgactaaaaaactccatataaaaacctggggctgtcagatgaacgaatacgattcatcgaagatggccgatctgctggataccacccacggataccagctgactgaaaatgcgaaagaagccgatgtgctgctgctgaacacctgttcaattcgtgaaaaagcacaggaaaaagtctttcatgtgttaggccgctggaagcttctcaaacggaaaaatccggacctgattattggcgtgggtggctgcgtcgcatcgcaggaaggtaagctgatccgccagagagcaccctatgtggatatcgtttttggccctcagacccttcaccgcctgccagagatgattaaccaggttcgcggcagccgtagcccggtggttgacgtgagtttcccggagatcgagaaatttgaccgtctgccagagccgcgcgctgatggcccgaccgccttcgtctccatcatggaaggctgcaacaaatactgtacttactgcgtggtaccttacacccgcggtgaagaagtgagccgcccggcagacgatatcctgtttgaaatcgcgcagcttgccgcgcagggcgttcgcgaagtgaacctgctgggccagaacgtgaacgcctggcgcggggaaaactacgacggcaccactggcagctttgctgaactgctgcgtctggtggcggcgattgacggcattgaccgcattcgctttaccaccagccatccgatggaatttaccgacgacattattgacgtctatcgcgatacgccagagctggtgagcttcctgcacctgccgatccagtgcggctctgaccgcgtgctgaacatgatgggtcgtccacatacggtgctggagtataagtccaccatccgcaagctgcgtgaagcacgcccggatatccagattagctccgactttatcgtcggcttccctggcgaaaccgctgatgacttcgagcgcaccatgaagctcatcggcgaggtgaatttcgacgtcagctacagcttcatcttctcagcacgcccgggcaccccagcggccgatatggttgacgatgtgccggaagaagagaaaaagcagcgtctgtatattttgcaggagcgtatcaaccagcaggccaacgcctggagccgtcgtatgctcggcactgtccagcgtattctggtggaaggcacttcccgtaagagcatcatggaactgtctggtcgaaccgaaaataaccgcgtggtgaattttgaaggcaccccggacatgattggtaagtttgtggacgtcgagattgtcgaagtgctcacgaactcgctgcgcgggaaggtggtacgtactgaggacgaaatgggtctgcgtattgcacagactccggaatccgttatctctcgcacccgtaaagtcaacgattctggcgtaggtatttaccagccctga

SEQ ID NO: 527039 - DNA, 1047 bp, Stenotrophomonas maltophilia
ttgaacatagatacgcgtgaaattagccttgagcccgcagacaacgctcgcctgctgagcctgtgcgggccgtttgatgacaacatcaaacaactggagcgacgtctgggtatcgaaatcaatcgtcgcgataaccatttcaaactcaccggacgcccaatctgcgtcaacgccgcggcagatattctccgcagcctgtatgttgataccgccccgatgcgcggtgagatccaggatattgaacctgaacagatccacctggccatcaaagaggcgcgcgtgcttgagcagagcgcggaaagcgtgccggactatggcaaagccatcaacattaaaaccaaacgcggcgtgattaagcctcgtaccccgaaccaggcacagtacatcgccaacattctcgaccatgacatcacctttggcgtgggtccggcgggtacgggtaaaacctatctggccgttgctgctgctgtcgatgcgcttgagcgtcaggagatccgccgtatcctgctgacccgccctgctgtagaagccggtgagaaactcggcttcctgccgggcgatttaagtcagaaagtggacccctacctgcgcccgctgtacgacgcgctgttcgaaatgctcggcttcgagaaagttgaaaagctcatcgagcgtaacgtgattgaagtggccccgctggcctacatgcgtgggcgtacacttaacgacgcgttcatcattctggatgagagccagaacaccaccatcgaacaaatgaagatgttcctgacgcgtattggctttaactcgaaagcggttattaccggtgacgtcacccagattgacctgccgcgtaacaccaaatcgggtctgcgtcacgccatcgaagtcctggccgaggtagaggaaatcagcttcaacttcttccacagcgaagacgtggtacgccacccggtggtcgcgcgtatcgttaacgcttatgaggcctgggaagaggcagatcagaagcgcagggccgagctggccgcagaacgtaagcgcgaagcgcaggagcatgaacagaaatga

SEQ ID NO: 527040 - DNA, 216 bp, Stenotrophomonas maltophilia
atgagcaataaagaatacgaacaggcgtttccaacccgcgatgataattacgactccaaatactctggcccgggcatgacgctgcgtgactacttcgcagccaaggctatgcagggaatcatcagcagcgaatgcaactatggagcgtttagtgatttagcaagcgatgcatacagcattgccgacgcgatgctcctcgctcgggaggcatcatga

SEQ ID NO: 527041 - DNA, 159 bp, Stenotrophomonas maltophilia
atgacagtcacccacaacggcaagcagtacaccgccaaaaagctcaacgataacgagtggcagctgacgtcggtatcggcgccgcgggaaaaactggtgcttaaccgctggcagatgcatatcgctggcctcctggaacaggttgaggtgaaggtatga

SEQ ID NO: 527042 - DNA, 210 bp, Stenotrophomonas maltophilia
atgatcaaccactacggcacaaccccgcttattcgccagtgcatcacgcccggcatgatggcaatgcatgaaggccgaacctatcgcgtctcagcagtcattcaggagcgcaaatgggtgtacctgcacaccgatgcagaaatcatacgtctcagtgactgcgtgattgacgtccttctggacggtcacggcaaccctatccagcactaa

SEQ ID NO: 527043 - DNA, 285 bp, Stenotrophomonas maltophilia
atgaacgcatacctaacttacgaccgcatcgaagatcggcgctgggttgaacagcagctcaccgacgagaaggaaaagtggatcgacgaccgggcgcagcaaatcatcgacatgatgccaaaagagccgtccggcctcttccacttcacggttccgattgactccagcccatacgaaggacttcgcagcgataaagctggcgaggcctacaacgatttcatttcggcagttgcttacgcccaggcggaatacgactgggaacaccgaaccggctgcccgttttaa

SEQ ID NO: 527044 - DNA, 504 bp, Stenotrophomonas maltophilia
atgtctgaatctaaaactcactaccgaaaagcttttgactccccttacctgagcagcgccgacatcgttgagccaacggtgctgacgatcgcccgcgcaacgttagaaaacgacaaaacaaaaaaatccaaagacgtttttaacactgcttattttgaagagcgcgagctgcgccctggcgaaaagcttaagccgatgattttgaatgcaaccaatagcaagatgctgaaaagcatcaccggatcccccttccttgaggattgggtaggcgtgaaggtcactgtttacgtcgataaaaatgtccgattcggaaaggaatcggttgaaggtctccgcttaagcccggcgcgcgtcacgaaaccggtgctttcgccggaaaaaaagcaggcatggaataacgctaaagcagctttcaaacgcgacggcaaccttgatgcagtgctggcgagaatggacatttctccagagcatcgccgccagcttgagcaggagtgttcatcatga

SEQ ID NO: 527045 - DNA, 624 bp, Stenotrophomonas maltophilia
atgatatggcacgacgtcgagcaaaatggtgaagagtgggatgctcttcgcctgggtaaggccaccgcttcaaacttcggactgattatggctaacgatggaaaggcgtttggtgagccagccaagcgttatgcccttcagttggctcttgagcagattaagggatgcaagtctgagttcggcttctcaaacgaacacatggaacgcgggcacgaacaggagcccattgcccgcatgctctacgaagagatgaacttcgtcgatgtggataacggcgggttctttgatcacgaaacttacggcgacagccccgacggcctcgttggccaggacgggctcgttgagattaagtcggtcattgccgccactcactactccaccctcacccgcgggtccttcgatccggcatacagatggcaactggtcggtcaccttgattgctccggcagggattgggtggacttcatcagctactgctcagacttcccggacggtaagcagctcatcgtttatcgccttacagctgctgaatgtgaaacagaaatagcccggcttcacgcacgcagaaatgatttcctcgaacttgttgcggacactaagcgccgcatactggagctcgaatga

SEQ ID NO: 527046 - DNA, 429 bp, Stenotrophomonas maltophilia
atgaaacgcacccccttctatcgccggcccgggcgaaccgggcaattctccggcctacgtgagcgccttatctggatgattcagacgcgcgggcgcccggtaaccggtagcgaaatagccgagaagtttggcgtaacgctcatcgagtttaaccgggtcgccaacggtattacacgcggctccggacagatagcgcagatcgttgagtcgaaaaaatggctcaacgagaacggcatctgcgaccgcactttcgacctcgtcacgaagccgaaggttgtaacgccacagggtaaatcgcgcctgttcacccggcgcgccatagagcagtcgcaggaaggcagacggcaggaatgcatagcgcgtgccgcacgccgtcgccgcctgattgctcagggcctctacatcgacgaaatggagtccatcctatga

SEQ ID NO: 527047 - DNA, 153 bp, Stenotrophomonas maltophilia
atgactcacgcccacgacgacatcagggtgggcacgctgtgccttcccttcattggtaacggctggctaatgccatggggtgaagtggtcagcaatccattaaaggcgcagcggctcgctgaggaatatcgggaaaggcaggaggcggcatga

SEQ ID NO: 527048 - DNA, 942 bp, Stenotrophomonas maltophilia
  misc_feature (859)..(868): n is a, c, g, or t
atgacctatcaactacacgtcgggcgttgcgaggaggtcctgaaaacgctgccggataactccgttgacgccatcgtgacggatccaccgtacgggctgagcttcatgaaccacaaatgggattacgacgttcccaccgttgagcagtggcaggaatgcctgcgcgtccttaagccaggcggacacctgctggcgtttggcggatcacgtacctatcaccgccttgtggttaatgcagaggatgccggtttcgaaatccgcgaccaaatcctctggatttacggcagcggcttccccaagtcgcataacctcgatggcgattttgatggctggggaacggctctgaagcctgcgcacgaaccgatcgtcatggcacgcaagcctttcaaaaaaactgtgtcagcgaacatggctgagcatggtaccggggcgatcaatatcaatgcctgccgcatccctaccgacgaggcgctaaatggcggtgctggcagtctactttcacaccagcgtgatggtaccgagcctgttgctgattatgagcaggcaccggaggggcgctggccagcaaacataattcacgacggaagtgatgttgtcgtgtcagcgttcccggatgcgaaaggccaacaaggagcgcttaccggcaatgagcccagctcgaaaatgggtgcggcgaattgctatgggcaaatggaccggcggcacgaatcaactccgcgcatcgatagcagtaagagcgccgccaggttcttctactgcgccaaggtaaaaccgaaagagcgcgatgaaggtctcgagagattcattgcgacgtcagccagcgacatgaccggcggccgcaaagaaggaagcgtcggcnnnnnnnnnncccgcgcgccggtgccgggcgtaccaatggcgcgaagaacaatcaccccacagttaagccgatcgcccttatga

SEQ ID NO: 527049 - DNA, 195 bp, Stenotrophomonas maltophilia
atgagctatctctgcaggctgattacaccgcctggcggtaccgtgcttgatccatggatggggagcgggagcactggccgggcagcaatcgaggaaggtttcaacttcattggcatcgacctgaacccggattacgtaactattgcttctgcgcgaattgctcactccttcaaaaagacgacggaggccgcatga

SEQ ID NO: 527050 - DNA, 360 bp, Stenotrophomonas maltophilia
  misc_feature (332)..(341): n is a, c, g, or t
atggcgaatgccatattcgacgaatgcctgcatataaccgagcttattaccgcagtcatggctcttacctttcatatggtaggcttccacggtctctttctcgatcagcatatcgatagcatccgtcagctggatttcatcgcccgcacccggaggcgttttggccagcagcgcccagatttcagcactcagtacgtaacggccaacgacagcaaggttagacggcgcgacgtccgctttaggtttttcaacaacgccaaccatcggtacgctttcaccaggttgcagggcaacacctttgcagtcaaccacaccgtaagcagtcacatcgnnnnnnnnnntcgactggctcaaccataa

SEQ ID NO: 527051 - DNA, 555 bp, Stenotrophomonas maltophilia
  misc_feature (519)..(528): n is a, c, g, or t
atggctgccctaaattcgaaagtcagaaaggccgttatcccggtggcgggattgggtaccaggatgttgccagcgacgaaggcaatcccaaaagagatgctgcctctggttgataagccattaatccagtatgtcgtgaatgagtgtattgcggcaggtatcaccgaaattgtactggtgacgcattcatctaaaaactctatcgaaaaccatttcgataccagtttcgaacttgaagcaatgctggaaaaacgcgtaaagcgccagctgctggaggaagtgcagtctatttgccctccacacgttaccattatgcaggttcgtcagggcctggcgaagggcctgggacacgcagtattgtgtgcacatccggtagtgggtgatgagccggtcgcggttattctgccagacgtgatccttgatgagtatgagtccgatctttcccaggaaaacctggcggaaatgattaaacgcttcgacgaaacaggcagcagccagattatggttgagccagtcgannnnnnnnnncgatgtgactgcttacggtgtggttga

SEQ ID NO: 527052 - DNA, 1014 bp, Stenotrophomonas maltophilia
atgacacagccattggccggaaaacatattttgatagtagaagacgagcccgttttccgatcgctactggattcgtggttatcctcactgggtgcaaccacgtcccttgccgaagatggcgtcgaggcactggaaaaaatggccagcatggcgcctgatctgatgatctgcgatctcgagatgccgcgcatggacggattaatgctggtggaaaatctgcgtaacgaaggttatcagacaccgatactggtgatctcggcaaccgaaaatatggcggatattgctaaggcgttgcgtttgggtgtgcaggatatcctgctcaaaccggttaaagatttaaaccgactgcgtgaaacggtgttggcctgcctgtatcccaatatgtttaattcccgggtggaagaagaagaacgtcttttccaggactgggatgctttagtcagtaatccgctcgcggccgcgaagctgcttcaggaacttcagccgccggtgcagcaaaatatctctcattgcagagtaaattatcgccagctggtagcggctgaccagcctggactggtgctggatattgcgccgctatcagattccgacctcgctttttattgcctggatgttacccgagcgggtgataacggcgttctggcggccttattactccgtgcgctgtttaatggattgctacaggaacaattatcccatcaggggcaacgacttcctgagttaggcagtttactaaaacaggtcaaccaactttttcgccaggccaatttgccggggcagttcccgcttctggttggctattatcacagcgggttgaataaccttattctggtctctgctggattaaatgccacgctgaataccggcgaacatcatatacaggtgagtaacggtgtgccgttgggaacgttgggtaatacttaccttaatcaaattagccatcgctgcacctcctggcagtgccaaatttggggtgccggtgggcggttacgcttaatgttgtccacggagtaa

SEQ ID NO: 527053 - DNA, 585 bp, Stenotrophomonas maltophilia
atgcctttcggcgccgttgcaaccaacctcagtacgggcagggagttatggctcaccgaaggggatattcatctcgccgttcgcgcatcctgtagcatgcctgggttaatggcgcctgtgcctcataatggctactggctcgttgatggtggcgtggtgaatcctgtccccatctctctgacgcgcgccatgggggcagatatcgtcatagcagtggatttacagcacgacgctcaccttatgcagcaggatttgatgccggttaatcttcagagcgatgatgcggaagaagagaaacttgcctggcatgcgcgtttacgcggcagaatagggcgcctgactgcccgtcgcacggtgaccgcgccgaacgccattgaaatcatgacgacctccattcaaattcttgagaatcgcctgaagcgaaaccgtatggctggcgatcctccggatattcttattcagccctattgtccacaaatctctacccttgatttccaccgggctgaggccgccatagcagcgggctcgttagccgtcgaaaagaaaatagatgaactgttgccttttgtgcgtacagcacgttaa

SEQ ID NO: 527054 - DNA, 288 bp, Stenotrophomonas maltophilia
  misc_feature (264)..(273): n is a, c, g, or t
atgagaaaggtaaaaattggactggcgttgggctcaggtgcagcccggggttggtcacatattggcgttatcaataccttaaaccagatggggattgacgttgatattgtcgcaggatgttctatcgggtcgctggtcggatccgcgtacgcctgcggtaagctcccgcagcttgaaagctgggtgcgctcctttagttactgggatgtactgcgcctgatggatctctcctggcagcgtggcggcctgctgcgcggcgaacgnnnnnnnnnncaatcagtttcgtaa

SEQ ID NO: 527055 - DNA, 366 bp, Stenotrophomonas maltophilia
atgcgctcgcggtatactgcttttgtgatcaaaaacgcagactacctgattaaaacctggcatccgtcctgtgatgctgccgattttcggcaagagattgaagccggatttgccaacaccgtctggctgggccttaccgtctttgatgccgctcccggccgcgatgccaacgagggctatgtcagttttgtcgcccgctttagcgaacaaaacaaacccggcgccatcattgaacgctcacggttcttaaacgacagcgggcaatggtattatattgacggcacacgtccgcaattcggtcgtaacgatccctgcccctgtggttcaggaaaaaaatttaaaaagtgttgcggcagtaatgcctga

SEQ ID NO: 527056 - DNA, 843 bp, Stenotrophomonas maltophilia
atgcaatcattacaacgtaaagttctgcgcactatctgtcccgatcaaaaaggactgatcgcacgaattaccaacatttgctacaagcatgaactgaatatcgtgcagaacaacgagttcgttgaccaccgtaccggtcgcttctttatgcgtaccgagctggaaggtattttcaacgacacaaccctgcttgccgatctggacagcgccctgccggaaggctcggtgcgcgagctaaacccggcgggtcgtcgccgcattgttattctggtcaccaaagaggcgcactgcctgggcgatctgctgatgaaagccaactacggtggcctggacgtcgaaattgccgccgtcattggcaaccacgagacgctgcgtacgctggttgaacgtttcgacattccgtttgaactggtcagccatgaaggtcatacccgcgaagagcacgacaacctgatggctgctgcgattgaagcgcataacccggactacgtggtgctggcaaaatacatgcgcgtgctgacgccatccttcgtggcgcgcttcccgaacaaaattatcaacatccaccactccttcctgccagcctttattggcgcgcgtccgtaccaccaggcgtacgagcgtggggtgaagatcattggcgcaaccgcgcactacgtaaatgataatctggacgaaggcccaatcatcatgcaggacgtgatccacgtggatcacacctacacggcagaagatatgatgcgtgctggccgtgacgttgagaagaacgtactgagccgtgcgctttatcaggtacttgctcagcgcgtctttgtgtacggcaacagaacgattattctttaa

SEQ ID NO: 527057 - DNA, 486 bp, Stenotrophomonas maltophilia
atgataagtttatcaccaccgactatttgcaacagtgccaaaaaactcacgccaaagcgaataacgtcttcgcccgttgctcatgctgatgtggcgcttatctgcgaacttgatgagcaatggagtttcgttggcagtaaagcccggcaacactggctctggtacgcgtataacaccaaaacagggggtgtactggcctacacttttggtccccgtaccgatgaaacctgccgggaactactggcactgcttacgccattcaacatcggcatgatcaccagcgacgactggggcagctatggccgggaggtgccgaaggataagcatctgaccggaaaaatattcacccaacggattgagcgcaataacctgacgctgcgcacccgcattaagcgcttggctcgtaaaacaatctgcttctcgcgttcagtagagatccacgaaaaagtcatcgggacgtttattgaaaaacacatgttctactaa

SEQ ID NO: 527058 - DNA, 1326 bp, Stenotrophomonas maltophilia; identical to SEQ ID NO: 156460

SEQ ID NO: 527059 - DNA, 1188 bp, Stenotrophomonas maltophilia
atgaaaaaatcattcatgcttattgctgcctgcgctgcgtggtactctgcaaccccgtatgcggcgatacaggaaggtaaactgatcatttggggaggtagtcttggtaatggacgacaggctcttgagactgtcggaaaacgttttgaagccgataccggtattcctgtcacggtggaacaaccgaaaaatatagaggaaagattccccttggtggcaagcagtggtggtggtccggatattgttatatacgcgcatgaccgttttggcgggtatgcaaagtcaggtttattatacgaggttaatccttccccggcattcaaagagaaaatagtcccctttgcatgggacgccgtgaagtataacgggaagctgattggttatcctatgagtatagaagcgctgactctgatctggaataaaaagctgattaaatccccaccttccacgtgggaagaaatcccggcaatggatgatgaactaagaaaaaagggtaaaaaagcaattacatggaatatttctgagccctattttacatggccattaattgcctctgcgggggggtacgtatttaaaaagaccgataacggttacgatacaagtcatgtgggtattgataatgaaggcgcagttaaagggctggaatttattgtgaatatggtcaaaagcggacgtattagcccagatacggattatccgctagctgaagccagctttaataaaggtgaaacagcgatgattatcaatggcccgtggtcatgggaaaatattggtaccagcggtattgactacggtgttacggtactgcccacattccagggacaaaaggctagaccatttgtgggggtcgtcagcatcggcattaatgcagccagccctaataaagaactggctgtggaatttatagaaaattatctgatgacagatgaaggacttaccacgctgaatgatgccgttccattaggtgcagttacactgaagagctaccagaaaaaactggaaaaagatccgcgtatccaggcaaccatgcagagcgcagaaaatggcgagatcatgccaaacattcctgagctgagttcattctggtatgcggagaaaaccgctataatcaacgcaattaatcagaagcaatctccagaaagcgctcttaatacagcaaaagaaagggtcctaactactcagccataa

SEQ ID NO: 527060 - DNA, 504 bp, Stenotrophomonas maltophilia
atgccgggcaaccgcccgcattatgggcgttggcctcaacacgattttccgccatttaaaaaactcaggccgcagtcggtaacctcgcgcatacagccgggcagtgacgtcatcgtctgcgcggaaatggacgaacagtggggatacgtcggggctaaatcgcgccagcgctggctgttttacgcgtatgacaggctccggaagacggttgttgcgcacgtattcggtgaacgcacgatggcgacgctggggcgtcttctgagcctgctgtcaccctttgaggtggtggtatggatgacggatggctggccgctgtatgaatcccgcctgaagggaaagctgcacgtaatcagcaagcgatatacgcagcgaattgagcggcataacctgaatctgagacaacatctggcacggctgggacggaagtcgctgtcgttctcaaaatcggtggagctgcatgacaaagtcatcgggcattatctgaacataaaacactatcaataa

SEQ ID NO: 527061 - DNA, 606 bp, Stenotrophomonas maltophilia; identical to SEQ ID NO: 144481

SEQ ID NO: 527062 - DNA, 282 bp, Stenotrophomonas maltophilia
atgaaactcagtcagttggaggcggggatgaccgtttggtcactcttccgaaccaaaatgggcaataccaccattaagacagtaactcttcattctgtcgttattcaggaggtttacgataaccacgttatcgccagctggaaccgcaatgcgccgcgtcggttcggggaaacggcgataagtagctggaaaaaagataagccgctactcatccgcgaccgttccggaagtgtccgtttggcgacgcgggaagaaaaatcccgaatattggaatcaaaatag

SEQ ID NO: 527063 - DNA, 126 bp, Stenotrophomonas maltophilia; identical to SEQ ID NO: 199394

SEQ ID NO: 527064 - DNA, 354 bp, Stenotrophomonas maltophilia
atgaataagtctctggtcagctttgcggaattatctggcgatgctattaatcttgcgcgacagtcggttatcgagatggaaatgaccgctgcccgggaaaagattggaaaggctcgttcgttattccgctcaggtattcatcgtgctgttaatggctatccgctgattcagtcggcggctaaccagatgagcgtcattaaacgactccagagcgacacagaatatctcgatgcctgtattactgagaatctttgtatgttctcgacagagggttatctgtacctgtttatgcaacgccgcttcattaatgaacccgtgtctgaaggccgggaactgaacaatatttccatttaa

SEQ ID NO: 527065 - DNA, 225 bp, Stenotrophomonas maltophilia; identical to SEQ ID NO: 144485

SEQ ID NO: 527066 - DNA, 204 bp, Stenotrophomonas maltophilia; identical to SEQ ID NO: 144486

SEQ ID NO: 527067 - DNA, 492 bp, Stenotrophomonas maltophilia; identical to SEQ ID NO: 199388

SEQ ID NO: 527068 - DNA, 285 bp, Stenotrophomonas maltophilia
atgcagattaataaagtcatgtcttttcttgatattctttctagctggcttgaagacaatattaatatggagtctgagctggtcttcgataatgatgtagacaataccacctcagaagccctgtatcccgcagtggaaaaagctaacgcggtattgagcaaacttgcatctctgtcgtctgatacgattcaggcgacgcgtcagcgtttacaggacgctgtcgacgtcaaagagctgctcttggcaaccaagcatttgatgctagcgccggattgcggagaataa

SEQ ID NO: 527069 - DNA, 546 bp, Stenotrophomonas maltophilia
gtgaaaacgttaattcttttctcaacgcgtgatgggcaaacgcgtgagattgcttcatatctggcttctgaactcaaagagctgggcatttattctgatgtggtgaacctgaatcgcactgaacagattgcctggcaggattacgaccgtgtggtcattggcgcttcaattcgttacggtcatttccatccggcgctggatcgctttgtgaaaaagcatacggcggagctcgctaagctgcccggcgcgttttactcggtcaacctggttgcccgtaaagcagagaagcgtacaccgcagactaacagctatacgcgcaagtttttgctgagctcgccatggcagcccgatatctgttctgtctttgcgggcgcgctgcgttacccgcgttaccgctggtatgaccgctttatgatccgcctgatcatgaagatgacgggcggggaaacggatacgcgtaaagaagtggtttataccgactgggatcaagtggccagttttgcccgtgaaattgcacgtttaacggacgattcgcgggttaaataa

SEQ ID NO: 527070 - DNA, 1452 bp, Stenotrophomonas maltophilia
atgcattttcgtgccattacccgaatcgttggattgctggtcatacttttctccgggacaatgatcattcccggactggtggcgcttatctaccgggacggcgcggggcgtgcatttacgcaaaccttttttgtcgcgctgacgattggctccctgctgtggtggccaaaccgccgtgagaaaggtgaactgaaatcccgggagggttttctgatcgtggtcctgttctggacggtactgggaagcgtgggtgcgctgccgtttatcttctctgaacaaccgaatctcaccgtcacggatgcgttttttgaatcgttctccggattaacgaccaccggggccaccacgcttgtggggctggattcactcccgcatgcaattctcttttaccggcagatgctccagtggttcggcggtatggggatcatcgtgctggcggtggctatcctgccgattctgggcgtcggggggatgcagctttaccgggctgaaatgcctggcccgttgaaagataacaagatgcgcccgcgtattgcggagacggcgaaaaccctttggcttatttatgtcctgctgacggtggcctgcgcgctggcgctgtggtttgccgggatgcctgcgtttgatgccatcgggcacagctttgccactatcgctatcggcgggttctccacccacgatgccagcgttgggtacttcgacagcccgacgatcaataccatcattgccatctttttgctgatctcaggctgtaactacggtctacacttctcgttgcttagcggacggagcctgaaggtgtactggcgcgacccggaattccggatgtttattggcgtccagttgaccctggtgatcatctgtaccctggtactgtggttccacgatgtctataactcggcggtcacgaccctgaaccaggccttcttccaggtggtatcgatggcgacaaccgccggtttcaccacggacagtattgcgcgttggccgctgttcctgccggtgctgctgttgtgctctgcgtttatcggcggctgtgccgggtcgacgggcggcggcctgaaggtgatccgtattctgctgctgttcaagcaggggaaccgtgaacttaaacgtctcgtccacccgaatgcggtttacagcatcaagctgggcaatcgtgcactgccggagcgtatcctcgaagcggtgtggggattcttctccgcttatgcgctggtctttattgtcagtatgctggcgattatcgccacgggcgtggatgatttctctgccttcgcctctgtggtggcaacgttaaacaacctggggccggggctgggtgtcgtggcggataatttcgccagtatgaacccggtggcaaagtggatcttaatcgccaatatgctgtttggtcgtcttgaggtctttacgctgctggtgctgtttaccccaacattctggcgtgagtaa

SEQ ID NO: 527071 - DNA, 615 bp, Stenotrophomonas maltophilia
atggaaagctggctgataccggccgagccggtcacctttgttgaggaaatcaagaaaagccgctttatcacgctgttggcgcatactgacggcgtggaggcggcgaaggcgttcgtcgagtccgtccgcgcgcagcaccccgatgcccgccatcactgtgtggcgtgggtcgcagggccgccagacgactcacagcagctcgggttttctgacgacggtgaaccggcgggtacggccggaaaaccgatgctatcccagttgatgggcagcggcgtgggtgaaatcaccgccgtcgtggtccgctactacgggggcattttgttaggcaccggagggctggttaaagcctacggagggggtgtccagcaggcgcttaatctgctgataacaacccgcaaaacgccacttacggaatatactttgttatgcgattacgcccagctatcgggtatcgaagcactgcttaaacagtttaacggcgtcatcgcacacagtgattatcaggcaatggtgcaattacgcgtggcgcttcctcaggcggaactggctgctttttcagcaaaactcgctgattttagtcgcggttcattgcaattactgccgattgaagaataa

SEQ ID NO: 527072 - DNA, 1332 bp, Stenotrophomonas maltophilia
atggactcactggcttcgctttataaaaatcatatcgttaccctacaggaacgtacccgcgatgtactggcccgcttcaagctggatgccctgctgatccactccggcgagctgatgaatacttttcttgatgaccacgcttatcccttcaaggttaacccgcagtttaaagcctgggtgcctgtcacgcaggttccaaattgctggctgctggtggatggcgtgaacaagccgaaactgtggttctacctgccggtcgattactggcacaacgtggagccgctgccgacctcattctggaccgaagaaattgacgtgattgcgctgccaaaagcagacggcattggcagccagttgccagcggcgcgtgggaacatcggctacattggtccggttcctgagcgtgcgctgggtctggatattccggcagataaactcaacccgaaaggcgtgctggattatctgcactactatcgcgcctacaagaccgactacgaactttactgcatgcgtgaagcgcaaaaaacggcggtgaatggccaccgtgcggcgcacgaagcgttccagtccggtatgagcgagttcgatatcaatcaggcctacctgacggcgaccggccaccgcgataccgacgtgccgtacagcaacatcgtggcgctgaatgaacatgcctcggttctgcactacaccaaactggatcatcaggttccggctgagatgcgcagcttcctgctggacgcgggggctgagtacaatggctatgcggcagacctgacccgtacctgggcggcgaatgcggatactgattttgcgcaattgatcaaagacgtgaacgacgaacagctggcgctgattggcaccatgaaggccggaaccagctatgtggattatcacatccagttccatcagcgcatcgctaaactgctgcgtaagcatcagattgtcaaagacatgagcgaagaggcgatggttgagaacgatctgaccgggccatttatgccgcacggtatcggccacccgctgggtttacaggttcatgacgtcgctggctttatgcaggatgataccggtacgcacctggcggcaccgtctaaatatccttatctgcgctgcacccgcgttctggcgccgcgtatggtattgaccatcgagccgggtatctactttattgaatccctgctggcgccgtggcgcgaagggcagttcagcaagcacttcaactgggagaaaattgaagcgctgaagccgtatggcggcattcgtatcgaagataacgtggttattcacgagaacagcatcgagaacatgacgcgagatctgaagctggcctga

SEQ ID NO: 527073 - DNA, 486 bp, Stenotrophomonas maltophilia; identical to SEQ ID NO: 95527

SEQ ID NO: 527074 - DNA, 210 bp, Stenotrophomonas maltophilia; identical to SEQ ID NO: 119697

SEQ ID NO: 527075 - DNA, 228 bp, Stenotrophomonas maltophilia; identical to SEQ ID NO: 95528

SEQ ID NO: 527076 - DNA, 234 bp, Stenotrophomonas maltophilia; identical to SEQ ID NO: 95529

SEQ ID NO: 527077 - DNA, 345 bp, Stenotrophomonas maltophilia; identical to SEQ ID NO: 95526

SEQ ID NO: 527078 - DNA, 390 bp, Stenotrophomonas maltophilia; identical to SEQ ID NO: 152332

SEQ ID NO: 527079 - DNA, 393 bp, Stenotrophomonas maltophilia; identical to SEQ ID NO: 118426

SEQ ID NO: 527080 - DNA, 534 bp, Stenotrophomonas maltophilia
atgtctcgtgttgctaaagcaccggtcgttattcctgccggcgttgatgtcaaaatcgacggtcaggttattacgatcaaaggtaaaaacggcgagctgactcgtaccctcaacaaagctgttgaagttaaacatgcagataacgctctgaccttcggtccacgtgatggtttcgtggatggatgggctcaggctggtaccgcgcgtgccctgctgaactcaatggttgttggtgttaccgaaggcttcactaaaaagcttcagctggttggtgtaggttatcgtgcagctatcaaagggaatgcagtaggcctgtctctgggcttctcacaccctgttgagcatccgctgccggccggaatcactgcagaatgcccgactcagactgaaatcgtgctgaaaggcgctgataaacagctgatcggtcaggttgcagcagatctgcgcgcctaccgtcgtcctgagccttataaaggcaagggtgttcgttacgccgacgaagtcgtgcgtaccaaagaggctaagaagaagtaa

SEQ ID NO: 527081 - DNA, 354 bp, Stenotrophomonas maltophilia
atggataagaaatctgctcgtatccgtcgtgcgacccgcgcacgccgcaagctcaaagagctgggtgcaactcgcctggtggtacatcgtaccccgcgtcatatttacgcacaggtaattgcaccgaacggttctgaagttctggtagctgcttctactgtagaaaaagctatctcagaacaattgaagtataccggtaacaaagacgccgctgcagctgtaggtaaagctgttgcagaacgcgctctggaaaaaggcatcagcaatgtttcctttgaccgttccgggttccaatatcatggtcgtgtccaggcactggcagatgctgcccgtgaagctggccttcagttctaa

SEQ ID NO: 527082 - DNA, 501 bp, Stenotrophomonas maltophilia; identical to SEQ ID NO: 118429

SEQ ID NO: 527083 - DNA, 180 bp, Stenotrophomonas maltophilia; identical to SEQ ID NO: 118430

SEQ ID NO: 527084 - DNA, 435 bp, Stenotrophomonas maltophilia
atgcgtttaaatactctgtctccggccgaaggctctaaaaaggcgggtaaacgcctgggtcgtggtatcggttctggcctcggcaaaaccggtggtcgtggtcacaaaggtcagaactctcgttctggcggtggcgtacgtcgcggtttcgagggtggccagatgccactgtaccgtcgtctgccgaagttcggcttcacctctcgcaaagcagcgattacagcggaaatccgtctgtctgacctggcgaaagttgaaggcggcgttgtagacctgaatacgctgaaagcagctaacattatcggcatccagatcgagttcgcgaaagtgatcctgtctggtgaagtttctactccggtaactgttcgtggcctgcgtgttactaaaggtgctcgtgctgctatcgaagctgctggcggtaaaattgaggaataa

SEQ ID NO: 527085 - DNA, 1350 bp, Stenotrophomonas maltophilia
  misc_feature (1053)..(1062): n is a, c, g, or t
atggctaagcaaccgggattagattttcaaagtgccaaaggtggatttggcgagctgaaacgcagactgctgtttgtaatcggcgcgctgattgtgttccgtattggctcttttattccgatccctggtattgatgccgctgtacttgccaaactgcttgagcaacagcgaggcaccatcattgaaatgttcaacatgttctctggtggtgctctcagccgtgcttctattttcgcactgggtattatgccgtacatttcggcatcgattattatccaactgctgacggtcgttcatccggccctggcagagttgaagaaagaaggggagtctggacgtcgtaagattagccagtacacccgttacggcactctggtgctggcaatattccagtcgatcggtattgctaccggtcttccgaatatgcctggtatgcagggcctggtattaaacccaggctttgcattctatttcaccgctgttgtaagtctggtcacagggaccatgttcctgatgtggctcggcgaacagattactgaacgaggtatcggtaacggtatctcaatcattatcttcgccggtatcgttgcgggtctcccgccggccatcgcccatactatcgagcaagcgcgtcaaggcgacctgcacttcctcctgttgctgttggttgcagtattagtatttgcagtgacgttctttgttgtcttcgttgaacgtggtcaacgccgcattgtggtgaactacgctaaacgtcagcagggtcgtcgtgtctatgctgcacagagcacacatttaccgctgaaagtgaatatggcgggggttatcccggctatcttcgcttccagtattattctgttcccggcaaccatcgcgtcatggttcgggggcggtactggttggaactggctgacaacaatttcgctgtatttgcagcctgggcaaccactttatgtgttactctatgcgtctgcgatcatcttcttctgtttcttctacacggcgttggtcttcaacccgcgtgaaacagcagataacctgaagaagtccggtgcnnnnnnnnnntccggtgcatttgtaccaggaattcgtccgggagagcaaacggcgaagtatatcgataaagtaatgactcgcctgactttggttggtgcgctttatattacttttatctgcctgatcccggagttcatgcgtgatgcaatgaaagtaccgttctacttcggtgggacctcactgcttatcgttgttgtcgtgattatggactttatggctcaagtgcaaactctgatgatgtccagtcagtatgagtctgcattgaagaaggcgaacctgaaaggctacggccgctaa

SEQ ID NO: 527086 - DNA, 192 bp, Stenotrophomonas maltophilia
atgacgaaacaacagaaaacagcgctgaacatggctaaattcatccagaatcaatctctgctcctgctggagaagcttaacgagcttgatctcgatgctgaggccgacctttgtgagaaactccacgatgatgcggagcatcttttccgtacactgtcctcgagactggatgaattactggatggtaactga

SEQ ID NO: 527087 - DNA, 192 bp, Stenotrophomonas maltophilia
atgaacaaacaacaaaagacagccgttaacatggctaaattcatccaggctcagtccctgcttcttctggacaggcttaatgacctggatctggatcatgaggctgatttctgcgagaaactccatgaggatgcggaacgcctttaccgaagcctgtcagcgcgcctgaatgagcagcaggacggtgcgtaa

SEQ ID NO: 527088 - DNA, 651 bp, Stenotrophomonas maltophilia
atgcgttacgtaaagatttccctttcagtagctacttttttattgttttggtatgtctctagctttttcacagggtgttctgatggctggggttcttcatccatagggttgagaggagcgtgttcatatcatggcggcgttagtaagctacctataatcattatctttttgggcctcatcgctagtttttttgttttttttcttttccctgatagtgaaagtgctactagcaaaaaggatactttccctgttgtaaacaaggaaagtaatgagtctattccaaaaataaaaaccaatacgcataacgaaataaaagttaagcgcgaattgaaaatagaaatagagaatttaaacgataagaaattctctaaaatatttatttattctgatggtctttttattaaagagttcaatcctgaaaataaaatgaaggtgagtaccaaaaggattaataaaaataaaatattaaaaataagtaatcttcttcgtgaagggaaggggggggctataaatcccattctcgatgtggaagcaaaagggtatcttgtgcgtttgttcgaaaatcatgcgcatgaaagtaaaacttattttattgatagatcggagaaacaagccttttcggacattaaagaactcatcaatagcgtctaa

SEQ ID NO: 527089 - DNA, 936 bp, Stenotrophomonas maltophilia; identical to SEQ ID NO: 234677

SEQ ID NO: 527090 - DNA, 963 bp, Stenotrophomonas maltophilia
atgcctgatagccatcgcgtttacagctacaacgccgttctgatgggctcgcccatcctcctgaaactcttctcccatgacgaagccctcgcgtcccgcgtgtttcgcctgatcaaacagtacgaagatctcctcaccgtcaaccgtgcgcattcgcaggtgatggatgtcaaccatgctgccggtcagcatccggttgtcgtcagtcgcccggtgtttgacctgatccgctgcgcgaaagcggccagcctgcctacagacagtgcgttcaacctggcgataggtccgctggtcaaacgctggaaaattggctttaagggggacgctgtaccgcccgcggacgagatcgccgccttgctgagtatcacggatcctgcgaacgtggtactggatgacgccaacagcagcgtgtttcttacacgccagggaatggagatcgatctgggggctatcgccaaaggttatatcgccgacagggtgcgggattacctgcataaagagggcgccgaactcgggttgatcaaccttggcggcaacgtccagacgttaggctcgccggagggtggctggcgcgtcgggctgaaaaaaccgttcgccggtgacgcgctgattggcgccataacggtagaaaaccggtcggttgtgacgtcaggcacctatgagcgctacttcgagcagaacggcaaacgttatcatcacatacttgacccgcgtaccggctacccgctggataacgaactggacagcgtgacgattatttcgcaagactccctcgacggcgatatctggaccacgctgatctacggcatgggcgtggagcagggctgcgccgcgctgcgttcgcgccccgatattgaagccatttttgtcaccaaaacaaaagaagtggtgatctcctcgatgcaccacttccgttttacccttctggacgacagctaccgaattactggcagtactgtttga

SEQ ID NO: 527091 - DNA, 2781 bp, Stenotrophomonas maltophilia
atgagcactaacgaacgtattttaagccccttcacattaccgaatggtactgaactgaaaaaccgtttgttaatggccccgatgacaacctgtacggggtattacgatggcaccgtgaccagcgagctggtggagtactaccgtgcccgcgctggcagcatcggcaccattatcgttgaatgctgttttgttgacgatctcggccttgcgttcccgggcgcaattggtattgataacgacgaaaaaatcgccggactggcaaaaatcgctgacgccattaagtccaaaggttccaaagcccttctgcaaatttaccacggcggccgtatggtcgacccaaaactgatcggcggccgcacgccggttggcccaagcgcggttgccgcgccgcgtgacggtgccgcgacgccggttgctctgacttcagaagaagtggaaggcatgatcggcaagttcggcgaagccgtacgccgcgcaattcaggccggcttcgatggcgtcgaaatccacggggcgaatacctatctgatccagcagttctactccccgaactctaatcagcgcgacgacgagtggggtggaagccgcgataaccgcgcgaaattcccgctggcggtgctggacattacccacaagatggtgcgccagtatgcggacgacgcgttcatcgttggctaccgtttctcaccggaagagctggaagtccccggcattcgcttcgaagacaccctgtatctgctggaaaaactggccgctcgtggggtggattatctgcacttctcccttggcgccgccctgcgtccttctatcgtcgatactcaggacccgacgccacttatcgaaaaatactgcgccatgcgctctgacacgctggcgcaggtaccggtgatgggcgttggcggcgtggtgaatgccacggatgtgaatgaagcgctggatcacggttacgacctgatagccgttggccgcgccaccatcgcctatccagactggaccgatcgcatcgcggcgggcgaaagcctggagctgtttatggacagtacccgacgcgaagaactgagcatcccggaaccgctgtggcgcttctcgctggtggaagcgatgatccgcgacatgagcatgggcgaatctaaattcaaaccgggcacctttattgaaaaagtgcaggacgatgctaacgaactggtgattaacgtcagcctcgaaaccgaccgcatcgccgatatcgaactggcctccggcccgagtgaagacgtcgagtttgtcaccagcttcgaagagatccgtacccgtattctggatgccaataccccgcacgtggatgctatcaccggcgcaaccagccagagcgaggcggtgaaaaaagcggtctcgaaggcgatgctgaaatccagcaaagcgctggcggcagaagagggcgctgacccgaatgagactaaaagcgtggacgtggtggtggtcggcagcggcggtgccggtctggcggcggcgattcaggcgcacgacgaaggcgcgagcgtgctgatcgttgagaaaatgccgactattggcgggaacaccattaaagcctctgccgggatgaacgcggctgagacccgcttccagcgcgtgaagggcattcaggacagcaaagagctgttctaccaggaaagcctgaaaggcggtggcaataagaacaaccctgaactgctgcgtcgctttgtcgagaacgcgccgcaggccatcgaatggctggcaacgcgcggcattatgctgaacgacatcaccaccaccggcgggatgagcatcgaccgtacgcaccgtccgaaagacggttccgcggtgggcggatatctgattagcggcctggtgcgcaatgtcaacaaacgcaacatcgaggtgatgctggatacctccgtgagcgacatcatcttcgaaaacggcgaagtgaccggcgtgcgtctgaccaccgaagagaacgaaaccctcaccgtggcaaccaaaagcgtaattgtcgcgacgggcggcttcagcgccaacagccagatggtggtgaaataccgtccggacctggaagggttcgtgacgactaaccacaaaggcgcaaccggcggcggtatcgcgctgctggagcgtattggcgcaggcaccgtcgatatgggcgaaatccagatccacccaaccgttgagcagaaaacgtcgtacctgatttccgaatccatccgcggcggcggggcgattctggtaaaccagcagggcaaccgcttctataacgaaatgtcgacccgcgacaaagtttcggcgcaaatcatcgcgctgccggagaaatacgcttacatcgtctttgacgagcatgttcgcgccaaaaacaaagccgcggatgagtacatcgcgaaagggtttgtcaccagcgccagctcgccaaaagccctggcggaagcgctggggatggatcaccaccagttcctggcaacgctggaacgctacaacggctttgtggaaaaacagcatgacgatgattttggccgcaccaccgcgctgcgtgcgcctatcaacgaagggccgttctatgccattcagattgcgccgggcgtgcaccacaccatgggcggtgtgaccatcaatacagaaacctgcgtgctggacagtaaccacaacgtattgccgggagcctttgctgcgggtgaggttgtcgggggtatccacggcggtaaccgcatcggtggtaatgcggtggcagatatcattatttttggtacgcttgccggacatcaggcggctatgcgttcgaaaacacggtaa

SEQ ID NO: 527092 - DNA, 588 bp, Stenotrophomonas maltophilia
atggctgcggataattctgcacgggcagtattcatcagaggactgctttttttagggatgatgctttatcttatttatagtctgggcttccagaatactgacgatctaaagcaacaaatcactcaggaggtgaacgccagtcgtagcctcatttctaatgaccggtggttgtcggttattgcaaatagtgaagctactttgtcgactctgattaatgactataagctgatcgaatatctgaatacgatactgatcccggaaacgacgaaacctgcgcgtgggctgaattacgttgcagagaagatgtcatcggtaaactacactgtggcaaagaatctccccttgctcatttatcagtccattttccgctggaatctgatactcgacgttttcggtaatgtaaccgttcagttttacaggatctggttcagagccttctggataattggtgcattaacctttgtttacctctcaatgcctaatatgtctctttttaacaatatcgctcaactgttcccccctgtcgcattgctgatattgggaattgcactcaaccgcttgtggtctaactttcaaaaacttatgtaa

SEQ ID NO: 527093 - DNA, 1182 bp, Stenotrophomonas maltophilia
atgtttaaccgtaaaaataagaagtcacctgccaatatcaaagaatcgcttgatgagaacgctgaccgtttttataagatgttccgaatccataccacctcaaaagtggttatttcccttctggcattagcagcagcaggggtttcggcctttaatatttacgataagtatcaggaatcagaaggacgaatggatcatattgccgtcgtgcgcatatcgggagaaatgggcaccgggtcagaggccggtgacggttctgtgatagccgcagcactggcaaaagcgtacaacaacccgcatgccaaagctgtcattatcgaggcggagtcaggtggtggcggaccttcagacgcgattattatttatcgccagattaatgcacttcgaagccaccagcagaagattgaacgtatttcacatgcggaatccgcaagcaagacccgtaatacgggtgataccagtgcttcacgctcgcaggacgatatcaatgccgaacaatcgaaacgcaataccctggaggtcctctccgccgggagtggccgtttcattgccgatatggaaaccagctataagcctattatcgttagcgtcaaaggcatttgtgcttcagcgtgctactacgccgtgtcccctgctgacgccatttatgcagatagcagcgctctgaccggctcgatcggcgtacgaatggatcactggaacctgtcccgcgtcatggatacggtcggtgttaaaaatgagccgctcacagcaggggaatttaaagctgcactcgacccttatcatccgctttccgaggccacccgggattttatgcagaagcaaatcctggattccatgcatgaaaaatttatttcggacgttgagcaaggccggggttacaaactaattagccgcccggaggcaaatgctgtcgctctgtattccggccgggtatggacaacgcagcaagcaatccagtacggtctcatcgacggtgacctgacaccagtcgaggtccgttcgcgtctgtctcaaatgtattcgaccactacattcaaaacgtacaacgagccgcaacgatcgcttcgctccgcgctcggtatgttaatgagcctgtcaaccaacatcgaaacgctggcgggcacaacctcccggttacttgattctgttcaggccaccagctatccgacggtgaaataa

SEQ ID NO: 527094 - DNA, 714 bp, Stenotrophomonas maltophilia; identical to SEQ ID NO: 144459

SEQ ID NO: 527095 - DNA, 360 bp, Stenotrophomonas maltophilia; identical to SEQ ID NO: 144460

SEQ ID NO: 527096 - DNA, 315 bp, Stenotrophomonas maltophilia; identical to SEQ ID NO: 144461

SEQ ID NO: 527097 - DNA, 852 bp, Stenotrophomonas maltophilia
atgaaattattcgataccgataactacagacttattctctggcgtaaatttctgccgtggctgatccagaacggtgcgcaaaaaaacaacccgcatgactattttctggtgtacttaaaagatgccgacaatacgcgttatattctgatgaagcacgaaagcagcaacgttgtgctctgcccgatgcataaaagcgaagatgtcagtatgagcgtggaagatatcagcgaaatgcaggctgaaatcattcactataagcgcaatgggtttcaggcttacaaaggcattatcccgtttgcctttgaccattatacgaaaatcatcaccttaaaaacggcccttgctcgtctgaaagggcgctgtatttctggcctgaaatctgattcagaaaccatcagccgggaccgttacaacttgctcaggctgctggtgaccgactacgtcaaccagcgcccttcgcgcgtttcgtctggtttcgcccagcgggaagtgatcgccatgctttacggcacactttggtataaacatatcaaaaatgagtcgtttagcagaaaaatcgcgctcttacttgagtcgctcgtgatcacgggcgatctcagcgaagagggtaaggtgtactacgtgcagggccaggctattaccaccatggtcgagtatgaaaaagaggaccagcgggtaacgcatcagcaaaaaatgcagaaaaaaattacgcgttttatgtttgcgataacgctatctacgctgctgattattctggttctgctgtcgatggcaggggtcgtcgacctcgccgctgtctggcagaaaatactacagattaagcctcttagatttttaatgaattttatctaa

SEQ ID NO: 527098 - DNA, 1002 bp, Stenotrophomonas maltophilia
atgtcttacgctattcacaaccataatctggcttttaacgacagcgccatcgcgcaatatatgaataccgattttatcgttattgatatttcattatgcgtagctctggcacgcgagcagttctttgaaaaattaaaagatgatgatattccgtcacatatttttatcgaagacaacggtcgcctcgcgggtttgattgccgtacgtaaattattgcaggccacggataccgtacagcccgttaaggggctgatgatatcggattttatccagcttaaaccggaagatgagcgggctgatgtcgccgggttgctggcgcacgcaggtgcggatgtcgtaccggtggtgacccacggcaagctggtgggctgccttaccgagcgtgaaatcgcccatctgctggaagatgacgttactgaagatgcccagcttcagggggcaacgctgccgctggagaagccctatctggaaaccagcgcctttagcctgtggaagaaacgctccgtctggctgctgctgctgtttgtcgcggaagcgtataccagctcggtgatccagcattttgaagaggcgctggaatccgccattgcgctggcgttctttattccgctgctgattggcaccggcggaaacagcgggacgcagattacctcgacgctggtgcgcgccatggcgctgggtgaagtccaccttcgcgacgtgggtcgcgtgctgcgcaaagagatgagcacctcgttaatgattgccgccacgctaggcctggcgggctgcgttcgtgcctggatgatgggcattgggatggaaatcacgcttatcgtcagcctgacgctggtctgcattacgctgtggagcgccattgtctcatcggtgatcccgatggttttgaaacgctgcaaaatcgacccggcggtcgtttccgcgccgtttatcgccacgctgatcgacggtaccgggctcattatctacttcaaaatcgcacagtatacgcttgggctggaataa

SEQ ID NO: 527099 - DNA, 501 bp, Stenotrophomonas maltophilia
atggcatggctggacacgctgctggatcattttgcgcattatccaacgcatctcttcgcgttgctcgttgttatggcactgagtaaatcaacggtactgatctcttccgtgctcccgcccgcatcggtcatgctgctggcggggattgccgtcagccagtcgagtatgcatccggcgctgacgtggctggcggtggtgatgggcgctacggcaggatcggtgctgaattaccatatcggccagctgatggggcatacccggcgagtgtcacgcttcacggcaaaacatgccgggaagtttttgcgggtacagcaccagctgcataaaaatggcgtgctggtgttgttcacctcgcgtttcctggcggtactgcgctatatcgtgccgctggcggcgggcatgctcaggctgagcgcgataaaggtttacgccatcagcctgctttcagcctgcgcatgggcggcgctgtatgtcggcatcgtcaccggcatcagcctctga

SEQ ID NO: 527100 - DNA, 402 bp, Stenotrophomonas maltophilia
atgatgcacaggcacatcgcaccccgggaacgcgccggtgataaagaactgcgcggtcgccacggtgcgctggaggctgttggcgtaggcatagacggtatccgcttgcgggcattcacccgtcttcaccatcccctgctctgccagccactcgcgtatatagtgacccatatacacttccagtacgccccctttggtggtgagctgtccacccgggacgtcccactccggccactgcttcggcgtggactgctccagtacgctgccgttattggcgagcggtgcacgcaggttgtggcggctcatgatgagtacctgttccagctgatagccgtccggtgtgtcctgcgcctgtgcgtcaaaggtcacggcaagggtacctgccacggcaactgcgagtag

SEQ ID NO: 527101 - DNA, 498 bp, Stenotrophomonas maltophilia
atgaacagtcttttaacgctggcgaaggacttagagcagaaatcgaaagcgcagcagcagagtaccggcgagatgctgaaagccgcattcagcgagcacgagcagtctgtcagagcggaactgagcgaaagcgagaagagaatcagcgccgccatcctcgaccacgaccggaagctgtcctcagccatgagccagcgcacaaaagggatgctgcgcatggtcagccagacgtggctgaccatcgtcctggtctccgcgctgctgatcgcatcgagcgcgggcattctgtggtggcaggggcagcagatactcgacaactacacgagcatccgggagcagaaagacgcgctggagaagctgaacgcccggacgtggggcgtgaggtatcaggaagacaaccaggggcgctttctggtgctgccggagggcgtgaaagcggacacaaactggacgttcgacaatggcaggaagaatggcatcagactggtacaggagtag

SEQ ID NO: 527102 - DNA, 216 bp, Stenotrophomonas maltophilia
atgacggatctggaaaaacagttattgagcgcattagagcagctacaacaggactactcgaaaaggctggacgagtgggagaacgccttcgcggaatggcggacgatgtctggacttatgcaacgggagaacgcggcgctgagcgagcgcgtcacgggcttgagcaggcaggtgcagagtttgagcgagcagctgcgccggttgtcgaacagttga

SEQ ID NO: 527103 - DNA, 345 bp, Stenotrophomonas maltophilia
ttggcagacaaacgcagcaaaatgctcacgatgtgggtgactgaggatgagcaccggcgtttgctggagcgctgcgagggtaagcaactcgcggcctggatgcggcagacgtgcctggacgaaaagcccgcccgtgccggcaaacttccctccatctcgccggcgctgcttcgccagcttgcgggcatggggaataacctcaaccagattgcccggcaggttaacgccggtggcggtaacgggcacgaccgcgtgcatgtcgtcgccgcgctgatggccatcgatgccggactcgagcggctgaggcacgccgtgctggaaaaggggacagacgatgatcgttaa

SEQ ID NO: 527104 - DNA, 645 bp, Stenotrophomonas maltophilia
atgatcgttaagtttcacccgcgaggacgtggcggtggcgccggtccggtggattatctgctggggaaagatcggcagcgcgacggcgccactgtcctgcaggggaagccggaggaagtccgggagcttatcgacgcctcgccctacgccaaaaagtacacatccggcgttctgtcctttgccgaaaaggatttaccgcccggccagcgcgaaaagctgatggcgagctttgagcgtgttctgatgcccggactcgataaagaccagtacagcgtgctgtgggttgagcaccaggataaggggcggctggagctgaacttcctgatcccgaacacggagctgctcacaggcaagcggctacagccgtattacgaccgcgccgatcgtccgcgcattgatgcctggcagaccatagtgaacggcaggctggggctgcacgacccgaacgggccggaaaaccggcgggcgctggtcacgtcgtccgcgctgccggaggcgaaactggacgctgctcagacgattacacggggattactggccttagcctcgtccggggagctcaaaacccggcaggacgtcactgaggcgctggaaagcgcgggttttgaggggtcggttccggctgagggcgaaatgacaccctaa

SEQ ID NO: 527105 - DNA, 450 bp, Stenotrophomonas maltophilia
  misc_feature (436)..(445): n is a, c, g, or t
atgacagccgagtatgatttagccatcctggatatcatgctgcctgatgtaaacggctgggatatcatccgtatgctgcgcagtgccggaaaggggatgccggtattactgctgacggcccttggcacgattgaacacagggtcaaaggacttgagctgggtgcggacgattatctggtgaagccctttgcgtttgctgaactgctcgcccgggtaagaaccctcctcaggcggggaaacacgatgatcacggaaagccagcttaaagtggctgacctctcggttgatctcgtatccagaaaagtcagccgcgccgggaaccgcattgtgctcaccagtaaagagttcagcttgctggaattcttcattcgccatcagggagaagttcttccccgctccctgattgcctctcaggtctgggacatgaattttgacnnnnnnnnnnattga

SEQ ID NO: 527106 - DNA, 1476 bp, Stenotrophomonas maltophilia
atgcatagcaaaccgtccagacgacctttctcactcgctctgcggctgaccttttttatcagcctgtccacaatactggcgtttatcgccttcacctggtttatgctgcattctgttgaaaagcattttgccgagcaggatgtcagcgatctgcaacaaatcagcaccacactgagccgtatactccagtccccggcagatccggatgaaaaaaaagtaagcaaaataaaggaatcgatcgccagctaccgcaacgttgcccttttgctcctcaatccccggggtgaggtgctgtacagctctgcgcagggggcagcactacgcccggccgtgaattcagccgattttagcgagcacagccgcgcacgggatgtctttctctggacggtggaggatactgcgagagcgatggataccgggtccggaatgaagatggaaacgtaccggattatcgcctcctctggccaggcgacatttcagggcaaacagcagaactatgtcatgctgactggcctctccattaatttccatctccattacctcgatgcgctgaaaaaaaatctgattgcgattgccgtcgtgataagcctgctgattgttctgatcattcgcattgctgtccgtcaggggcacctgccccttcgtaatgtcagcaatgccattaaaaacatcacctccgagaatcttgatgcgcggctggaaccgacacgcgttcccattgagctggagcagctggttatctcgttcaatcatatgattggaaagattgaggatgtttttacccgccaggccaatttctctgccgatatcgcgcacgagatcagaacacccatcaccaatctggtgacgcagactgaaatcgctctgagtcaggatcgaacgcagaaggaacttgaggatgtcctctattccagccttgaagagtataaccggatgaccaaaatggtcagcgacatgctgttcctggcacaggcggacaataatcagctgatacctgacagggttcggtttgacctcagagcagaagtcatgaaagtcttcgagtttttcgaagcctgggccgaagaacgcaatattatgctcaaatttaacgggatgccctgcctggttgagggagatccacaaatgttcagaagagcgatcaataatctgttatccaacgccctgcgttataccccagagggacaggcaatcaccgtctcaataagagagcaggagagtttttttgaccttgtgattgaaaatccggggaaaccaatccctgaagagcatttatcaaggttgtttgaccgtttttatcgggtggatccgtccagacaacgaaaaggagaaggcagcggcatcggccttgcgattgtaaagtcaatcgtggaagcacatcacggaagagtgcgggtggaatcggacgtacgctccacgcgttttatcttatccgtgcccagactggagaaaatgatcccggaaatccaatgctga

SEQ ID NO: 527107 - DNA, 432 bp, Stenotrophomonas maltophilia
atgaaaaatatcgtattagcatctttgctgggctttggtttaattacatcgtcctgggccactgaaaccgtgaatatccatgatcgcgtcaacaatgcacaggctcctgctcaccagatgcagtctgctgcggctcctgtcgggatccaggggactgcacctcgtatggccggtatggaccagcatgaacaggccattattgctcatgaaaccatgacgaacggctcggcggatgcgcaccagaaaatggtggaaagtcatcagaagatgatgggaaataacacagtatccacgaccgtcccgtcaacatcttacacggcgatgaatgagcatgaaagagcagcggttgcccatgaatttatgaataacggtcaatccggcccacatcaggccatggccgaagcgcatcgtcgcatgctcagtgcaggctga

SEQ ID NO: 527108 - DNA, 351 bp, Stenotrophomonas maltophilia
atgaaagccagaaacactttatttgcagtattaatgttatccctgccagcgatttcagcagaacattcggaaatgaaaatgtcagatatgcactcatcggcatcgtcacaggaatatatggctggcatgaaagacatgcatgacaaaatgatggctgccgtaaatgagtccgatcccgataaggcctttgcaaaaggtatgatcgcacaccatgaaggagcaatagcaatggctgagaccgaacttaaatacggaaaagatcccgaaatgagaaagctcgcgcaggacatcattaaagctcaaaaaggtgaaattgagcagatgaataaatggcttgatagtcaaaagtaa

SEQ ID NO: 527109 - DNA, 606 bp, Stenotrophomonas maltophilia; identical to SEQ ID NO: 107131

SEQ ID NO: 527110 - DNA, 2898 bp, Stenotrophomonas maltophilia; identical to SEQ ID NO: 119702

SEQ ID NO: 527111 - DNA, 660 bp, Stenotrophomonas maltophilia
atgggtgtcagctttgcacctgcgaagcgcgctgccgtatggccgcgcccaagccgtgagccgggccgctggcccgcgtgctggccgctcccgccagcgacaggacggcgcaccgccgacttgccgccgctggctttgccagcccgcttgagcaccttggaaacgaagctctggccctggcctttgcctcggttcttcggcgcgccagggcgcacccggaaatcgtcgtcgcggcggtcggtcatggcagcgcccctggcaagctccggcgtctccgggcgtgcgaagcacgcggacatgcctgcattggcgcgggcctcgcgccccacgcggcacggcggcaaagccgctccgtgccgcgccacccccatgtgcagacaggccttcgacgcggcccggtgccgcgtccttttgtcttgccttccgcctttgcccctcgctcccgctccgggcatcggcggcccggcggcgctgctgcaccagcagccagcccgccggcgaacacgccaatggccgcaggccaggcgcgttcgaggcaagacgcctgcacgttggacggctgcgccgaaggcagcgcgaagtgcggtgcgaatgcacccgcactgcacgtgcgatgacaaggcgacgaacagtagaacgacatgcccgatggcacgatga

SEQ ID NO: 527112 - DNA, 507 bp, Stenotrophomonas maltophilia; identical to SEQ ID NO: 144612

SEQ ID NO: 527113 - DNA, 912 bp, Stenotrophomonas maltophilia
atggacattaaaaatgcctgggaaaataaaactgtcagaatctcagtaattggtgctgcgttgattgtattgattatcgttattagtcaatcaattttttccactccggttaaaaaagagaagaaaacccagaaaaaagatatgcaaactgggttcctgattgatgattcacaaatgactaagctgagtaacgaggaaagccagaagacttataacgaaatggtcaggcagaaccgcattgatcagaatgcggcaaaggcagatcgtgataaagctgaaaaggcccagcaagaaagcaaagtacagattgccaaccttgcttcacaagtccagcagctctcgacgcagttgactgacatgcagacctcacgaaacggtaatcgtaatctcgacgcaggtgggtcacgcaaaaacgtcaatgagcaggccccagcaacgccataccagctaaatccaaatgctgcggtgaatggggctagttccggatacgctccgatcacaccgacccgaaatagcccaatgcggactatcacgcagagttcaattaagacaaatggttctgatggtgtcattcaggttatgccgatatccgaaagccggataagagaggggcgtgaggtcgttgctggcggtgacaaagccccgacacgaactattcgcggcgacgggaccgctcctgtagacagtaaagctcggcatgcggcacgtaaagacgaaatgtttctcccagcgacgtcaattatcacaggggtgctaattaatggtctggaagccccaacgagtctgtcgtctaaagctgaacccatgccagtcactatgcgtattaaaaaagacatcatcatgccaaacaatttcacgatggatttgcgggattgtaatttgttgggttcagctgttcaatatcttgtgtga

SEQ ID NO: 527114 - DNA, 591 bp, Stenotrophomonas maltophilia
atgctttcagaagattcagtgcctgaatcgacttataacctgacactggttccactggatgttcctggtgcaatgatttcggtcacaacttctttgagcccgacaatgcaggcgaaacgtgagacatctttggataaacataattatgatgagatgctggcacgatcccagtcagaagagttggcaccatctgaccctcgtcaggatgaccataaacagcggatcattgatttactgactccggttgcgctaggtgaggttccttctggttttagtttacaagaagaccgcttgtcacgtataccgagctcagagcagtccccgtgtaatttcaatatgtattcaaagttagggcaaagacttgtgggatctagggaattgatagatgtcattcttgttaaaaatgacaagccttacggacaagttgtcgctgatcagcaatgtataactgaaggagtaattgcaagtgctttgttcgataaagcatttcttcagcctggagaggaaaccgagctttacattgtgcgggataaattatttaaagagcgccagactcgtgtaaccacacgaccaagcctgattaaaagataa

SEQ ID NO: 527115 - DNA, 444 bp, Stenotrophomonas maltophilia
atgcaaaccagtgaaaaaggcattgccctgatcaagcagttcgaaggctgcaagctcgccgcgtaccaggatagcgtcggcgtctggacaatcggctatggatggactcagcctgtcgacggcaaaccaatccgcgccggaatgacaattaagcaggaaacggcagagcgcctgctgaagaccggactggtcagctacgaaagcgacgtgtcacgactggttaaagttggcctgactcaggggcaattcgacgccctggtgtcgtttacgtataacctcggagcccggtcactgtcgacatcgacccttctgcgaaaactcaacgccggtgattatgctggcgctgccgatgagttcctgcgctggaataaagctggcggtaaagtcctgaagggcctgacccgtcggcgtgaggcggagcgcgctttatttcttgggcaatga

SEQ ID NO: 527116 - DNA, 318 bp, Stenotrophomonas maltophilia; identical to SEQ ID NO: 161605

SEQ ID NO: 527117 - DNA, 243 bp, Stenotrophomonas maltophilia
atgaagaacttccagctttatgttggcggcactaacaacatcacctatcgctacgaaatcaaaaaggtggatgatgcttttagtgttcgaatattcaacgtcataaacaaggtgcacaaagaggttggtagcaagtcgcttcgctttgtgtcagctcatgatgttattgatgagtgcacatcgcattacaggaaacacgctgaaggcttcagaggctttatacgtggcttcatgatgcggtga

SEQ ID NO: 527118 - DNA, 486 bp, Stenotrophomonas maltophilia
atgaaaaagattaaccagagcacgttaaaagagcttctaagttatgacgagaagacgggcgtatttacgtggattaaaaaacgtcagaatgtagtggtaggaagagtggcggggcatatagatagacttggttacgagaggataaccatttcaggaaaaatatatctctcccatcgtttagcatggctttatgttcatggatatttgccggaaaaagagatagatcacataaacagaataagaaatgacaacaggattgccaatctaagagaggcaaccagccaactaaactccctcaatactggcatgtacaaaaacaacacatcaggaagcaagggcatttacttcaacaagaaggccaaaaagtggcaggctcaaattcttatagacggaaagcgcgagtacttaggtctctacgatgatgtaaaaagagcggatatagcatacagaattgctaatcacttcaggcttgcaaaactggattga

SEQ ID NO: 527119 - DNA, 678 bp, Stenotrophomonas maltophilia
atgaacagtcagcaactggaatacgtacgtcagcagctcattgtggcgaccgcagatctgagcggggcgacgaaagggcagctggtagctttcgccgagaacgcacaattcaccgcgacggcgcgcagccggggccggaagaaaatcaccgacccggtcaccggccggaaagttaaccctgacggcccggcgatgagcggcagccagtcgcgctccaagggttcgtctatcgcactggtggggccgattgagttcgtgacagcatcatggcgccgggctgtcctgtcgctggaagaccatcagaaagcatggctgctgtggaactacagcgagaatatccgcttcgagtaccaggtggcgatcactcagtgggcgtgggcagagttccgggagcaactcggcgcgaagaaggtgaccggcaagactatggagcgcctgaagaaactgatatggctggcggcgcaggacgtgaaagcggagctggcggggcgggatgcgtacgaataccaggcgctggcggagttggtgggcgtgactgcaaagaactggtcagagacctttacagaccgctgggttgagatgcgccgcatttttctgcgcttagatagcggagctttattgcaggtaacgcgatcacgttcacaacaaaaggcgacaaatttagaggctcaaaaatga

SEQ ID NO: 527120 - DNA, 951 bp, Stenotrophomonas maltophilia
atgacgacacaacgacttcaacgtgactggcgtatcccaaccgccgggctcgccgtgctggtgttacttatggcaggtttcgcactgcatacgcactggaatgcatttattcagtggtgcctcgccgctcagatcaccctgcaccgttatctggtgatgtatttgctgcaacttaataatcatcagtacagcggtgggctgtggttgttaaccggtgcgtttctttatggtgtactccatgccgttggaccaggacacggcaaatttatcgtcgccacgtatctcagcaccaataaagagagccagctcgcggcgcgcgtcgtaccgtttatcggtagcctgatgcagggcgtcagcgcgatcctctttgtctttatcctggcggttggattgaacctcgcggcaggggatatcagtaccagccgttggtacgtcgagaaaatcagcgccttactgattgccgccttcggtgcgtttatcatttatcaggcgctcagcagcctgcgtccgcgcaaaatggcgattagcgccatcaagccgcatcatcataatgaacactgtggctgcggccatcacggcgtaggggtggatctggctaaaagcgactggaaaacccgtctgggcgtggtgctggccattggcgcacgcccgtgcagcggagcaattatgatcctgatgttctcgaatgcgctcggcattattagctggggaattgctgctgtgatgacaatgtcgctgggcacggcgctgtcgattatggggctgtcgctggcagtacgttacgcgcgtgaacgcacagtagcctggtttagtggcggcacttccctgaactgggtaatgccgatggtcaaaatagccggaggagttgttctgatactgttcgcaactatcctcttcctgacggtgatccccgtcagcgtcagcggcgactatatcgccgcaggatgctaa

SEQ ID NO: 527121 - DNA, 1497 bp, Stenotrophomonas maltophilia
  misc_feature (989)..(998): n is a, c, g, or t
atgcttagaaggaaaaaagtaaaacccatcacgctgcgcgatgtcaccattattgatgatgcgaaactgcgcaaagcgattacggcggcctcgctcggtaatgcgatggagtggttcgattttggtgtctacggctttgttgcctatgcgcttggtaaagtgttcttccccggtgccgatcccagcttgcagatgattgccgcgctgggtacgttctctgttcccttccttattcgccctctcggtggcctgttcttcggcatgctgggtgataaatatggtcgccagaagatcctggctattactattgtcatcatgtcgataagtacattctgtatcggccttattccgtcctatgcgaccattggtatatgggcaccgatcctgctgttgatctgtaagatggcgcagggcttctccgttggcggcgaatataccggtgcatcgatttttgtcgccgagtattctccggaccgaaaacgcggctttatgggcagctggctcgactttggttcgattgccgggtttgtcatgggcgcgggagttgtggttctgatttcaaccgtagtgggtgaagagaacttcctcgactggggctggcgtattccgttcttcctggcgctgccgcttggcatcatcggtctttacctgcgtcacgccctggaagagacgcctgcgttccagcagcacgttgaaaagctggaacagggcgaccgtgaagggttgcaggatggcccgaaagtgtcgttcaaggagattgcgaccaaacactggcgcagcctgctgacctgtatcggtctggtgatttccaccaacgtgacctattacatgctgctgacatacatgccgagctatctgtcgcataacctgcactactcggaagaccacggtgtgctgattattatcgccatcatggtaggcatgctgtttgtgcagccgattatgggcctgctgagcgatcgctttggccgtaagccattcattattcnnnnnnnnnngttcgcgctggcaatcccggcctttattctgattaacagcaatgtgctggggctgattttcgccggtctgctgatgctggcggtgatcctcaactgctttatcggggtgatggcttctacgctaccggcaatgttcccgacgcatattcgctacagtgcgctggcggcagcctttaatatctccgttctgattgcgggcctgacgccgacgcttgctgcttcactggtggagagcacgcagaacctgatgatgcctgcttactatctgatggttattgcggtgattggcctgattaccggtattactatgaaggagacggcgaaccgtccactgaaaggggcaacgcctgcggcgtccgatattcaggaagcgaaggagatcctgcgcgagcactacgataacgtagagcagaagattgaagatattgacgcagagattgaagagcttcagaaaaaacgttctcgcctggttgaccagcatccgcgaattaacgagtga

SEQ ID NO: 527122 - DNA, 450 bp, Stenotrophomonas maltophilia
atgttcgaatcaatactcgtggtatgtaccggaaatgtctgccgttctccgattggagaacggcttttgcgccagcacttgcccgacagacacatcacctcggcgggaatactcggccttgaggggtatccggcggatgagtgcgcccaggacgtggcctggcggcatgggatctccctcgacggtcatgtggcgcgcaggctgacacgcaggctgatgcagggatccgatctcatcctggttatggagccggaacatcttcgcttcattgcagccatggcaccggaaaacagggggaagtcgctgctttttgggcagtggctggagccgcaggatatcccagacccctatcgtaaaagccgtgaagcgtttgaatatgtgttcgggctattgggtaaagccagccaggaatgggcacgtcgtttaggacagaaaggaataaagcattaa

SEQ ID NO: 527123 - DNA, 1131 bp, Stenotrophomonas maltophilia
atgaaaaacacaacagcattatctgtaatattcttagcaataagtcagttggcggggtgcgtaatttctcccggccaaacgttaagttccgcaggcaaaaaaataattgcgccggctgatctcaataatagtttagataaacaaatcgaaatttatccacttacgcccggattaattgagaaactacgtcccgcagcagctaaatctcaggcaaatcctaatcttgatgagcaggtcaaaaactgggaataccgtattggaatcggtgacatcctgacggtcaccgtctgggatcacccggagctgactacgcccgcgggacagtatcgtagcgcaagcgatacgggaaactgggtcaatgccgatggcacgctcttttatccttacgtgggtaaactgcacgtggcgggaaaaacggtttccagagtgcgcgaggagatcaccgcgcggctggataacgtcattgaaagccctcaggtcgacgtcagcgttgccgctttccgttcgcaaaaagcctacgttacgggagaagtggcgaaatctggccagcaggccatcaccaacattccgctgacggttatggatgccgttaatgccgcaggtgggcttactgctgatgcggactggcggaacgtggtgctgactcacaacggtcaggattcccgaatttccctttatgccctgatgcagcatggcgatttaacccagaataagctgctcaaccctggcgacatcttgtttattccccgcaacgatgcgctgaaagtattcgtgatgggcgaagttgttaaacagagcacgctgaagatggatcgcagcggcatgacgttggccgaagcgctcggcaatgccggtggcctgaaccagaatatggctgatgcgacgggtatttttgttatccgctcggtacgcgagtccgggaaaattgcgaatatctatcaactgaatgcaaaagacgcttcggccatggtgctgggcaccgagtttcagcttgagccttacgacattgtctatgtcaccactgctccactctcccgctggaatcgcgtaataacacagcttgttccgacaatcagcggggtgcatgacctcaccgaaacggttcgttatatcagatcgtggccgcaataa

SEQ ID NO: 527124 - DNA, 333 bp, Stenotrophomonas maltophilia
atggctaagcgtaaattggtgcttctgggtgtattactgtctctggcgggctccgcattcgcagccccgcaaacggccgccgcgccttccggcattaaggcttatgaagagcaggagttcatcgccgacttcaccaaatttaagattggcgataccgcgcccgcgcagtatcagacgccagagtacaccatcaaacagtaccagctacgtaaccttcccgcgcccgatgccggtacgcactggacctacatgggtgaaaattacgttctgattggcgatgctgatggcaaaatctacaaagcctataacggagatattttctatcaccgctga

SEQ ID NO: 527125 - DNA, 423 bp, Stenotrophomonas maltophilia
atgatccggccctggcaggaggacgaccggccatttctgcgcacgctgtacctgcatgcacgacgcgtggcctggccatggctggacaattctgaatggcagcttgaggattttgacgccgcaacgcgtgacgagcagatctgggttgcgattcacgacggtcaccgggtagggtttgcctccgtctgggaaaatgataactttttgcacaatctgtttgtcgacccgcagtatcagcgtctgggagttggccgtttgttactggaacaagtacagaggacgtttaccagtacaggcgccctgaagtgtctggtgaagaatgagcgagcggttgcgttttaccagcgccacggctggcacattgaggcgacgggggattctccggaaggagagtattatttgatgcactatcggcttgggtaa

SEQ ID NO: 527126 - DNA, 531 bp, Stenotrophomonas maltophilia
atgcgcacaaaatatacgggtctgcaaatcagcattcactggctggtttttctgttagtgattatggcctattgcgccatggaattcagaggctggttcccgcgaaccgatcgtccgcttattaatatgatccacgtttcctgcgggatcagcatcctggtgctgatggtggcgcgcctgcttatccgcctgaaattcccggctccgcccattcaaccgaaaccaaaagcgatgatcaccgggctgtcccatctggggcatctggttatctacctgctgtttattgcgctgccgctgatcggcatggtgatgatgtataaccggggaaatgactggtttgcgtttggcctgacgatgccgcatgcggcggaggggaattttgacctggtggatacgctaaaagcgtggcacgtaacgctggcgaatctggggtattttgtgattggtttgcacgcctttgccgcgttgatgcatcactatttctggaaagacaatacgctgctgcgcatgatgccgaaaaagcgtcagtga

SEQ ID NO: 527127 - DNA, 1068 bp, Stenotrophomonas maltophilia
atgaataaagtgaagacaatgaatattgcgctgatcgggtatggttttgtgggtaagacgtttcatgccccgctgatccagtccgtcgacggcctgaagctggcggtggtctcatcccgggatgaagaaaaggtcaaacgcgatctgccgaatgtcctcgttgttgccacccctgaagaggctattcagcacccggatatcgacctggtggttatcgcctcccctaacgcgacccatgcgccgctggccaccctggcgctcaacgccggcaagcacgtagtggtggataagccgtttacgctcaatatgcaggaagcgcgagacctgattgcgcttgcgcaagaaaaacaacgcctgctctctgtcttccataaccgccgctgggacagcgattttctcggcattaagcaggtgattgagcaaggcagtatcggaaaggtaaaacactttgaatcgcatatcgatcgtttccgcccggaggttcgcgtgcgctggagagagcaaaatgttcccggcagtggcctgtggttcgacttaggcccgcacatgattgaccagacgctacagctttttggtctgccgctgtcggtacagggcaacatcgccaccctgcgtgacggtgcggaaattaacgactgggcgcacgtggtgctgaactatcctgaacacaaagtggtcctccattgcagcatgctggtggcaggcggcgttgcccgctttaccgtccacggcgataaggccagcgtggtgaaagcgcgcatcgatcagcaggaagcccagcttctggcaggcgtcattccgggtagcgaaagctggggggaggacagcgacgctatggtgctgtttaatgcccagggtgacgccagcgctatccctgcgccaaaaggcgaccagcggcagtactatataaacgtgcgcgatgccctgaacggcaagattgacaatccggtccatccggtggaagccctggcggtgatggcggtgctggaagcggcggtaaaatcttcagaaacgggtacaactcaggaactggatttaacggcgcaggagcgcgcgcaactgcaataa

SEQ ID NO: 527128 - DNA, 744 bp, Stenotrophomonas maltophilia
atgcataaaactgccagacagaaatatgtacttgaaattattactgaacaaggccaggccagcatcactgagctggcagaaaagttgcaggtttcggcggataccatccgtcgcgatctgaccgatctggaaaaacagggactggcgcaaaaaaaccatggcggcgccatcgcgctgaatctctcgacgatgaaccgagttagcaggaataccttactgcctgaaatcaagcagcggctgggtaaacaggttgcgcagtgcgtacctgcgggctcgacgctttttctggacgccggaagcacacttctggccgttgcctctttcctgcagggaccgctgaccatcatcaccccttctcttgatatcgcccagcaggttagcgatcgggaagatatcgatctgatcctgcttggtggaaagtgggatcagaaacagcgcctgtttgccggaagcgccaccctttcgctgctctctcgctaccgggcggatatcgccatccttggcgcatgcgccattcatgccgagctcggattgagcgccagtcaggaggcggatgccgaggtgaagcgtgccatgctggccgcaagccaggcgcactgggtagtcgccgaccatcttaaactcaaccagtgcgaaccttatctggtttcagggttatcccagattcatcaactgtttttagatcgtccctgggcagagctcggggaccatagcgccgtgcaggttaccgtttgcgcgcattaa

SEQ ID NO: 527129 - DNA, 660 bp, Stenotrophomonas maltophilia
atgcagtgcttgcatcggacaaggcagggatttatccaggaaagaacggcaacgtataaccgtcttcggggtctggtatccgaatttgggattatcgccccacaaagcactgatgctctacgtcatattgtttctgaccagagggaaactctgccagtacaggttaggctttacattgatgatctattggctcatataactaatattgaagaaaaaatcgccgaatatgacagggtattatctcgtgtggccaaaacagaccatcgcagccagcagttaatggaactgaaaggtattggccccacaacagcgagcgcactggtcgccagtattggcaacgcacatgattttaaaaacgggcgccaactggcagcctggctggggttaacgccatcgcaatacagcagtggtggaaaatcaaagcttggcagaataacgaaagccggtgattcatatctgagaacgctgctggtacagggagctcgttctgtaatggtaggggcagagaatagaacggactcgtttagccgttgggtctgctcgttgattggcaggcggggatactggcgtgctgtcgttgcaatcgctgccaagaatgcgaggttgtgctgggcatcattacattacggcgatgacttcagactgtattcggcaacatga

SEQ ID NO: 527130 - DNA, 189 bp, Stenotrophomonas maltophilia; identical to SEQ ID NO: 159040

SEQ ID NO: 527131 - DNA, 1392 bp, Stenotrophomonas maltophilia; identical to SEQ ID NO: 159039

SEQ ID NO: 527132 - DNA, 1359 bp, Stenotrophomonas maltophilia
atgttggtgaccatgtcagataaagaaattcatcgcttgccagtgatacaggctgtttgtgaaaagcgcctacgccgtcgcgatgcagcgtcacagcttggcatctcagaacgtcaggcgcaacggcttatcaatcgttaccgggtttctggtgctgaaggacttgtcagccgcaaacgcggtcaacccagcaaccgtcggttgaccgaatctctcaaactacgcgtactcacgctaatacgtgaaaactacagcgactttggacccacactggccgcagaaaaactcagagagcgtcatgatatccggctttcaatcgagactgtccgcaactggatgacgtcggacggactctgggttccgcatgctcgtcgcaagtcacgggtttatcaacctcgacatcggcgtgattgcctgggtgaacttatccagatcgacggctcccaccatgactggtttgaaggccgtgcgccaaaatgctgccttctggtatttatcgatgatgccaccggccgcctgatgcatttgcggttcagcgagtcagaaacagcctttgactacatgctggcaacccgggaatacattgagcagcatgggaaaccggtatcgctgtacagtgacaaacacgcaatatttcgcgtcagtggtccggagaaccgcaataccaccgttacccagttcggacgtgtgctctatgacctggcaatcgagcttatatgtgccaacagctctgaagctaaaggccgcgtggaacgtgcgaatcagacgcttcaggatcgactgatcaaagaaatgcgtctggaaggtattaccggcattgaggctgcaaatgcctggcttgccactttcattgcagactttaaccgccgattctcacgtccggccaggttcccgaaagatttgcatcgtccggtgcaggaaagccccggtgagttaagagacatctttgcctggcatgatgttcgtaccgtgtcgaaatcactgacattccagtacgataagatcctttatctcatggacccaacagaagaaaatagccgtcttgccggtgaaaaaattaaaatactggactatcccgatggcaccctcgccttccactatggacaccggagccttaagtgccaggcatttgataagctggcctgtgtcgaccaggggcagattgtcgataacaaacgtctcgggactgtactcagactggctcaggtaaaacaggatgagcgggaaagcgaaggcaaacgggaacgaagcaaaaaatcgcccagccgtaaggctcaggtgcgcgtccaggaacagctccgggctatcaatcccgttctggcagacccgagcttgtttgtggcaagttcaaagcgatag

SEQ ID NO: 527133 - DNA, 792 bp, Stenotrophomonas maltophilia
atgattaaattcccgactaaaaagcgcgttgatttgtataaaaatgctgtcagttctgagcaattacatctggatctggctgcggctcaggagttcatgttcgatgcctgggaaactgatgacctggacgttgtgctgaaactcatcagaaaagctatcaagaaatccccgctctgtgctgacgcatactcattctactgcgagttatctcaagaacctcctgagtcaaaaatcgggaatctggagacggctttgtacgcagccagcattgctcttggcgaggattttcaggagttcgcaggacgtttctggggatttgtcgaaacacgtccatatatgagagcaaaagcagctttggctgaggccttatgggagtcaggtaatttttatccggctatggctcactgccgcgaaatgctgaagctcaacccgaacgataaccaggggattcgtcatttattagcgaactattaccttgagcttgaaatggtggatgatctggccttgctactggacgattatcctggggatatgcgcccgtttcttcagtatacacgcgccctcctcgcctaccggcagtcatccccagatgccaatgatatcgctaaagctgcgattgattctaatagacacatccccggcttgttatcgaagtgcagattacagcccaagtctaacagtggatatattacgttaggtgaaatggatgaagccatatattacgtgaataataatttaaaatcctggattcgcacccctggtgcaattgaatggattgtcaatggtatttaa

SEQ ID NO: 527134 - DNA, 750 bp, Stenotrophomonas maltophilia; identical to SEQ ID NO: 199545

SEQ ID NO: 527135 - DNA, 411 bp, Stenotrophomonas maltophilia
  misc_feature (63)..(72): n is a, c, g, or t
atgaaatctgtaatactgacaacgttaatgctcgtggcggttggcactcaacccgtctttgcnnnnnnnnnngtctttgcggcccaatgccagttcgggtcctgcaacgcagacattgaggccagcagtgaactgctggtctctgcggctcagacggataaagacgcggttttaaaaaaacttaatgacgcatcatcccccagcgacgccatgtctaagcgggttgaatcgtatctgaataatgacaggctaaaggtgaacaccgacagtacccggaaaggtccgggcaatggaatcgtgaagccgacggatgagctagcgccggtaaggcagctgaaagtcattcgccccgagcttgtacaaaaccccatcacccagccattggttgccttttatgaacgtatggcctga

SEQ ID NO: 527136 - DNA, 423 bp, Stenotrophomonas maltophilia; identical to SEQ ID NO: 158974

SEQ ID NO: 527137 - DNA, 612 bp, Stenotrophomonas maltophilia; identical to SEQ ID NO: 144625

SEQ ID NO: 527138 - DNA, 291 bp, Stenotrophomonas maltophilia
atggcactggtagtcgaaaaactcgatgacggcgacggccgcattatccggtccaatgttgggagtctctttggtctcgaagagagccggtgcgtaagggatgatccgctcaagggaggcgttggtattttggttttcaagagccttacccgcttcaagcagatactgaggattttttaccagataggtagccgctacctttcctacttcatcgttactggggagctcagttttaaaatatttcgacgtgatatacacagagccagccgtcgcaatcaacacagaaattaa

SEQ ID NO: 527139 - DNA, 363 bp, Stenotrophomonas maltophilia
atgatcaaggaacgaatgacgccagaagagttagccctgctgactggctatagccgacagaccatcaataaatgggtacgcaaagagggttggattacatcgccaaaaccaggcgttcagggcggcaaggcgcgtctggtacacgtcaatgaaaaagtgcgcgactttattcgcagcgcacgcagggtaacagagtcgccggaaatgccagaaaaggcgtaccacgaaggctcgcttcacgccctgctcctgacgctggcgaatgaaatgacgccggatgagcaaaagcagatgacatctctgttactgcgggaagggattaccggattgttacaacgcttagggattcgcgaccaacgctaa

SEQ ID NO: 527140 - DNA, 366 bp, Stenotrophomonas maltophilia
atgaccacggaagagctggcggacagtctgggcgtcgcccgacaaaccgttaatcgctggatacgacagaaaggatggaaaacggagggtatcaacggtgtaaaaggcggaagagcgagggtgatatgtattgatgcgcacgttaaggagcacatcattagccttcccgccattcgtaacagtcgggctgtttaccatgtggcagaaagcccttcactctatggcgtggcgacctcatccagcctgcttccacaaattatcgactcgctggaaagcatgaccactgtcgaacaggaacgtttgcacaagctgctcgctcgcgaaggtttgcagggttttctcacgcgtcttggtattgctgaataa

SEQ ID NO: 527141 - DNA, 1416 bp, Stenotrophomonas maltophilia
atgaaaatcaaaactcgcttcgcgccgagcccgacaggctatctgcatgtcggtggtgcacgtactgctctctactcctggcttttcgcacgccacaacaaaggtgagtttgtgctgcgtattgaagacaccgacctggagcgctcaacgccggaagcaattgaagccattatggatgggatgaactggctgaatctggagtgggacgaaggcccatacttccagaccaaacgttttgaccgctataacgccgtaattgacgagatgctggtcgcaggcacggcctataagtgttactgctcaagggagcgtctggatgcgctgcgcgaagagcaaatggcaaaaggcgaaaaaccgcgttatgacggtcgttgccgtcatgaccacagcgagcatgctgctgatgagccttgcgtagtgcgttttgctaacccgcaggatggctctgttatctttgatgaccagatccgtggcccgatcgaattcagcaaccaggagctggatgacctcatcattcgtcgtactgacggctcgccaacctataacttctgcgtggttgtggacgactgggatatggaaatcactcacgtgatccgtggtgaagaccatatcaataacaccccgcgtcagatcaacattctgaaagcgctgaacgcgcctgtaccggtgtatgcgcacgtatcgatgatcaacggtgacgacggtaaaaagctgtccaaacgtcatggcgcggtgagcgtgatgcagtaccgtgatgacggctatctgccggaagcgctactgaactatctggtgcgtctgggctgggctcatggtgaccaggagatcttcagccgcgaagagatgatcgagcttttctctctgaactcggtaagcaaatcagccagcgcgttcaacactgacaaactgctgtggctgaaccatcactacatcaataccatgcagccagagtatgtggcgacttatctgcaatggcacattgagcaggcaaacatcgatacccgtacgggccctgaactggcggatctggtgaagctgcttggcgagcgttgcaaaacgctgaaagagatcgccgagagctgccgttacttctatgaagagtttgacgcgttcgacgccgacgcggccaagaaacacctgcgtccggttgcgcgtcagccgctggaagtggtgcgagataaactcgaagccattaccgaatggactgcagaaaatgttcaccacgcgattcaggcaaccgctgatgagttggaaattggcatgggtaaagtcggtatgccgctgcgcgttgcggtgacgggggcaggccagtctccggcgctggacgtgaccgttcatgccattggcaaatcacgtagcgttgcgcgtatcaacaaggcgctgggctttattgctgagcgcgaaagccagcagtaa

SEQ ID NO: 527142 - DNA, 1113 bp, Stenotrophomonas maltophilia
atgacgagggtcatcagccggccgagggaccgcaacagggcgcagacgcaggtcagcttccgctacgatccactggaccgccgcatcagcaatacgcaccgccagatgcctgacggcctgccaaccggtaagctggtcgccacgcggtttgtccgggaacggttacggctgttacaggaaatgtgcggggatgtgctgctgacctacgtctacagcgatcaggacagctacgacccgctggctcgtattgacggcgttgatgccccggaaatcttctggttccactgtcagcccaacggcacgccggagcggatgacggatagcgaagggcaggtgcgctgggaaggggtgaacagcgcctggggcaaactgctgcgggaaagcgagacgcaggtatcaggatattcccagaacctgcggatgcaggggcaatacctgaaccgcgagacagggctgcactacaatctgttccggtattacgacccggactgcggacggtttacgcagcaggacccgatagggctggcgggggggataaatctttaccagtatgcgccgaatgcgctgggatgggtggatccgtgggggttatcgtgcagaaatagctggaatgatttccagagcaaaactcgaggtgcttttgctacaagaggtcatgctgcacgggcctaccgagctactcatggaatttcaaagccagatttccctaatccggcgacatacctcgatgcaggaaaaattagtaggcatttagaactattcaagggaggggttactaagttcgtttggggtattaatcctgaatttagtcatttaggtcctccaggaggccactttgttatgccaaggaccgttgctgatgacttaattagacgttcgggtgggaacattccaaagcttgaaagattgttagggttaaatgcaggtgatctcggagacgctcctttaagagttgatattaataatccgacaggtttaagaatgccaacaggaaatgaacgaggagcaaatgaattttggttgccgggaggatatacttcaggtggtatcccagaggcggccatagatcctactccgctaaatcaattaaagatcacaccgttgaaaaattaa

SEQ ID NO: 527143 - DNA, 198 bp, Stenotrophomonas maltophilia; identical to SEQ ID NO: 125581

SEQ ID NO: 527144 - DNA, 210 bp, Stenotrophomonas maltophilia; identical to SEQ ID NO: 491571

SEQ ID NO: 527145 - DNA, 813 bp, Stenotrophomonas maltophilia; identical to SEQ ID NO: 144495

SEQ ID NO: 527146 - DNA, 1221 bp, Stenotrophomonas maltophilia; identical to SEQ ID NO: 144496

SEQ ID NO: 527147 - DNA, 210 bp, Stenotrophomonas maltophilia; identical to SEQ ID NO: 491571

SEQ ID NO: 527148 - DNA, 711 bp, Stenotrophomonas maltophilia
atgaccaacaagtttacgtcaaaagtgtcttatagcgacgtgctgacagttgtaacgtacaaacagcctaagctaagtattgatgttgcggaaattcttgaaggcgatgatttaccagtctcgttgctggataatgatgagccgattccgcagggtacggctgaagtaatgtggtcggaagataaaattaattgggtcgcgggtgacactacctataccgtgactgccgctgagaagcttccgccaactatctacgcccggatgcgctatctggattcagacgacctggctgaagagtcctcctggaaagagacgtctgcgcggttaacggtcgctaaacccaagcgcctttccgtttcagtgagcagcatttcaaaggtagaggtgggaagtaaagttactttagatggtaaatactccaacccgaacagtcggtaccagaacggaaatgacgtcattgaagaatggactgcccctgacggacagaaaatcagagggcctaagttgtcgatgacgctgacagaggagatgctggataagcaaggctatgcggcatttacatacagtgcatggctcgctgacagcaaggaaagtaccatttccacgcggaaagtatcgattaagtcctgggtgtataagttccctgaaatgaaagtcagtacgaagctaaaatacactatggccccgtcggtgatgctgccaacttactga

SEQ ID NO: 527149 - DNA, 717 bp, Stenotrophomonas maltophilia
gtgagcggaccccagaaggtcggcgatgagtatctgtatatctttgacttaacagacctgacgaatggctcttatgccgccacgttcactatagagaatactagcaagaatacgtctacgtacaatgagcccgaaagcaaactgatgctttctgataaccccacactcatggtacttaaggatggggcagcgctggcaaaacgagcacctgtttatttcttaaatgaaattattgttgccgcattccaggggcaggccggggttgcggatattaaagccgttactatcgataacaaagttgttgaactcaccccaacgaactacaaaggcatttattatctgccggtgggggatgatctagatgtgaatgctgaccacgaaatcacagtcgtggcggaaaacctgtatggcaagattgtgacattcaataccactttcacgtatcaaccgacagggtttgcgcttaaaaacttagaaaaagacgtcaccttgtattctcgcgttcggcaatataccgatctgatgagtcagacagccggtgataaatgcactctctttactacggaagagaacgcgcaggcttatcttgagtggtatggcggcaaatctgatatcactgcctgttaccctcagtggaacaatgtaccggacgggcttgaattttactttaaaggcaggacgccaggacttacggggttcttcaataaaactggctaa

SEQ ID NO: 527150 - DNA, 273 bp, Stenotrophomonas maltophilia; identical to SEQ ID NO: 31728

SEQ ID NO: 527151 - DNA, 1116 bp, Stenotrophomonas maltophilia; identical to SEQ ID NO: 31727

SEQ ID NO: 527152 - DNA, 234 bp, Stenotrophomonas maltophilia
atgacaatgatggatatgagcggacacgatcaggctgcaatgtcccatgaaatgatgcaaaacggcaacgcttctgcccaccaggacatggcggagatgcataaaaaaatgatgaaaggcaaaccaggggccaccaacgaatcagcaacgtcattttcagaaatgaacgagcatgaaaaagccgctgttgtgcccgtccgggagcgttttttttattctttcatttatcattga

SEQ ID NO: 527153 - DNA, 876 bp, Stenotrophomonas maltophilia
atgagcgagaagttacagaaagtgctggcgcgtgccggccacggttcgcgccgtgaaatcgaagccattattgaagcaggtcgcgtgagtgtggacggtaaaatcgccacactcggtgaccgcgttgaaatcgtaccggggctgaagatccgcattgacggccatcttatctccgtgaaagagtccgctgaacagatctgccgcgtgctggcttactacaagccggaaggcgaactgtgtacccgcaacgatccggaaggccgcccgacggtgttcgaccgtctgccaaaactgcgtggcgcccgctggattgccgtagggcgtctggacgtgaatacctgtggcctgctgctgttcaccaccgatggtgaactggcaaaccgcctgatgcacccgagtcgtgaagtggagcgtgaatacgccgttcgtgttttcggccaggttgatgagaacaaactgcgcgatctgtcgcgtggcgttcagctggaagacggcccagcggcgttcaaaaccatcaagtttaccggtggtgaaggcattaaccagtggtacaacgttaccctgacagagggacgtaaccgcgaggtgcgtcgtctgtgggaagcggtcggtgtccaggtaagccgtttgattcgtgtccgctatggcgacatcctgctgccgaaaggcctgccacgtggcggctataccgagctggatctgacgcaaactaactacctgcgcgatctggttagcctgacgccagaaaccacatcgaaagtggcggtagagaaagatcgtcgtcgtatgaaggcgaaccagatccgccgtgcggttaaacgtcacagtcaggttagcagcaatcgccgctctggcagccgtaataacaacggttaa

SEQ ID NO: 527154 - DNA, 591 bp, Stenotrophomonas maltophilia
atgagtgaagaccgtcatcagcagcgccagcagcgtctgaaagaacaggttgatgcacgcgtggcggccgctcaggacgagcgcgggatcctcatcgtgttcaccggcaacggcaaaggcaaaaccaccgccgcatttgggaccgccacccgcgcagtcgggcacggtcagaaagtgggcgtgatccagtttatcaagggtgaatggcccaacggcgagcgtaatctgctcgaaccgcatggcgttgagtttcaggtgatggcgaccggttttacctgggatacccagaaccgggaaacagataccgcagcctgcctcgccgtctgggagcatgccaaaagaatgctctctgacccgtcgctgaacatggtgttgctggatgagatcacgtatatggtggcctatgactacctgccgctggaagccgtgctggaggccctcaggaaccgccctgcacaccagacggcgatcgtcacggggcgcgggtgtcatcgggacattctggagctggccgataccatcagcgagctgcgtccggttaagcatgcgttcgatgcgggtatcaaagcgcaaatagggattgattactga

SEQ ID NO: 527155 - DNA, 438 bp, Stenotrophomonas maltophilia
atggatgaacaggatccggagatttggcagcaggtgatgcaggttaacgtcaatgggacgtttttcctgacccaggccttgcttcctttattacttaactcagattccggttcgctggtgtttacctcctccagcgtggggcgtcagggtcgtgcgaactggggggcttacgccgcctcaaaatttgccacggaaggaatgatgcaggtgctggccgaagagtatcaaaaccgccatctgcgggttaactgtattaaccctggcggtacgcgcactaaaatgcgtgccagcgcgttcccgacagaagatccgcaaaagcttaaaaccccggccgatattatgcctctttacctgtggctaatgggtgacgacagccgtcgtaaaaccggaatgacattcgatgctcagccaggccgcaaaccggggatatcgcaatga

SEQ ID NO: 527156 - DNA, 393 bp, Stenotrophomonas maltophilia
atgcctatttcatgcggtaagcctgcaaataaagatggtattaaaattttggaggcgaaattcaaaatcagtttgcctgaagattataaagaattcctcaggttgaaaaatggcaattttttaagtgaacttgatttcattgatgataagttaattatttgcgatgatcctggcggtaacttttacctaatattaaatggcagtgaaaaccaaggtgtgtattattgggacaaaacacatctacatgcagaggatgatctccaagagtatgagctcgctgagcaaaatgagtgcggcaatatctataaaattactaatagctttactgaatttcacaagagaatttgtaagacttcccttgatgcaggaatgaatgtaactgttgatttatga

SEQ ID NO: 527157 - DNA, 1323 bp, Stenotrophomonas maltophilia
gtgctgagcgagtccggcattaacggcgaggtgggctatgaatgggatgcgatgagcaacctgaccggcctgacgctgcccggcgggcaaaagctggcctggctgcactacggctccggccacgtcagcgccatccgcttcgggcagcagctggtgaccgagttcacccgcgaccgcctgcatcgcgaagtgcgccgcacccagggcgcgcgcgagcagctccgtcagtatgacagtctcggcagacgcaccctgcagcgcagcgagctaagcacggacgtgaccctgccggagcaggcgctactggaacgcctgtaccgctacaccgcgcgcggtgagctttccggggtcagcgatacactgcgcggtgaggtggactacggctacgacgccgaagggcgtctgctgaagcactacgaggcccgacagggacacagccgcgcgcagttcagctacgacgccgcggataacctcgccgccagtgacgctgcggcaccggtcacggataaccgcctccagcactggcaggcgcttttcatgaaatacgaccactggggcaacctggtcagccgccgcaacgggctgtatgagcagcattacgcgtatgacgccgagaaccggctggtgtccgcccggggaaccgggccggaagggcggtttgaggcgcgctatcactacgacgcgctgggccgccgtacgcgcaaaatcgtcaccacgacgcacggcaccaccgacacccgcttcctgtggcagggctaccgcctgttgcaggagcagcaggagagcgggctgcgcagcacctatgtatacgacccgaatgaagcctggagcccgctggcgcgggtggatcaccttcgtgaccagagcagcggtgagatttactggttcaataccgatctgaacggtgctccgctggaggtcacagacgagcgcggcgcggtgcgctggagcggccagtacggcagctttggcgaggtgcgccatcagagcgaagggttctcacgggttgtgaatcgcacagcgatggcacaccagccgcttcgctatgccgggcagtacgctgacggtgaaacggggctgcactataacctgttccgctactacgacccgcaggtcgggcggtttattgtgcaggatccgattgggctgaatggtgggtggaacctttatcagtatgcgccgaattctctaatatggatcgacccgttaggattgaaagggttctttaccccatcaatttttaatgctccttcaggtagtactcataccgtttaccagcaatcaatagactggacttacctgtcaacacgaggggaggagtaa

SEQ ID NO: 527158 - DNA, 642 bp, Stenotrophomonas maltophilia
atgaactgtttcagcctgagagaaggggagggccgttttgaaatagcctgtgaattcgatgatctgcccgattttatcatgatcgacgacagggtgcagaccacgctcgcctcagaacatctgctgaatgaggacggcaattttgaaatcgtcaaaacgtttaaagcaacgacctcaggaaaaccggagcagacctgcatccgctgcatccacccggatgaggagcccctgagaaatttactgggcatgaaaatttccgaactcaaggcggtgggaaaagaagttgaaaaaaatgtggcggataaacgcaccgcatcgttatggcgtcaggccatcagggaagccgccgctccctatacctgttcggaaatgttgctggatgtcgataaagagtttggaaccgacacaaaatcattatggggtaagatcctcgatttgctgcccacgtatgcgattttcaaagccgacagggaaagcagcgacggggattcagaagctaaaaaccccttacagcaggccgtaaaagacgctcaggcggcgctgcaggacaaaattacagcgctggaaaatgagatccaggacagcgtactggatgtcgcacagagaacgctggataaatgggtaagcggattaaatggttga

SEQ ID NO: 527159 - DNA, 408 bp, Stenotrophomonas maltophilia; identical to SEQ ID NO: 194083

SEQ ID NO: 527160 - DNA, 897 bp, Stenotrophomonas maltophilia
atgagcaaatcctgtggtggcgcctgtggcggtaatgcaacgtccgcagcggataccgatatacaggcctcctccgaggcgccagggagatgggtcagtgtttatgccgtgccgaagatggactgtccatcagaagaacgaatgattcgcctagccctgaacggctttgaggagattcgggcgctgtccttcgacttgtcgaaccgccggctgaaggtcgtgcatgacggcgaggtcgagcccgtcacctcgaaactgaagaccttggggctaggcgcctcgcttcaggaaaccgtcgctgcaaatccggagaccatcaaggccgccgagttttcggcagcttctgctaagcaagaatccgggaccctgcgctggttgctcggcatcaatgcacttctgttcgtggtggaaatgactgccggtctgatcgcccggtccaccggcctgattggagaatccctggacaattttgccgatgcggcggtgtacgggcttgccctttatgcggttggacatagcgtgaaaatgcaggtacgtgccgcgcatcttgctggtgtactgcaactgatcttggctgtgggcgtgctcgtagaggtggtgagacgctttgtattcggtagtgagcctgaatcgctggtgatgatggctatcgcattcgtcgcattgattgccaataccagttgtctgctgctcatatccaaacatcgggaaggcggggcgcacatgaaggcaagctggatattctcggccaacgacgtggtgatcaacctgggggtcatcaccgccggcgccctggtcgcgtggaccggttccaattatccggatctgattatcggcaccatcgcggggggcattgtacttaacggtgccagacgcattttggcgttgaagggttaa

SEQ ID NO: 527161 - DNA, 243 bp, Stenotrophomonas maltophilia; identical to SEQ ID NO: 144326

SEQ ID NO: 527162 - DNA, 1998 bp, Stenotrophomonas maltophilia; identical to SEQ ID NO: 156288

SEQ ID NO: 527163 - DNA, 477 bp, Stenotrophomonas maltophilia
atgcaaacaattaatcctcagcgtaaagcgtttctggacatgttggcatggtcagaaggtacggacaacggacggcaaccgaccaaaaaccacggttacgatgtaattgttggtgggtcgctgtttactgattacggcgatcatccgcgcaaattgattacgctgaatccgagacttaaatcaactgctgcggggcgctatcaactactggcgcgttactgggatgcgtatcgcaagcaacttggactgaatgatttttctccatctaaccaggacgctgttgctctccagcagattaaagagcgcggggcgctacctctgatagaccgcggcgacattcgccaggctatcgatcgctgcagcaatatctgggcatcacttcccggcgctggttacggccagttcgaacataaagccgatgcgctgattgctaagttcaagaatgccggcgggaaagttaacgagcctgcatcatga

SEQ ID NO: 527164 - DNA, 483 bp, Stenotrophomonas maltophilia
atgaacacggtcatcatctcattggtgaaaaagctttggctgcctgttgtcatcctggttgtaattgccgtgctgtcgtggaaggtgaatcactaccgcgacaacgccataacctacaaataccagcgcgataaagccactgagaaactcatcctagcgaacgccaccatcaaagacatgcaggtgcgtcagcgtgatgtcgctgcactggatgccaaatacacgaaggaattgtccgatgcgaaaaaaaccattaacgatttgcgtcgggatgtcgattctggcgctaaacggctgcgcatcgccgcaacctgccctggaatgtccaaagccacctccgccaccggcgtggatgatgcaggagcccccgaacttactccagacgctcgacggaattatttcgatcaccgggacggaatcgaaaccgttaacaaaatgattcacggcatgcaggaatacatcgatacgcagtgtcagaaataa

SEQ ID NO: 527165 - DNA, 546 bp, Stenotrophomonas maltophilia; identical to SEQ ID NO: 161593

SEQ ID NO: 527166 - DNA, 321 bp, Stenotrophomonas maltophilia
atggagctaactgaataccagaaagccctattcgatgatctgacaaaactacagcagaagtttgcgttaggcatcgtaaaggggcttagccaaattgatgcgtacaaacaagccggtggtaaggccaagaaagatgaaaccgccagtgcatgtgcgagtgaaatcctaaccaatcctaaggtaaaggcatttatcgatgagatgaacaaggaagccatcacaaacgcggttatgacgcgacaggaagccctggaacggctttcagtgatgggaagggcatctttgcatgagatggttgaatttagcgaggtcgaaacttaa

SEQ ID NO: 527167 - DNA, 258 bp, Stenotrophomonas maltophilia
gtgttccatagagtatgcaatcagggtcggaccaacaaacgtgtctttcaggcactcgaactgagtaccttcaactacgcgacgcagcagggtgttacgaacaacacgcatgtatacgccagcttcacgacctgctttacgcagttcagtcattttgtctacagtaacgccacgggaatccgcaactactgcagacagcgcgcctttggctacttcgctgacttcagcaacaatcgcttgtttgtcttgaagatttaa

SEQ ID NO: 527168 - DNA, 678 bp, Stenotrophomonas maltophilia
  misc_feature (580)..(589): n is a, c, g, or t
atggctaaactgaccaagcgcatgtccgtgatccgtgacaaagttgatgcgaccaaacagtacgacatcaacgaagctatcgctctgctgaaagaactggcaactgctaagttcgttgaaagcgttgacgttgccgttaacctgggcatcgacgctcgtaaatccgatcagaacgttcgtggcgcaactgtactgccacacggtactggccgttccgtacgcgtagctgtatttgctcagggtgcaaacgctgaagcggctaaagctgccggcgctgaactggtaggtatggaagatctggctgatcagatcaagaaaggcgaaatgaactttgacgttgttattgcttctccagatgcaatgcgcgttgttggccagctgggccaggttctgggtccacgcggcctgatgccaaacccgaaagtgggtactgtaactcctaacgttgctgaagcggttaagaacgctaaagcaggtcaggttcgttaccgtaacgacaaaaacggcatcatccacaccaccatcggtaaagtggactttgacgctgacaaactgaaagaaaacctggaagctctgctgnnnnnnnnnnaccaactcaggcgaaaggcgtgtacatcaagaaagttagcatctccaccaccatgggtgcaggtgttgcagttgaccaggctggcctga

SEQ ID NO: 527169 - DNA, 447 bp, Stenotrophomonas maltophilia
  misc_feature (20)..(29): n is a, c, g, or t
atggctaagaaagtacaagnnnnnnnnnnagtacaagcctacgtcaagctgcaggttgcagcaggtatggcgaacccaagtccaccagttggtccagctctgggtcagcagggtgtgaacatcatggaattctgtaaagcgttcaacgccaaaactgaatccatggaaaaaggtctgccaatcccagttgtaatcactgtttacgctgaccgttctttcactttcgttaccaaaacccctccagcagcagttctgctgaagaaagcagcgggcatcaagtctggttccggtaagccgaacaaagacaaagtgggtaaaatttcccgcgctcagctgcaggaaatcgcgcagaccaaagctgccgacatgactggttccgacattgaagcgatgactcgctccattgaaggtactgcacgttccatgggcctggtagtggaggactaa

SEQ ID NO: 527170 - DNA, 810 bp, Stenotrophomonas maltophilia
atgggtaaaccaacagatgagcaaagggtcatcattgaaaatgcaaacgcaaataatatggttattgcagcaccagggtctgggaagtcatttacgatgatcgaggctgtgatctcaatcctcaggcagttcccatatgccaaggttggaatggtcacatttactcgcgctgcaacaaattcattggctgaaaagctgaaaagtcggttaagtaaaaaagaccaggatagggtgctggtaaatactttccacggctttatccggatgcaactggacatggtcaactggaagggcaagatgctgattagctcggcacagcgttctgtaattcatcgtgcgttaaaggagtcaggcgcgcctttccgttacccggaagctgaatttgctattgatgcgattggaagggaaatggatacagacatcatttcagttcgccatacgcgtcaacaaatccacttgttcaacacataccaggcaatatgtcagaaagaccacgtagctgacttaaatgcactctcacgttttgtcgtgggccagatgcactcaggaaaaatgcagccactaaatttgacgcatttagttgtagatgaggtgcaagacaccgactcgattcagtatgcctggatcgcactacatacaaggggtggtgttaacacgagcatcgtaggggatgatgatcaggcaatctattctttcagggcctccggcggggtaaaaatattccagcaatttgaaaaacaattcaggccaaacatattttatctaaatacctgtttcaggtgtgaaccagaaattgatgtagccccctga

SEQ ID NO: 527171 - DNA, 873 bp, Stenotrophomonas maltophilia; identical to SEQ ID NO: 144601

SEQ ID NO: 527172 - DNA, 579 bp, Stenotrophomonas maltophilia
atgcttgtggcctgtgatcaaaaagaaatggaagcgtctattcataaaaatcagaaatcctgtttcacactggatactgaacgctgtgttaaatatctcaatatgggatttacaaagaagtgtgttaaaaaagcaacagacatgtgctgctacaattcaatgttatctcgcgtgattatgcagcaggcgtatcctcaacttggaatagatccggttgcttcgagttgcgttggattatcaattagtcaaatacagagattagattttgataagatcgatttaactgaatggattaacgatgccgtccaggtcggagaagttcctgatcagtacgctacattctccgagtcatcgataacagaaaatttgccatttaaaaatgaaaattaccaacttccatcccaaagaacgaaagaatcaatgggtggtgaggataatatgataaaagctagacaggaaaataatcaggcaattaaagaggagaatgtggactgtagctatctaccacggcccgcgatttgtgaagttgggtcaacttatgtagacccaattactgggaaggaattaccaaaatactaa

SEQ ID NO: 527173 - DNA, 1509 bp, Stenotrophomonas maltophilia
gtgacctggaaaacaacagccgaacaaaacgccatcatcgagtggaagggcaatcatctcgtggtgaatgcctttgccggtacaggtaaaacctccactttagtgagttacgctgaagccaacccggaaagtaaaatgctttacctcgcctataatcgcgctgtgcgggatgaggctgaacgcaaattcccctataacgtagagtgtaaaacgtcgcatcagcttgcatgggcccgtttcggcaaacatttccgtgaccggctgacagccagtctgcgcattacggatgtggccagaaagctcaatacccgccactgggcgctggcgcggctggcgctcagcgggctgaacatgttcctctgcagtgctgaccccgagccggggctgatacatctgccgtctgaggatgatcgccacggtctcgatgccggtaaaattctgggggcaatacaaatcctctggtatgaaatgagccgtactgattcagtctttcccgtcacgcacgacacctaccttaaactgttccagctctctcatcctgacctgtcaaaacgctgggacaccatcctcttcgacgaggcacaggacgccaatccggtgaccagtgcatttgtactgaatcagccctgccgggtcattctggtcggcgaccgttaccagcagatataccggtttcggggggcagataatgcactgagagccccgcagctggtgcaggcagaccggttgtggctgacagcgagttttcggtttggccctgaggtcgcgcggatggccaacatcctgcttgaacgtgccggagaggaaaagcgcgtgacaggtaacggggggcaggatgctgtcgtcagcagccttccggcaggggctgagcatattgctgtactgagccggacggtatccggcgtgatcggcagtgccctgacggcgagccttatggagaaaaatgtcttctgggtcggggggattgaaggctacaaaacagaggagctggaaaacctgtactggttctccgccgatatgcctgaaaagatgcagtccccgcgcctcagccgggactaccgggattttgatgaatactgctcaatagcaaaagccacacaggacgtggagatgaaccaggccattcgtcttctcgatgactttttcccactaccgcaaaagctggccatcatgcgccgtcaggtggtaacccatgagaaagacgctcaggtcacggtttcaaccgcacaccgcagcaaagggctggaatggccggtggtaatgctgagtgaggattttactgacattaccgacccgcttctttcgcaggatgagcggcaggatgagactaacctgctgtacgtggctgtcacccgggccagaagaacgcttgtgcttaacgaactgatgcgctggctgagtgatgaaggcgggaaaaaccgcgagacgacgcacgaaaccgtaccgtccggaaatggagagagcgccgacaggcacgaagaaacgggaaaaacttctgagagtgagtaa

SEQ ID NO: 527174 - DNA, 210 bp, Stenotrophomonas maltophilia; identical to SEQ ID NO: 491571

SEQ ID NO: 527175 - DNA, 2166 bp, Stenotrophomonas maltophilia
atgctgaaattacagtataccgggatgttagatattgctcatatggataggcatggaatagagttcgtcagtcaagaagataaaacaatatgtattgcctttgctgatgaacgaggaatcgctctttttgaggaacacctttcacagcttggtcacgctcatataacctaccagcaaattttaaccgcattggatagcgttgatgtttggactaatgaggatcgcaaaagccggtcagtgaaacagtatgggtttcctgattcagattccttcggtctagatgttgagctgtggccggtagaaacgacacaacatccttctcgagctcggatctgcggagaatttgaaaactggctccgtgaaaatatgattcatcgcttggatagaattaatcttgatagtttgctgatgtaccgagtacgagtaaatttagagcaagctgaaaaactgcttgagcaccgtgatgttcgaatggtggatcgtcttcctgtcagtggaatctcttatgagaaactgaacaaagatatcaattttatccccgaatatatcccatctccattacctaatgccgtaaaagtttgcatccttgatagtggaattaataccgcacatccattattgcgtagtgcaatagccgagagtgcctgcttcgtggataatgaagatgaatctgaccattttggacatggtactgctgttgcaggtattgccctatatggtgatgttgaggcttgcgatgctagcaatttctggcaaccgtcaatgtggttatataacggcaaaattcttaatgcccaaggggaatttgatactgctacgattgaaacaactttgaccgaagcagttgaatatttcgttggtctaggatgtcgtatttttaacttatcacttggcaatgcaaatgcgccttacgatggaaagcacatccgaggtattgcttatgtgcttgatgtgctggcgaggcgtcacaatattcttttcgtagtttccgcaggtaattttaatggtagcagtgaccctgatgttccagtagaaagttggcgggcagagtatcccagctatttaatccacgatagctcagttattattgatccagctcctgctctcaatgttctaacggcaggaagttatgcaaggcataatgcaacatttgacgctcaacgtcgtgctgatgaaattagccatttaagccctgcaggtgaatatcaaccttcaccattcacacggcatggaccttctgtgaaaggtgcatttaaaccagaaatagttgcgcacggtggaaactttgcggcacctatgcgtaatgctggaggtcaatggcgacaacatgccagaggacttggtgtgctaagctgccaccatcaattccaaggaagtacacttttctcagaacaaagtggaactagtttttctgcaccttatatcacgcacctcgctgcacgtttactcaatgaatatccagatatgtctgccaatatgttgcgagcgatgcttgtcaatcacgctgcgctgacaccgcagatggagaatacattctcagaagaggttacagaacattataaatctgcaccttcaacccgaaatcgtagtgttattcgagatgtcgttggatatggaattgttgaggaagatggtttatatcgctcgtccgaggaagtagttgttatgatgtgtgaagagcaaatctctgatgatactcatcaattctttgagcttccattacctacatcttttttaagaactcagcgagcagtaagagaactgcacattactttagcgtattcaccagcagtcaggacaacgcgattagattatacagcaacgcaaatatcttacaggcttgttaaaggttcttcgttgcaagatgttcagcaatactttaatcatgatatacaagatggtactgattctaggaatgacgatgcggtaagcaatcgttctattactgcacaacaacgtgatcatggtacagtacaatcctctagttggacttttaagcaacggtctccagatgaaaagtggtttgtggttgtaactagaaatgatcgtgagtggggcaccccacttaatagccaacatgaacctggtaatgactccaacttattgatagtgttttatgttcagataatgcccgatgactttgtcatgcagctccaccgattttga

SEQ ID NO: 527176 - DNA, 573 bp, Stenotrophomonas maltophilia
  misc_feature (528)..(537): n is a, c, g, or t
atgaccgcactattgcggtgttgtggtaagggatacgctttttcggtgatcaatatggcaaatatcgttacgtgtaaaacaaagaacggcgaaacagtccagtatgttgacgaggtgattggttcaggctcgatgaaggatgtttacttttcgcctgataaatcttacgtcgtcgctttttatcaaaaaccgcagaatgagcaggcccgggatcgtattgatatgatcaccggccgctacaggcaaaacatttttggacaatccggtggcgaatactggaaggatctgttttgttggccgacccacgttgttgagcatgggaataaaatcggtatcgtggttccaacctaccagaaccattttttctttaaatatggttccaaaaacgatgattttctggatattaaaggccgggagaaagaaggcaaatggtttgccagcgccagcaaccagaataaattcctcgatccgcgtgaacgaggcaatacgcttacctatctcaaagtctgtctgctgctgacaagagcnnnnnnnnnnatccggaaatgggccatgccagcatcattgacgtag

SEQ ID NO: 527177 - DNA, 954 bp, Stenotrophomonas maltophilia
atgggccatgccagcatcattgacgtagacggcctagtcgttcctggaaagtatcctcccgatgtggtgggcactccggattttatcgctccggaggtggtgaaaaccagccatctttccaaagaagatccgaaccgcgtactgccaagcattactactgaccgccatgcactgtcggtgcttatctacatgtacctgtttttccgtcatccgctacgtggcggaaaaatacatgacatgtcggatgaagtgcgtgatgaaaccttatcaatgggtgagaaagcgctcttcattgaacatccgacagacaaaagtaatgcagtcaaaatcagtcagttatcctccttttcacttccctgggctgacccgggtaaaattccttacaccatcatgggtccctacctgacgtcattgtttgatcgagccttcatcgatggcttacatgatgccacaaaacgccctaccgccgatgagtgggaaagtgccttggttaagaccgttgacctgatacagccctgccaaaacacgaaatgtgaacagaagtggtacgttttctcgggtaagacaaagccggtctgtccttactgcggtacgccgtataaaggtaagttgccagtgcttaatttttattcttctcgtaaagaaggcagctatcgtcctgacgatcaccggttgatggtctggagcgggcagtctatctatgcgtggcatgtgaatcgtcttatcgcgccaaatgaacgtacaacggatgcacaaaggaaacgggttggttattttgtttaccataacgatcaatggtggttggtaaatgaaggcatatcaggactaatgtcattaccggataagcggcagattatggttggggaaaaaatagaactgaagaataacgctcaatttgttttgtcaaaagaggaaggtggcaggctggtagtcgttcaattagtagaaaactaa

SEQ ID NO: 527178 - DNA, 369 bp, Stenotrophomonas maltophilia
atgggggcggcgacaggcctgcatgtgtaccaggcatttggcgctgaagcgtatcgtaagtaccacaacaacctgatgaccagcgcgtatgtattcttcaacaaccagcgagggtttacgctcagtgatttagacatggtggtgaataaatccgggttcaacagctcattcagcgatcgagaaaaaagtcgctatgagaatgtcatttccggaaatatgcaactgggggaagctctcgggatcagcggaacgccagggttcattatcatgaacatgcaaaaacccgatgctgcaacgacatcattcatcccgggggctgtcgacgaagctaccctgaaatacgcaatccagaaggcccgtggtggttaa

SEQ ID NO: 527179 - DNA, 258 bp, Stenotrophomonas maltophilia
atgaaagatgcgctgctggtcatcgactcgtcactaaacccctgtgacggctcattgctggtttgtgagataggaggtgagttcaaagtgaagatttaccggacatatcctcagcatcaccttgagaatgcactgaacggacgcaaagaaaagttacctggtcacttcgaagggatagaaagcccggtgtttggagttatcacgtacatcatcaacgatgcgcggacaggtgagtttgatgattgcccggtgatgtga

SEQ ID NO: 527180 - DNA, 243 bp, Stenotrophomonas maltophilia; identical to SEQ ID NO: 121213

SEQ ID NO: 527181 - DNA, 282 bp, Stenotrophomonas maltophilia
atgttaattgtttctatcttggcattacctgaaacattaggttgctcttttattgtgttcttgtttgtgaataactggttaagtaaacaggaggcgattgccatcgcgcgtattattgccgtcgagatgcgttcatctggttatatagatagtttcgaacttcgtgtgagcagatttggggcgaagaagttttttagtatgtttggggagttttacctcaaccaatttgatcccgacacacgagagagaaagtatggtgatgctgccaacttactgatttag

SEQ ID NO: 527182 - DNA, 912 bp, Stenotrophomonas maltophilia
gtgctgatcgaccaggacaagtgccgcggctggcgtatgtgcatcaccggctgcccgtacaaaaaaatctacttcaactggaagagcggtaagtcagagaagtgcatcttctgctatccgcgcatcgaagccggtatgccgaccgtctgctctgagagctgcgtagggcgtatccgctacctcggcgtgctgctgtacgacgcggatgcgattgaaaatgccgcaagcaccgagaacgagaaagatctgtatcagcgtcagctggacgtcttcctcgatccgaacgatccgaaggtgatcgagcaggcgctgaaagacggtattccgcagagcgtgattgacgccgcacagcagtccccggtgtacaaaatggcgatggactggaagctggcgctgccgctgcacccggaataccgcacgttgccgatggtctggtacgtgccgccgctgtctccgattcagtctgcggctgacgcaggtgaactgggcagcaacggcattctgccggacgtggaaagcctgcgtattccggttcagtatctggccaacctgctgacggccggggatacccagccggtgctgctggcgctgaaacgtatgctggcgatgcgtcacttcaaacgtgcggaaaccgttgacggcgttaacgatacccgcgcgctggaagaggtcggcctgaccgaagcgcaggcgcaggagatgtaccgctatctggcaatcgctaactacgaagatcgtttcgtggtgccgagcagtcaccgcgagctggctcgcgaggccttcccggagaaaagtgggtgtggctttacctttggcgacggttgccacgggtcagacagcaaattcaacctgttcaacagccgccgcatcgacgcgatggatgtgaccagcaaaacggagccgcaccaatga

SEQ ID NO: 527183 - DNA, 711 bp, Stenotrophomonas maltophilia
atgattgaactcgtcattgtttcgcgtctgctcgagtaccctgatgctgcgcttgtgcagcatcagcaggaactctttgatgcactcgcgtcatctgaaaacctggataaagaggatgcccagtcgctgggcattttcctccgcgacctgctggcgcgcgatcttcttgatgcgcaggcggactacagccagctgtttgaccgtggtcgtgccacgtctctattgctgttcgaacacgttcacggtgaatcccgcgaccgtggtcaggcgatggtggatctgatggcccagtacgagcagcacggtttgcaactcgacagccgcgagctgccggatcacctgcctctgtacctggaatatctggcgcagctgccgaaagaggaagcgctgggcgggttgcaggacatcgctcccattctggcgttgctcggcgcacgtctccagcaacgtgagagcaattatgcagtcctgttcgatctgctggtgaaactggctaacgcctcggttgacagtcaaaaagtggcggaaaaaattgcggatgaagcccgtgacgacaccccacaagcactggatgccgtctgggaagaagaacaggtgaaattctttgctgaccagagctgtggcgaatctgaaatctccgcgcatcagcgtcgttttgccggagcggtggctccgcaatatttgaatatctctaacggaggacagcactaa

SEQ ID NO: 527184 - DNA, 1344 bp, Stenotrophomonas maltophilia
  misc_feature (473)..(482): n is a, c, g, or t
atgttgtggcacaaacttccgaaatctatctacttccgccgcggctctctgccaatcgcgctggacgaagtgattactgatggccacaaacgtgcgctcatcgtgactgaccgtttcctgttcaacaatggctatgcagaccagatcacctctgttctgaaagcgtctggcgtcgaaactgaagtcttctttgaagttgaagctgacccaaccctgagcgttgtacgtaaaggcgctgaactggctaactccttcaaacctgatgtgatcatcgcactgggtggcggttccccaatggacgccgcgaaaattatgtgggtcatgtacgagcatccggaaacccacttcgaagaactggcgctgcgctttatggatatccgtaaacgtatctacaagttcccgaaaatgggcgtgaaagcgaaaatgatcgccgtcaccaccacttccggtaccggttcagaagtgacgccatnnnnnnnnnnatttgctgttgtgactgatgacgcaacgggtcagaaatatccgctggctgactacgcactgacgccagatatggctatcgttgacgccaacctggtcatggaaatgccgaaatcactgtgtgcgttcggtggtctggatgcggtaactcacgccctggaagcttacgtttccgtactggcttctgagttctctgacggtcaggctttacaggcactgaaactgctgaaagaaaacctgccagcttcttacaacgaaggtgcgaaaaaccctgtagctcgtgaacgtgtacacagtgcggcaaccatcgcgggcattgcatttgctaacgccttcctgggtgtctgtcactccatggcgcacaagctgggttcacagttccacattcctcacggtctggcgaacgccctgttgatcagcaacgttatccgctataacgccaacgacaacccaaccaagcagactgcattcagccagtacgaccgtccgcaagctcgtcgtcgctacgctgaaatcgcagaccacctgggtctaagcgcaccgggcgaccgtactgcagcgaagatcgagaaactgctggcatggctggaaagcctgaaggctgaactgggtattcctaaatctatccgcgaagcaggcgttcaggaagctgacttcctcgctcacgtagataagctgtctgaagatgcattcgatgaccagtgtactggtgccaacccgcgctacccactgatttccgaactgaaacagatcctgctggatacctattacggtcgtaacttcactgaaagcgatgtcgctgccgtaaaagtagacatccccgcagttgtaaaagctgacaagaaagcgaagaaaaatgcttga

SEQ ID NO: 527185 - DNA, 525 bp, Stenotrophomonas maltophilia
atgcgtaccgttgtttataccgccgaaatcgacgatcgctttggggcagggaaggtaagctcaagaatagggctctcgtcgcctgcaaggctgtttaaccctgaaacggacctgcttgaggacattcgtgcccagcatgcctctaagcctgtccattgcgtgctggtagatgaaagccagttcctgacccgcgagcaggtccatgcgctttcagaggtcgttgatgagctggatattcccgttctttgctatggattacgcactgactttcgcggtgagttatttgccggtagccagtatctgctcgcctggtcggataagctggttgagctgaaaactatctgcttttgtggccgcaaggcaagtatggttcttcgcctggaccagtcgggtaagccttatgctgatggcgagcaggtggtgatagggggcaatgaacgttatgtctcggtctgccgcaagcattataaagaggcgctggctgtaggctcgctgacggcgttacagggcgacaatcgcaaataa

SEQ ID NO: 527186 - DNA, 543 bp, Stenotrophomonas maltophilia
gtgtcgcccaacaggctccagcgacagttcaatccggatgctccggatgagcgttgggtaacggacataacctacatcaggacccacgaaggctggctgtatcttgccgtggttgttgatctgttctcacgcaaaattatcggctggtccatgcaatcccggatgacaaaggacattgtcctgaacgcactgctgatggctgtatggcggcgtaatccccaaaaacaggtgctggttcattcggatcagggcagtcagtacacaagccatgagtggcagtcgttcctgaaatcacacggcctggagggcagcatgagccgtcgcggtaactgccatgataatgcggttgcagaaagctttttccagttgttgaaacgcgaacggataaagaaaaagatctacggaacgcgggaagaagcccgcagcgatatttttgattacatcgaaatgttttataacagtaagcgtcggcatggttctagcgatcagatgtcaccgacagaatatgaaaaccagtattatcaacggctcggaagtgtctag

SEQ ID NO: 527187 - DNA, 1002 bp, Stenotrophomonas maltophilia
atgttacatactgcgaataaaatgactgtcattgaaatctctgagcctggcgggccagaggttttaacgcccgttcagacaacgattccggtgccaaaggctggggaaattttggttcgcgtcaaggccgcaggtgttaatcgtcctgacgtcattcaacgccagggtcattaccctatgcctgacgacgtaacccctattcctggtcttgaggtcgctggaacggtttcatcaattggtgaaggcgtcacgggcgtaaagattggtgaccgagtctgtgctctgacgaatggcggtggttatggtgagtattgcatcgtgccggaaagccagacactgccggtgccagacagcatgtcaatgatagcagcggcggcacttcctgagactctgttcaccgtctgggcaaacttgttcaagattggtggcgcaacacagggtcagagtgttctgattcatgggggaacaagtggtatcggcacaaccgcgttgatgctatgccgcgaaatcggtatcgaggcatatgcgacggctggatcagatgataaatgcgatgtgatcgcagagcttggcgctacgccagtcaactaccggacaactgatttttctgatttcattttgaagcaaacggatggccgtggcgttgatatcattctcgatataatgggtgcatcctatttctcccgaaatatgaggagtttaggaatggatggccggctggtaatcattggcttccttggcggagctttcgcagaacaagtggatctgcaagaactcgcgttgaagcgagcggttgtcacgggttcaacgatgcgagcacgaacttcggtcgaaaaagccgaaattgccaacgacttgcttaaaaatatctggccgattctcaatgcaggtcgttgccatcccatgattcacagcacattcccgttacgcgaagcagcacgcgcgcatgcattgatggagtccggcaagcatgttgggaaaattgttcttacggtgaattag

SEQ ID NO: 527188 - DNA, 210 bp, Stenotrophomonas maltophilia
atgacggatggctggccgctgtatgaatcccgcctgaagggaaagctgcacgtaatcagcaagcgatatacgcagcgaattgagcggcataacctgaatctgaggcagcacctggcacggctgggacggaagtcgctgtcgttctcaaaatcggtggagctgcatgacaaagtcatcgggcattatctgaacataaaacaccatcaataa

SEQ ID NO: 527189 - DNA, 678 bp, Stenotrophomonas maltophilia; identical to SEQ ID NO: 527119

SEQ ID NO: 527190 - DNA, 486 bp, Stenotrophomonas maltophilia; identical to SEQ ID NO: 527118

SEQ ID NO: 527191 - DNA, 243 bp, Stenotrophomonas maltophilia; identical to SEQ ID NO: 527117

SEQ ID NO: 527192 - DNA, 198 bp, Stenotrophomonas maltophilia; identical to SEQ ID NO: 152560

SEQ ID NO: 527193 - DNA, 1965 bp, Stenotrophomonas maltophilia
atgaaccacgacgctgcgcccaagcagctcaccttccgcgcagtggccctagccatcgtgctggcggtggtgctgtcggccgcaaacgcctacctcggtctgttcgcaggcctgaccatcgccaccgccattcccgctgcggtgatatccatgggcgtgctgcgcctgctgggcggtggctccatcctcgaaaacaacatcgtgcagaccggcgcttcggccggttcgtcgatcgccgccggtgtgatcttcaccatcccggcgctggtgatcatggggtactggccggacttcaagtactggtgggtgctgggcatcgccggtctcggcggcctgctgggcgtgctgttctcggtgccgctgcgccgttcgatgatcgtcgaagacccgcttccgttcccggaaggcaaggcggcggcagaagtgctcaaggccggtgaaaacccgggcccgggcctgaagatcctcggcctgtcggcggtgatcggtgccttcgtcaagctggccgcggaaagcggcatgcgcctgattcccgatgcctgggccacctcggcctacgtcggcagttccaagatcaccgccttcatcggcaccaacctgtcgccggcgttgctgggcgtgggttacatcgtcggcctcaacgtcggcatcgtggtggtgtccggttcgatcctgacctggcacatcgccattccgatctaccaggcgttcttcatgaacaccgatccggcactggccgcgtcggttgccgcggcttcgtccaccgaggcagcgttcgccatctggggcgcgaagatgcgctacctgggtgtcggcgcaatgctgatcggcggcatctggaccctgatctcgctgcgcaagtcgctgctcaacggcgtcaagagcggcttcgccgccgcccgcaagagcggtggtccggtactggcgcacaccgagcgcgacctgccgatgaagtggatgctggtcgccctggtggtgttcgtgctgccgctgctggccctgtaccaggccattgtcggccagtggcacgtgtcgatcccgatgaccctcatcatgatcgtcgccggcttcctgttcgtgtcggtctcggcctacctggccggcctgatcggttcgtccaacaacccggtctcgggcatcaccatctccaccatcctgttcgcctcggtcgtgctggtcgtgctgctgggcaaggatggcctgcagccggtcggcgccttcggcgcgccgctgggtgcggtggccgcgatcatgatcggcgcggtggtgtgctgtgccgcagcggtcggcggtgacaacctgcaggacctcaaggccggctacatcgttggcgccaccccgtggaagcagcagctgatgctgggcatcggtgcgttctcgtgcgcgctgatcatggcgccggtgctgaacctgctggccaccgcctacggcatcggcgtgaagtccgagctgcacccgaacgcactggccgcaccgcaggccaacctgatggcctcggtggccaagggcctgttcggtggcgaactgccctggaccttcatcggcatcggtgccgtggtcggcgccgccatcatcgcgctcgacagctggctgaagtcgcgcaatgcccgcttccgcgtgccggtgctggctgccgccatcggcatctacctgccgctggaactgatggtgccgatcttcctcggcggcctgatcgcctacctggtcgagcgcttccacaaggtgcgtgccgatgacgaggaaggccgcgaccgcgtgcacaagccgggcgtgctgttcgccgccggcctgatcaccggtgaggcactgatgggcatcgccatcgcgattccgatcgtggtcagcagccgcgccgacgtgctggccgtgccgttccacctgccgggcgcacagtggatcggcctggccgtgctgttcctggttggctggctgatctaccgcaccggcaagcgcgccgtggcgtaa

SEQ ID NO: 527194 - DNA, 768 bp, Stenotrophomonas maltophilia; identical to SEQ ID NO: 199654

SEQ ID NO: 527195 - DNA, 582 bp, Stenotrophomonas maltophilia
atgaccgggactgaagcatgtgatgaagagccttcaatcagtacgagagcagaaagtgtgccagaattttccccccttaatgaactaagtcccgaagctgataagcctgagataaatcagacagtagcagaagactctttccctgaacgcgctgtagaggataacatccctttacacagcattaacattgacgcacaaaaaacagtgataaaaaaacagactggcactgaatttgtcaggtggctttctgaaggacttaagagcaagcgaattgatattaatcagcctgattcgagggcgcatgcagttgcagggttcatctttctcagggttccggacatattttatctttacatcagagaaagcggagcagagctaagcagggattccatacaaattgaatttgagaagctgcatattcacagggtgcgcaggggagagcgttttattaaagcaaaactgtaccactcgcctggcaaagaaggcacgtttaaacctgtaagtggatatcttgtcaagactacacaccttttcagaggggcgtcttcccctgaagacagcggacttctgtctttcctgtga

SEQ ID NO: 527196 - DNA, 1032 bp, Stenotrophomonas maltophilia; identical to SEQ ID NO: 82670

SEQ ID NO: 527197 - DNA, 1155 bp, Stenotrophomonas maltophilia
gtgcggcatttctcaccgtctttgctggcacctgtttatgaagcgtatttccggtatccgggagagaacggggtcagcagggcagagatcatcatcagggacgttctggaaaattactttcttacttctttttttctgttctgttaccacacatggggaaacacctctcaggttctgggtctgacgcgggatgatatacatctggatgaaaagggtatcagcactgattatgtttataaggggagagcgaataagtatatacgtctgacgataggtaaatcggagtatgtgaccaaacgtgcgggctattactggtttctgtcttttatcaggctcagggacgacatcgttaactatctggtttccgcagataacttccctccggtacaggcgctgtttctgagtgagccgcaggtgaaattccgtaagctttattctcttaatcccagtcatctgactaaattttctaactctgagggggcgtgggccacgatgcggcagcttaatccctcgcttccatcaattaccgtttctggcttgcgcaaaacgtctgagcagtatacggacagaacattaaagaatggtctgattacggcggaaaaagcacagcataactggggcacttacaggcggaattatgctgcaggtaacccacagggggcgaaggaaaacttcagtgctgcacttgatacgcttatgaatcaggggattgcgacacgtgcgttatccgagcgggtaaaagttgctgatgagctggggatcgatctgcgtggaagcgatgagggtgtggatcttttcttgaatggcctgggatgtcgatcgcaggagccgcctacagatattgaattgcgctttataaaaaagcaaaaacgatttggccggacaccaaaggcttgtgcggatttttctcattgtgtcgaatgttcaaaaagttgcgttgtggaaacgctggagtctgtatggctcctgctgtcattcaggcatgctatcgagtatggaaaaccgttgtacatcggttcggtcaatgctgtggagcgttatgaaacgttactcctgaagattgatttacggcttgggctggtagatgaggcgatcctgaaaaaagcgcgcgttaaacttcagcgagaaggtgtggctccggtatggcagatttga

SEQ ID NO: 527198 - DNA, 501 bp, Stenotrophomonas maltophilia
  misc_feature (447)..(456): n is a, c, g, or t
atggcagatttgaagaaaaaagaggtaagccgtagtcgaatggcggagtttcctgccggaacgccgcttcgttcaggggatgagtttccgactgaggatatcatctgtgaggcactagaaaacaaaagctttgaacgtctgaataactgcctggttatcgccagctcagatgaacatgatatgcgttttatcaatgaggagacgctgaatatttatttcagggatgatgtctggaccaatcgctatgtcagaacccatattggtgaaacgttaagaaccgttaatttttcaggcatacgggatcctgaactgcgtcttgaagccaaaatcatctcagccagcctgctctggattgtcggcaggaccgcgaagacgcagtccctgatccggaaatgtgcaaacattgtggcgggagcccgtattattgagtctatggggtatcgcagnnnnnnnnnngctgacaggtcatacccgtcttcgaaaatacggttactttcctga

SEQ ID NO: 527199 - DNA, 939 bp, Stenotrophomonas maltophilia
  misc_feature (726)..(735): n is a, c, g, or t
atgacccccctgacaaaacttgagtttgcgccagtcggtagaggcgacagaaaaagcattgttgaacgctgtttcggcattctgaatgatgaggttattcataggcttattggaacaacacgaaggggaaagattgttaaaggagagccaacaccgcaatccagggcttgtttaacgattcaggaggtcacgtctttactgattcgggagatacttgcacataatcagagaacgtatgaggaactggcttatatcaatcccttactgattgaaaatgatctcgtaatatcaccaaaaaatagttggatgataagcttaaagcacgggagattcagcgcaagagccgttggggccgacgaagtgatcgcacgattgttaatccctgtgaacgctaacattaccgccggtgggattcagtacaataatcttttttatgaatgtgatcctgaaattgcatcaggtgtcagagtatttggaagaaccacttgtgaagcaagaatagatgacaattgcgtagattatatatatgtaagatttgacaaaaatagcattttcaaaaaacattacctacttaagaaaagagatgtatttaaagggaaagctcatcttgatacagatgtaatggctgattgggtagatactcaaaaagaaattaatttatttactctggattcgctcagcaatatcaataataaagatgaatttaacaggaaaggtaacgaaagnnnnnnnnnngaaatatacgaatctcgtcgggtacatggtaaagatattaaaaaaaacaggaaaaatgaacttgattcattagggcgaactcatgttgctaatggaagatctgaacccctacttccttcatccagtaatgttctgcttttgcctggccgggaggagaaacaaagatggttaaaaggtaagaagaagactgaggacgcagaataa

SEQ ID NO: 527200 - DNA, 141 bp, Stenotrophomonas maltophilia; identical to SEQ ID NO: 102393

SEQ ID NO: 527201 - DNA, 930 bp, Stenotrophomonas maltophilia
atgaagaagaaaaacagcacacccactcctcacgatgccacgttcaggcagttcctgacgcaaccggatattgcccgggatttcatggaaatccacctgcctgcagagctgcgagcagtctgcgatctcagcacgctgaaactggaatcaggctcgttcgttgaggatgatctccgccagtatttcagcgacgtcctctatagcctgaaaactacagccggcgacggctatattcatgttctggtcgagcaccagtcaacgccggacaaacatatggctttccgcctcatacgctatgcggtagccgccatgcagcgccacctggaggcagggcataaaaaactgccactggtgataccggtgctgttctatacgggtaagcgcagcccgtatccgtactctactcgttggctggatgaatttgacgctcccgagctggcaggcaaactctacagcaacgctttcccgctggtagacgttacgatcattccggatgatgaaatcgctggccatcgcagcatggccgccctgactttactgcaaaagcatattcaccagcgggacctggcagaactggtcgaccggctggcacccatcttgctggcgggatacttgtcttcatcgcaggtgatatcgctggtacactatatagtgcaggcaggcgaaacatccgacgccgaagcctttgtacgcgaactggcacagcgtgtgccgcaacacggagacgcacttatgaccatcgcacaacagcttgaacagaagggcatcgagaaggggattcagctcggtgaacaacgcggcattgaaaaaggcgagcgcgaagccacccttaaaattgcacgaaccatgctccagaacggcattgaccgcaataccgtcataaaaatgactggtctgactgaagacgacctggcgcagatccgccactaa

SEQ ID NO: 527202 - DNA, 780 bp, Stenotrophomonas maltophilia
gtggttgatttatccgacatatcacgtcagcggaagctgttagagcgcgtacctgtagaggaggtatggggggtaggaaggcgcatcagcaaaaaactgaacgctatggggatcagtacagcgctggacttagccaatagctcaccgtgggtaatcaaaaagcatttcaacgttgttctggaaagaacgttgcgtgaactgcgtggtgagccgtgtctggcgcttgaggaatttgcaccaaataagcaacagattatgtgcagccgctcttttggatatcgtattaccgagtatgccgatatgcgtcaggctgtctgcacctatgcggagcgcgctgcagcaaaattgcgtagcgaacaccagttttgtgcttttgttagcgtttttttacgcaccagcccgcacgcagataatgaaatttattatggaaaccaatcatcggtgaaattaccgacaccttcggatgatacgcgtgacattattcgtgccgcgacagaatcactggatcgaatatgggtcgatggttaccgttacatgaaagcgggcattatgctggctgatttttttagtcgcggcacagcacagcttaatttgtttgacaattttgccccgaaagctaatagcacggcactcatgacggtaatcgacggcattaatgcgtcaggaaaagggaaggtctggtttgcgggtcagggcatccagaagccttgggcaatgaaacgtgagatgttgtcaccggcttacactacgcgctattcagatctgccaatcgctaaatga

SEQ ID NO: 527203 - DNA, 531 bp, Stenotrophomonas maltophilia
atgtttttacacctggtacctaaaatcctgcatccgatgggaaatcttccgaacaagcaatacctggtgggtatgctgaagggtcgcaaggcattgaatggatttctggtcaaaattccccgagcgttagaagagtttacgatggtctccgtctggaatattgaaggatacggcaaaataacgcacaccctgaagacctttgtcgaagatacggaatatgacctggtttcccatgacgtgctgctggcgcaagggagctaccgggcacaggcgtctgaagagtatcgtgttcaccctgtctataaaaacattgcgccggtacacatcgaaccgaagatggagtccctgctgtcgaccgaacccaatttagagaacgatgtctgtgaaacctattcgtgggggatgctggtgcgtacgcgggaagaggggtttaaggcaatgacgatgccatcagcccgtctcagggagtctgaggcactgcggggggatcgccagccacaaccggagcaggccattgttattagcgggtga

SEQ ID NO: 527204 - DNA, 237 bp, Stenotrophomonas maltophilia; identical to SEQ ID NO: 144492

SEQ ID NO: 527205 - DNA, 249 bp, Stenotrophomonas maltophilia
atgaccagcaatcgctcccgtgaaatcaaaacaccgcctgtgcatattattgcggattacgttcttcgcttcatgaagaacaataaagaagcgaaattgtacgaagcaatgagccgtcttgaaagtaaaatcaaactctttgttgctgacggccatgatgagcagcatatccggacacagttaaatcaggccacacaatgtcataccaaagaaacactgaaacgggcctgtgaacggatttgtatttaa

SEQ ID NO: 527206 - DNA, 237 bp, Stenotrophomonas maltophilia
atgctccgcaagactaacggtgaaatagccaaaggcttacagaacgcgaccctctcagtacgtaaggatgccaacttcgggatagtgtttaatggagcggaggcagctcctggggagtctgtaaatgttaatatcgacatgggtatgggtgataatcttctcatgccggtttatccatcagagaacggcaagaccggagccgctgagtttatgatccaaattgatgagctgaagtaa

SEQ ID NO: 527207 - DNA, 1275 bp, Stenotrophomonas maltophilia
  misc_feature (1188)..(1197): n is a, c, g, or t
gtgaaagcaggggcgggtaccgatgcagctatcgactccctgaagccttacctcgaaaaaggcgacatcatcattgatggcggtaacaccttcttccaggacaccattcgtcgtaaccgtgagctgtctgctgaaggcttcaacttcatcggtaccggtgtttccggtggtgaagagggcgcgctgaaaggcccatccatcatgcctggcggccagaaagatgcatacgaactggttgcgccaatcctgaccaaaatcgcagccgtggctgaagatggtgagccttgcgtaacctatatcggtgcggacggtgcaggtcactacgtgaaaatggtgcacaacggcatcgaatacggcgacatgcagctgattgctgaagcttattccctgctgaaaggcggcctgaacctcaccaatgaagagttggctgaaacctttaccgagtggaacaaaggcgagctgaacagctacctgatcgacatcaccaaagatatcttcacgaaaaaagatgaagagggtaaatacctggttgatgtgattctggatgaagcagcgaacaaaggtaccggtaaatggaccagccagagctctctggatctgggcgaaccgctgtctctgatcaccgaatccgtctttgcgcgttacatctcttctctgaaagagcaacgcgtcgcggcatctaaagtgctgtctggtccacaggctaaaccagccggcgacaaagctgagttcgttgagaaagtgcgtcgtgcactgtacctgggtaaaatcgtttcttacgcacagggcttctctcagctgcgtgcggcgtcagacgagaataactgggatcttaactacggtgaaatcgcgaagatcttccgcgcgggttgcatcattcgtgcacagttcctgcagaaaatcaccgatgcctatgctgaaaacgccggtatcgccaaccttctgctggcaccgtacttcaaaaagattgcggacgagtaccagcaggcgctgcgtgacgtggttgcttacgcagtacagaacggtatttcggttccaaccttctccgctgcggtggcatactacgacagctatcgtgctgccgtgctgcctgccaacctgattcaggcgcagcgtgactacttcggtgcgcatacctacaagcgtacggataaagagggtgtcttccataccgaatggatggaatgnnnnnnnnnnaatgagttaactctctgcaataacatcaacccggagctcgtctccgggtttttttatgcaaaaaatgccgcgcaataa

SEQ ID NO: 527208 - DNA, 1413 bp, Stenotrophomonas maltophilia
atggcaagtatttctacgttgggagtcggatcaggtttgcagttaggcgacattctggacagtctgaccgctgcacaaaaagcacaactgacgccgatctctaagcagcaaacttcctatacagcaaaacttagtgcttacggcacgctgaaaagtgcattggaatccttccagacggcaaatactgcacttagcaaagccgatctctttacagcgactaccaccgccagcagcagcacatccttcagtgctacaaccagcggcagcgcgattgcgggtaaatacaccattaacgtatcgcagcttgcgcaggcgcaaaccctgacaacagctaaaacgcaaagtgataataaaacggcgattgcgacagcggacagcaccatcaccattcagcaaggtggtgacaagaaacctgtcaccattaatatcagtgcagaaaacagttctctaactggtatccgagatgcgatcaacaaagcggatgctggcgtaagtgccagtattattaacgtcggtaatggtgagtatcgtctgtccattacgtcgaaagataccggtaaagacaatgccatgactattagtgtcagcggcgatgcggcacttcagtccttcatgggctacaacggtaatagcgcagataccgctaacggcatgatggaaagcgttacggcccaaaatgcgctattgaaagttaataacgttgatattgaaaacagcagcaatacaatcagtgatgcgctggaagatatcactctcaacctgaacgacgtgacaaccggtaatcagaccttaacgatcactaccgataacactaaagcgaccaaagcgataaacgactgggtgacggcgtataactccctgcaagatactttcagcagcctcacaaaatatactgctgtggatgcgggttcagacgctcagaataccagcaacggcgcgttattaggcgacagtacgctacgcactattcagactcagttgagaagcgtgctgaataatcctcacaccagttccaatatcaagaccctggctcaagctggcatcactaccgacccaagcaccggtaaactggaagtggatgatgacaagcttagcgcggcaatgaaaaacagcgcggctggtatcaaagacctgctgatcggtgacgggaaaacatccggtatcaccaccaccgttggaacaaacctcacaggttggctctccagtaccggcatcattcaggctgcaaaagatggcgtcagtaaaaccctgaacaatttaaccaagcaatataacgcggccagcgagcgtatcgacaccatggtagcgcgttataaagaacagtttacgcaattggacgtcatgatgaactcgttgaactctacgagcagctaccttacacaacagttcgaaaatacgtcttccaacaagtag

SEQ ID NO: 527209 - DNA, 885 bp, Stenotrophomonas maltophilia; identical to SEQ ID NO: 129930

SEQ ID NO: 527210 - DNA, 441 bp, Stenotrophomonas maltophilia; identical to SEQ ID NO: 162543

SEQ ID NO: 527211 - DNA, 1488 bp, Stenotrophomonas maltophilia
atgcgcaacccaacacttttacaatgttttcactggtactaccccaccggcggtgaattgtggcaagaagtcacggcattagcccccaacctgaacgaaatcggcatcaatatggtctggttacccccggcctacaaaggcgcatccggcggctattccgtcgggtatgactcttatgaccttttcgacctcggtgagtttgaccagaaaggcagcgtcgccaccaaatacggcgataaagcccaactgctggaggccatcaacgccttaaaaagcaaccagattgcggtgcttctggacgtggtggtcaaccataaaatgggggccgatgaaaaggaacccgtccgcgtgcaacgcgtggatgctcaggatcgcacccaaatcagcgatgagatcatcgaatgtgaagcctggacgcgctacaccttccccgttcgggccgggcagtattcgcagttcatctgggattacaaatgctttagcggtatcgaccacattgaaaatcccagtgaggacggtatcttcaaaatcgttaacgactacaccggcgaaggctggaacgatcaggtcgacgacgagatgggcaatttcgattacctgatgggtgaaaatattgattttcgcaaccacgcggtgacggaggagatcaaatactgggcgcgctgggtgatggagcaaacccactgcgacggcttccgcctggacgcggtaaaacacattccggcctggttctataaagagtggattgaacatgtccaggaggtggccccgcagccgctatttattgtggcggaatactggtctcacgaagtggataaattgcagcaatacatcaatcaggtggacggcaaaaccatgttgtttgacgcgccgctgcaaatgaaatttcacgaagcgtcacgccaaggacgcgactacgatatgagccagattttcaccggtacgctggtggaagccgatccgttccatgccgtaacgctggtggccaaccatgacacccagcccttgcaggcgctggaagccccggttgaagcctggttcaaaccgctggcctacgcgctcatcctgctgcgtgaaaacggcgtgccgagcgtgttctacccggatctttttggcgccagctatgacgacactggcggggatggtgagacgtatcacattgatatgccggtgattgaacagctccacgagctgatcctcgcccggcagcgttttgcccacggcgtgcaaaccctctttttcgatcatccaaactgcattgcgtttagccgcagcgggacagaggagcacccgggctgtgtggtggtgctgtcgaatggtgataacggtgagaagacgatctgcctcggcgagaattacggcaataagacctggcgggattttttaggcaaccgcgaggaaaccgtgaccacggcggcggatggcgaagggacgttcttctgtaacgggggaagcgtcagcgtctgggtgattgaggacgcgctgtag

SEQ ID NO: 527212 - DNA, 309 bp, Stenotrophomonas maltophilia
atgaataatgaggtgagttcgctgggtacggaaaaacccgaaggtccttttgttcttctgacgttagtcggtgatggttttatcttcgatgagcggcacgagattatcaggataaatggaagaccaaagcaggtcggagtaaagcgaaattattttgaatctgatctgggggaagggaaggcgaaatgctggacagtggatattaatgaggcccatgtattccccactctggatgccgcgaccgaacagctatgtaaattaagccgaccacacctgattaaaatccgaaaactaattcaggaaatttaa

SEQ ID NO: 527213 - DNA, 699 bp, Stenotrophomonas maltophilia
gtgaagacacgtggaatgctttttaaagatgaaatggtcagggcaattctggcaaaccagaaaacacagacgcggcggattatagagcctcagtacagttcacctgaatggtcggtaaggcctgcgcaaacaccgcgacatcgtgggcatacgcatgactggtggcttccaacaggaactcagccaaattcggcgcttcgcgcctgtccgtacggtgtagttggcgaccgtattactgtacgtgaagcgttttccttgctcgggaatgaagatgcgtgcgcggtggactggaatgacaacattgtgatggacagatctgaagcagcccgcatttaccgtgcgagctgtgaacagcgttcgggggattatgggctgtggtcgatccctgatgaggccgactggaagccccgtacagaaaatatgaagttcgaaggtgcgtggacaccttctatccatatgcctcgctgggccagccgtatagtactggaaatcaccgatttgcgagtagagcggttaaactgcatcagcgaagaggatgcgaaagctgaaggagccccaaccgaatgttgtgttattggcgataagcattttcttggcttccgcagcctttggaaagacacctatggagaagacagttggcaggccaacccgtgggtgtgggtaatcaattttgagcgcattgctggggaagtcgcatga

SEQ ID NO: 527214 - DNA, 225 bp, Stenotrophomonas maltophilia; identical to SEQ ID NO: 144553

SEQ ID NO: 527215 - DNA, 1551 bp, Stenotrophomonas maltophilia; identical to SEQ ID NO: 144324

SEQ ID NO: 527216 - DNA, 276 bp, Stenotrophomonas maltophilia
  misc_feature (259)..(268): n is a, c, g, or t
atgaaagccatcaactggaacgaagcagatgcgggcgttaccttcgaatacgaagatatcccggcagagatgcaggacctggctgacgaatggcaccagaacctgatcgaatccgcagcagaagcttctgaagagctgatggagaaatacctgggtggtgaagaactgactgagcaagagatcaaatctgctctgcgtcagcgtgttctgaacaacgaaatcatcctggtaacctgtggttctgcgttcaagaacaaannnnnnnnnngtagttga

SEQ ID NO: 527217 - DNA, 1305 bp, Stenotrophomonas maltophilia
  misc_feature (24)..(33): n is a, c, g, or t
gtggttctgcgttcaagaacaaannnnnnnnnngtagttgactacctgccatccccggttgacgttcctgcgatcaacggcatcctggacgacggtaaagatactccggctgagcgtcacgcaagtgatgacgagccgttctctgcgctggcgttcaaaattgctaccgacccattcgtgggtaacctgaccttcttccgcgtttactctggtgtggttaactccggtgacaccatcctgaactccgtgaaatcggcgcgtgaacgttttggccgtatcgtacagatgcacgctaacaaacgtgaagagatcaaagaagttcgtgcgggcgacatcgctgctgctatcggtctgaaagacgtgactactggtgacaccctgtgtgacccggatcacccgatcattctggagcgtatggaattccctgagccggtaatctccatcgcggttgaaccaaaaaccaaagctgaccaggaaaaaatgggtctggctctgggccgtctggcgaaagaagacccatcattccgcgtatggactgatgaagaatctaaccagaccatcatcgctggtatgggtgaactgcacctggacatcatcgttgaccgtatgaagcgtgaattcaacgttgaagcgaacgtgggtaaacctcaggttgcttaccgcgaagcgattcgcgcgaaagttaccgatgttgaaggtaaacacgctaagcagtctggtggtcgcggtcagtacggtcacgttgtgatcgacatgtacccactggagccgggctctaaccctaaaggttacgagttcatcaacgacatcaaaggtggtgtaattcctggcgaatacatccctgccgttgataaaggtatccaggagcagctgaaagctggtcctctggctggttacccggttgtagacatgggtgttcgtctgcacttcggttcttaccacgacgttgactcctctgaactggcgtttaaactggctgcgtctattgcctttaaagaaggctttaagaaagcaaaaccagttctgcttgagccaatcatgaaggttgaagtagaaactccggaagagaacaccggtgacgttatcggtgacttgagccgtcgtcgcggtatgctgcgtggtcaggaatccgaagtaactggcgttaagatccacgctgaagttccgctgtctgaaatgttcggatatgcaactcagctgcgttctctgaccaaaggtcgtgcatcatacactatggaattcctgaagtatgatgatgcgccgaacaacgttgctcaggccgttatcgaagcccgtggtaagtaa

SEQ ID NO: 527218 - DNA, 210 bp, Stenotrophomonas maltophilia; identical to SEQ ID NO: 491571

SEQ ID NO: 527219 - DNA, 282 bp, Stenotrophomonas maltophilia; identical to SEQ ID NO: 101047

SEQ ID NO: 527220 - DNA, 330 bp, Stenotrophomonas maltophilia; identical to SEQ ID NO: 101046

SEQ ID NO: 527221 - DNA, 615 bp, Stenotrophomonas maltophilia
atgacgaacaataaccaaataacacagaatattactgttgcattgatgggcggcgatcattatgcaagaaacggcattaaaacgttattacgcagcatccgcgacgaccttcacatcattatcatcgaaggaggttatcaggaactggataaggcgctgtcgtcgattcgtatcgatatcttatttatatccggcgcagagaaataccatacagggtatggctcactgaaatatttaaaaaaaatcaaagccacgcatccagaggtgattatctgcctgtactcaacctctgcccattccctgttatgggccagggaagatattgatgcctatatctcgctacagaacacggtttatcagtggcggataaagctagcaaaaatggtcgatagccattatcggccccaaaagcagccagcggcgttatcgctgacgcctggagaaaggagggtattaaaggaactcaggaacggactggatatacgttacatcgcagaactggagaaactttcttatcgccgcgtgagcgctttaaaaagctcagcgataagaaaactcgggctcaggaataagacagatttgctggtctttttggtgatgctgccaacttactga

SEQ ID NO: 527222 - DNA, 186 bp, Stenotrophomonas maltophilia
atgcgagaacttaaccggcgtttcagagatcactatggcgtcccggtgcgggtcatcagatgggagcccgagacccgacgcgttatatacctccgcgaagggtacgatcatgagtgcttcagccctcttgagcaattccagcgtaaatttacagagttaaaggacgaccatgagcagaatctttga

SEQ ID NO: 527223 - DNA, 555 bp, Stenotrophomonas maltophilia
gtgggtatagaacctgaatggaaagttgagaagcagcccgcctggctagtggccgcaatcaggaagacgattgccgcgttgccaggaggatacgctgaagcggcggaaattctggacgaaacccagaattcactctttaaccgccttcgtgctggtggcgaccagatctttccgatgggctgggcaatggtgcttcagagcgccgctggcgtaagttacatcgctgacgcgttctcacgtgaaaccgataacggaattcacgttcccggcgccgtgcctgatgatgaaaacgaagagattggcctgaagctggccgagctggtggggaggcttggtgagctggtcaacgcttaccgtcattacattgaagatggtgtagttgaccggagcgagtggcaaagtcttaacgatatcgcatatcagttcagggtcactctcatgacgttcctgaaccttatttcccgtgtttattgcctcccagaaatgggtgaggcccgcgagtgtgcagctccgggccccttggcgtgtcgtatcagtggagaaactaacgcatga

SEQ ID NO: 527224 - DNA, 216 bp, Stenotrophomonas maltophilia
atgacaaccgacgagattgaacaacatttcggcagcactgaaaaagttgccgaattttttggcatcactagtgaggccgtttaccagtggcgtaaccgcccaggacgcttaatcccaaaaggacgagctgctgaagctgcgtatcgaactgctggtgaactggaattcaacccagaacgttatggcaagaatacatcgccaagcgatcagaaataa

SEQ ID NO: 527225 - DNA, 546 bp, Stenotrophomonas maltophilia; identical to SEQ ID NO: 199410

SEQ ID NO: 527226 - DNA, 237 bp, Stenotrophomonas maltophilia; identical to SEQ ID NO: 144462

SEQ ID NO: 527227 - DNA, 141 bp, Stenotrophomonas maltophilia; identical to SEQ ID NO: 102393

SEQ ID NO: 527228 - DNA, 927 bp, Stenotrophomonas maltophilia; identical to SEQ ID NO: 159045

SEQ ID NO: 527229 - DNA, 870 bp, Stenotrophomonas maltophilia
gtgctgatttacgttattggtgataaaccgattgatcgggttactaagcaagatattcgtgaagcgctgaaagtgaccgaaaacttacctactcgtactaagctgccatacaagcgcctatctttgcctgaatgcattgattatgacgtaccagaggaagatctgatcagtagtcagcatgttgaaaaacatctcaagatctggcgctcgctttttaaaacttacctcgtcgaaaccaaagaccagttagagaaatccccaaccgatggaatcacatatgaggtgaagcctaatcggagaggtcatttcagcaacactgagttgagtaagcttaaaaccaagctgttctcactggaaaataacgattggcgcaaatggtacttcctcaccctcatttatactggtgctcgacgtggcgagattgcctctatcagaaagcgggacatccgtttagatgaagaaacttcacgctggtacatttatatagaagacgggaaaaccgaacatgcccaacgccagataccactcaataaggttttagagtcaggtttactcagtcttgccgatgctctaaacgatggtgatctgattttcagtgacttacctaactacaccacagcaacagtcgaatggggtaagttgatgaatgaaacaggtatccctgattatgatgagtttgggctaaaaaggcgcatacatagtcttcgtcacaccttcgtaagccattgccttgcatctgggggcgtgtctttacctttgatgcagtttgtagttggtcattcccgaacccaaagtttaggcgtcacctctatttacacgcatcgcccaccgcttaaagacctgttatgtgtagttgacttccagaactaa

SEQ ID NO: 527230 - DNA, 303 bp, Stenotrophomonas maltophilia
atgcagactcaatttatcgcggaaataattgtgagcattgacgagaggttgttaggcgttgagcttctcactcgcttcattacctcagatggacgtccccttcaccctgagttcgtaatttcatcttgggatttagataggaagcggcttttcctatacgaacaatgtggaaacattgccattaagcaaacgtggttcgagcaaaagaatctattttgtacactgaacattgatcagcaaatggcttttctgatacgtcatgactacatacttagggaaggtgcgaacaagttcctgatatga

SEQ ID NO: 527231 - DNA, 258 bp, Stenotrophomonas maltophilia
atggtcatcctgcagtacggtaccgatacgctgacgaacctgaaaataatccggatgcgtatgcaatatgccaaatgccctgatcctgccctcatcagggatgtggatcccaaggataagcttcaccagtgtcgttttcccgcatccggatttacctgtaatggcaacgacttctccgggattgagtgtcagcgacaccccgccgattatcggattttcccctcccttgtggctgaagatgatgtgctcaagtactag

SEQ ID NO: 527232 - DNA, 1410 bp, Stenotrophomonas maltophilia
atggaaaataatgtgaacgcaaaaattaaataccttatcaatcatatttacggtgaatcattttcagatgcacaccttgacgtgttattaactaagcttcaacaggcggcggttaatattacggagaagcgtaagtcaggctgggatgaaaaagatgttgttctgattacctatgccgatcagatctccgcgaaaggggagaaagcattgccggtatttacccggttctataatgagtggctttctcgtactttttctcatgtccatcttttacctttctatccttggtcatcagatgatggtttttccgttattgattatcataccgttgcacctgaaacgggaaactggcgcgatgtcgcggaattaaaacagtcagccagcttaatgtttgatttcgtttgcaatcatatgtcagcgaaaagcgaatggtttgcgaattatctggcgcagaagcctggttatgaagatttctttatttctgtcgacccggaaaccgatttatccgcggtgacgcgcccacgcgctttaccgctgttgacgccgtttacgcttaatgatggcagcgttcgtcatttatggactacattcagcgatgaccagatcgatctcaatttcgcctcgccgcaggtgctgattgcaatggttgacgttctgctccattacctcatggaaggggcgcgttatattcgtctggatgcggtcgggtttatgtggaaaatcccgggaacaacctgcatccatctggaacaaacccattgccttatccagctgttccgcgccattacggacgccgtggcacctggaacggtgatcattactgagacaaatgttccgcacaaagacaacatctcttacttcggtgatggtgaaaacgaagcccagatggtctatcagttttccttacctccgctggtgctgcatgccgttcatcgtcaggatgtgaaagcactttgccaatgggcggggtcgctggcactgccttcttcacacactacatggtttaatttcctggcctcgcatgatggtatcggtttgaatccgctgcgcggcattcttccggaatcagagatcctctcgttggtcgaaaatcttcagcaggaaggcgcgctggtcaactggaaaaataatcctgacggaacgcgaagcccttatgaaattaatgtcacctatcttgatgcgttaagtttacaagacagttcagatgaggaacgtattgcacggttcctcctcgcgcatgctgtgttgttaagtttcccaggcgtcccggctgtttatattcagagcattcttggttcgcggaacgattatgaaggcgtcgaacgcctcggatataaccgcgcgattaaccggaaaaaatacacggcggggcagcttggtagcgaactggtgatgctgccaacttactga

SEQ ID NO: 527233 - DNA, 546 bp, Stenotrophomonas maltophilia
atgacaaaacaaaccgtgaatgtctacggcatttctgtccgggttgactccgcagggagatataacctgaacgatctgcatgcggcagccgttgccaatggtgaggcgacagaatcacagaggccgaataaattcatacgaagtgcggcggtaaagcgctttgtttctgcactggattccagaggacaaaaatgtcgtctggaagaaaatcaatcacttaacattgtgaatggtggtgttaaccaaggcgtctgggctgccgagttgttagctattcgctatgcggcatggattaggcctgaatttgaaatccgcgtttatgaaacattccgcgaggctgtgcttaatgggcttagtaatatgaaccgactcaaccgacttgacctgctgatcgccaatgagaccaaagaggtcagcgcatgtgcccgggcaatgaataagtggggcgtcggtggtcgcaagaagcttctcaattgcgctcgtgagcggatcgtcagccagatggaccctgacatggtcacgctgatggaagcaaaggtcgggtag

SEQ ID NO: 527234 - DNA, 321 bp, Stenotrophomonas maltophilia; identical to SEQ ID NO: 527166

SEQ ID NO: 527235 - DNA, 402 bp, Stenotrophomonas maltophilia
atgaccgtggaaaatgacggcgaaatttatctccccaatgcgatgcgcagttggttttataacccggatggtagcgatcgttttactgcaaccgatgatgcaggcggtacgccttttaagatccatgtagatgattgctatggagacagcggtacggctaaaaagctgagttttagcttttcgccgcagtcgggtttctggccaggacaaaatcaggtctctgaaaaatataaaaagaatgttttaaacaacgacggcacgtcaaaaatcacttatgacgtaagcggtcaggatactgcatttttaacggattatcagttctatgcccgatatcaaaatattggcgtagtggctggtggtgtcgttaccagtaaagtattggttgacgtcacttacgaataa

SEQ ID NO: 527236 - DNA, 507 bp, Stenotrophomonas maltophilia
atgagtatggcggatggcaatgattctggctggatgcagatttaccacaccggaaatacgacccgtgcatctgacggtacgttaaaagccgcttctccgattgtacagttgttcggtgatggttcgtgtcagcttaacgatgaatctgaaggatgcactgtaacacgccaggctatcggtgagtatctgattgaagggtgtgtggggctgaacgctgacgcggcatggggtgggatagatggaggttttgacatcccaaccgatcgcaataagcagccgcttatctggctggattatgaggtaaatgcagacggatcggtgctggtaaaaacattccaccgggaataccctacagcgccgtcatttgcgaggaacgtattgaagggtgtggcggatggcgaacctgtcgacatcccccgtgaccagttcgtaagtgttcgcgtggaaatgcccgtggacagcctctggaaccagcgacgcaaagatgcattaacagttactatttaa

SEQ ID NO: 527237 - DNA, 573 bp, Stenotrophomonas maltophilia
atgagtggccagttcagtaagggtaacgttcagtccgtgctggatcgcatcgccgtccttgccgcccagttcgatgacgatggcgaaatggatgtctggggctttggagagaagcataagaagtatccaaatgtcactctggataaccttgacgattacattcagaccatccgtggatccggaaagcgttcagcctgggaaaatttgccggggcttggtgggactaacaatgaaccaccggtaatggaagaaattgtcgactacttcaaagactcaaaaatcccggtttacatagtgtttattaccgatggcgggataagcaagaccggagcaattaagaatgctatccggcgctcagccaacttcccgatcttctggaaatttgtcggcctcggtggatctagctacggaatcctgaaaaacctggatgattttacagaccgccgcgttgataacacccatttctttgcaatggatgacttcggctctatcagcgatgaaaaattatacgataacttactggaagaatttagaccgtggatagatgaaacaaaaaggttaaatatcctttaa

SEQ ID NO: 527238 - DNA, 504 bp, Stenotrophomonas maltophilia
atgagtaccgctaaactggtgaaaacgaaagcgtctaatctgctttatacccgtaacgatgtatcggatagcgataaaaaagcgaccattgagctgctgaatcgccaggtggtccagttcatcgatctttcgctgatcaccaaacaggcccactggaatatgcgcggtgcaaactttattgccgttcatgaaatgctggatggcttccgcacagcactggtgactcatctggataccatggccgaacgcgccgtacagctgggcggtgtggctctgggtaccacgcaggtgatcaacagcaaaacgccactgaaaagctatccgctggatatccataccgttcaggatcacctgaaagagctggcggaccgttatgcgattgtcgcgaacgatgttcgtaaagcgattggcgaagcaaaagatgaagacaccgctgatatcttcactgccgcgtcacgcgacctggatcagttcctgtggttcattgagtcaaacatcgaataa

SEQ ID NO: 527239 - DNA, 543 bp, Stenotrophomonas maltophilia
  misc_feature (70)..(96): n is a, c, g, or t
atgactcttttgaaaaagttacttttgccgacattaatcgtccttttcccggtggcaactcttgctaccnnnnnnnnnnnnnnnnnnnnnnnnnnncaatcatcatttgaagcgaaagtggtaaaaattatcgacggggacacaatcaccgcgctcgatggtcagaatacaaacatcaaaatccgcttgtacggtattgatgcccccgaaagtaagcaggcctttggacaaaaggctaaacaagcgttgagctccgcgattgctgcacagaatattacggtaatagaccacggacctgatatttacggcaggatgctgggaaccatttggcttgatggttatgacataaacgcctcaatggtagacagtggctatgcatgggtataccggtttgacggtaatgccatcgtcccaaactatctgaaattcgaagcttcagcgcagaaagcagttaaaggcctctgggtagatccgaatcccgttgccccctgggagtggcgccagcaaaaccagaaacctcaaaagacgaaaagcagggggtga

SEQ ID NO: 527240 - DNA, 621 bp, Stenotrophomonas maltophilia
atggcaagatatttgggtcctaagctcaagctgagccgtcgtgagggcaccgacttattccttaagtctggcgttcgcgcgatcgataccaagtgtaaaattgaacaagctcctggccagcacggtgcgcgtaaaccgcgtctgtctgactatggtgtgcagttgcgtgaaaagcaaaaagttcgccgtatctacggtgtgctggagcgtcagttccgtaactactataaagaagcagcacgtctgaaaggcaacacaggtgaaaacctgctggctctgctggaaggtcgtctggacaacgttgtataccgtatgggcttcggcgcgactcgtgctgaatcacgccagttggttagccataaagcaatcatggtaaacggtcgtgttgttaacatcgcttcttatcaggttaaagcgaatgacgttgttagcattcgtgagaaagcgaaaaagcaatctcgcgtgaaagccgctctggagctggctgagcagcgtgaaaagccaacctggctggaagttgatgctggcaagatggaaggtacgttcaagcgtcagcctgagcgttctgatctgtctgcggacattaacgaacacctgatcgtcgagctttactccaagtaa

SEQ ID NO: 527241 - DNA, 1005 bp, Stenotrophomonas maltophilia; identical to SEQ ID NO: 133534

SEQ ID NO: 527242 - DNA, 396 bp, Stenotrophomonas maltophilia; identical to SEQ ID NO: 118202

SEQ ID NO: 527243 - DNA, 837 bp, Stenotrophomonas maltophilia; identical to SEQ ID NO: 118201

SEQ ID NO: 527244 - DNA, 1140 bp, Stenotrophomonas maltophilia
atgagtaaccagcacccatttatgcatttcgatgccatcccagattatcgccaacaaggtaaagtcgagcacaagttaactgatatcattttgttaacaatttgcgcggtgctttccggtcaagatgactggaaagctatccatctttacggcactagatggttagattttctcaaacgctttggtgattttagtcatggtgttccctctgccattaccattgcaagagtgatgggaatgattagcgcgacacgcttacaaaagtgttttatcgaatggatgaaatcctgctgtgaactgacggacggtgaagtgatcgccatagacggtaaaaccgtgcgtggctcttatgatgattcccgtgggcttggtgctatccatatggttaatgcgtttgcgacagagaatggcgtgtgccttggacaacataaagtttacgagaagtccaatgagataaccgctatccctgagttgcttcaactgcttgatatatcgggttgtttagtcacaattgatgcgatgggatgccaaaagaaaatcgcgcaaaagatccttgaaaaaaacgctgattacttgctggccgtgaaaggaaatcaaggccgacttgagcaagcttttgataactattttgatatgagcatgctgcaaaaacatgatggtgattcttacagtacccaagaaaaatcgcgaggcagacaggaaacacgactggctttagtgaatgaagatttaagtgttttgggcgatcttgagtttgattggccagggctaaaaacgatgggaattgtggtatcgattagacaagaatcagcagtggcccaagagtcagaagtaacggtgcgatattatattagttcgaaagcgctcagtgctaaagaattgttaaatgcttcacgctcgcactggttagtcgagtcgatgcattggatgttggatactgcatttggtgaagatgcttgccgtaaacgagcggaagaacgagcagagaatttcgcaaggatcagacagatgtgtttaaacatgctaaaaagtgaaacgacactaaaagcgagtattaaacacaaaagagcgatgtgcgcgatggatccggagtaccttttgaaggttctgggaagcctttatttacgggaatgttcatga

SEQ ID NO: 527245 - DNA, 264 bp, Stenotrophomonas maltophilia
atggcaaggaggcagattctttctctgtcggaaagagaatcattactggcattaccggacgatgagttaacgctgacccgaatggcctatttcagtgagcatgatctggcgattatcagtgctcaccgtaaacccgccagccgttttggttttgccgtccttctttgctatctgaaaaatgttggctttgccccggataaaaaaatcccaccctctgatgcgttgctggggtccgcttggaaaaaggaaattatcctactataa

SEQ ID NO: 527246 - DNA, 600 bp, Stenotrophomonas maltophilia
gtgattatcgaatcggctcactcacgtttcccggtcatcagcgaagacaaagatcacatcgaagggattttgatggcgaaagatctgctgccgtttatgcgcagcgatgccgaagccttcagtatggaaaaagtgttacgcccggccgtggttgtgccggaaagtaaacgtgtggatcggatgctgaaggagtttcgctcccagcgctatcacatggcgattgttattgatgaatttggtggcgtttccggtctggtcacaatcgaagacatccttgagctgatcgtgggcgaaatcgaagatgagtatgacgaagaagaggatatcgacttccgtcagctgagccgccacacctggaccgtgcgcgcgctggcctccattgaagacttcaatgacacctttggcaccagcttcagcgatgaagaagtggacaccattggtggtctggtgatgcaggccttcggccatcttccggcccgcggtgaaaccgttgacatcgatggttaccagttcaaggtcgcaatggctgacagccgacgtattattcaggttcatgtcagaatgccggacgactcaccggtgccaaaactggaagattaa

SEQ ID NO: 527247 - DNA, 654 bp, Stenotrophomonas maltophilia
atgaaagcaataaccgatatcggccaggccgttgtccgcgccagtggcaaagaggtattcctcaacccttcattcctcgccatgtctcgtattgggtcgccggaacagattgttgatgctttcgtgaaggttcatgccgggcattacccgaaacaccgaatctccgatactcaaatcatgaaggcggccaatgcccgatgctttgctgaaatggcagcatctgcggcaaacgtagtacggaattgctctgagggtgatattgcagaggtgattggttcgtactcggtgaacgcggcagggcgactgctgttcaagcctggggctatcccgatcgaggatgttatccagcttgcccgccacctgattctgcatggcgtaatgggcgatcagccgccggaggatttcgaaggaaaaaaaggagaatacagtgacaaattcgatgtacgatcattcgtctacaccgctgttgctcacctcggaatgagcgagtctgatgcctggaacatgacaatgaccagcttccgcgccgccatgaatgccaagttcccgcagaaggaaaaagcaaaagtgccgactcaggagaaatacgacgaggttatggactgggccgagcaaatgctggctatcgacgcgcaacggaacggaccgcattaa

SEQ ID NO: 527248 - DNA, 618 bp, Stenotrophomonas maltophilia
atggtgaataagtcaagcgtacttttcattgaccgcttttttagtaaatatgtttggaggatatggatcgtgaggagtcttaccgccattttaataattcctgctcttgtcacagcctgtagcatgcaggaaatagcagatacaaataataaaatcagtcatggtgcttcaggtataatgaactctttgaggggaaactctaacccatcaactgatgttacgacaccaatgcatttacctcagtcattaaaaaaagaatccaagtctaaaaattatactgtagctgttgatgtagatactgctgctgccagaataaaaagacattacaagtttatgtcaagtcaggagctggatagtttacggaatagctctaatgacggggcatggaaagcggccgctgaagatgatgcacatccagtttgggaggcaatacctggtagctattataaaatgggctctgactggaatgataacgatcatttagatgtagaaattgaaaaaaacgggagtggaagtaaactctatataacatattcatcggcatctgcagaaaggctatcgggatctggcgtacagaagttgatgaaggaaattcattccgtggctataggtgagtga

SEQ ID NO: 527249 - DNA, 735 bp, Stenotrophomonas maltophilia
atgaataacggagctgagtataacaagacgctgaaacagcttgtggaaagtggtcaaactcttaacgacgagcaaatcaaacaaacctacgcttacggcgagctgtctgtggcaatgggtaatctgatgaatggtgtggataattctttattcaccggattcatgaaaggcttcgctgatggtggtgatgaccttgtgaagaacaccaaagtgattactgaatcggctggtgagatttccagtgtggtgagtgatatcaatgctgggcttcgctctcgtttcccagagtggtttagcaatgctaacaaaccagcggcacagagtttgtatgatggtgctgttacaggaagtgccaacagtgctgccgattgggtgcaggacaagacagggtttaatacccgtagtgtcggtcatgctgttaaaggttggttaggaatagatgataagcctacagggacagcggtagaacagtacggcctgaatggtgattctctgcgagggggagcgcttcgtgattctgctatatcatccctaaccagcaccaatagtgcgccatcgtacaaccttgcacctgtattcaatctcaatcttgaagcgtctgttccgctcaccatcgccagcgatagctcaagattaagcgattacattgatttccaggcgagagcctcacaagcaagtttcgcacagtcactaaccttgtcagccttgagcggtcaaagcagtacaggcgggtga

SEQ ID NO: 527250 - DNA, 381 bp, Stenotrophomonas maltophilia
atgccattcatcaaacttgaactttctgagcatttccctggtttggataagggattgaaaagtcccttattaaaatcgctgagccagggtgtaaatgggctatggctcgatgaccttggcgcaggaaacgcgaatgtagttagtttgatggaaggatactttgaggttgtaaaggtagatcgctgcttctttaatgaacaggtgcagaaaccaaccttcaaccagctgattgcatcaatcaaaaaacactgtgacaaaattattattgaagggattgagaatagagatcatatggggttactgcgtgaggtggggatttggggattacaggggtatctttttaaatctgtcccttttaaaaacgtggatttattgctgtag

SEQ ID NO: 527251 - DNA, 693 bp, Stenotrophomonas maltophilia; identical to SEQ ID NO: 161489

SEQ ID NO: 527252 - DNA, 240 bp, Stenotrophomonas maltophilia
atgtttgcactcattcaacgaggtcagatttacgctgaccagcacggttggcctgtaatcatccacagctgcacatcacagatagtccgctactggcgacagggccggataaacaccgcttcaatcgaccgattcaacaatgattttgagcacctcgaccaccgtgaggcggcacagatacgcgccgaactggagaagagcgagcacattaaatcgctgcgtgcccggcgcgctgcctaa

SEQ ID NO: 527253 - DNA, 981 bp, Stenotrophomonas maltophilia; identical to SEQ ID NO: 119795

SEQ ID NO: 527254 - DNA, 600 bp, Stenotrophomonas maltophilia
  misc_feature (546)..(555): n is a, c, g, or t
atggctgccctgaaggttgaagaggcccgggcccagttcaacgtcacggatgcagatcgttatccccaactgaatgcctcatccgggatcacatacaacggtggtctgaaaggtgacaagccgaccacacaggagtacgacgcgggtctggagctcagctatgagctcgatttttttggcaaacttaagaacatgagtgaggctgatcgccagaactactttgccagcgaagaagcccgtcgtgccgtacacatcctgctggtctccaacgtttcacagagctatttcagccagcaactggcgtacgaacaactccgtattgcgcgggaaacgctgaaaaattatgaacagtcttatgcattcgttgagcaacaactggtgaccgggagtacgaacgttctggcgcttgaacaagccagggggcaaatcgaaagtacccgcgccgaaatagccaaacgagaaggcgatctggctcaggcaaacaatgccctgcaactggtgctgggaacgtaccgcgcagttccgtcagaaaaagggattaaaggnnnnnnnnnntattgctgcagcgtccggatattatggaagcggaataccagttga

SEQ ID NO: 527255 - DNA, 648 bp, Stenotrophomonas maltophilia
atgaatattaaagaaagatttgctgaactctgcaaagattcagagttcattaattgttacaatgagttcaacggaactaatcttaccgttctggatcagtctcagttattcagtgtaggcacgttgtttcaccttgttacgatcaagatgaaaaacaacactgagttgttacttactgatgcgtattacgatatcgaatacaaagcgaagaattatatcgccactggtgactttactgatatcagcacaatcgatgaagaaaaagaaatcaataacaacgggatgtcagttaagctggcaaacgtaagaactgaatatatcaacttagtcagaacgaaacagcttgatacagccgaagttaatattgatatatgttttctgagtcctgaaacaggcaaagtaagagagagttttaatctgttcaatggtgagatcgataagctcacgattaacattgactatgatgataacgaatcgaagaacgaaaccgaagttcaactgaactctatctgggcagttctggagaaatcagcacgaaaccatgcgtctgatggtgttcacagaagctataaaggatcagagaacgattcattcttttcaagaatcggtaaatggaattccgagcaaaagtggaccagcaagaaatga

SEQ ID NO: 527256 - DNA, 156 bp, Stenotrophomonas maltophilia
atgaaactgtttccgaatcttcgtgctcaagttcagcttggtgaagaaatcaaatacagatctcctaaaggtcgattcgtactgactaacgaaagttatccttatgacattaaatcgctgagtaagatccaacttaaagcaacagaggttatctaa

SEQ ID NO: 527257 - DNA, 672 bp, Stenotrophomonas maltophilia
atggcgtcggcgaacggcatgtatggcaaggcgattggcgcttatgacgcgacgctttctttgttcatcatgaatgagctacgtaatggtgccagtaaatacaaaaccccacttggtctggcctcggatatgcaactgtttgaggcatcattaaaacgtacgaataccatggcatctcaggggcagctctggctgcaattatctggtgcggcaattgcgtttcttgaaatgtttgcgtacatggttgctccgtttgcattgctcatgctgcttgcactcggcggaaacggtgttgccgcagcggcaaaatatcttcagttgattctcttcgttaatatgtggccgattactgcggtgatggtcaatgcctacgtgaagaaggtggcaacagcggatcttgatacatggagcacactgaatagtcagagtaacgcggtgacttggatgggcttaccagggcttgccgaaacatatagttcttacttatcagttgcatcagcgctctatgctcttatcccagtcctgacgctgttcctgatgacgcaatccattcatccaatgatgaatgcgatgaaaggagttacgccacccgcacctgtggactccagccaccccttttccaagtttttcctcgccaccaagtcccaaacttccattgaggagaaggtttga

SEQ ID NO: 527258 - DNA, 705 bp, Stenotrophomonas maltophilia
  misc_feature (102)..(111): n is a, c, g, or t
  misc_feature (664)..(673): n is a, c, g, or t
atggctgaccggtctcagagaaatacattatggccttaccagaatcattcctgttatctcatgctgaatatcacattgagtataacactccctatgtcaccnnnnnnnnnncaactggacagttgtcttaaaactatcagcagaggacgtaagttacctttcgctattctgtataaccgttcaggatacaaagagagtgctgagtcagtcaccattcttgatgctatccgttatctcaatatgttgccacaagatgcaatgaaagtacgaatagctaatccacgtatagctaccttccagcgtttatttactagcaccgatttatattcgcgtgtccataacgggaaaatagcaggggcagacactgttaccacagcagaaatgctgaataagctgatacaggattaccggtttgctgtgagccaggcaggatttaaaaaagcatgcagaaagtaccagagggcttcggttaaaaatctgaagggagtgatgaattacatcagacatctgcaggagcgtcattcccggctgctggtcttgcgggttgatttatcatgggcaaatgagcacaaagctgatatcactgctgatgatgcccgtaagcaccgtcagcagctgtttcgcaatatgcaaaagaatccaatctttcgccatgtcctcgggnnnnnnnnnngtatggaaactggaatatggcccacaacgtaa

SEQ ID NO: 527259 - DNA, 393 bp, Stenotrophomonas maltophilia
atgacccctctcggggttcttgctggtgcgattctggttactgacgggacaaacagcatcagtaaagaagtggctcgctacgcaactaacaacactaccagtgaagggctggtcgcgaatgccgcgatgtctacagctgagtttatgggctttagtcgtgagaatgggttaggtgtctacaaatcaatttcactggccgctaatgcgtacaccatttttggcttgttacggcgacctggtacctggcgactgtttcgttatctccctgctgactattaccgaaaggtgagcacactgagccgcccgcagcttacaatgaaaatagcgggttatggcgtgaaagctaagattatttttgatctgttgtccgtcagcgacccgtcccagaattag

SEQ ID NO: 527260 - DNA, 327 bp, Stenotrophomonas maltophilia; identical to SEQ ID NO: 119097

SEQ ID NO: 527261 - DNA, 210 bp, Stenotrophomonas maltophilia; identical to SEQ ID NO: 491571

SEQ ID NO: 527262 - DNA, 180 bp, Stenotrophomonas maltophilia; identical to SEQ ID NO: 133515

SEQ ID NO: 527263 - DNA, 264 bp, Stenotrophomonas maltophilia; identical to SEQ ID NO: 133514

SEQ ID NO: 527264 - DNA, 231 bp, Stenotrophomonas maltophilia
atggggtatggcgacataaaatatctggcggcgctgggagcatggcatggctggtgtgtactgccagtactggcattagtggccgcgttaatggctctgctgtatctggttggtttctcgttgttcaaccctgataagcaggcattaaaaaacccactgccttttgggccatttctggcggcagcgggtttatgcgttggctgggaaagcctgattaactttccactttga

SEQ ID NO: 527265 - DNA, 477 bp, Stenotrophomonas maltophilia
atgaaaggtgatgttaaaatcataagttatctcaataaattattgggaaatgagcttgtcgcaatcaatcagtattttctccatgcaagaatgttcaaaaactggggactgactcgcctcaacgatgttgaataccatgagtccattgatgaaatgaaacacgccgataaatatattgagcgtattttattcctcgaaggcattcctaacctacaggatctcggaaaactgggcatcggagaagatgttgaagagatgctgcgttctgatctccggctagagctggagggtgcaaaagacctgcgtgaagccattgcctatgcagacagcgtacatgactacgtcagccgggatatgatgatccagatcctggccgatgaagaagggcacatcgactggcttgagaccgaactggatctcattagcaaaattggcctacagaactaccttcagtctcagatcaaagtggaaagttaa

SEQ ID NO: 527266 - DNA, 387 bp, Stenotrophomonas maltophilia
atgacgcgtagcgaagtgtatgacgcgctgagagcgtggttgcagtcgcatggctttgatgttggttatcgcgtccagaagcgattctggaatgagttggagaataccgagggggaaagataccttgtcatccagcagaacggtggcggcaagccagaagaagcgataacccgcgattatttccgcatcctcctcctgtcaggccagaacgacagcaatattaacgagattgaagatcgcgccgacgccatccgccaggcgatgatcgacgactacaaaaccgaatgcatcatttcgatgcagccaataggcggcatcaccgccatccagaccgaagaagggcgttacctcttcgatatttcctttcaaaccatcatttccagataa

SEQ ID NO: 527267 - DNA, 411 bp, Stenotrophomonas maltophilia; identical to SEQ ID NO: 496748

SEQ ID NO: 527268 - DNA, 255 bp, Stenotrophomonas maltophilia
atgcaggccgcgcatcgccagttcgccggcgatgtgcgtggcgagcgtggtcttgccgacgccgcctttctggttgagaaacgcgaagatcatggcgcggccctccgagctggaaagccggcctgggcgtgccatttcgtggttgtccaccgaaacggcgcgcttctactaaaagttatgtatttcttgttaggtaagttagagggaacgcaaacccgcgccgttgttggctttccggcgttttcgtactcctga

SEQ ID NO: 527269 - DNA, 144 bp, Stenotrophomonas maltophilia
atggctagcgggaagagaaagaatcaaaaggaatcgcctgaagaagagttagatcgcctgctggatgagcttgaactcacaccggagcaacgggagtttatcgaatccatgcgagaggataagagcgatcccagtagtgagtaa

SEQ ID NO: 527270 - DNA, 591 bp, Stenotrophomonas maltophilia
atggactctgacttcaaatcatggtgtgggatcgtttatgcattgtctaaccgtccgctcgactcggaaggtcagctggagctgaatttcccggagtttgctaagttctgcggttttgacactaagcgcattgataggcaattgaaagagcgttttgatgcttcattgacgcgtattgcccgaaccagtatctcgttcattaagaaaatacccggtacagacgatcagataacgataaacatgcacctcgtggaatccacgtactacgacagttccaccgggaaaatcgtcatcaagccaaattcgaagctcaatacgctgtatcgcgtcgacggtaaaacccgactctacctgaagacgttgcagaaactggcccgtaaggagtccgcacaggccctgtatctgtatctggctgagttaccgagcaccttttaccgtatcggatttgaccggctgcgtgaacgcctgcaactgtcctcacatcttggcaaccagaatgccacagttaaaaaggcgctgggccagcttaaagagatcggttttctggaatactccatagacaaagaaaacggcgatatagatgccggataa

SEQ ID NO: 527271 - DNA, 294 bp, Stenotrophomonas maltophilia
atgccgagttcgttattgggcaaggttggcaaccacctgcaaatgtcagatggtctgagcgcggtgaccagccgttataaggatatgggaagtgatgggatcaagacgtatgagagtgcatcacaaaactcagagcgtgcgattcgtcagcaactgaccgatgatccacgcttcgggtcggataaagcagatgcgttcgttaactttatgaagtcagaccttaacaatacaaacgaaccgtatcagtcgagaatagagagagctgaaaactggctgaatgataataagaagtag

SEQ ID NO: 527272 - DNA, 744 bp, Stenotrophomonas maltophilia
atgtccttcctgttaatcaggagggaggcctttctgtacctgatacatggacaaattatgaatagaatcatcaccgtactgatcgtgtcgtctgtgtcctgcccggtttttgccggggcctatgtcgaaacgcgcgaagcgtacaatacggcctctgagctgcacgaggtgatcctgcgtgcgggctataacttcgatatgggcgcggggctgatgttcaccaacgcttataacgtggggaaatgggacgaactgaagcacagctataacgaaatcgagggttggtatccgctcttcaaaccgaccgacaaactcaccttccagcccggcgggttaattaacgacagcagcgcaggatcgggtggagcactctatttagatactaactataaatttacggactggtttaatctgacgttccgctatcgctataaccataacaattacgatacgccggactataacggacagatggataaaaacgacacgcacgaattcgccaactactggaatttcaaagtgacggatgcgtttttctacacctttgagccgcactttttccagcgggtgaatgattaccacagcaaaaatggcaaagatcatcactgggaaattaccaacaagttcagctataaaatcgacagaaactggctgccgtatcttgagctacagtggctggaccgatggaatgattacaaccgcgagcagtaccggatccgtttagggttacgttattcgttctaa

SEQ ID NO: 527273 - DNA, 708 bp, Stenotrophomonas maltophilia
atgagcaacaatttctttagattaaatcatacaaccaaaactcttggaaagatatttcctgccttgttgatatgcacccctgcggttgcattttctgcaacgattgaccaatcaacttctgttcctcaagatttctcagccgatgctgaatatattattaataaaaacgtgacgatctcctccgctggtagtgaagcggcggtatcggtctctgggtttgcgatcgataatgtcactaacaaaggaaatatttccggtacaggaactggcctggatattaatactggcgcgcaacgtgtagttattaacaatgacagtggtgcaaccatttcttccaccacagcgaatgctgtgaatattcagtcattactcggcgatttcaacaacaatggaaatatcatcggtgcggaaaatggcatttatgtcagtgaaagctcctcagcagtaaatattaccaacaccagcactggagtgataaaaggaaaaacaggcctgagttctcagactggcattggtattaataacagtggtgcaattattggtacaagcggtgacgctatcacactaggcactggcaatacaaagatattaaacagtggtaccgtacaaggaacccagaacggcattaatgtaaaagatacggcaaaagtagatattacaaatagcggaacgattagtggcgatacggtgatgctgccaacttactga

SEQ ID NO: 527274 - DNA, 210 bp, Stenotrophomonas maltophilia
gtgattcaaacgctctttgatttccctacatatttcaagttttttattggcttgtttgccctggtcaacccggtagggattatccctgtcttcatcagtatgaccagctatcagacagccgccgcgcgaaataaaaccaacctgacggcaaacctgtcggtggcgattatcttgcttacgtctctttatctggggggatcctggtggtga

SEQ ID NO: 527275 - DNA, 756 bp, Stenotrophomonas maltophilia
atgcagcccggcatgtttgggcttggtcgtccggatggggcattaatattcaacacaacgagccaggatgatcttcttgctggattgacaggatatgggcttacagttcttcgaaataatgcacagataccagagccatggaatatatggaactattcaccgacaatatttgcccggacaggtgatacgtatagccttttttcaatgccttttcagtcatctggcaaagttcgtatttttggtggtgcagcagcaactggatggaatcacagcaggatattatacgatgataaaaacacagtcgtggatagcaatggctttataaagcaggcatccccggtcgtcaaaatcttcactgatggtaaatatgaaactaacgacgaatcagaaggcgtcacggtgactcgtctggatgtcgggcaatatcttattgaaggctgtaaagcactcaattcagacgctgcctggggcggtatcgacggaggatttgaaatccccacagacaggaataagcaaccgctcatatggctggattatgaggttagcgcggatggttctgtgctggtgaaaacctaccaccgaactcaccctgatgcgccagcatttgccaggaatgagcgtgatggattggcagatggtgagccggttgacatcccggctcaccagttcgtcagcgttcgtgtagaaatgccagttgacagcatctggaatcagaaacaaacggaagaggctttaaagcaggaacagggctcgtaa

SEQ ID NO: 527276 - DNA, 705 bp, Stenotrophomonas maltophilia
atgaacccattcaaaggccggaattttcagcgtgacatcattctgtgggccgtacgctggtactgcaaatacggcatcagttaccgtgagctgcaggagatgctggctgaacgcggagtgaatgtcgatcactccatgatttaccgctgggttcagcgttatgcgcctgaaatggaaaaacggctgcgctggtactggcgtaacccttccgatctttgcccgtggcacatggatgaaacctacgtgaaggtcaatggccgctgggcgtatctgtaccgggccgtcgacagccggggccgcactgtcgatttttatctctcctcccgtcgtaacagcaaagctgcataccggtttctgggtaaaatcctcaacaacgtgaagaagtggcagatcccgcgattcatcaacacggataaagcgcccgcctatggtcgcgcgcttgctctgctcaaacgcgaaggccggtgcccgtctgacgttgaacaccgacagattaagtaccggaacaacgtgattgaatgcgatcatggcaaactgaaacggataatcggcgccacgctgggatttaaatccatgaagacggcttacgccaccatcaaaggtattgaggtgatgcgtgcactacgcaaaggccaggcctcagcattttattatggtgatcccctgggcgaaatgcgcctggtaagcagagtttttgaaatgtaa

SEQ ID NO: 527277 - DNA, 519 bp, Stenotrophomonas maltophilia
  misc_feature (403)..(412): n is a, c, g, or t
ttgaatgttaacggtgatgaatacggctcactctatattagcggtacctggcaggattactggaatgactccagctccacttccgactacagcgtgggttacaacaatagttttgcttacggtagctatagcgtttctgtgcaacgcacgtacaacgaaacaggggaaaaggatgacagcgtttatttaaacgtcagtattccattcagcatattcaataaagatagcgcgcagtcaggcggatttaataacgtcaacatgagcctgcgcactgatttaaaaggcggtaccagttttaactctacggcaagcggcaactccaaaaacagtgaagtgagctattccgttagcgcctcatcaagcgggggcaactacggcaacctgaaccaggtcagtggctatnnnnnnnnnntagtaaacagtattccgcgagttataacggcggaatggttgttcactcgggtggcgttgtatttacatccggcagtatcggcgaaacggattcacttgcgctggtaa

SEQ ID NO: 527278 - DNA, 486 bp, Stenotrophomonas maltophilia
atggtgtggccgcagtttgcaaacggtcaggccggattgaaaggccccgtccaggctggtgataaatgccttttggtggtctgccagcaggcaaccgatggcagcgacgacacaaggcgattcgacatcatcgactcatacgttatccctggtgctggttatagtgatgcagtccctggcaacgatgacgtgagaatgtattttggcgatgccttcattgctatcgatgccaacgggaaaatgaccattaatgctccaggtggggtggaagaaacaacaccgttgcataccgttaaaggaagcatgaccgttgagcagttgttcacttaccagggcggcatgactggctcgggcggtgaaacatcggtagctaccataaccggcacgatgcaggtgattggtgatgtggttatcaatggcatcagaataggcactcaccgtcaccaaggtgatagcggtggcactacaggaggcccggagaactaa

SEQ ID NO: 527279 - DNA, 393 bp, Stenotrophomonas maltophilia
gtggccgataccgcccatcgccaccagcttctctgctttttctaccgcgtcatcgaaatctttcgcacggtacattgccagtgtcggggacagtttttcgtgagcaaacggctcactttcatcaacgactttcacttcaccaatcagaatcttggtggtagcagggacgctaaagccggcgagttcagcgattttatacgctggctgacctacgatagctgcgttcagtgcaccatttttcagaatcacgtcctgaacggctttcagttctttaccttgcaacaggtagccgccgtggctggcgaaacgttcacgaacggcgtcgtataccgaatcaaccacgacaacagactgttcagatgcacagataacgccgttatcgaaggtttttga

SEQ ID NO: 527280 - DNA, 537 bp, Stenotrophomonas maltophilia
gtgaaggttgaaaaaagcgatgttctggcgtttaccatttcagatgttgaacgcctcgacccggtaagggtgatgattgaaaactatgagcccggtaaggggcgcatcaccatcacctgcttcggtaaggcctggaccggcgcctggtttgctatgggcggtgataccgtgcaggagttcattaagcgcgtcagcaatgagtaccttataggctatttcgacccgcaactgcaaagcacggtggatgatgataacgacgccaaccttgaattcgtcaaaggtgagatcatcaaactccggcgccagcaggaaatctatgctgatgatgccagggaaatgtgggatgaggctgaagatgctgaggatgtgaaggcgagctgctgcaactatctcgtcggcgacaagttgcttaacctgctgggtgatgacccatggtacgcaaaatggccgtctgtgccgaaccatcattatcagtacctcgaacgcatcattgatgcagtgcgcggtgggctcgcagagctggagtgcgccgcatga

SEQ ID NO: 527281 - DNA, 138 bp, Stenotrophomonas maltophilia; identical to SEQ ID NO: 147211

SEQ ID NO: 527282 - DNA, 222 bp, Stenotrophomonas maltophilia
atgaaaagattcctttccgttgcacttctcgctgcgctgcttgctggttgcgcgcacgactctccctgtgtaccggtatacgacgatcaggggcgactggttcacaccaatacctgtatgaaggggactacccaggataactgggaaacagcaggtgcgattgccggtggcgccgcagcaatagctggcctgactctcggtattgtcgccctgactaaataa

SEQ ID NO: 527283 - DNA, 222 bp, Stenotrophomonas maltophilia
atgaagcttcgggtaaaccgatatcgcgtatcggtgttgtatacggagctggcaaagccaacgatctcatcagggttaatgttctttgatgacgggttttctggcaaaaatgcaaacgtgacgttaagcattttgccaatgagactaaatacatcagggatgatgccagtaaacgtaccgttagcatactctgaaaaaggtggcgcggttgttggcagctga

SEQ ID NO: 527284 - DNA, 279 bp, Stenotrophomonas maltophilia
atgttgcaaaaatcacagttcgatattggcaagagcaatactaaccagcctatgactgctacagaagccggattctacgacgtacatctctgggaattcccgatcatgacaatgttgaaattgctgataatcggtgaatgtacagcagaaccttatattgatgccagtctgacgtatatcagcgaagttgatccaatgtgggaaaatgacagcatgacagcaaccaaaatttccaaaagtaacttttttagcttcttcaccggcacgctcactatttag

SEQ ID NO: 527285 - DNA, 132 bp, Stenotrophomonas maltophilia; identical to SEQ ID NO: 144599

SEQ ID NO: 527286 - DNA, 297 bp, Stenotrophomonas maltophilia
atgcctcaggaaagtaacatccgactttccctctaccagaacaatcccctgcgccctttccataccggtctctggcagcacccccaggctttcagtggcttccttcagcactgcgtcatccggcatttttactacgggttcacccgcctcatttcgggtgacataacgtacaccttcgacagggatcaatccggccagcgccgggacatgggtggtgacgataatctgacggtgcggctggcctgccagtgccagcaacgctttcatcagcatcatctgatagttcggatgctgtga

SEQ ID NO: 527287 - DNA, 591 bp, Stenotrophomonas maltophilia
atgtgggctgaaatgaaaatgaatccgactgacctcgcggatgtcagtggctacacctacacctatctcatgaacgggcaggccccgctgaaaaactggaccggactgttccgtcccggtgaaaagatacgcttacggtttatcaacggctcggcaatgacctatttcgatatccgtatccccgggctgaaaatgacggtcgtggctgcagatggccagtatgtaaacccggttaccgttgacgaattcaggattgccgttgccgaaacctatgatgtcattgtggagcctcagggtgaggcctataccatcttcgcacaatccatggacaggaccggttacgctcgagggacactggccacgagagaggggttaagtgctgccgttccccccctcgatccccgtcctctgttgaccatggaagatatgggtatggggggaatgggacatgatatggcaagaatggaccacagccagatgggaggcatggataacagcggagagatgatgtctatggacggtgctgaccttccggatagcgggacatcctcctgtctcttatacacatctccgagcccacgagactcctga

SEQ ID NO: 527288 - DNA, 498 bp, Stenotrophomonas maltophilia
atgcgtgacgatggtcaaatgcccgcaatttcgcagccaaaaaaagagccggcacctactgacaccttccgcattgaagcgctagacttttacgtaagcgctggacctggagccatcaacagcgaatttgtagaggtgcttagatccgtggaatactcagtggaagatgctcgccggatgttcaatggcagaaaggctgagcaaatcagaatcattaatgttcgcggcgacagcatgtccgggaccattgagccaggcgacttgctgttcgtcgatattagcgttcagcacttcgatggcgatggaatctacgccttcatatacgacgacacgtcccacgtgaaacgcttgcagaagatgaaagataagctgcttgtcatttccgacaataagacttaccgcccatgggagccgatcgaaaaagaagaaatgaacaggatactcgtattcggaaaagtcattggcagcatgccacaaacgtacagaaaacacggttaa

SEQ ID NO: 527289 - DNA, 369 bp, Stenotrophomonas maltophilia
atgcacaagcgcgacgacggttttgtggtggtggacgaggatgtctgcatcggctgtcgctactgccacatggcctgcccgtacggcgcgccgcagtataacgcggctaaaggccacatgaccaagtgcgacggctgccacagccgcgtggcggacggcaaaaagcccatctgcgtcgagtcctgcccgctgcgcgcgctggactttggcccgattgaagagctgcgtaaaaaacacggtcagcttgctgcggtcgcgccgctgtcgtctgcgcacttcacgaagccgagtattgtgattaaacctaacgccaacagccgtccgacgggtgacaccaccggctacctggcaaacccgaaggaggtgtga

SEQ ID NO: 527290 - DNA, 216 bp, Stenotrophomonas maltophilia; identical to SEQ ID NO: 10294

SEQ ID NO: 527291 - DNA, 465 bp, Stenotrophomonas maltophilia
atgcaagtccctcgggtcgagaagatcaccctgaacatgggtgttggtgaagcgatcgctgacaagaaactgctggataacgcagcagctgacctgacagcaatctccggtcaaaaaccgctgatcaccaaagcacgcaaatctgttgcaggcttcaaaatccgtcagggctatccgatcggctgtaaagtaactctgcgtggcgaacgcatgtgggagttccttgagcgcctgatcactattgctgttccacgtatccgtgacttccgtggcttgtccgctaagtctttcgacggtcgtggtaactacagcatgggtgtccgtgagcagatcatcttcccagaaatcgactacgataaagtcgaccgcgtgcgtggtttggatattaccattaccactactgcgaaatctgatgaagaaggccgtgctctgctggctgcctttgacttcccgttccgcaagtaa

SEQ ID NO: 527292 - DNA, 177 bp, Stenotrophomonas maltophilia
atgttgccagcttatgatcaagcccgacagcgtcatgatttgcctttgctggcgagtgcaatacacacgtacatcgaagacaagcagttagaggctcaggctgcttgtgatgtgcccgatgacaaggaaagtcaaggctcgctgatgctgaaagaaatgttggggggaaaactatga

SEQ ID NO: 527293 - DNA, 282 bp, Stenotrophomonas maltophilia
gtgttgtttgatggtaacaaagatgcgaatgataataccctgctgggtttaaattcctccgtggacagcgatggtaatactgcgactggcgttgccgttaaactctatgaaagcgaccgtaacacgcagattaaaattggtgatatttctcagagtatcgaccttgccgaaggggaagattcaaaaacactcaatttctacgccaattataatgccaccaccgatgtcgtcagcaccggagaagccgacgcagatgccaatttcctgatggtttataactga

SEQ ID NO: 527294 - DNA, 171 bp, Stenotrophomonas maltophilia
atgatttgtcccaatttgagcgcgtgcgagtgcatcgcttactccaccccggatgaaatctcgcacctgctgctcaacaagatgtgctgtatgcgcatttattggcatcgtcaccgctttggttccaatgtcattacaaatgcgtgcttcgatcgcgtgagtagcatatag

SEQ ID NO: 527295 - DNA, 240 bp, Stenotrophomonas maltophilia; identical to SEQ ID NO: 243862

SEQ ID NO: 527296 - DNA, 249 bp, Stenotrophomonas maltophilia
gtgttcaatacgctgccgatgatgggtaaagccagtccggttagcctgggcgtaccggcagatgcctccgcaagcggcggacagcaacagcaggtacaggagcagcgtcgtcgcattaatgcgatgttgcaggattacgagttgcagcgtcgtctgcactccgagcagcttcagtttgagcaggcccaaacccagcaggctgctgtgcaggtgccaggaaaccaaactttaggaacgcaatcgcagtaa

SEQ ID NO: 527297 - DNA, 222 bp, Stenotrophomonas maltophilia
atggagaccttaacgacacgcaacaaagcggaggcacgacgaattgagagctgggtgcagcggcaaatcgcagatcttgggacaaccaagatcgctgaagtagctggcgtgaacaaatcaaccgtaagccggtggcgggagaacctggtgccgaacatgtcgctgctgctggccatcctgatttctaacagggatggagtgaagggagattttgaagcatga

SEQ ID NO: 527298 - DNA, 258 bp, Stenotrophomonas maltophilia
atgattgcaggcatgaccccggaggtttatcagcgcctggtgacggccgttgagctgggaaaatggccggacggtgtggcgctcacacctgagcaaaaagagaacagcttgcagctggtgatgctgtggcaggcgcgtcacaataccaacgcccagcacatgaccatcgacactaacggtcagatggtgatgaaaagtaagcgcgaactgaaagaagacttcggcatcacgccgaagccgattgcaaccttcaaataa

SEQ ID NO: 527299 - DNA, 183 bp, Stenotrophomonas maltophilia
atggctaatgttgaatcaaatgacgagcgtaaaaatgcattgattgccgctgaagatgaagtgcgccagcgtgtaaccggcgtatcgcacgaccggggaagagtgatgggcgattatgaaattggccgcatgcgctctctctttactcacaacacgcttctgagcccaaataagaaacactaa

SEQ ID NO: 527300 - DNA, 195 bp, Stenotrophomonas maltophilia
atgcgtgcgcaactccttgacggtaaattctccggcgacagccgcaattacaatatcgccgtgacttgccgaaagcgaacgatcaaccaccagaaggtcaccatctccaattccggcatccgtcatggagtcaccgcttactttaataaaatatgtggcgttagggtgggctatcaaaagcgtattgagatttaa

SEQ ID NO: 527301 - DNA, 183 bp, Stenotrophomonas maltophilia
atggagaggataaggacgaatggcgagacggctttcccggtcaccgacaaatggcgcaatttccagcgtcacgtcgagggcagtgaattcatttccggaagcgaggagcgggtcgatgtccaggcgctggatctccgcacagtcaacaatgaggttggagaccttcaccagaaactggcttaa

SEQ ID NO: 527302 - DNA, 276 bp, Stenotrophomonas maltophilia
atgatcgatccgctcattaccttcgcgctgctgggggccatcgcggccttctccatcggctgcgcaaagctcgtctcgtggctgctcgaccggcgtgattacaccgcctcgcagcagttgcgcgaagccgccttcgtcgcccaagcacgtgccgacctggccgcaaccggctggaccccggatcacgaaaccctctatcaggcggagatcgaagcctccaagcgcggtgacctgctcgccgccgcccgcttcgccgaaaagcaggaggcactgtga

SEQ ID NO: 527303 - DNA, 1314 bp, Stenotrophomonas maltophilia
atgacggaatttcgggaggataggaatgtcattcgtgcttttgacttcaaggcgtcagaggacggcacgcctggtacgctccattacctgcgccaaacctggttgttacgcgcgattggtgatcaactagaactgaagtcgggccagagtctctcccaggcgctagcgcttctcagcaaagacgaccagatccgactgtggcgtcgcatacagccggaagatctggccggggtccgagttgcttttcaggagggtcggattaagaaagtcgacttgcgtctgagcactgtgttcagctgcgaagatcctctggccatggtggatcaactcatctctctcctttcactgccggcagcgaaaggtcagaagtactcgggtatacggaaagagctgatcgctggatcctcattcaagaagatcgtccatctgatcctgacaacgctctggcgccgcggccatattttttactctctcgcgatgacagagtccttggttgcagaggctaaagctgagacagggctaaccatccgtagcggttctctggtacaagttcttcaggatcctgatctttttccgaacgaactgttcaggcgcgtttgcacccttgaaatcaaggcgctcggcaagcgggcggatgcaactcagaatctgtacttgtcatggtttctcctttcgactaattgcagcgacatcggtgacatatcacctgaactgttgacagcaactcgtgatttcaagctcgcgtcctacaaatggtgggagcttctccgagtaagcttcgaatcggtgcacggctcagctagctttccagttccgcctcgatccagggtgtttggggaagttcgcactcggtcacttgagtgggtcctgcgcgaagatgcccgactctctatttggacggagctgtatgagcggatgtttgcgtcggagtacaagacgtacacccctcagcagtacactgatgctaggcacttcttccgttggcttatgactttggagtcgtggccatctcctcaggcacttgaccacaagcaggtacggaatgatgggcaagaccgtgatggcagttcatttcgagagtacttggataactacgtcacaaagacgaccaggcagaagcccggtcctttaagagcagcatccaagacaggcgcaatgcgccagctttaccgcgtaatggatttcaacaggcaagagaacttgagcgcgattgcgctcgatcagcgattgattgggtctttgcgagttgataacccagttgcagaaggtgactggatttggaagcaggccgccccgacgtccccccaagattga

SEQ ID NO: 527304 - DNA, 690 bp, Stenotrophomonas maltophilia; identical to SEQ ID NO: 510458

SEQ ID NO: 527305 - DNA, 1050 bp, Stenotrophomonas maltophilia
atgctctgcgctggcctgcaggcgttcggcctgcacctgttgtgcgcggccgtggctggcctcggcgcgctgcttctgccggccgagcaggatcggggcctggttggcctgcttcgcatcgcggttgccacgcgcctggcgttgttgttgccgttcgtgctgttcgcgcgcgctgcgttgctgctggcggtgctgggcgcgcgcatgatcgagctgggcggcggcagctccgcgctcggcggcgcgcgcatcggcatagtgctgccacggtccgccgtaacgatgcagcccgcgcccatcgagttcgacgatctgctgcatgtgcgccagcagctcgcgatcatgactgatcaccagcaggccaccgcgccactgctgcaactgctcgtacagctgttggcgatggcgtgcatcgaggtggttgctgggttcgtccaggatcagccaatcggcaccgctggcccaggcaccggacagcgcgacctgcatggcctggccaccactgaggcgcgcggccggctgggcgggatcgagatcgtcgggcagccgaagcgcctgccattgctgctgcaggcgttcgcgcaggtcccagcggtcgccgacgcaggcgaagtcggcctcgtccacgctgccggcttcgatgcgttgcagtgcggccagttccgcgccgacgccggccagttcaccgaccgtgccggcgggtggatagccgggcgtcggcaacaggaacacgcggccactgccgcgcacctggccagtgtcgggcagcaaccgtccggccagcaggcgtgcgagcacgctcttgccggcgccattggcaccgaccaggccggtggcgaccggttcgaaggaaaacgtcagatcggaaaacagcgggcggccgtcggccaatcgatacgacacgcgatcgagcgtgagggaatgcggagtcatgcgacctccatggatgccgggttctcccctgcgcgcaggggcgggaagagtcaggccgtctggtgggaagacggcggcatcaatggcgcattggtcgcgagcctctgggaggaatga

SEQ ID NO: 527306 - DNA, 1056 bp, Stenotrophomonas maltophilia
atggccttgctaaaggatctaccgatcagcctcgccatgagagatgtcgcctttaaccaggacatcaaggcaatcgtcccgaatcaaggtctggatgcccgcttcctcgcttaccaactgcaaagcaagaagcacgcggtattggatatggtcgataccgcaggccacgggactggaaagctcgacaccgacttactgaagtctgttgatctggttatgccgccgatcccggagcagcgccgcatcgccgaaatcctttcgacctgggatcaagccatcgccactgcggagcggctgctgtccaacagccgcacgcagtggcatgcgctgcttggtatcaccctgcacctgccatcggccaacccggatgcctcgtcgcccagcgacaacggcggcttccccgcctctgtgcaacccggcatacccacgttgccgcctgcggccacaggttggcggcgcattcagctgcgagaccacctgcgtgaagtgcgccgcccggttgcactgaaggacgacgagtcgtacaccctggtgacggtcaagcggtcacgcggcggtgtggcgctccgcgaagtcttgcgtggcaatgaagtcaagacaccgacgcagttccacgtccgcaccggcgactttctgatatctaagcgacagattgttcatggcgcgtgcggcatcgtgccgcccgaactggatggggcggtggtgtccaacgagtacgcggttctcaactccgatggcgagatcgacctccggtttctgcgctacctgtcagagacgcggtacttccagcagacctgctttcactccagcatcggtgttcatgttgagaagatgattttcaaggccgatcactggctcaactggccgttcaacattccgccgctggagcaacagcaccgcattgttcacattatggaaacggcgagccgggagcttgcttccatcgctgagcaactgaaagcgctcaaacgcgagaaggcggccctgatgtcccaactcctgaccggcaaacgccgcgtcaagttgctggacgccgaaaccgtggtgcaagcatga

SEQ ID NO: 527307 - DNA, 342 bp, Stenotrophomonas maltophilia
atgactagcttcacctttgacgttcccaagtcgatcaggttcagtgagcttcaccttaggatggaggatggctcggttcactatgaatgggagccagttgcatcgatctgcgcgcagtcgaacatccccgaggctgacgtcgccctgggatgcggctccatcgtccctctcctgatctatggctggctgcaccaggcgctaccaggggaagtgactaagcaagagcgccgtgaggctcaacggattgtggagtcgcttctgtctccgattcttcgtaggcggcgtggcgtccttgcgcaggtcacggtccgtcgagtgggcccattgcccaccgtgcactag

SEQ ID NO: 527308 - DNA, 2199 bp, Stenotrophomonas maltophilia
atgaactttgaaatcaatcaaggtgtatccgtaaccgcaggggcgcttgcgcagctttcgggtgaagtcacggcagtgactttcaggaatcaggagaatggcttttcgatccttaaggtgctgtccgcaggcaccttggagcctgtcaccgtcgtaggggtgacgaatgccgcaataggcgagctggtcgacgttacgggatcatggaaggtgcatcgctcgtttggccggcaacttgaggcgactacggtcatctgccgccgccctagctcgcccagggcgattgagcgctttctcgcatcaggggcaatacctggcataggtgcggtactcgccgggcgcatagtggctgcgtttggtgctgagaccatggcggtgctggacgaagatcccaccagaatcctcacggtcggcggtatcggcaaaaagaggggcgaggagatcgctcgggcctgggcattggatcgcgatgctcgaaaggtgctcctggctctggcggagtacgaaattgggactgccatctgccaccgcatagcgaaacagtacggtgagaaggctttggaaatcgtccaggcccaaccctaccgcctcgcccgggagatcagagggatcggattcgctactgcggatgccatcgcaatgaaggtggggatcgcccgcgatgcgccggagcgaatcgaggctgggcttcggcacgtgatcgttgccgaaacaacaggtggaaacacaggattgccgcgtcgggcattcatcgagaaggcctcggccgctcttggccttgacgaccaagttgtcgaggacagcctgacggagcaccttgggaggaaagagttcatcgtgcctgttcagatgcacggcgatcgatacgtattcgaggcaagcctcttcgaagctgaacgacgtatagcgcgaactctgcaggagatgaacacccgctcaagttgggtgtccagcaaggaagccgctgatgacatcactgaggcggcacaggctgcttgcgctgtcgagctggcgcctgagcagcgccaggcggtttcaatggcacttcgagcccgggtcggcattctcacgggtggccctggcacaggcaagaccagcaccttgcgcgtgattctgcacgcgctgggacaggtgcatgctcgtgtggttcttggagcgccaaccggcaaggcagccaagcggatgcaagagagcactggtcagcaggctgcaacggtcgctcgtttgatcgggatgggtcaagatccaaccgagcacagggagatcgattgcgatgtcctggtgatcgatgaggcctccatgcttgatgtaccgatgttcgaccgggtactggagtacctcgttcctggggcgagtatcttgctggtgggtgacgtggatcagcttccatctgtcggagctgggaacgtgctcgctgacatgatcgccggcgagctgctgccgactactcgactcaccaaagtcttccggcaggctgagtcgagcgcaatcatccggaatgcgcacaggatcaatcgtggagctggtctggagccgcccgccccagcgggagaggctgacttctatttcctcgaggtggacggggcggagaagatcgcggaaacggtcgtgcgccttgtttcccacgatattcccgcaaggcgagggataccttcgcaggagattcaagtgctgtccccgatgcggaagggtgagacgggtgctgacaacctcaatcgcctgctgcaggcggcgctcaaccccagccccatcagtttcgtggacaggggcgggacgcgatatgggactggtgatcgggttctacagacgagcaacaactacgatctgaatgtcatgaatggagagacagggatcattgttggagtcgacaaggcgtcatctgttgtcgaagtagccatcgacgacagggtcgttgcgtatcccttcgacaacttgggggaactggacctggctggagccatgtcggttcacaagagccagggtagccagttcgccgcggtggtcattcctttgagcagccagcaccacatcatgctgcagcggcccatcgtctataccgccatcaccagggcaaccaagctgtgtttgatcgtcggtcagcggcgtgcgctggacactgcgatacggaacctgcgggcggtcccccggatcacttcccttcgggtccgcctccaggcggctggggcggccagcaagtga

SEQ ID NO: 527309 - DNA, 603 bp, Stenotrophomonas maltophilia
atgcggcaggcgagaaaactcatggaccagtacgggctgagccttggcgatgcatccgacgtcaatgtcagtgcccaggccacgcgctacaaggggaagaagggcattccgcgccgcctgcagcagttggccacgaccatcgctgccatgttccggtgtgtggtcatcgctaagacacggcatggagacagggccgagttgcagttcgtaggcgtgggtgccatgcccgatctggcgaaatacgcgtttgtgcaattggagcggcagctgaatcgtgcactggcggaattgcgctcggaggtcaaggtgccggtgaagcgttggacccggcttcgtaatgactttgcagacgggtgggcggtcactgcatgcacgcagattcccttgccgcccgaggacccggaccacaacgaaatgctcatgactcagtacgagctcatcaagaatcaggtggtcgtgcgcaaggattccgccacccagcggaaggctcgcgagcgcaagcggtcgccgctctttgatcttggggtgctgcggggccaaagcgcggaggtatttcaagggatgggcggcaagcagcttgcaggcctggagcagcagacatag

SEQ ID NO: 527310 - DNA, 1437 bp, Stenotrophomonas maltophilia
atgaaactgatcgcgtcgatcctgagatccctgggtgtcaatggcggcaaaccacgtctgtggctgcagggtcggatgcctgagcgggccggcttcctgcccggcgttacctacaacattgagcgaagagaagatcagaccgctgtcgtgctccgcctcgcggacgatggggcatatgtagtgtccaggaagcgagggaggacaggtgaggcacctgtaatcgacctgaactcagatcgcattctcggcatctttgaaggtgtcgacagcgttcgagtgctcatcggtgcgagcgagatctggattcttccagacgccttcgacgtcaagcgccgcgagcgcttggcgcggttccaggccgaaatggcggaggggtatgtctcaaccggcgcgctcgcgcacggcattggggtgatgaccagtgcgctgcatgccggtctggaatctatgggcttgaaatcccgcctcaggttcgccgttgagattgaagaggactcgctcgaacaggcaatgcacgcgaatcccgcgtgggacaaggacacgatctctgttgcgatgcccatacagcagctcgcgttcggtgaccgctacacgctgtcgcgactacccaaggtatcgctgcttgatttcggactcccgtgtaccgcagcatccgttgccgggcgtgccaagaagcacctggccaagcccgaggacgatccgaaggctgggcacctggtagccgctgctatcgcactgatcgcccacttgaacccggtcggcttcatctcagagaacgtcaccccttggttcaacacagcctcggccgcaatgttcaggacgcagatggtggagcttggttacgagatccacgagcatgtcatccaaggggatgcttatgcgctggaagggcgtgagcgcactgtatggatcggcctcacccgtggcattgagctcgacgtggcagccatcattgcaccgccgcgtcgtgtccaattcctcggtgaagttcttgaggatgtgccgttggattcacccatgtggaagccaatgacctacctgaaggaaaaggaagtaagggacgcggctgccggcaaaggattcagaatggcgatcgttgatgcgcaagctgagtcagtgggtacggtcgggcgggggtacgcgcgcgtgcgtagcaccgagccgaagattcagcatcccagcgatcctggactgctgcgccagcttactgtcggtgagcatgccgcggtgaagggtattccgagttgcctttacgctggtgatgctggagcaacccgggtacatgagtggttgggccagagcgtcatctggccagctttcaagcatatgggccagatcgttgccgctgctttattgagtggggtcaaggacgaagccagctccagatcccgtcatgaacgtgttcgtgtcgctgacttgttcgaatcagccgcttag

SEQ ID NO: 527311 - DNA, 483 bp, Stenotrophomonas maltophilia
atgaagcccggcgcggtgccgggcaaggatgatgaaatgaacggtttctcccgcattgtcggtgacttggcagttggactgaccactgctgctgtagctctgttgatccttttgacgccgcaggactttgtccttaccgggttgagtggtcttcaggtggcgatcatcgttctgctgtgtacggtgctggccagcctggttcgccatgacagcgctgcccaggtctaccgcgtgtactttgaactggcggtattcaccgtcgccctgtcatgggtcgcgtgggcgggcgggaatgatctcctgagcgcggcggacccgaccactttcggtgaggggcctgcttccttccgactggtaaaggtgttccaatcttgcttcaggctgatcggcgatcactatgcatggtggcttgtcggacttctcggtctggttgtctgcgtcgcacgattcaagcggcgcggcctctgcaagcccgcgcgatga

SEQ ID NO: 527312 - DNA, 447 bp, Stenotrophomonas maltophilia
atggcgccgggactggagatggagatggcgaaatcgagaagcgtagtaggagacatcgtaacgggcttggtcgttgcaacgtttctgatggtgttcgtgctcattcccgcgagctttgtgtgggagaacgtgttctggtggcagggtgcaatactcgccgcagagtgcatcacgctggtgctcctcatgggcaagagaaatccggaggggctgactcgactgcttcttatggtcgcggtggtcacaatgctgatctcatggatggcctggataggggttgatactcagttggaactgggtgagggagaattcgctgagagggtggggccagcattgcttggcctcttcgagctgcttaccaatgactttggctgggtactgattgcactgatcggaatcatgattgcggtcgctgcgtgggggcgcatgtctcaacgttctgcatga

SEQ ID NO: 527313 - DNA, 951 bp, Stenotrophomonas maltophilia
atgaacgaaatgaatgatagtggggcgatcggcgatctggaagtggcggtagtcgatcctggtcaggcacttcaggccgacttcgatctcccgcagtcggagttcgccagtcagctcagcccgggtggagtgaagcacttcaagggtgaagccaagcgatccgactcgatgtacttcatcgagccggaaaaactggtcgtcatggaaggcttcaacatccgtgtccgtactcagagctatctggaccacgtgcaggcgctggccgagtcgatgatcgagcacggcttcgatagcgacagcccgctcttggtcttcgtccgtgaagtcgatggctcagatgagatggtagtcattgacgggcactcgcgactcgaagctgtgggcatcgcgcgcaaggctggcatccagatcgacacggtaccggtgatctttgccccgaagtccatgaacatggacgacgccctgctgaagctgcgccgcaagaacaccgggcggctcctcaccgcgtatgagctcgctgtcctgtgcaagcgctttgacgcgcgtgagtacagtcatgcagagattgccaggggcatcggcaagacacctgcgtatgtcgcgagcctgctgctgttggcgcaagcaccacggtcactgacgaacctggtcattgcgggtgcagtcacggcaacgctggcgattgctgaaatccgtgcgcacggcccggaaaaggcggaggcccggctgaaagccatggtcgagaaggctgctgaaaagggcaagggcaaagtcacgagcaagaaccgaccggaggcgaagttcgaatcgggagtgaagaaggcggcaccacagctctttgagcgggtccgttctatctccaccgatcccggctatgccggcctgtcgcaggaaaatcgtgacgccatcgcggccttggtcgacgagctcgaagcactcaagtccagctga

SEQ ID NO: 527314 - DNA, 405 bp, Stenotrophomonas maltophilia
atgaaacgcatgagcacttcagctgtaaggatccagcccggcacccaggtcatcatctccgatggcaccccgatgccgcctgtgcgcttcaagcgcaagctcgaagactggcagcagcgcaactatgccgcggttgttctcggcgagagcgagcgcggcggctataggctgcagttctccgtcggtttgacactccgcgtcggtgccgttgtcttcctgagggacgttggccagaacgtgacggttgcgccggttatcggagcgccccccgcgcccctgaccacgcccgatgggatcggtgaggtccacatcgaccaaaaggcttggttggcacaacaccctggcgttctcgccgccgcccgcgctgcagaagctgctgcagcccccaccgccatcctctactga

SEQ ID NO: 527315 - DNA, 447 bp, Stenotrophomonas maltophilia
atgaccgacaacgtaatccagatcggcgagctgttgatccgtcgccgccaggagaaacacacctacctgaaggacgagcgctgccaccatcgcaagatgacgtgggacgacaacggccagatcgtgacctgcgacgcctgcggaatccagctctctccctactgggcgctgcaccagctggcccacttctacgacaaggaaatgtccaagctcaaagcccgggcggagcaactggaacaggacaagtcgcacaacctgcacctgatcgcggcgaggaaggtcgaggccgtgtggcgcagtcggagcatggcaccgtgctgcccgcactgcgggcggggaatcctgccagaggacaaactaggggacgctcaaacacgccgcgacttcgagctgcgtcgtcgccaagcacggcccgacgaaggaaagagcgggatgttccgtggctga

SEQ ID NO: 527316 - DNA, 660 bp, Stenotrophomonas maltophilia
atgagcgccccgtttaatgccgcggatgccgttctctccgctcagccctccccgggtggtcagggggatgcgcgcaggcagtggctggaagtccgtgggttggccgcaggcatcgtgaagaacctccaagcgtttgccgattcgccacacaaaggcgcgtggtgtggtgcgcttgacgacgtcctgtcgttcgccgatcagatcgagaaggacgccgctgctgcctacgaatccatcctcgccgcccgccagccggtgggggagcccgtggccctggtggtgccgggcgcgccaacgcgctgcaggcactgcgaaagcaccgatctggaatggttcgcccatgttcgcgcggtcaacgacgttccgcatgggcgactgactactcacgacgtgggctgcgtcttcgtgctgggatgcaatgaatgctccgagacgttgcacacggtcaaggctaattctatcgcagcgcttctcgccgccccgcccgcgcaggccgtggacctggaacggtttcgggggacggtcagatcccaccactccatgacggagtggatgcaccgatgcgggtttgtatcggccgagaagctggaagatagcaagaagaaccacgatcacctgctggccctgatcgacagccattcggcaggaggccggccatga

SEQ ID NO: 527317 - DNA, 258 bp, Stenotrophomonas maltophilia
atgactcacccagagatcgccaaagtccaggaacccttctgggatgacatcgctggcgagtgggttgccaacatcactatgtactcgcccgatggccagcgcggtcgattcgagccatgcgtcccgatgggcagttggcgtcgcatcgaacggcctgacttcccgctggcacgcgatcacactggctttcgatgctggggttcaagcctcgaatacctcccggagcaggccgcagaggacaaggaggtgaactcatga

SEQ ID NO: 527318 - DNA, 4911 bp, Stenotrophomonas maltophilia
atgaagctcaagaagatctccgaggcgatgatgtggctgccgggctttggcccgggagaagatccgcttcagctacaggccgcagtgtcgaatacggccttcaagccgcagacgtcgctgcacagagaggtgaagctggcctctccgccaaagaaggtatggcccaggttggagagcgggctgcacgacgcactgacttcgcggttcgagaagttcgacgcgaatgtccgtgcgatcgagctggtgaaaggcctggcgccaggtgatgcggtcgagggtgaagcacgacaagtgctgaactcctacacgggttggggtggcctaccgtgggcctttgcaacgcattccaacgaaggtggtgttgtcgaccgccaacggcgaatccaagaactgctgagtcagagtgagcttgaggccgcaagggggagcacgataaatgcccacttcacaccgcccgacatcatcgaggctgtatgggaaggcgtgcagcagttgggcttcaagggagggaacatccttgagccatctgctggtaccggctacttcatcggcacgatgccatcggaaatcgccgagcgttcgaacgtcacagcgatcgagctggagccaacaaccgccaggatgcttgaggcgttgtacggtcagttcggggtccgggtgctcaatacgggcttcgagcaggcaaagctgccaagtgagttctatgacctggtgatcaccaacgtgcccttcggcgcgtatcaggtcgcagagctgcgcaacgtggagtatcggaacttcctgatccacgactacttcatcgccaaagcgttggaagtgacgcgtgttggcggcctcgtagcagtaatcacgtcagcagggacaatggacaagatgtccactgaggtgcgggaacacctggccctatcagcccggttggtctccgcagtgcgtctgccggcgcacacgttcaaggcgatcgcaaacacgtcagtcgtggcggatgttctgatcttccaaaagatagaggcggcaaacgtggaacgcccactctgggcagggaagccgacgcgtgtcagcgcaggcgatcccctggcaacggaccattgggcgtactacggccagggtgcatttgtgaatccctggtacgcagagcaccccgattgcgttcttggcaagatcgggctcacgtcgacgcagcatggcttggccatgaccgtggtttccgacgtcgaacctgcagcagagcttgccatccgcatgcgaaatctggagcccgggcagtacgtcgaccggaggaaggaagcgcagccacgggagatcagtgcgacgacctacatggtggcgagctcggagttcatcaaaccgggcgcctacgtgatcaatgaaggcaagctctgcatctcgcacggaagcgagctcgaagtgatcgaggaaaccgtgcagaagtcgaagggggcacgaatccgcgctctgattccggtccgcgacgccgtgaggcgattggtcgcggcgcaggttgcctgtacggacgatggcaaagtggaagcgtaccgagttgcgctcaacgtggcgtactcgaagatggtcaagaagcacggcttcatcagcgcaacgatgaacgttcgagctttccgtgacgaccccgacttcccactactgctttcgctggagaagtgggatgacgagtctcagactgcaaccaaggctgacatcttccaccgtcggacagtaggggctgaaatacgtgtagatcgatgtgaaacggctgccagtgcactgctgacctgccttggtgaggtagccagggtggacatgcgcaggatcggagagctgctcgaacgagatccagaggatgctgctgttgagcttcttcaggatgggctgatctacatggaccccgcaaccatgacctacaaggaggcaagtgcctacctgtcggggaatgttagggagaagctcgctcaggcggagtcagctggtgatgagttcataaggaacgttgcggcgctgcgggagatcattcctgcagacctagcacctgtggacattggcgcacgcttgggctcgccttgggtacccgcttccgactaccagaagttcaccgaagaggtgatcgggcatgaggcgaaggtctcgttcaacaagaccgtaggcgcctggaacgtgtcgggccgggagtggggtgtcgacgtgacccagacttggggaaccgagcgagtgccggccttcacgttgatggagcaagcgctcaatcagcaatctccgaacgttaccgacatcgatccttctgatccggagcgtcgtcgtcggatctccaatgtgtcggagaccatcgcagcgaaggagaagcaggagagcatcaaggccgcgtttgtggactggctgtggaaggacaaggatcgtgccgatcgtctcgtaaggctctacaacgatgagtacaacagcatcgtcgagcgaacctacgatggctcccacctgcacctgcctgggttctccaatgcctacaacctgtaccagcaccagaaggatgccatctggcgtggtattgcgggtggtgggaacgtactactcgcgcactgtgtcggtgccggtaagacgctgacaatgatctgcattgcgatggagatgcgcaggattggtttcgccaagaagccggttctggtagttccgaaccacatgttggaacaggttgcagcggagtttctgagggcatacccaggagcaaacgtgctgctcaccagcaaagaagatctcaccgcagagaggaggtcgacgatgctgggccggattgctaccggagactgggatgccgtcgtgatgacgcattcctcgttccagcgcattgaactgggggctgagtatgtgacggatcacatcaaatcggtcattcaaaagatcgaggcttccatacgcatcgagcagtcggagagtcgttctcgcagcgtcaagcagctggagcgaatgaagaaggtctgggaggcacggcttcagaagaaggctgccggcgacaaggatgatctactgagctttgaccagcttggaatcgacgcagtctccaccgacgaagcccatctgttcaagaacctctacagacacaccaagatgcgcgtcgctgggttgcccacgacggattcgatgcgggcgttcgacatgtacctgaagacccgctacatcatgcaaagtcgaggggcagagaacggtgtgatcttcgcaacaggaacgccggtagcaaacagcgttgcagagatgtgggtcatgcagtactacctgcaaccggcagcgctgcaagcacacgggatggatagtttcgacacgtgggcgtccaactttggcgaagaggtgacgggtttagagctcgctcccgatggtggaagctaccggctccacacccggttcgcacggttcatcaaccttccggagctgctggccatctacaagcaggtagcggacatcaggacgaaagagcagttgaatctgccggtgccacggatgaacgtcagtaccattacctgcgatccgtccgacgatctcctccagtacgttgcatcgctggtggagagggcagacaagatcaagagtggagccgtgaagccgtgggaagacaatatgcttgcggtgaccacggatggtcgaaaggctgcgacggatgttcgccttgtcgggatgacagcggatcaccatggaagcaaggtcaatgtcgctgtgaggaacatccacaggatctgggaggaatcggggtcataccgaggtgcccaggtcgtgttcttggatctctccaccccctcaggaggtggctggaacctctacgacgacatgcgggggaagctgattgcaatgggcatcccagcagacgagattgccttcgtacacgacgccaagaacgataagggactggcggagctgttcaagcgtgtacgagagggtaaggtgcgggtgatcttcggcagtactgcgaagatgggtgttggaaccaacattcagactcgactggtcgctctgcatgaccttgatgctccgtggcgccctgcagacgttgagcagaggcgcggtcgcatcgagcgtcaggggaatagctgtgaagttgcctatgtcttccgctatgttgttgccaggagctttgactcgtacacctggcagctactggagacgaagcagcggtttattgcccaggttacttctggcaatgctacctctcgtgtcatcgaagatgcagagttgaccgcgctatctttcgcagaggtgaaggcactggcgacgggcaatccgctgatcgttgagaaggcaggtgttgacgccgaggttgcgaagctgtcgatcctgaagtcaaagcatgagcgcactgcatggacaaacgcgagcgcccttggtgccctgcctggccggattgccaagcagcgccagctggtcgctggttacattgcagatgcagatgccgtgcggcagttcatggagcagcctttcgccatgatggtgggaggccggagatccacggatcgcgatgaggccggtgcgaagttgcttgagttggccaacgaggttggggtcaggggcagcgaggttgttgcccagatgggagacctcagtgtcgtcgtggatggtggtagaaatgtcctggaagggaaggggatcttcctgcagggccatctgtcccacgattccgtggcgctgctgaagaccggtcgcggagtcctaggtgctctcgaacgtgaggcgatgcagatcgcagttcagagagacaaggccgtcgagaagctggaacagctgaagcgagatctggatgatcttcgggcggtgtgtgatcgcccgttcgagcaggaggctcgcttgcgccagctgttgcagcgtcaggctgagatcgatactgagttgggtaccaactcgtctgagtttgcggttggaggtgagcaggagctcgctgaggccgcttga

SEQ ID NO: 527319 - DNA, 819 bp, Stenotrophomonas maltophilia
atgcaacgcaatgaaagaatcgaagatcggcgctctcgtcatggagcacgccaggcaacttgcaagccgcggctactcgatagacgacatctgctgtgcgctacgcgacttgccctactccgccaaggaagtgaggaccgctgccagacaggctgcagcacattctcatgcagaaggaaccggcacacagcaggatctgcaggcgtgatcgacctccttccttgtgtaactttgagtggaagggtgctggacctgggacggccgacgccggaccagatcttcccattggacatcgcgcatgcgctgggcaatatctgtgtccttggaggacacacgaggcgcttctattcgatggcagagcacgcgatcgacgtcgcaggaattcttcctgctgagctacgcctgagagcactgctggcattcgcaccgaccgcgtaccttcccccagtgggctgggatgtgctcacaccaccggtcggcctgcagcaagctcacgccagccttgttgaagcaatcagtctgcgctttcagctcactccacagaaggaagagtcaactgagatccgcatagcgattgcgatggtgcgccacgcgatccttcgtgatttgttcccccgacatcctggcctcagccagtacccggcaccgccgcggtttctcaagatcggtcaggggatgaactgccaagcggcaaggctgtcctactttcaagccttgcagcagctggtgggcgacatagtcgagtcccaaccaatgtggtacccgtcgacagttgacgaagcggttcgccgtgcgcccgagcattgccccactccatag

SEQ ID NO: 527320 - DNA, 741 bp, Stenotrophomonas maltophilia
atgattcatcagaattcctgcatcgagctcgctttccatctacacctgggatcatcggctcgcgcgccagagtacgactatgagccgctgaccgtcatctaccagaccatcccacaggaagatggcagcctgcgattcgatgccctgcacgttacccggatggccaaacatgcggttccccgcagctttacctggtcgagccggcgatgggcagtcaatctcgacttctatcccttccccgcagggaaaatcgacgctctgcgcgaggacatcgtcgccacgctgtccgaagagcatgagatgccggcctggctggccgctgcggtagaggatgatgaatccttggaacgcattgtgacgggcagggcggcgagcaagcggttgcgaaaccggctgatcgttaccgggtttctgtcccgcgacccgaatggagatgggcctggcgggagcgaagatggtcgcgagcggcgtctgctgctcaagcaaccaggtgacaagtatggaattccggtcagcttgctgatgggaacgccggggtgcaaaggtatgctggatatggccacgcacggcgagcgcacgcctgtgacgctgctgatgcggcctgacttcaccgctacgatggatgaggaagcggacacggaaaccgttctgtccgtcgagcgtcggttgatcatcctggaagcgtcggctgttgcaatgtccgacttccagcagggataccagttcagcgagctggcatga

SEQ ID NO: 527321 - DNA, 543 bp, Stenotrophomonas maltophilia
atggatacctacttcgtcgcaggcgacacccgctacttctggattggcgccctgctcatcctcctggacagactgctactcgcatctgtcgtgccgcggcgcctgtacttctggcttcatcttccctggacgtttctgcacgagctgacacacttcgtcgtcgcgctcctcctgggtgggcgggccagcttctcgaaccttgtccccaagcttcgcgaggacggtctctacgcgctcggcagcgttgagtactcaaaggtgaacgccacatttggccctggcctggtggcaatggcaccgctactgaactggatgggcgcagccatcctgtatttcttcgtcatggattcccatcccttggggctgtggacgggcattgggaccacacttctcttggtcggccttctcgaagcgggcattccgtcctggtcggacatcaaggatggccagttcatctcattctgcgcaatggtcggctttgttgccggcattgtcttggtggccggaccaaagcacttgctgcagtacatcggcctgctgtaa

SEQ ID NO: 527322 - DNA, 741 bp, Stenotrophomonas maltophilia
atgaatcagatcggcaaattaaatacgtatcatcggccaattaggtccgttgaaccggtgccggtgtttcagccattcctgcagccgaaggtggcactggctgatagcacggtgtgcggatacgagcttctgatgcggcccaccggatacgagggcggggcagaggagttttacaccaggctacgggcaggtagcgccgcgaaccggcgaatggtggagctctctattctggagcgctctctcgaattgctcccctacctgcctcgccgaccgctggcgatcaacgtgagctggcctttgctctgtagcagcgacgggatcgaattggttgagctgctcattacgcatcccgatgcgccggccatcacgattgaggcccttgaacctgacgcggtcgatttcgacacagccgcagacgtggttcggcggattcaggccttgaagggaaaagtggcggtggacgacttcggaaaaggcttttcccaactgagtcttatcgccagcgtacccgggctggatgaagtgaagttcgattcctcgctgatccatggggcaaacgcggccgcactcgtgccaaggctggtggaagcggtgcacggaatgggggccatcgctactgcggagtgcgtggagacaagctttgacgcgcagcgttgccggctagctggttttgatcaagcccagggctacttcttcgccagaccgatgccgttccatagtggtcaggagcgacgtgcgtag

SEQ ID NO: 527323 - DNA, 1257 bp, Stenotrophomonas maltophilia
atgagcacgttccttgagaatctgggtgccgacgttcgcagcatggccaaacgtgtccagaaggccgcgtatctgccatgggcgctaacgctggagatggccgggttcccgcagcttcagacggtcatgttcgaagatgagggctgcatgtctctggttcgcaacgtattcggaggcgcagtcgttgcaatcgagtacgaggtgggcaagggtagaaagcagcgcgtgtaccttccggtgcttgatactgcgggggctcccatcagtgtcgatgcagccgatggtcgagatctgacggacaccatcaatcgctgcagggccagaactgtcgccatgacgcacggcgtcggcctgacgctgtggtcggatcttgagggggatgggccagagtacgtcaaggcattgggggtccagaccgacacggacctccgcgcagttgccgagctccgcgatgtaaaggagatccgtgatcgcaatggcacaatcaagcgtacgcagagctacctgggctggcatgcggcgttggcggcagcgaagatcactgatcccgagttctactgggaagtcgtggaatgccagaccgtagacgagaacggagtccaaggcacataccctttcgcaaaggtccgtggcaagggttgggtggtcggtgttcgtgtggtctggaagaacatcgagcatgtcgaatggcttcccatcatgggtgtcgagcaagtttcaactcgcaacggacccaaggccatggagcaccagtcgatcaatgaggtgaacgcgttccagtggcactccgcctgcatgcgttgcctcgcgaaggcgatcgcgatgtgtactggctatggctaccgcgcatatgcgggagacctgggggtgcgtctgtcggaggagcaaacggttgaggaaaagcagcagccggctgctcgtcagccgaagccgcagccgaagccgcagccgaagccgcagccgcagccgaagccgaagcctgagccgcaagtcgttgctgcaccagaggctgcggaggtggccactggatcagcagagacgcaccaggagcttctggaccaggtaaaggggctgatgccgttcgtgaacgatcgcacgcagttccacgcctggctgggcgtcccatcgctggaagaggcgagcattgacgatctcgatcgagcaagatcggcattgcttgctcgaaaggagcggattgagcccatccaagggctgattccagagaaggcgggggcaatgagcgcctccgtgcattga

SEQ ID NO: 527324 - DNA, 678 bp, Stenotrophomonas maltophilia
atggagaacgacgtgtcggacaaagataaaatcggcgatgttcagcaggaacgtgacgacctggccaacgccatcgcagcggccgcagtcaaggctggaatcatctcggggggcacgagtttgacgggcccccagcttgtgatgctgtgcgacaacctggcggagacagcattgctcccacgtctatcgaaagctgcaatcgattcggatgtggatcatgcggccctggtgctgctgaactcagtggctggcaaggatctcagcaatggcctgctaatgctcccggtggcgcaacgggcagtggctgccgcactatgcctcgaccgtgacaaggcgctcctgaccgatactttcgttcaaccggtgccggaccactgtgatcgcgtgacgtggcgaggccgctactaccatctcggtgctgacaaggtcgagaccgcagctcgcccactcgagacccttccgagagatgggactctctgccggatgctggtccggttcacccgcaatgaaatggacaccaccagtggtcggacggccgcctggacgatcggttcattcgatcccgaggaggaggagtttcacctcgctggctgggacagcgacttccagcacttcaccgatggcgatggcgacgtgcttggctggctcccgcttgtcgatgagcgggcaggcggctaa

SEQ ID NO: 527325 - DNA, 486 bp, Stenotrophomonas maltophilia
atggcaaagggtacttcgtgcactgtgcatctgctcggcaacctgggcagcgatccgaaggtggaatacggtcagaacggcactgcccgtgcgcgactgagcgtggcaaccaccgaatcccgcaaggacaaggatggcaaccaggtcgacatcacgcactggcacaacgtgaccttcttcggaaaggctgcggaggtgatcggtgagtacatgcgcaagggcggcaagatcctggtgatcggcacgatccgttaccgcaccgatgaagcatccggcaagcgctacacggacatcatcggcaacgagttcacgatgctcaacgatggccggaacggcgccggtggcgatgccgacaacggcaaccgtcagcagcggcagaaccagcagccggcccagcagcccgctccgcagcagtccgctccgcagcagtccgaccagtcggcgccgccgatggatgacttcgcagatgatgacctgccattctga

SEQ ID NO: 527326 - DNA, 261 bp, Stenotrophomonas maltophilia
atgaagttcaatacgaggctggagaagtacacggaggctcgccgaaggctctcctggtcattgcaggtgggcagtctggtgttgatcggatctctggcgctggcgagctttgcggttgatggagcacctgccgcttaccagctgttctacaggatttgcttgggagcctattgcgtgctcctaggagtgctggttgttctgcgttggtacgtcggccgtgtggtccgactgctgtcgggaccaacacgcgtaggagcttga

SEQ ID NO: 527327 - DNA, 645 bp, Stenotrophomonas maltophilia
atggaagcgaaggttcgagcttggtgcacttgccaccatcagcatcgcgatgacctcgctagtggccttcgctgcttggcgcagcgcggaggcaaccatcgcattacttctgctccctctgctcatgaacctggcgccatggcgttggtggccagcggtgctggccttcacatacttcatagtcggcaaccgcgacatcccggtgattgtggatcgcttcttcgacgacctgggcacaggggccggcattgccgccgccgttaccttggctgcgatccaatctcttcccttcctgctctattccccgacctccacccccagcggccgaacatggcgaatggccgcggcgctcgtcctgctcaccattccccctgtcggactcgtcgcgtggcgcagcccgctgttggtttcgggcctgctcttcccgggcatggggtacgcaggtgtcgcagcgtcgatcgcgctgttcgcaggggtagccggaggcggagcctccctgcagcgacaccgccgtctcccttcagccctgaccttgctggctgcggtcttggccgttgtcgcactcactcagcattctgccagcccccctcctcgatccgttcctggctggtttgccgtcgatactcagtttgcccccagtactga

SEQ ID NO: 527328 - DNA, 585 bp, Stenotrophomonas maltophilia
gtgagcgcactggtggacaccttgctcggcgaccacggtccagcagcccccgaagtccttgtgttcccggaaagcaccttctcgccaatgcgtccagtggacacgttcatgatgaacttcgtcgatgagagagcgaggcgctcgggggctacggtcctggtaggcgacgtcgtggtcatggagggcgaccgctggcgcaataccgttcgcgcatacggcctgacgacagcaacagtggatgagtctcgattgcccatgcccatgggcaactggaggccggggttcggaggtgtcaggtcccgtccgttcagctcggacctggtgacgattaggacgaggaacggcgacaaggccgtggccatgagcatttgctttgaagacacggtactctggccccactttggcctcctctccggccgggcagatgtgatggtttcggtggccaacgtctgggcactgactgacacctcagcggacagaacccagacagtctccgccgcattgatcgcccggctcgccggaacgcccctggtaagggccaagaacacgttggatgtagacacctatggcaaagaccgcagctaa

SEQ ID NO: 527329 - DNA, 1107 bp, Stenotrophomonas maltophilia
atggcaaagaccgcagctaaccacgaagtgcctgccgacgaggaaggctccaagaagggcggcattcccgaacggaagcgcatcaaggcgtcggaagtccaggtcatccgccaggaccgggcattgatgacgcccggcctgttcactatgaaccgcgctgccgctgcccagaagaaggtgatctcccgcaccgaggacacagtcacggagcaatccatccgtcttgagaccaccaccgtcatcaagggcacagagatcaggttcagctataccccgctgaacgcggacgatcttcgcatgctgcacggcttggtagccatggtgtccggcgaggtgcgcggcgaaatctttgcctactctgctcacgacatctctgatgatgcccagaagtcctggagcacgcttggcgccggcgccaaggccttcggcgacacgatgatcctgatcaaaaccagcaagcgtcagctcgcggaggccggtcgcctaggactcgatccaaagcatctgaatggtcgcacgctcaaaagcacaatggactccatcaagcgcctcacccaggtccatctgtatgtgcgcgaggcagatggtgaccatgagtacggtgcgcctttgatttcgagcttctctcgcgacaagaccaagatccagctctccctgaatccacgcatcatcagtgcggtgatgggcactacgcttggcgccttcagcgccatatccatgaccgatctgcgcaacctccggggtgacgctgccgttctactcttcaatcgtctctgcgctgtatgtgatcctggcagcagacccaagccgatcggcgccgagaaggtcgagtcctacatctggggcaacatcttgaccaaagcggccactcgcggggagcggctggctcgcaagcgcactatcgagcgcgccttcaccgagctccaggcatgcgggtgggacatcgagtgcattcgcggtgggtatggcaagccagatacctggttggttggtcgtcccctgctccctcgcaagaacacccctcagcaggtccagatgaagctaggcttcggcggtgaccaacaagatgataacgagggtgaagaggatggcgctggcggtagctga

SEQ ID NO: 527330 - DNA, 264 bp, Stenotrophomonas maltophilia
atgaacacgaaggtggaccaagcggggttcgacgtggtcgacaccatgccgattgcgaccccggatgaagttttcagcacccgacagcttctcgccatgacccagactgagtttgcgaaggagatgggcgtaacggaattcacgatctggcgctgggagaatggcaggcggcaaccctcggaagcgcagaccagggcgttacgcgagctcggtgagctgcggatcttttcccaacccggcgacagcgaggcatccagcaaatag

SEQ ID NO: 527331 - DNA, 687 bp, Stenotrophomonas maltophilia
gtggctgaaaaggttcggcgacgccggcgtcgcgtgtttgcgccctggcgacaggagttccgttacgcaggcgtcctcgcgctgcttgcagtagtggcaatgtggcagggcgtgggcagcggtcgcctcattactacggtagtaggcatcgttattgccgcgctattagcgattggtgccagatactgctggcaaagcggcatgcgccgttggtacggcaagagggtcgaatcgtgggcggtagcggaggtggcatcgcagctgaaacggcaccgtaaggtgaagtgcgagactcaggttcctgttttagggcagggcgacgcagacctggtcgttaccggacgacggaagcttcgctgtctggttgaagtgaaggccttcaatgtgtggaaccaagggttgtggtcgatcggagcgcgggagagctcggcgctcctgcaggctgcggatctggcgcgatccttaggatgcactgaggtgatcgtttggcttccacgcgggaggccgtctctggttcagcgcatcgggctgtgcaaaggtaagaacggcgtgaaggtggcgtttggagcacccgtcatctttgcaacgcgccttaaacgtttagctaaccgcaaattgccgggaaataagccggaaaggttggtaagatggggtcccacggcggttgggacgcatcgtgacccctaa

SEQ ID NO: 527332 - DNA, 360 bp, Stenotrophomonas maltophilia
atgactgatgaagtcatgatgcgatgtttcgaggctgctttagaggcggtgggagaagagcgtccaaaacgaaacgagttcactctgtgtgatcaagcgactcctaatcctgagtatcttgctactcgtgatcagcatcgctttgaggggttcaagatcgggatggcaatgctggcatcgagtcagcagctccaggctcgcatcgacctggccgccaactacattgcgcttggtcttggcgttctcaatgaaggcagctcgaactgggctgaaggtatcgagcacaatgcccgattgatgaagctggctcgcgacctgcaggctcagattgccccagacggagtcgggcaaagtggctga

SEQ ID NO: 527333 - DNA, 132 bp, Stenotrophomonas maltophilia
atggccaggtaccaataccgtttcaagcttgccgacagaacctggtctgactggcacgagtgccaacacttcgaatggtgttggttgagaaatgcgcgagatttcgagaagcagatcatcatcttgcagtga

SEQ ID NO: 527334 - DNA, 213 bp, Stenotrophomonas maltophilia
atgaccaatagtccggagtacgagcagggcttcagcgcaggaatcgtcaccgctttagccgtcctaaccagcttcggtgacgtcggcagcaccgagtatgaggccatcctcaacgcggccggcagggatgatgtcattgcgtacgcgcgtacggcgaaggcgatgacatggagcggtttggcccactacttaggtgagcccggagatgcatga

SEQ ID NO: 527335 - DNA, 249 bp, Stenotrophomonas maltophilia
atggagcaggtaatcgagaacgacgtcgccggagatcgtggcaaagcagctcttgccgtagattgtgagtcgagcgagcattacgccttctggcgccagcactttgaaggcggatgcaggtgcattcatattggtgagctgaagattctgcccagcacggtcgacgaccgtgaagccctggagcactacgaagccaattgccagtgttccaggaatccgtccgtgtccagggctgatggccatgggtaa

SEQ ID NO: 527336 - DNA, 426 bp, Stenotrophomonas maltophilia
gtggaatacgcctatgacgtcgcagctgcagcggtgcagcccttgcttgagaccttgaacgaggctcgggctcatgctgcaagggatctgagagcgaatggaagccgtaccagcggcgctgatttcgctgcccgcgtcagggacgacgcaggctttgcggatcttgctgcacgaatctatgaggtcttctgcaacagttccggcgtactcatcggctgcattgaagaccacatccggctggaactgctgatcgacccagacgtcgccagcaccgacatccttctcccgaacgagatcgttgaagcggtaccagaggaaaagcgagccgcgtttccacgccgtctgctcattgatcgcacgatcgcggctttcagtgagtcgaatggggaggatgaaagccaaacgaatacccaggaagctcaatag

SEQ ID NO: 527337 - DNA, 441 bp, Stenotrophomonas maltophilia
atgaaaattcccgatttgaagatggccaagatcaacctggtagatgcgctggtgaatggtggcgatgtcgacttccactacgcgctcgctgtactcagcctgcggcaagcaaacgtcctgtcggaggtcggcgactatgacgagctggcgatacagtaccaagcactggccagcgcgatcgcgatctgccggcagattccccccagtacctaccaggggctcggagggctgatgcgaccgctggaagagcggaggtactccggccaacccgagcatacgtgcgtcaagcagttcctcctgcagaaccaggaagccgaacgagcactggaagggagggagagggtcaaacgacatgctcagcgcctcaacgaattggagcgcatcccggatggagacgactacaacgagattctggccatgctgcagatccccccgaaatga

SEQ ID NO: 527338 - DNA, 690 bp, Stenotrophomonas maltophilia
atgcagcaggaacgcctgcgtggtgccggcatgagagatgaacacatgaagagcttgaacctgaaaaacgccttggccgctttcgccgctgtgtttgacggcgtaagtggcgcggcagccccggcagccttgaacgtggaaatcgagattgtctacgccgaagcagtacggacggtagatgaagccatgcgctgcgagcagcaactgacttttgaagagcgtctcgatgtagctgcattgcggagcctgattggagcataccggtcacttcctgccgactatttgatggccttcctgttcgccaaggacgtggcatctcgccgtagcgaagatgcacatccccaacggcacgcggtggaggcacgggttcgcgcagcgctcgttgcggtcgatggtattccgaccgaagcactcgccaggtcgaacctgtcggtattgatcccccatctggcccactatcttcccgccgacggcgagaaagatggcttggctgctcatcttcggaaggaggttgattcgctcaaggctgacacatccggcccctcgcttcacgaagtgttcggcgtcctggacatcgtcctgcatgctgttcctggtgcagcccataagccgtcgcgcctcgtgcgtcaaagcaactcgcccacacgagctgcctccgattgcgatcaagccgagagcttggttgcctga

SEQ ID NO: 527339 - DNA, 555 bp, Stenotrophomonas maltophilia
atggttccgttctccaccgtgctgaaaatcgtgatggagctcgtcgtcgacgatgcctacccagcgctcaacaagcctgaggcagatccagatgacaggcgatggtcgcttgcaacggcaatctaccaaacgatgcgctatctgggactggacccagaggagcttctggtggtgcgtggcgaacagccgggctggctgggagagatctacgggatgctggaagagacgttcccccaatgggtatccggacgggacgacgcgagcagaggctggcttgagttggacactgacgagtttgtggatcttgacacccttaacgggcgtcaagcgcctgggattgcggatgaagaacttccccaggacctgacgttggagatccttacttcgaaccttcaggattactgcagcaagcatggcttgccgcaggtctgcgctgaggagttgcttgccgggaacgaccttaccgaacgccaacgcgaatggatctggcggttcgttgttacgtggtcatcagtagagcggcgcgaggaggaacgtcagaagcgagaggcgtga

SEQ ID NO: 527340 - DNA, 585 bp, Stenotrophomonas maltophilia
atgcaagtatggccattgaaactcatgttcagctgcattggcgcggcgcgtaacgaggctctgcgtgagtaccacgagagcggcgatggaatgaaccgctggattgtctacgacgaaccgctgctgtgggcaatcaaagacggagatcggttgaacggctcacacttcactggatggcatgggcgccggaacgaggtcgtagatctacttgccgcctacccggaaacacaacgggttgtagcccagggcgcaatcctggtcagtgaggacgaacagacgtttaaggccggagactatcggcggttcgactgggaggcgactatctggttgccgtcgctgtgcccagaggcgctgtggccagtatgcactccgtggaaaagcgcggagcacgcgctcagggacacgtcaccaaactaccgtccgagtatgagcatgcgcgatccggagctgatagttcttgctgatgactacgacgccacggcgaccaggctgggtgatccgcgtcgcgtgtatcgctacggcatggagagccggcatcctggatcggcaggtcaggggaagggagaactgcctgatggcaagtga

SEQ ID NO: 527341 - DNA, 141 bp, Stenotrophomonas maltophilia
atgatgaaaactgaaaggcctcccatcgggaggccttttctattgcaggtgcaacagccgttcatcgcagccgacagcatgatccttgaaaccgacacggtgtcggtactggagaagctgcaatgcaagtatggccattga

SEQ ID NO: 527342 - DNA, 480 bp, Stenotrophomonas maltophilia
atgagcggcagtatgagtgagcgggccagcaccggccagcaagaaccagggaaagcgctgttctacgtggatgctgagggaaccatagtcgatcagctgacaagctgtggcttgtctcagtacagcggtcggacgcaggaagagctcgaggtccagttcggacctctggtaatcctgagcgcgcaagacgcagtggaaagacttgagcagaagcacatcgagcatgtaccgcgggaaattgaagagagcgcgttcgagtacgctcgaaaagttctgccgccattgcgatatgtcgagaacggtgcgtctgccagcttcaggatcggtgagccatatgtcatgacattgcacaccgcttacatccgagtcggcgatcgcttcttccagatcctgaggccattgcatgaagaacatgctgacctggtggatagggttcggacattcctcgacactcaggccgaagctcgccaaacctcatga

SEQ ID NO: 527343 - DNA, 270 bp, Stenotrophomonas maltophilia
atgagcatgaagattggatatcccatcaagcagcaacccgaatgggaggggccggagcgcgaggcggttctgaagttgatatggaagttcacccacgcagacttcaagggccacgcaggctccacgtggggaccggagtacgttggcaagcagaccatcgtggtttcgcaccgcggagctagcgcgctgtgtcttctggaagacctgtcaagtgaccagatcaatagcaggttgcgctacatcaacttcagattggccgcacggcgctga

SEQ ID NO: 527344 - DNA, 666 bp, Stenotrophomonas maltophilia
atggcaaacaactacgcagacgggactgggcttcttcgggtttccagcatcacgccggtgattctggcgctctttgacggttggactcttcgccctagcgaagaagccgagcccggcgccttccacatctcgacggagaatgaagaatccgattgggacagcctcacagagcggctggtcggagttgcacagcaacatggcttggaactccaggcagacgaggaaggcgaccccagagtcgtcatccagaagctcgcggtggcgctgggcacccaagagcttgggacgttggaagcgtggctggagcaggagggctttgacgagccgcccaccctggacgcaatgctgactctggcactgcatctcgatgacggacacggcatcacttcaatttcattggagacagcacatacctgcgacaagatgcgcctgtgggaattcggcggtgtctttcagtttcatagcagtagctacgagctgacggtgagcacctgttacacacgcctgagatgcgacagtcttagtgaagctcttcttcgcaaggatgaggacgcagtcgcgtcgctgatcgccagtgtcgcctcagactggatgggctttgccgacgctgatctggccgagcgcattcgtggcaaggtttcaagactccttgcagggcccgggtga

SEQ ID NO: 527345 - DNA, 261 bp, Stenotrophomonas maltophilia
atgaagcacacgatttcgggttcgctcgacgatgctgagctcgaacgggcgaagcaaagcctccttgaagggaaggtggtgtcctacgggagctgcagcctgcatcccgacgagaaatgcgaattgatctggggagtagacccctacggcatcgatgtggttgcggcaaacacgaatgacgaggccggatgtgtgactgcgctgcgatgggccgtgtcttctcacaaagcagagaaccacgccgctgaattctgctattga

SEQ ID NO: 527346 - DNA, 810 bp, Stenotrophomonas maltophilia
atgatggatagcttcaacaatcacttggccacagttcagagccaggtgagcgcttcgttggatatactcaggagtacccctgtattgactatgggcatcgggcgctcgcgaccggcgcttgctgacccatacctgctggaagtggtctctggtcttcactggtacctgcaggctccgtcagcccaggtcagcgatgtaaccaagttcctggggtatgccgaatccaggctggaggcaatccaacgtgacctggccagctggggtatcacctcgaccggcctgctgcgagaggtaacgtcgctccagatcgcagaccatctgctccggccagcagaaggccgagggattcgcatcaatgccagcagcagaaaagcactgccaatgcttgagaagcagctgtatgaggcatccgcgatccaggatcgcctcgcctctatagtcagtatgtaccgcttcgcagtgggggactattcctacagcgacccggcagagcggcggttcacccaggtggtcaggcacatccttccattcgtgcgttgctactaccaggatctgcttatcgtggatcgtgatcgaatcgaggagatcgtgcgacaacgaacggctgacgttctcttgattggtgcgaagcagaacggctgcggcacctggtccagcacccgtaaggacggagaaggccgagcgcactcgcttccggcagactgcgtccagatcgtggaagttacgagaatgggtgtacgcgtggcaaagcgggctcgaatctcgcactcagcgttgccgcagaacatgcttcctggcatcgccgcatga

SEQ ID NO: 527347 - DNA, 153 bp, Stenotrophomonas maltophilia
atgaccgctgatatgcagatcgccattgtcggaggcgtgatcagcgccttcgcagttgccttcacggtcgcggcgtacttcctcgccaagaggcagcgtcgtacgaaccaggaagagcagcactatcacggccaccacagcacgcatcgctga

SEQ ID NO: 527348 - DNA, 291 bp, Stenotrophomonas maltophilia
atggaacacacgcaagagttggctcctggctgcaacgcaacggacgaattcctgaagcggcactacctgaccaggactgtggccgaactaatggcccttccgcccgagcagaagctgctcgcaatccggctgctgtaccgtgccgagcaagagtccgggcgccaggtcgaaagacttggcgcatacaaggcccgggcccgactgacgccgggtatgaaagacgatcttcgacggcattggaacaagaggatgcgggcgcaggagctgttggcgcctctaatgcgattgtga

SEQ ID NO: 527349 - DNA, 411 bp, Stenotrophomonas maltophilia
atgacggaggcgaaacttcggcactccagaactgccctgagttctcgtgtggaggagatcttccggcgctatgacttgctgattcgagccgcggcacccagggaactgtcggatgccgaatggatcgtgctacttcaggcgctcaagaacggtgcggacggtgctgaagagatgatctggcagcgtttgatgggctgggcattccttcatggcgatcaagtgcatcggacctatggaatcgatgcgaccaatatcgctcgacgggtcagagaaggcgggcctgccatgagcgccgcaatcatggagatggtcgacagctattggtcattccccgatcaattcacccatgagcagcgcatggaaatccttggcctgcttggaaacgatccacagggtcggctggggttgtag

SEQ ID NO: 527350 - DNA, 432 bp, Stenotrophomonas maltophilia
atgaacgcaccagataacgtaagtgcttcaaagaaaaggctttctatccagttcggggcgtcactgtctggtctgctgcttgatggccactgctcaggggccactgttgccggtcgtttggaggtgttggccaagcgttacctggcgctgatcgacgtcaatggccccacctggccggtgagttcctggaccaattgcatcaaggcggcgcggaaagtcgatctgtctcatccaggtgcggtctacgctttagctgcaacgtgcaaggcggacaagttggatgcgaagctgagctactccttcgagtccatgcagccaacccagggggcaatggtcatctcggtgtgtgagcgattcctggccaccgggcgcgagcctaccgaggaggcagtcggcgatttccttcgctccatcgccgtcataagtgattga

SEQ ID NO: 527351 - DNA, 204 bp, Stenotrophomonas maltophilia
atggacgacgtcctcttcggagctcttgccgagcggttgggcggcaatgaccacgcaatccggtgggtacgagcagcgattccccgcatcgaacagctgaacgaggtgggatctccgctgaccgacgtcgccaaggccggcacttcccgccttgtgcaaaggctggccctggaccatttgctgaaaccatcggatcaggtctag

SEQ ID NO: 527352 - DNA, 552 bp, Stenotrophomonas maltophilia
atgcaaggccgagggggggacgagacactgacaccgagcgaagcgctgcaggagtggcgatccgaggccgaggcgttgggcgaacgccttgccgagctgttccgcgaggttgagtgcatcgaactggcgatggcggacgctgccgcccttctcggtgcgagtcagcccccgatgtacggacgtatggcgatccgctggtggcgtctgttcggtggtggccgaagaacccccgtcctggtcaaagaaacaggcggcgctcgaggccagatcaaaccggagcgcgtaaagacccggggtgtgcgccagcggaccgatctgggattcagtctgaacgctgacctcgccaagcgaggcattgatgcctactggtccctgagccacatccgagatggggttcttcaggaaattgcccgaatcaagcgtgcactggcgggagctaaagggccacggcgcgaagctgtcgtccggattcgagcggagctggtgatgctccaggaggaggcccgtgaccgcctggtggacgttggccacatacgtccggtcgatcagtga

SEQ ID NO: 527353 - DNA, 1002 bp, Stenotrophomonas maltophilia
atgagcaaggcagctgcagcagcagtcaacaagagcggtaggccggtcatcggtctggacatcggacattccgctgtaaagatcgcggcaggtggtgatacggagctgtttccgtccgccgtggttccggcctcccagctttcagttgcggaagcggcgaaaagcgcgaaggcagacaccgtcctggtcaacgaccgcgaatactgggtaggcgagaccgcattgatccatgcgaacggccaggccctcgaaggtctgcgcgatgactggatcgagaccgatgaacacggcgcgttgctgtccagcgggtatcagcgggcacttcgcatgctcagtggcggcggtgatcctctgctggtcctgggcctgccctcgcgacttcaccacgcgcaacatcagcgactggttgaggttgccgcaatggcgctgcgaatcgacaagaagagcgtcaaggtggtgccccagccactcggcgcgtacatgtcgaccgtccttgatccctcgggagagccgatggacagccgcgatccgacttcggagaagtggggaatcatcgacgttggctactatacggctgacttcggcctgatcatgggcggcgtttggtcgagtgccggcgcgaagtctttcgagggtgcgaaccggatcgcaggcaacctgcaggagcgcatcaaggccaagcacaatcaggaactgtccctgcgtgcgtgcgatgaaatcctccgcacgaaagccacgaagttcttcggaacccggattgatttgagcgacatggtcgacgagtgctgcagtgactacgctcgagcgctccaggaacaggcgatgaaggtcttcggcccgactcttgccagcctcgacggcatcatgatcgcgggcggcggtgccgacctggtctatccgcttctgtcgaaggtctgggcacatgccacgactgccaagcagccgcggtacaccgtcgcagaaggcttccggcgctacggcttgatgctcgtcgcagaatga

SEQ ID NO: 527354 - DNA, 708 bp, Stenotrophomonas maltophilia
atgactagcgccgagtctggcccgctgaagcggccagcacgatgggagctgtatgtcagagacacggagcatcccctgcttgcgcaatggatcgagggcaatcgctatcaggcgtcgtcattcctgaaggattatctggaaacgcagctcgccgcaggtgagttgcccatgaacctgaagaccgagccctcatcccctcgccggcagcaacggaggagggcggcgggtcgagcgattgcagttggtaaggacggcgcgagcggagcttccagtcgcagacttcaagccgatcacaccagtgctgagcattccgacaaccaagatcgggcgggccaaggcccgccaggaagcctcggcgccctgtcggcgccggggctaggcgagcgaagcgactcgggcgcggcagcgcatcggcagcgtcccgatgaccttgcaaatccaggtgaaggcgcacaactcgaatcccatggagttccccctgcagcaaacagtcgcgcccccggcagcaccgaacatgaaagcccccagagaagcgattcacaaaaccacactgctcttgcttcgaacaaaccgtcacctgagcaaaaaagtgaatcgacttcatccgatctggcatccgactcgatggccagaggtccggattggcgccagaagatacgcaacgccctgatccagaacgaaagcgttatcggcaatgacgacaactga

SEQ ID NO: 527355 - DNA, 1968 bp, Stenotrophomonas maltophilia
atggctcaggatcacagttcaatcgaacgactgttcattgcagagaagccgaaggtagggcaggcgatcgcgaaagcactggtctccatgaaccccgcggcgcatgcgtccaaggggttcgacaaggcgaacaagcttgcatactttcgaataggcgatgacgttgtgacctgggccttcgggcacatcttcgagctggcgtcgcccgaagagtacgatcccaagtatgcacgctgggatctggatcatctgccgatccgaatcgcggctgaccagtggttgctgcgcccccacccggataaggttgaccaagtcaacgtgatcgggaagctcctgcagaaggcaaagatcgtcgttaacgcaggtgatccggaccgtgaaggtcagatgcttgtcgacgagatcctggagcacttcgaatggaaggggagtgccctgcgtctcttgatgagcgatcacacgaatgtgagcgtgatgcgggagcttcgtcgaatggtggacaacacgaagttcgccaatctctacctcgccgcaaaatgccgagcccgtgctgactacctggtcggatacaacttcacacgcgcagccagtaagaagattggccttacagcccccatcgggcgagtgaagcatcccgtgctaaccctggtagtcgtacgggatcgattgatcgaggcacaccaagagcagtacttctacacgctgcacgccaaggtatcgatgctcgaggcggcagggagttcgagcgtcactgccttggaaatgagccacgagccagctaacaaccgcattactgatgagaaggtggcaaaggcaatcgcggcgcagttgacagggagcaccgttgaggttgctgtcaaaaaccggaaggttgcgcgtggcgcgccgcttccgtattcacttccgacgttccagaaggacgcggaagccgtctacggttggagcgcgaaaaaatcgctgcagacgttgcaggctctctacgatcagaagttcgtcagttatccgcgatcgaagtgtgcgtacctccctgaagagcaggccggtatggcactccgcatcgtcgatcgcatcctggcaggaggatggcatccagacgccgcagcagttcggcagcacatggcacccagcaagactgtctacaacgacaagaaagtggaagagcaccacggcatcgtcccaaccagtgaagtgccgaaggatgatctcaatggagatgcgcggaaagcatggctgctagtgtcgcagcgcttcctggcgagtcttatgccggcgctgcaggtcgcggtcaccgatgctactttcgtcgcggaggggagggagttcaaggctacaggagaggtaatgctgaaccagcccgcttcatgggcggccatcatcgcgcctaagggcgacaagcagcgcctccctatccgctatccagaggacacaacagtccgtggccgggtgcaggaagtggcgaccaagaagggcaagaccagtccaccggagcgttacacccaggcatcgttgatcgaagacatgacgtccgtcgcaaaatacgtggctgacgaacggttgcgagcggtgcttaaagaaacggccgggatcggcacggtagcaacgcaagctgacaccatcgaggggctgctatcaagccagctgcttatggaggagcaatccaggaagaaaaagtacatcagatctaccgactttggccgataccttgttgatcacatgcctgcagcgatcggcaatgttggtgtgactggctcctgggagatccaactggatctcattgccaagggccaggcgagtggggcggacttcatggacaagatcgaacgcttcgtcgatcggcacgtgtcgacgatcaaggcattggatctacccacgccaccccgcaagcctgagaagaccgccaagacggaaagaggcgtcaaaaaatcgacggccacaaagcgacggaagaccgcctcagcggtcgtgtaa

SEQ ID NO: 527356 - DNA, 696 bp, Stenotrophomonas maltophilia
atgtacggagtttcgaaagcacttcgcaggacgtttgatgtcgcatatacccagaggggtttgcgtgactctcgcgaggcacaggaagcggaaatcgccatgggcatggtccaggcgttgctttctttgatgccagagagtgacgatcttgtgactctcttcgaagagatgcaccgggtggcgtacgcagccgaggggaatagcccacgagttcgccgactcagtgacacataccttcgcctgcagactgtccttgaagggtgcaagcactctgtagttagtacagacctgatggctgtgagacaggccacggctgtcctgaccatggcggccgaggccgtacctgagacggagtttgagatctctggcggcgacaagatcagtgccgatttcaagggtgcagttttgactgcgcacttcgagactggcatgtcgctcgaaatcacgttggcgaaggggctcgaccgtgaacaatcagacgcatgggtgattgacggaggaatctggatgcggaacacggtccgcccggccatcaatccgacggtgtacgaggtaatggagggacgtgtaggtcatgagaccgtggccaccatcgccaagtacctgaagcagctgattccatactgctctgagaggcgggtcgtcgcacccacgaggcctcggcagccactgctgctggcaagcaacgcggggtga

SEQ ID NO: 527357 - DNA, 552 bp, Stenotrophomonas maltophilia
atgagcaatgtcgcaaccgaccgcaccaaaatcacgctcgacaacgtcaagatcagcgtacagcagtcgcgtggaagcacgtgcttcaccgcactggtgtacttcgaaggctccctggtgggatcggctgactgccagggccgaggggacggcatcgcatttcgtcctcatgcggctctgaacaagggtggaaaatggaagccgttggaggtcgacgccgtcaagcgagggcaagcggaggcatacgccatcgcgaatccggttccgggtggcatggaaggtgctctcgaagatcacattggcctagcgctcgattggtaccgcagcgggaccgaactcaagcgccgcctgaagtcgaagtgcatcgtcgtttccgaggggaaggcgttctcctacacgggcgtgctcagcgcaaacgctgaggcacgcgcaaccgagctttgccgctacaccgaaatagctcgaaagagcgacccggaagcgaagatcctcaacgtcatgccgtgggatgaggcgcatgccctctaccaccgcgcgacttcacctgtctga

SEQ ID NO: 527358 - DNA, 261 bp, Stenotrophomonas maltophilia
atggacaatctgcagcatcacctggctgttgcccgagaaccaacgaatcactcccagttgagcacctgcacggacctacagatcgagaggcttggactggcgctcgccggttcagatcgcgaactggatcaagcggtcgatgaattgaccgccttgaaggaagagggaatgggcgatacccagctgtgggattcgctgctcgcgctggcgggacacgcgctgaggcggcgggtggaggctgagttcaccagcgtgcactag

SEQ ID NO: 527359 - DNA, 975 bp, Stenotrophomonas maltophilia
atgagccagaacaatcaaatcaacttcgtaaacgaatcgaggaacgtggtctggctgtcaggctatgcaaaggctggcgatgaaggcgaactgcttctgtatcaatcggccaacgaggggagggcgatcccgatcaagctgcatgccgggctcaaacgtccgcgggcacacactccgtgtgaaatcctctgccacgcctacggatatcgtgacgaggcgggaaagggctgggtccggttagaggcggtccagatcaagcgagcctctgtggtctccgtaccgcgcaacatcgtggcgctcaacgcactgcggtcccagcggccaggcagcgctgacccttacaaccccttcgtcaccctggaacaggcgcgggcggagatccaagagaatcttcgactcgacggtgcgaccatcgatgagttgttgaagactgcttcgaagcgagccaacggcaaagacggatttgtcaacaaggcgatcctgtctgggtgtgtagggcacaaggcttacgtcccagcggccgacgatggatcgggtgacctgggacacttcggcttccagctcatgcaatcactggatcaactgaaggcgatccccgtacgagtcaccggtgtggactcccggttcagccaaaccctgcgcaaagttcttcccatcaacgtcgtagccaccgtcgccgtggacgctgtgcgggacgaagcccagaacatcatcgatcgtcgcgtctacctgaccaccgacaagaacaatgttggttacgccagtgccaatgatttcgcccgcaaggtcttcccggcctggtggcatcagctggcagcggcgatggcagaacagcagatggcacagcgcaaggcatctgaggttggagtcggcacgtcaacacgagctgtggtcgcccacactccggtggccgctgcaggagcggccgaggttgccacgccggcagatgtgacagtgtctgacgagacgttctaa

SEQ ID NO: 527360 - DNA, 783 bp, Stenotrophomonas maltophilia
gtggacgaagcccagatcctgcaagccctgttcggcgacgacgaagaattcgacctcgacgcgggcattgttcgtgcgctggcggaaagcgagggcgcaagtccactggtgtcggacgctgaggtcgaaaagcagatgcgagagcatctcggcctttcgcgtttggacgtttcgacaacattgagctcctcgccgatggcgggcactgctaccgtcaggcccagtgacggtgatcgcgaagactacaatgagtatgaatgggagatcgtcattgcgatgcggcggaactgcatgctggcgatccgccccgagacgtcgcagaaagccaggcacggggcgctgcggtggcttttcgtccgtgggacggaagacaagaagggaatctccttccacttggcctgcgaggcactggaagcgcgctactgggtaatccaggcgctggtgcaacactatctcgcggtacgcgacatcccactcaccgaagggctgccggaccaggcagatgggcttccagaggccctgcagtcggaagcgatgttccatgcatggctccccggcgtccagctggcggaagctctatggtccaggcctggaattcttgaaagcgagctggaagcagtctgcgcccttagcagtgatgactacagcaaagccatgacgcagctcgttgactgcgggcttgtcagcatgcgtgtgagcagggcctatttcgcagctcggccggcagcaattcgcaatgctggcaatgggctgtcgtggtcacgctcatttctgggggaatga

SEQ ID NO: 527361 - DNA, 963 bp, Stenotrophomonas maltophilia
atgatggagctggacgtagaggctcttcgtgagcggaggccagaggccatcgccgagctctggaaagcgtgcagagacgccgcaatcaaagcgagccatcgtagtggtgccagagagtttgccgaagacattgcccaggagatggtgatggttattctcaccgctttcctacccaactatgagccaggcagggagatcggaccatatctctttgaaatggccaggcgaatggggctgcgtctgtaccggaagcactcctcggaagttctcttcaccacgttggcgtcagcatcacctgatggaatggtcgacttcgagtcgctcgtgccgagtggcgaagatgaggactcagagtcgaacctattgcgggcagagcagcagcaatcagcgaagagcgcgaaggccaagctatttgcgcggatgaaggaggtccaatccgcttcaccggagccaacgaagcccaaggtcgccacgacggcggtgagcagggctcgtaagcgcaaagtcaaggaggagccattcttccctgtcatagatctcgcacgtgcggagaagcgtgcgcatcttgcttcgcgtcccgaagtcgaagagctgcgagagctgcgtgttcggcttggctatacccagccgcagctttcgcgcttgcttggaaagcctgagaactatgtgcgcaccctagagggaggcttgattgtcggccgcccccatgagctcttggcggctgccagatcgctggccccagcggtggagtcgacgggtcaggagtctgcaccgatgtacgagctgctaagcggctggtgcagccgccttggcctcgacccggacgaccacatgcagcttggtaagatgctgtcgatccatcgcaccacgctctacaggtggcgcaatgagaagacgcggcctgacccggtggcgatcgcaaagatccgcgtgcttgttgaggagctcgcacaacatggctga

SEQ ID NO: 527362 - DNA, 264 bp, Stenotrophomonas maltophilia
atggctgactcagcatatgtgatcacaattttgaccatcttcgtggtcgtgatcctggcgatgtttgaagcgggtaggtcgttgctggggttcaccttcaaccagatatggaccctggcgctctggttgttcggcatcctattgggcgcagcccaggtggtactgcttcgggtttggcgtgcgcacgtcatcgtgtttcgcaatttgggcttccggaacatggtgctgccatcggtcgctcgaagaacgacgcgtagggattga

SEQ ID NO: 527363 - DNA, 447 bp, Stenotrophomonas maltophilia
atgcagttcattattgatgccgaagctcagctactcgattccacacgaaccgagctcagtccctacgctgcgctgctcggccaggtcattgcactggctgcggatgactgccggcgagcactgaaggcacctgcgttcaatgcactcagcgatcgcgaaatgatcgaagcagcatcggccgcttcattcctgctttcaaccacctgccacttcatgatcagtgtcatcggattggaacctgacgcaatccggctttcggcagcgttgggtaatgcaacgcttgcgcgtctgaacttgaacctggtggatatcgatgccacgcctgaacaatggtgccgagccatcgagcttgctacacgatctgcgacggtaggcaaggctgtcacacctctgtcccgtgtcgttcgctatcgccaggagagctttcactttgctctcgctggctga

SEQ ID NO: 527364 - DNA, 1086 bp, Stenotrophomonas maltophilia
atgagtgcagccatctacaaactggcccgggaatcccatgaactgccggacttctggcgcagccttggcttccccctcaagaaatctggaggcaagaaggaccgctacgagtccagttacacgccgtgctgtggccaacaccatcgcgaggatgccggttccattttcaggcaccgagacaccctggagtggcgttggatgtgcttcccctgcggcacaggcggcacgatcatcgatctggtcgcggccgttgagggaatcaatcaccacgctgccgcgcggaagatcgttcaggatgcgggcggctatcaggtagtgaaaaagaagttgacggagcggcacacccctgcggaaaagcctgtaggggatgcggagcgtcaactcgcaattaccaccgttcagcagatactgcttgaacagtgtcggcccgacgaaggttccattcgctacttgaccgaaacccggatgatttcccgcactacggttgatgacgcatgggaacgtggaatgctccgcacccttccgtttgaccctgaccagtgcaatacgtggttgcggctcaatatcggcaatgagctccttgagaagaccgggctacttgctccgaagcggagatggccggcgattgcctatcggccaatcgttctgttcccgccaggcggcaagtgcatggagttccgtgttgcaacagagaagtacgtcagccctaaggcgctgcagtatggcgagaaggccatgcctctcgtatggcgccctaagagcggaaacgtgcgaagggtcctggtcgttgagggtggtatcgatctgctttccacggtagatctgggaatgtcccaagacaccttgatcctcggtccgctggggacgagtgcctggaacgacaagtggatcggatcaatcagaaatcgctatccgaatgccgaatggctggttggattcgatcccgacaaggccggagacaccatcgcacctcgccttcttgagacgttgatatctgccgggatgcccgcgcggcgagtcctgccatgcggagttgctcctgaccaggactggaacgatagcctcaaggccagtcgtgccttctaa

SEQ ID NO: 527365 - DNA, 828 bp, Stenotrophomonas maltophilia
atggcagagcaaaaagatgatcagttcaaaggtggggagtttgaccagtgggtcaatcgtccggatgacgccgtgcctgctgatgaaaggccggagagcacgcgcacggccgcccacaaggaaagaaagtccaagggcttcaaggccctcgccccgaagcagaagaagctgatagttggttgtgtagtcgcgcttggcctggtgatggtggtgatggctcgcaagggcagtcagcaaaacgtcccggtgcagccctctccggagatcgccgcagtcacggaaaagtccgcacagatgctccaggacggggttaaggctgcccaggcgtcagccgctcagtccgaggaagatccagctatcgtcgcagcgaatgctgcagcagcgatcaccaccgcatccgctcccaaggcagccccggcagaatcagtaggccccgcttctcccggtccagcatcggacgcaacggctggtgcacccgcagttccggcaacggcgccgacagcctcgccggcaatccaaccaaccaaggctgtcatccagcctgaggcgcacgccgtttcgggcgggactgttgggcctgcaagcacatcgctgcagaagtccgaaggggacgaggcaatcgttgcggagctgagcagggttcaggacgaactgaaacgttggcgaaaccaggcagcaagagatgcacgcagggcggctgaggctgagtccaagctcgccaaacgccgctacacagttgtgtccgtcctcgctgacggtgcagtcattcgagacagcgatgggcgcgaacacattgtcggtgtgggtggcaaagtgggtgcggaatga

SEQ ID NO: 527366 - DNA, 624 bp, Stenotrophomonas maltophilia
atgatgaggctggctaccgcgttccttctgctggccattccgtttgtctcgcgcggtgagatcgtggccaaggtcagcggctgcggagcagcaagcacaaactgcaatgaatcagtacggatgatgatccggcccgatgcagatgttcgggatactgaggctgcgctgttcatcgggatcttcccggtcgtgaatggtcaacctgcggtgggaatgggcggctacttcaacggcagaacgtgggtggccagcgctgagcccgttcctgccttcgtcgggcgtcttccctccggccctgcgacggtaccgatccaaggcggggtatgtggtttggtaaggaagaacaagggcccgtcgggccagtacgtgctcgtcgccggctatggcaggaccaacctgggaatggcgagcagccccgggttggatctggaggacctcgagcacgaggcgcgcactgccgaccctgaaatcgccgcacagctgagaaagctggtccgtgactaccaggcagctcagcaacgacttcaggtaccaggtggaaaaaccgcgatggcctttaccgacatgcgatcggcccagaggtactggccgctcaatacctataactgtgaggtgtcacgatga

SEQ ID NO: 527367 - DNA, 513 bp, Stenotrophomonas maltophilia
atgagctggttcaaacggttgttcgggcaatcggatgcggacagcggtaagggggtaatgccggcattgctcgcgcccgcaggaagtaagcggtcagccgatgcatcgccattggtcaaacaccgggtcaagaacctgattgctcaaggaaccactgtcgatggctcgctcaccacaatggatggagcggcggttgatggagtcgtgaatggggacatcacggtccggggcgccaactgtgcggtgctggtaagggcaggggggatcgtcaacggcgatgtcaaagcctccatcgttgtccttgcaggagagatcaacggggacatcatcgctgactctgtgcggttgtacgccggcagcaagcattttgggcgagtcgaggccacgcagctgatcgtggaccgtggcgcctccgtgaacaatgaaaacatgagcgtaggcggtggctcggcggacgagaggcgtaggccgttgcgtttgtccttggtcccccaagccgacgccaagggatga

SEQ ID NO: 527368 - DNA, 1248 bp, Stenotrophomonas maltophilia
atgcagactgccatcatgatcgatgccaacggtaaagctactaaggtcaacgcgtctcttcagccactgggaagcgatgacaccaagttgccaaccctccacatacggcccgcactgtttctgaccaaagagcttctggatgccgccgaactcaatgcggtctcgctcgcagtggagtccagtttcgagctcaacctgccatcgattgtgtacgtgaggcgaccctatccaaactattgctatcttgtgggaggcaccgagctcgagcgcaacggttggcttgtcccgatccagggtgacatgcccgacagcatcgaactgaaattcacttggtcgatcccgctgaggcaaggtgcaagcgaagcccaggtcgtcagctggaatcttgagcactacatcgcactgcatctccagcagggtggtggcaatgtctacagcatggacccgtccaactggccatatgacgctgacagtgcgcctccgctttacacggccccggtgggattcgtgggcgaggagggtggggacaacccttctctcgctgacagacaggcgagctacaccgtttcgggcaccagggcggtcataagggagatcgtgacggtcccaggggtgccattgagccaagcgcatactgtcggcgcgttccagaatcttcagttgcatgagtttgcgcacgcgtctatgtcaggagcatctgtcagtgataaggcgcatctcgcaaacggagagctggaagtgccggcgcgtctgtttaggcaggcagtgctggacgcacgtgcgcgggactggcgaaggacggtttactggctacctcagggcggattggagcaacatccagcgcttagcggcgtctgccgctggtggaacgagcaccgatcttcggctgcggttctgaaggctggctcattcatgcccatggtgcgcgttgctgatgatggcctgtattggtgcgccgaccggcaggttcccaacgagccggtggatggattcagtgagccgcacaacgccgcaagggtgggagcaactgttctgcttgagttccgagccgaacagactgaagttcgttggaactctgacgggctggtaacgctcaagccggacggcagcgaactgatgacggagtgcatttcggaagaggactattcacctctgtgccaatccgcatatgagtgcctggaagcgctggcccagtttcctcagaatttcccagcggcgtgggacgagatcatggctgcagccagctag

SEQ ID NO: 527369 - DNA, 2178 bp, Stenotrophomonas maltophilia
gtgatcgccacaaacaagctgccgtcctccgtgctgatcatcttcctgttctggtacggggtcttcttcctaccactcggactgcgcggcatccccatctgggacatcctccagaacctgccgatctcagtggctctctcccttgcaggcgccgtggttggtcttggcatggtgatgatgaccacgatcaccgtcagcgctgccgatgaagatcggctatgggagggctccgtcaatcgcgaagcacacgtttccttgggcgccgcagcgtggtgcccagtacctaagcgcgcggcagcaccacgggatctgctggagagcacgccgtggtggccccgggtatccacccagtaccctgggtatgcgagcgccatcaaagcagttctggacaccatgtacgtgacaccgaagctgccggcctcaccctaccccggggggcatcgcggccggaccttggtcgagcactcgctggccgtggtggagcacatgctgcaagaggtacctggctggcggtacacgggccagtacgacaagcggggcaatctgcgcgttccactgcagaacccagacaagatcgcgcatcggtttcggcctgatgaggtgccgctgctgattctggccgcgctgtcgcatgatattggaaagctgacgtgctacgtcccagcggaggaccaggatgacaacgggacagttgctacgttgaaggtagtggaggcgttcccgaaccatgatcaggagggcgctcgactgctccgcatgattcccgaggtgatggacctacccttcgaggaccgcaccgcattgatcaccgcgtgcggctattaccatcatccgttccagttgccaaatgctgactgggtaacagatcgcattcgaagtttgaccgaactgcttgcgcatgccgacatccagacgggcatctctgaaggacacacgctgacggcggatgttgaggacgggtacgcagacacagtagagccagcggcaccgtctgcagatgccctgcccccgaccgaggagctcgatgagggtgatctggacagcgccatttcagtggcggcgtcggagatccgcggtgcaaggaagtctcgcggtgaagcagaacatggacagcaggtggacctgccccgagagctacgcctgttcatggacagcattcggcgtcctggcgcgatcaacggtgttggccagcagaagaacaaccgtattgcatggaagcatggcgactacgtatacgtgatcgacagtgctatgcgagcggtcgtaatgaacagaaatcccggcgacatggcctggcttgcaacagcgactgaaacgtcctcgggcaatgcagcacccttcaccgctgcattggctgagcagatccatgccatgaatggcctgatggtcgaatttgagggcaagacgtataccccgcgccgtgcgctcttcaagatggcatcgaagggttcaacacgaaccgtgcctgttcttgtcgtgaggacctccttcatccccggggcaaacgggataaaggacgccgacccgatcaagctgacgggcccattctggggtgaccagtcaggccgtagcctggaacccagagacggtgaggctgcgtccgtcaccgagagcgcgattgaggccactgacgtagccgacctttcagtggatacctccggggctgccgccatcagcaccgaacacacacccgcttcaacatcacagcctgtcgaggatgaggccgaccaggaggactctgtggaagagcaagcactggatgatcctcatcttgctgcagctcgccggcacttcagcgccgaggcactcgatgccgaggatctaggcatcgatcttcccactgctccgccagtggtatcggattcaggtgatgagatccttgaccatcaatcgactagcaaacccgaggtgagggcgagctcaccctcttccgaggaggtagctgcctacttcgtagagatgatccagagcattgaattcctggaccggcatagctacgcgatacgtgagcgtggtggcgtccgctttgcgcttctccctctcgatgaggaaagtggccaagcggtctcccgggccctggatgagcttcgtcacatcggcgccgacctgagtgggatcaaggtcgccacgatcgaagcgacgaatcagcgagcctacgtgttcagattacctgcctag

SEQ ID NO: 527370 - DNA, 1650 bp, Stenotrophomonas maltophilia
atgctcactcaccctgcgttggccccgttcagcttcaccgtgagtgccgcagctggcgttggattgggcgccctgggcggcgcgatgctgggcaaacggttaagttccgaagtgggattcgacacgctgcccggcagtgagttgaggatcaactcatctaaaccaccgccgcgaaccgaggacggcatcctcctgggctacatcgtcgattctggggagcccctctacatcccgatggacgagtgggtgcgtcatgggatgattgcgggccaatccggcgtcggcaaaaccgtctcagcctctttcgtcgagtaccagcagattcagcgaggcggcggcctgctgatgattgacggcaagcttgatccggacaacctggatctattgcgggatatgtgcgccagcgctgggcgcctagacgatctgcttgtcatcagtcccggcgacccagcaaattccaacacctacaacccaattctgttcggcgaccccgacgaagtggcctcacgttgcatgtcgctgattcctgcgaccgaatctgacgcgggcgcggaccactaccgccaatctgcgaacacagcgctcaccacgctgttcaacgccattcaggcctgcggattggcatacagctttgcggatctctatgtcctgcttaccaacgccgaggcaatgaactggctggaaaagcgggtgccctatggcagcgaagcacagaagcagctctccctgttcattcacaactacaagcgcccttccaagggacagggcgcgggtggtccagagctcattgatcccgccaagctcaaggacacgctcggcggtatcggtggtcggctgttccagttcggtaccggcaaattcggccaggtcctcaacacgtacagccccgaggttcgccttaaagacgcgatccttgccaacaagatcatctacgttgcccttcccaccatgggtaaagccgaggccgcatcaagcttcggcaagatggtcatcggcgacctgcgaactgccatctcccagatccaggcactgccgaagcacatgcgcccgcgcatcccgttcctgtgcttctacgatgaatgtggctcatacgtgacccaggcgtggtcccgtatgttcgaacaggctcgatcggcacgcttggtcatgctgccggccttccagacaaaggccaacctggaggtgctcggcgaggagctgcgggcgatggtcagcggcaacacaatcacaaaactgttcttcaaacccggcgaaccggagacagcagaatggatggctcagatgatcggcaaggagttccgcactacccacacaatcaccgccaacagaggtgaaggagcgagcaaggccgcgcacatgtcttccaagccagctggctggacggacagtggtgcaacggccttctccgagtccgtcgagctcgaatacaagatcacggacactgaactgatgatgctgggtaagggtgagtgcatcgtcaactacgacggttcgaagatctatcacatccgtgtaccgcacgtgcacttcaagaatcctcacgcacttggcagccccattaacagacagcgcgcaaagtacgtgaagggattggacttcatgaagcatgtggatcgctggaccgggaaagagcgaggctgcgacctgtga

SEQ ID NO: 527371 - DNA, 327 bp, Stenotrophomonas maltophilia
atgggtgcacgcatgaaaatgctcggggttgttctattcgcttgcctttgcttcttctttgtctacgtgctgttggctggaaccccgctggaaaggctcaatcgctcctgcctgccagcaacctggatggggcgggcgttcaccaccgcggcatcattcagttcgccatctgcagaagagaagacccaagaaggtgcaggctcgctctacaacgggtgccggtactttctctaccgccagttctacgccgaggagcacagagagctaaaggcgcagtacgagcgctccaaagaggcgggtggcggcaagaagcaggaggcgaaatga

SEQ ID NO: 527372 - DNA, 342 bp, Stenotrophomonas maltophilia
atgaggcctcgcgcgatcggtaagaacccgaatcctcagtacgccagcgagtatgggatcggaatcatgcagatcagctcatggcatctggacgaccttgcgaaggtaggcatcacggaacagatcctcctggatcgcccttgcacaaacatcaccgtgggtgcctggatgctttccaagcgggtccgcaggtacggcatgtcctggaaagcggtcggagcctacaacgcaacaacggaatggaagcaggttcagtacgccgagaagattcaaaggcatctgtaccgcgaattgaaagcggcgggcatcaatcccgctgcgcagcccgaagggagtaagtaa

SEQ ID NO: 527373 - DNA, 1053 bp, Stenotrophomonas maltophilia
atggccgatcagccaatgtcagcactgggtgcgcggaagcaccacgcaatgaaggtcttccggagctcagttcaaatcctgagcccataccttgacgacccatcggttcaggaggtcatggtcaaccgggcaaacgaagtatgggttgagcggaaaggccagatcgagcgaatcgagctgaagctgagtgagaacgagattgccggcgctatcaagtcactcgctgcggcaaacggcaaggacgcggccccaattcttgatatgcgtctgccaggcttccgaatcgccgccgtccaagagccgttctccactcgaggcagtgccatttccgttcgccggcacatgcacggcgttaagagtctggctgaatacgagcgcgacggtgggttcgatctattcgactgggtcgatccccaagaggtggctagacctacagatgccgaggtcgcccaaggcggagcccacgtgaccaggctgctccaatggattgtgcagcagcggaagaacctgatcgttgtcggaggcacaagttccggtaagacgacgctgctgaatgggctgctggcaaacatccaagctgaccaacgagtgctgacaatcgaagataccgccgagttgcagatcttggccccgaacgcggtttgcctggaggccgacgagaaggcgggaattcccatacgtgcgttggtgaagctggcgctgcgaatgcgaccggacaggatcatcgttggcgaggtgcgaggaggcgaggcatacgatctgctggatgccatgaatacgggccacccgggttcagcctgctctctacacgctgacagtccgtcccaaggcctctcccggctcgaaacgctgattggaatgcaccctgacgcttcgaatattccccaccgggtgattcaaaagaagattggagaagcaattgactttgttatattctgttcacgtcggggttctcgtcgtggcctggaacagatccttgagctgaacgggaccgacgaacacggctaccaaacaaacctcatattcaacgctagacggcacaaggacacgtaa

SEQ ID NO: 527374 - DNA, 378 bp, Stenotrophomonas maltophilia
atgaaccaaccagctcagaagaaagccagcctgatggagcggctctggcactccagggccacccagacctatctgatggtcgctgcgttggctgcgcttacgttgccaggtgaagcggcagcccagagcaagaaccagctgggatcaggcagctggatgtccgtgggcaagaacatggccagcaacttctgccagttcctggagtcgcccatcattaccgttgcagtcggcgcgggtgcagtcggcgtgctgatcgtggcatcgatgaacgaagacaatggcacgctcagcaagatcctcaagaccgtcagcttcggcatcgccatcctgatggtccccggcattctctccggcctcgggttcgggagcatctgctga

SEQ ID NO: 527375 - DNA, 306 bp, Stenotrophomonas maltophilia
atgaaggcacccagcgtggtgtacgtatcgctagcacagcccccgcttgttgcgggggttgagccgaggctgatgctgctcaacgtcggggtcggcttcgtgttcgccttcatgttcaagtggtggtggctgctcgcagtcacctggttggcccacaacgcactgaaggccctgtcgaagaacgatccgttcgtgcggcggatctacatcgtctatcagcgtcaagccaacaggtatgagccttggcctgagcccactccaaagcgtggccaccgccctacggacatgggccgagggattgcgtga

SEQ ID NO: 527376 - DNA, 2592 bp, Stenotrophomonas maltophilia
atggaagacatccgctccgctcaggagatcatgccgtggatgctgcccatctctgatgggcttgttgtttgtaaggactcatcgctgttgggctgctttgagttcgtcggtgctgacgcggattccgcaggcgatgctgccttgttgcagatctcaaatgctgctgatcgcctcatgatgtccctgcgagatctgccggtcacaatctggtggaccctgagacgcgagaagtcggaagactactgcggcgagcccatgggcgacgccatcgcgcagctgatcgatgaccagcacagggcgagctatctcgcaaactcggcctacgtgaatcgtcacttcttctcgatcatctggatgccggagcgttcaaccgcaggcatgttcgagaaggccggtgtgttgatgggtgacggcgtgaacccattccgagcggtggtgtcagcaatccaggcaacctatttcggaaagggcgcgttcgcatggaagtccatggaactggaacgagcggtcgaggagtttgaaggccggctcaggtctatccaggacatcatgtcgatcctgcgtttccgccgcctggaagggcaggagatgctgggattcctgtggtccatggccaatccaggtagcaagatggcacccaaggcttgggacggccagcactacctggatggactgctgccggaggcagcggtcaacgtctacaagaacagtctcacgttcggtgatgttgatcccgtccacgccaatttgatgtccatgaaaacgtggcccacgcctatcgcgttcggcgctttcgacaccttggtgtccttgccaaccgaaatggtggtttcgcactgcttccgtgtcatgggcaccgtcgctgctgaaaagcatgctgacgacatcaagaagtggaatgacattctgaagtaccccttgacgacgtggattttcggcatcttcaagaacggtgcgatgaatgagtccaaggccaaccccgctcgtgcgctggcgtcggccgaggctatggccgcaaagggggtgcttacgtccggagaatcgatcttcggtcatcacaacctgtccatcatgctgctggaccgtgacgaggagaggctggaggcatccacgcaggcgatggcgagaatgctcgcggcgtcgccgttcacgggtgtcatccgagagggcatgcatgctctgtctgcatgggcaacgactctgcctgggcagtggcaagaatgcaggcgttggatgggcctgatgggcgacaacgtcaacgcgatcgcaccgctcatggggattggaatgggagaccgtttcaatggccacctcactgagcagcttgggaagccctgccaggcattgacggtgctgccgactgactacaacacacctttctacttcaacttccacgtaggcgctctcggccacgccttcgttgtcggtccttcgcgatcaggcaagtcaatcggcatgaacttcttcctgtctcagcttgggaagtacaacgcgttgccgaatcgcacacgcccgcagggcgttggcggaaacacttacgtggacatgaatccggttgggtttgacgacgtcgtgcgccgagtgatcttcgacaaggaccactcgtgccgaatccccactctccttcaaggcggtgagcacatcgatctgcgccccgatggcgaagtgaaggtgaaccccttcgtcatgctcgatgaccgacgccattggcagtttctcactcgctggacggaaggcctcattggatcgcgggggtacaaggttagcgccgaagaccatgagtcgatctaccaagcgatcgagcagaccgctgcacagactgactccagcctgcatgtgctggccaccgttcgaacgttcctcccgggcaccctgggtgtccacttggacgaatggattggaaccggtcagaacgccttctacttcgacaatgagatggacagcttctcggtttcggggttcacctgtatcgagatgggcgagatcatgaaggagccacgcgccgcagtggcgttcctggactacgcgttctatcgaatccagcgcatgctggaggatcagcgcacatcgaccgtgaagttcacctgcatttacgtcgaagaatgtgctttcgtgatgcagattccggagtttgtcgcccgactcaaggattggttgaagacgttcgcaaagctcaatgctttcctcgtgctgtgtacgcagtctcctgaggatctgatcgaagttcccgcatcggtctttgccgcaatccgagacaacattgcaaccaagatcttcctaccggcgcctcaggcgcagacagagtctctatacaacctctacaagactcagttcgcacttcgcgacgatgtaatcgagaagatcgtcaacggcagaccaaagcgggactacgtcatcgtgcagcccgagctctgtcggaaagtgaatatgcgattgaccgatgtgcaggtggcggcattgcgttctgatatccgtgctcagcgggaattccagctcatatatgaggaccgacacggtcggcccgaatggcggtacgactacatcaacagaatgctggaagtggcggaagaagagcgccgcctcgcagcttga

SEQ ID NO: 527377 - DNA, 792 bp, Stenotrophomonas maltophilia
atgaacatcaagatcaagccgacagccctgacgctggcaatcaccttgtgcctgtgcactacgctacagccagaacctgcggaggcgggtgccatcgttggcgcaactgagttcacgcagatcgcgaacaatatcgagctcgtgatgcagtatgccaagcaggttgaaggcgttgcccagcaggtcaagcagtacaagaagcaggtggaagcgctccgcaagctggactcgcgcaagctgggtgatctcatgctcgccggagcaaagggcgtgcgtgctggacaggacgtgcttgggcacatcaaggcgatcgacgagctcgacggtgtcctgtcgagtgttggaaagagcattgacaaggtggccggggaggggcggatcgctagcgacaccatgtcgatcctctcgcgcgccggctacaaaatcagcccgaatgactacgtcggcatgatgaaggcgttgggcaaggtcaagcgggacacttacggcaagcgcatggacgaactgaacaaggctgccacagacgcttccaacgacatcgagcggatgaacaagatcgttgccctggcaccagagatcgccacgaacgtcgaaggtcttggtgcgttggtgcagggcaacggcatcatggtgagccagttggcgggcctgaagcagacgatggccagttcagcagcaatgaatgtcgagacggcctctctactcgccgagcaggtcaaccgtgcgcgaacgggggacgtcaagctgaaggaatggggcgacgagtggctgacccctaagggtgaccactga

SEQ ID NO: 527378 - DNA, 213 bp, Stenotrophomonas maltophilia
atgcgtgcgtcggttgtggcgcagaggaacgagggcgcgcttcgcgcccttgattccaagcgaatcctccgaggcttttctggagctcagcgacgctggatcgcgctgggcgtcgggatgtaccaggtgttctacaacaagcctttggtgcccctgttgttcatcgcatgcgcggtgctatttgcggtccagctgatcgctccaattctctga

SEQ ID NO: 527379 - DNA, 1608 bp, Stenotrophomonas maltophilia
atgttcttcgaatcaaattttgctgtggccacattcgccacggtaggggcagctgcgccccagtccgcgcaaagtgtgttcaccaatgtgtttacgacactgatcgaacacgggcccaaggtagctgagaagctggtacctggctgtctacagattctcgctgtctgcgtggcgattcgactggtcaaggctttgattgatgcattgttctcagacgacgcgatcggggctgtcggcgatgcattctctgtcgtgctgtctgggtttgtctgcatgatggtgatcacgcacgtgtcggacatctcgggtgtggtgtggaccgtcgcggatgaaacgatgtcggttatgagtgtgggtgacgtcagcggttccggtgtggccgatatctcaaccaggatgatggaagcttcgtggaagttgttgctggacgtctacaacttgtacttcaacacggaagcggctgagggcgccgcctctggaagtgccatggaaaagctcctggactggctgggcatggcccttactggtgcggggctcctgcacgtactgatcgggctgatcgttcttctgatgacgacagcttatgcagcgatcctggccctgcagctcaccacgggtggcatgcagatcactatcgcgatcggcttccttccgatcgtgttcgcgttctatccgatcatcgagaactgggccaagaacgccattggcgttattgctgctggcatcgcgcaccttggcatctgcgcattcctgatctccctcgtaagtcagcaggcgactggcttggctactgccctgagtagcgggggattcacgatttttggcgagaccgttggcggctcgcaagtgaacaagatcatcgcgtctgtcgtctttgcagccgtactactggtactgggcctggcaacaggtaaatcggttgggttcgcaacttcgatcttcggctccacaggcggaatgatgggcaagccatcgcatggaagaggcggcggttcgggtagcggtggtggcaacgcaaacaacactggcggtgctggcggcggtgctggtggcggtgtagtgcctggtgttgatccaggtggtgctggtggtgcggctggaggggcgagcggtgcgggtcaggctggcgccaaggttggtgcgagttccgcggcccaaggtggcgcggctgcttcgggagctgctgccggtggtgtgggtgccattgcgaccactgcagctgtggccggcgcgaacgctgcacaggcagcaggtggtgcagcgttgggcgctgctgggctatccgcaccaggtggcgggaagtctggtgccagtggcggtgctgctggcggcaccgttggatcttcaagcgctgcaggcggcggtgggggtttccaggcaagtgcgggctccaaggcaggcatggcagcggcgctgatcggtgcagctggcaagcaagcgctgaagaacggcgctgccgccctgaagccaggagcggcacgcgtcggaagcgctggcaaggccgtcggcaaagcggtaggcaagggcgccgcgaaagtcgggggacatgcggtcagggtcggtaaggccgcagtgaacgcccaggtcaagggaacgctgcggggttga

SEQ ID NO: 527380 - DNA, 684 bp, Stenotrophomonas maltophilia
atgagtaagaaagagcagcaggcacgtcatcccgaaccgcacctccagctgcgcgctatgaagaagtggctgaacgttgttgaggccccgaagatcgagaaccgcaggctactgggcatcacgctcctgcttgtggttgtcgcggtagcggagggcattgctctggccggcctggctccgctcaaggagaaagtgccattcatggtccttgctgagaccgacgcaaatggcgccctgaccggcaatgtcgtggcaacgaatcagctggcccagcagtttgtgcccagtgagaacaatctcaggtatttccttggcaaatgggcagtcgatctgacgacggtggatgaattctccaaggaaatgcggttgccgatcagctatctgctgatgagaggcaaggccatggaggactggaactactacgtcaaagagcaagcccagccgctcgcaaagctttcagccaaccccgggttcagggagcgagccgagctggtttcaatctccttcctcagtgatgacactgctatgattcgtatcaaattgaccgatacgaatcgacaggtaaggagaattcaattgaccgtcacatatgcaatcatcccgccagccacggatgaggacgtacagcggaatccgatcggtctgtggatcaccagctttggagtgaacaatgaacttgcgtaa

SEQ ID NO: 527381 - DNA, 786 bp, Stenotrophomonas maltophilia
atgaacttgcgtaagcggctgctgctcggcgcgatgtgcgttgctttggcgacgccggcctatagcgctgatctcgacgttctgaagatcggcctcgcaggggacaagaccgacgcgatgccagccgcgaaagcgacgcgcctggtcaccttccgctatagcagggatgtttcgtttgccattcgagcattggtggacacgtatgtgaacgtggagatgcccgagggcgaggtcgtgcagggcttctacctgagtgatcgggaacgatgggaatacgacgtgacgggagacgggcgtcgcgtgctcgtgaagcctttgcagcctgggttgatcaataccggaactctggtcaccgataagcgcagttacgagctgacgctcatttctgtcggtctcggcgagccgtggtaccagcgagtaagttgggttgtccctggggtgaaaggggcaggcaacggcttttactggcgcggcgattcggttgcctccggtaccggatctgccaaggcggacgaacccagttcactttcggcggggagcttgaatttcaagtaccgcgtcagtggccgagcaccattcaagccaaccacggtctttgacgacggtgtccgtacttggttccgctttgatggcgtccaggatctgccggccattttcgccactgtcggaaagcagctcgacgttgttgagtacagcgtccagggcaactacgtggttgtgcccagtctcgctgaggccttcgttcttcggctccgcaatgcggagatcaaggtcgagaagcgctga

SEQ ID NO: 527382 - DNA, 1263 bp, Stenotrophomonas maltophilia
atggccggcgcaacttcgaagaagccggtcaaccggaaattaatgtgggtggctttggtaggcctgttcatggtcgcgctactggccattcttgttctcagcgtccggaatcctcaggccgctcgtgagcagaaaaaagaagccgcaaggcaggccgagatcgccaaccagtccaccgggtctggtgagcaagcgactgcgacacttaacgagctggagaaggacctgcagcgcgagcgggatcgcaagagcaaggaatcggagaccgccgacagggccggtttcaacgccatggtcggcggagaggctgccagtgactcgggtatgggtctggcaggtacagatggcatgccgccgattgatgcagatctcgcccgcaagctcgccgcgttcgatgaggtccagcgacaggtcgcaccacgagctggtgcatccggggcacaagggcggagcactggagctggtgccgaggacgttggagctggaactggcgctggcggaggcgggtggggaagtgctggcgggaagacgaagcgcgaattttacgaaaactacgacaaggatcgtggtgttgcatcgggaacagagggcggagacctgttcggtggcgcagcgaatgccagtggtgaggaaggtgattcacgattcgaaaccaccaaagctaagcaagccccttccccctacatcatcaatccaggtgtcccgattccggtcgtgattggcaaccgaatcgacacccggaacggcggggaagcgaccggcatgattactcgcacgatctacgacagccgcacccaccgcatccctctgataccgcagggttccaaggtgatgctttcattcgacacctcagtcgagccgggcgtggaccgattgaatggccaattcaagcgaatcattcttccggatggttccataattgaactacaatcttctaacgttgcttcgctggatggttcattcggaatccccggcaaatataaatccaatttcgcaagggcaataggcccggccttcgtggtcgcagccatgggccagtacatagagcgggagttcccagagcagaccatgaccacgcgtgaaggaacgacatatcagaccccatcggtcatgcagcaggtcgcgcccaagctgagcgaacaggtcggccagcgctatcaagcggcaaagccctatttcgtgatcaagcctggcactgaggtgaggctgacagttggcgagccgctccagttttctggccctgcagcagggggtgctcgatga

SEQ ID NO: 527383 - DNA, 756 bp, Stenotrophomonas maltophilia
atgagcattcgaacgcttgcgctggcggttatgaccgcgttcgccaccccgtgcacggctgcctccttcaactaccagtacgaagtgcagggcgatcaaccggctgcgccgatccaggcctttgacgatgggtcgcagctctatgtgcagcttcgtgatccatcggcaccccccgttccaatgggggtgaacgggccgatgcaatacaggatcaagggctactacatggtcctgcccatggtcccgacactcacgctgcacatggggcgatatcaggctcgggttgtttcgaccggttacgccaacggagttgggcaagtggtgagcgtaacaggagcggtggatgcgctcgcggcacctgtccggccgcagccaatgcagcaggccgacgcagtttggaccggggcgcgaacgcagcctatgccgcttgctcctgcgctgagtgcagcacaggaagtcagcggcgagatcgttgttggggggaaggagggtctcatctcatccattccttccggcacgcagcctctgaaagtcggcgccaggaccgtttcttacgtcgaatccgtcatgacaagcacctacgagctctatcgcgggaaagccgttctgataggtgccggtggaacggttgccggcgccaaggctgcggttgcagccagatcggcgtgccaatcagcaggtgcaacttgcgaggttgactacaaggccgggttcaccggcgttctgactatcgaaacgaaggaagctcaccaatga

SEQ ID NO: 527384 - DNA, 705 bp, Stenotrophomonas maltophilia
atgaagatgctccaggtggttgccgcaaccgcgctggtcggcgtagccaatgccgcaatgggcgcgtgcccgccgatgtccgtctacagcctggatgggatggaggcggacaaccttccactatcgcaggcggtagatggactgctgacggggaccgcatggaaggcgacggtttcccccgacgccgatcttctgcgagtgacattccgtgatgtggcggggccgttggacaaggttctggacatggtcatccgacaggctcagaaggcctccggcgttggcgtcacgatgcgcaggaatgcagcggaatgcagcgtaagcattgaccgcgcacccgtaccggttgcgccagcagttcccgcagccgccagctccagcgttgctggccatccggccgcagttgcacaggctctcgcgccgcctcagctaccacggaaggtcgaaacgctcgctgccggtaagtggctggacgctgcactcaaggactatctgcgcgagaacgggtggcagctgcgttggaacatcgaggaacactacatggtcgacgtcgcactgccgctgcctggcgatgacgtcgtcaacaacatcaactggctggtcgagacctatcagttgcagaacgggatgcgaggcgtaaagccccgcttcaccagcaacaacgtcgtcgtgattgagaagaccactgccacggaggcaaggaattga

SEQ ID NO: 527385 - DNA, 1692 bp, Stenotrophomonas maltophilia
ttgaacgccaagaccctgattctgagcgcagcgattgcgcagtcgctgctgttggctggctgcggcactgccatcgagatgcgccgcgaggtccgcaccaagcacgaggtggccacgacgcaggtcgagtcgctgctgcagtcacagcggcggcagatggagcgtgcgtcagcttcgggcatcagtgacaggccctacgttgatgtgaatccagtgaggcgcacagcagagcagcctcctgtgttcagcacagaggttgtgttcaacggcgtcccgctccaggtcctcgctcagcgcattgaagcaacaaccggtatcaggatcagctaccagtccgaactgttggcgagcgccaatgccagcagccgagccgcgccccaggcttccaacggtgcgcagtcgagcagcgtcaacatggagggcctgcctccaggcttggcctcggccgttgcaatggtcgagggcggaaccttcaatgccgatcgccggaccggcagcgtctctgtttccttcaaggggtcgctcgctgacctgttgaacgaggtatcgagctcgacgggttcgagctgggaatacgatgctggcgcgcgtacggtggtcttctaccgttacaaaaccgagacgtttgtcatacctgccgcacccgatgggatggacctggccgcaaacatgggcggcgcgctgagctcgagctccggcgatcaggtgatctctggcgccagcgcggtgggcaccttcaagaccaacgagaaggacaagatctggggcgggctcaatgaggcgttgaaggttctcgtgtccgcagagggggggtacaccctcatgccggccacgaacatgattctggtccgcgatcgccccgatcgtcttgatgctatccgaaaggtcatcgatcagacagtagcttctctctcaacgtctgttgacctcgaagtcaatgtctatcgtgtgaccgtgaacaacagggactcgcgtggcgtcaacttcggggtggcattccagaagctcctgcagaacgcgggctacaacctggttgcgaacgttggcggtgtcacgggcgaggaagggtcatcgcgcttcgtcttgaaggttccggagaaggatgctgccggaaacccgaaccgctacggcggcagcgaggcatttgtcgatgctctggccgcactcggcgatctggccagcaaggattccgcaaccatcacgaccaccagcaaccgcggtatgccgttgaaggtggtccagcgtaccccgtacctgaaggagaccgccgccaattacgtctctggcacgcagctgggcgttgcagctggtccgacgttgacgcccggtgtcgaagaaactggactcaacatgttcctgctcccgtccgtccagcccgatggacgccggttgaagctcaacatgatgatgagcctgagcacactcgacaagctggacgagtacggtccggaaggtttcaagatccagcttccgaacacatcggctcgtgagttcttcaatgagtcctggctggagagtggccaaatgctggtgatctctggcttcgaaagagaggccacggaaagccgtactcgcacgccttggggccgcaagacatggtgggcaggtggtagcaacgcggtatccaagaatcgagaggttctcgtcgtgaccgtgcggcctgcggtcttcatctcccgagccaagagctga

SEQ ID NO: 527386 - DNA, 513 bp, Stenotrophomonas maltophilia
atgaccgcgacattcgcaagcaagtccattcccgcagccatcgtcttgtttctttcaagctcactggcgcatgcgcagtccgtggatgtggccgcagcggcaaagaccgaagctggcttcaatgcggcggaggcagttctttggcggcagcacaggctgctggagatccagaagaaggtcgacgagtcccgtagggatgcggaggctagcgtcgcccaggacaacgcgctgctgagcgggcttcctgttggcaatctgccgcctccagcagccacggcgccgccagttccggctgcgcccgccacaccgcccccgccagagtttccattccgcttggcatccgtatggggtatcgagggcaagtatcaggtggtgatccagtctggacagatgcggcagatggtgacgctcggttctgcgcttccgggcgggttgaccttggttggtgtggatgctggtggaatccggatgaggaagggttcacagatcaagacgatggcgttcggagagtag

SEQ ID NO: 527387 - DNA, 1290 bp, Stenotrophomonas maltophilia
atgaggatcgggaacattggtggccgcaacttcgcgatggagctggagtgggtgcggcttgacggcgtaccggtcaagattcatgcgaaggaggtagccgctgaacacgggaagacatactgcgcttcagttcctacttcggatggaagtgtggtctgcggtactgggcagctggctgaaggtgagagggcgcccaagcgccctctctacagtttcgcagcagcactcgcgtccattggaagcagcgcgatctatgtcgggcatgtggtcgacgacgcaaccgaagtagccaggctgtggtacacggtggtgaccgatggcgaggtgtcgcccggcacggatgtcacagttcccttcgaggaggggattgcggcggtcactgagttgtcgctgactctacgcatcccagtgatggttatgggggaggtggcagggctcgaaagtgcagaatcgttcgaccctgccgacctgcttgcgcgggtcaagcccaaagccatggtcgcagtggaacatggcataccgaaatcgcgggcggtagcaactgccgtggctctgttggcgatggcgagctttggataccaccaatacgatcagcacaaactgcgtgcggcccaggaggcggctgcggctgcagaggcgcaggcacaggccgcctacatctcacagatcaggctgattgccgaccagctgcccgccagcaatcagtggatcggcgccgcgctgtcgcgggcaatcagcagtatgccggcctggtacgcgggatgggagctgcaggacgtcacctgtactccagtgcgttgtgaggccaagtacaagccgtccaacgatggcttcagctacgtggccatggtcgaccgtttcggttcacagcgatcccgatggagcgaccaggatcgcttgctctacgtcagcatcgagcaaaagatggagagcacagcggcacctttgaccgatgacaagctgttgtcgccagcacccgcgaagctgcgctctctcgctgtcgtcgggttgctcccgggggcagtgaaggggattacggccaaggagacatccacgaacctttcggcgcagttctcagcgcctgctggggctggagctctatggcaggacgacattgatacggaggcctcgttctacctggatgtgccgactgtcgtgacgctcagcggtttgatgagcaatgctgggtttgtggcgaggcagatgacattcacgagaggcaaagaatcgtccttgccgacatggaagctcacatggacccgcctgcgtggggagtccacctatgagtga

SEQ ID NO: 527388 - DNA, 1785 bp, Stenotrophomonas maltophilia
atgagtgatggttcgtatccgcgttccggtggcccgcaggaccacgcacttgtccttcgtgacggcgccgaggcgtttgggagcttgatccctacgctgcaggctgcacgcggcgaactcggttcggtgatggacaaagtcccgacgccgcggaagtcggatgccgtgacgtacttctatagagccgtggcggaccttcgcgccggcaagctctcggatctgcctgtgtgggacacgatcctgaacgatcagggtaaggtcctctgttctactgggcgcagatccactcgattcgcggttatcactgattccaaagaccaagagaagcgctgcttcgtcgtccagggctctgcggagcttccgaagaaggaattgtccgatcttgccgtgaagtcgatccagagcggctatagggtgtctggcgtcatccaggtatccgacgacctgatgaggctgctctggtcctcctgggacatgaaatctggtgttgccgttgagggcgaggacgcgctctcttccgtgcaggcgctcttcgatgagatcggtagcgcagccgttgaggctggtgcttccgatatccacctatcgtggcaagacggcaagacatccgtcctgttccgggtgcatggccgcgttcgccactaccaggatctcaccgaagacacaggtagggcattggtcagcgcggcctacaacacccttgtggacaaggaatcagtcacgcagggcttcaatgagcggggaaggcaggatgcatcgattgagcgcaagctcaatggccgcagcattcgctttcggtacgctggtgctccaattaccggtggctacgacgtcaccttgcgcattatcgatgtgacaggtgaagtcaagattcgcactcttgaggaagctggctactcggtcgatcatcagatggctctgcatagggccaccgcaaagccctcagggatgatcgtgtttatgggaccgactggcagtggcaagtcaacgtcgctggccagcctgatgaccgccatggctgcggccgacccgagcaagatctaccgttcggttgaggaaccggtcgaggtcaagatgcccggtgtacggcagactgaagttccaaggcagaccggtgctgtcagtgccttgaacgaggtgcttagttcgatcctgcgtaaggacccggacgtgatcatgattggcgagattcgcgatgatcagaccgctcagcttgcaatcggggcagtgcgcagtggtcaccttgccctctcctcactccacgcagatggcgccttggccgcgttcgaccgcctggagttgctcggcattaagcgggcggatgtcgcgtcgattgggctctggaatgccctggtgttccagcggttggttccggccttgtgtccggcctgtaaggtgcgcggtgaccaagtcaaagttggccgtgaaatctccacaggactagccgagcggctcgctgcgatcaacgttccgttggattcgatcttcgtgaggtctgaagacggctgcccgctatgcgatgcaggcatcgccggccggaccgtttgcgcagaggtggttgtgccgacgccaagaatgcttgagcgcatcgtgctccaagactcgatagggatgtggaaagagtggaggcgatcaatcaagaaggatgaccctgcatgcatgtcgggccgtacctatttcgagcatgcaatctggaaaatgaagcagggaatcctgtctccggttgaggtggagaagtactgcggcttagtggacgaacctgtgttcgaggatatgaatgaataa

SEQ ID NO: 527389 - DNA, 1146 bp, Stenotrophomonas maltophilia
atgaataagcgcgtcaactccgcgtccccagcggttgcgagccggaaagcaatgaatcgcctgtccatcggagatcgaatcgatctttggctggggtttgttgggccgtttgggatcggcaaccgagtcgagttctatcgcgacctggccgccttcactgccgagcgcctgtcgccgatggcagccgttggaaagatgcatgaggtggcaaggaagcgaaggtcactaaagtggctgaagctggtgacagagcacctcatccgaaccggcaaggaagggtatgcatcgttcggtgagcagttgtcaggcctcatcgaccccggggaagcggtgatgctttcgaccggggagaggggtggagcatttccggcgacgttggaaaggctgattgctttgaacgaacgcaaagccgctatatcggcagcgatcggcttcgcagtgctgacggtggttgtgtatggggcagtggtgctgggcctgatgttcttcgtggctaagttgttggccccgaagtatctcgcgatggtgacgccggtaaccatggccaaactgagctttgcgcccgcatacctggccacgtgtgcagccgtggccgattggtggttgccagcattgctgatcctggtgggcattgtgacggcgatggtcgccagcttgagacgttggcgtccgggcgtgcttcggtccttccttgacgatcacgtcgcgccttggtccgtctaccgccgcatgcgggcggcgctgtttctatcgacgctgtccacagcgttgaactcgggtggccaattcaagtcgacattggaggttgttaagcgtgcctccggcccttgggagcgcgaccagatgaaccgaatgctcacaaggctaagcggcaatgggggaattgcatccgctatgactgctggctttctgccccaggacgtcatggatcggctgtcgatctacctttcggtcaatggattcgaacagatcctccagccgatatcgaataacgcaatggatggtttgttgaaaacatcgaggatggttggcagaataaccaaggtggtttgcactattctgatcattgcaattctattggccacggttggcgctggcgcagagattgctctggtcggtctgcctacccctggtgcaccgatgtga

SEQ ID NO: 527390 - DNA, 585 bp, Stenotrophomonas maltophilia
atgcgtatgcagaaccgcaacttcccaagacccatcgggggtgggcgacgtacccgtggcatggccctcctggacatcctcatgtatacggcgcttgtcgctcttgccctgtacggagtcttcgtactggcccagaaggtctttgggaaaagcgctgtcaacgaagaggcgcaacagttcctcgagatgtcgaacgacacagcgatgacgttcgccaagacacagggcaacttcgctggcgtgacggttgcgcagcttctcgcgcacaacctggtccccaagaagatgatcaatggcaccagcattcagacggccgcctggtcaacgccggtgactgtggcaccggcttcgctgactggttcaacggctgacgcgctgtcctatacctactcggttccccgcactgaatgctccgagttcgtaaccaccgttgccggtgcgcttggcaaggtgacggttggtggaaccaccatcaaggacgttgccaatggcgttccgaacgtcaacatgaccgccctcggtacgtcatgcaacgcaactgccggtacgggcaacgtggcactcgtgctgacgcggggcaggtaa

SEQ ID NO: 527391 - DNA, 1173 bp, Stenotrophomonas maltophilia
atgaggaatcggcaaaagtccatggcgccggcacggcagcagggcaatgcactgctggctgcgctcattgcggtgagcatctttagcgggttggtgcttgcctggatgctttggcaggccaagcagcaggagatcgatcgtgcgaacgcggctggcaaaaccctagcgcaattcggcttggggctgaggggctttgtggcagcagtgcagagtaaccctgcgttaggcaatggaacacgaaacgggtacgcctggcttaaaccgccagcttgcggtggactcgctaccaaccctgtaactggctacatcccgtgtgcatttacgggcggagagtacggagacagcttcagtactcgaatcgttgtggatgcgagcagcaatgctgtcgaagtccgcacatcctatgtcgtacctcaaccgcagagcggcagaggcagtgcaagcgagatcgccgcccggatcgcgacggccgcaagcggcagtggttcggcgtccatggataacgccttcgtcaacgtctttgccaatgcgcctgaggatgcaacggggttgcctgatgcagctgcaatgctggccaacgccgggcgggtggtgatggtgctggacaacgcgccatccaacgaccagtggcttcgtactgacggaacgaaccgcatgctcgccaacctcaacatgggagggttcagcgtaggcaacgcgagagacggcgcgttctcgggcaatgtgcgggtcaatcaagcgctgcaggtcgaccagggcctcaccgtaaccagtggcagcgctgatctgcgcggcggcgtggtcacaacggacgtggccatgactgatatcggggtgtttgcgtcgcagggcatctatgctgctgaagtgctgacaggcgccacgacctatcaggttgccaagccgcgttgcagcgccaccgcctcggtgccgaagatctttgcttccctgcaggcaaccggcacctccaacgttgatggataccaggccgattcaatctactccagccgggtcgacgtcaccgacattggtggagcatggcaggtaacgcctgtcgtaatcggcacaagattcgacatgtctgttagtgggtcgacgatcacgctcaacaagtccaatcccaccatcaccccacgtgatgcacgcatcgtcgtgcttaggaaatgctcatga

SEQ ID NO: 527392 - DNA, 345 bp, Stenotrophomonas maltophilia
atgaccatggacgatcagggggtggaaaggttcgatgccagtgcttgggaatgccgcgtgaggcagcttgggctggagtcctgtaatggaacgggacaggtatatctcctataccagcgcaagttcagatcactgattggcgaagctcttgcagcgcttccagtcgagcaccaggcgcaggcgaccgcaatcgccaatgcacacggctactcggagcctgatgaagaagttggcgatgacgactgtgcgcatggactcgatccgaactgctgcccgctgggttgcggcgacatcgatgatggctggcccagcgaggatggcgagttgcccgatgacgttgtgtag

SEQ ID NO: 527393 - DNA, 630 bp, Stenotrophomonas maltophilia
atgacgaatacgctttctctctgcatgcttggcgcggtcctggcttgcccattctatgcacatgcacagagtgcaaaccggccgatcgcggacgacccgaatctggtaactccgccgcgcaaggttggcgactacggttacggcgctggcggtgtgcgtgactcggtgctgcaggggggctccgccggggggctgccaggttcctccgtgggtgtcccgaatccctgcgacttcgatccgcagcggtgcgtggttacgccaccgagcacgggtggcggcggatctggcaacggtggcagtggcggatctgttcaaaccttcagcactgtcgccagcggacgattctcagctggtggcctgggtggtccgttcgagatgcagtacctggatctgcccgacgcgccgcagcgatcagacacgtacgtcatcgtcgatgtgaccaacgccacctacgtgagtggttgcagtgcatttgatacatcggcagcgctggctagctggatgccctacgactactcgaattgggatgggccaggtacttggaaggtgctgctgactgcgccaaacgggtcctgcagatcgggcacagcgttttcctatcggatcgattacaaggtgacaacaaagtga

SEQ ID NO: 527394 - DNA, 2739 bp, Stenotrophomonas maltophilia
atgcaaaccaagacccacccgctgaccgcagccatcttcaccctgatcgccgccaccgccttgaccgcttgcggcagcggcggtgggtccaagagcgagccgactcccggcccgatcgtggacggcggtaacaacggcggcaacggcggcaacggcggcaacaacggcggcggcaccccgccgaccccgaccccgacccccgatccgtacgcttacaagggcatcgaggacaacgccctgatcccgaccggcatcaagaaggcccaggacgctggtttcaccggcgcaggcgtcaagctggccgtgctcgatggtggcctgctgggctcgtacgcgccgctggacggccggttgaccgagtcgaaggatttcacgggccagcctgctgacaacccgactggcaccaaagcctcgcacggcatgctggtcgctgccttcgctggcggcaaagcaacggactcgttcaagggcggcgccgccccgggcgcggatctgtacctgggccgcgtctgtgcagcggacaactgcaacagtgcatacgtcgctgcagctgtcggtgacttcgccgccaagggcgtcaagatcttcaacatgtccttcggcgcgaagtcgtctgaaatcgtggtccccgcctacgccgcagctgcagaggcgatcgtcaagaatggcgctctggcaatcgtggcgaccggcaatgaaggcgcaagcgagccgaatgccccggccaactaccccacccttgccgctggctacgaccggaactggctggctgtgggcaatgtcagcatcggcaccgacggtaagccgagcggtctggacccgacctccaacttctgtggcggcgcggccgcgttctgcctggttgcccccggcaacaacagcatgcagccggtcccgggttcggacagcgccaatttcaacatcatcaatggcacgtccatctccaccgcgatcgtcagcggcgtggctgcgcaggtctggcaggccttcccgtggatgagtgccaacaacgtgcagcagactctgctgaccacggccacggacctgggtgatgccggcgtcgatgccaagttcggctggggcttggtgaacgcagacaaggcggtcaaaggccctgccgcgttcatgagcagctggggcgtgggtgtcaccggtgactccactttcagcaacaacatcagcggcaccggctccctgaccaagggcggcagcggccgtctgaccctgtcgggcgccaacacctacactggcagcaccacggtgctcgacggcaccctgaacctgaccggctcgatcacctccaacgtcctggttggcaacagcgctaccttcgagacgcacggcggcaagatcgacggctcctacggcgtcatcaacaccaccggcaacactgccatcgagctcggcaagccgttgacggtcacccgtacggtcgacctgaagggcaacctgatcttgttgccggagaccggcgactacaaggtggccaccagcgagaagatcctcagctccggcgtcctgaatggggtcaagggcacgttcgacaacgtgaagtacgccaacggcttcttctggaccgcaggcctgtcgtatcagccccaggccgtttacgccaacctgacccgtgcaagcgccgcagccagcgcactgtcgattggcgcaccgcaatccgtggtcgacggtgcaaagcaggccgatgctctcgtggctgagctcgatcagcgcgccgctgcgggcgctaccgccgcatctgacccgatgctggccaccggtgccgccctgctgagcgccggcgacgcggcagcagccgcatccctgtccagcctgactggccagatccacggcacccagcgcaccctcagtctgcaggcgggcctgaatgacctgacctccgccgctgatcgcctgccggcaattcgcagcaccgagcgcacgacgctgtgggcccaggctgaaggcgtagagggcgatctggaccgcgacggctacgccaaggcgaagtacaacacccgcggcatcaccatcggcctggacaccccggttggctcctccggtgccatcctcggtgtcgcgctgaccggctcccgcaccaagggcaacatctccgccgatgccagccgcctcgaatcggaccgcaaggcgctgaccgcctacgcgttccagccgctcggcaacgcctatgcttctgccaccctgagctatggcaagttcgacgtggatacggtgcgcactctcgcctctggcaacgcccaggaacgtgtcaaggccaaccgcgacgattcgatcctgagtggccgcatcgaggccgggtacaacgtgggtcagattgcgccgttcgtcgcagtgggcgctctgcgccagcgccagggcagcttcaacgaatccgcagcatccggccttggtctggctgcaggcagtgactccctgaccacgcagttcggtgagatcggcctgcgaaaccgcttcgcgtccggcgcctggtcatttgacagcggcatcgcctaccgcgcggtgttcagcggtcgcaacaccggcttcaacgcgtggttcagtggcctgccgggaaccgacttcaccgtggctggccagaacgtgtcgaaggacaacctgcgcgtcttcatcggcacgacctataccgcaagcccgacactgtcgatctacggcaatgtcaccgctgaacgtggtggcgctggccagtcgaatgcagcaggaaacctgggcttccgctggacgttctaa

SEQ ID NO: 527395 - DNA, 315 bp, Stenotrophomonas maltophilia
atggcggatcactactggcccatgttgttcgcgcccgactcgattgcggcgacccggcgcgcgtgggaagaggcatgctcgcagctccgcgttcattgcagccatgtgggggctgctgccaggtcacgtgaaacgagctccaagtacagcgtcgtgtactcgggccgcaactacgtcctggatatgcagatcaagggcagtagctcgtttgacccccgctcttgcctccgaatctacttcgcccaagcccgcgatctgcaagcgctgcttgtcggccacctgcccggccatcttcccaatcggcagagcaactga

SEQ ID NO: 527396 - DNA, 237 bp, Stenotrophomonas maltophilia
atgcgggaagaagggaagctcagcgatagcgatcacagcaacatggacaagttccttgggttcatcctggatgactacaagaatggtggaatggatcgcggagaggccatcgcgtacttggctcacgtgatggccgctgtcgacttgcagaactattctgaagcacggaaatggttcgagaaccatgagaagtacatcgcggaaggcaagaagatccgcggctcagctggtggttga

SEQ ID NO: 527397 - DNA, 291 bp, Stenotrophomonas maltophilia
atggcagacgatagcaactacacctacatgccggccgatggctggtatatgacgcaccccaacaatccgggctcattcccccgaaccttttaccgtgttgccatgtggcgcatcgatgccgaaggcactgtggttgggatgatctccgttcgcctcgggcctgggcaggagaaggagcccggcctggtcaggcttcatgcgccgccacgttcgactgacggacagtacgtgcactgggatgacctgaccgacgaggacaaggctcatatcgttgcgcggcgcttctcgtag

SEQ ID NO: 527398 - DNA, 1047 bp, Stenotrophomonas maltophilia
atggcccagactcccagcctcctcccagaagaggcgtataaggcgatcgaatccctggtgacagagggcgtgcctccgacgcatttggcagtccgcgatcgcgtcggcgggcgcggcagccatccagtgatctcgcgatacatcagcgattggtacagcaagaacgggcctgcgtttgccgccaaggtggtggccgcacggcagcatggcccggtcgccgacgtcgtcggtcaaatgcggcaggccgctgtcgaagcagcgaatatcgtctccgacgaggaacgcaaacgccgggaggctctggaacggcgagaggagcagctgcaggaggcgcagctggccctagacatgcgggagcgatcgctgctcgaacaatcggagaagctggccgaccgcgaggcgagtgtggagcggctcatcgccgagctccgggcggacaaggcatcactgagtgatcagcttcagcagacgcagagtgaagtcggccgactcaacgcggagctgcatcgtgctcatgaagtacacgcggccagccggttggaagccgatgccacgcgagaaaagctactggcccaggtagcttcattggaagtccgggttgcggacctggcagcgcgagagcagtcagcaaagcaggccgctgaagccgcccgtgaagccgaacagaaagccttggacgccctgtcagcatggaatgaatcagagcaggttcaccgccagatggctaatgcggctgtggaacgcgtcgcggggctgaacacgcagctgtcagcggcgttccggactgatctggaaaggatcatgactgcgtcttccagccgcgagcaagcaaaggcggcggagctgcgtgcggccttgcaagagctcaacgccgccaaggagaagattgcgggtttggagtcccgcgccgaacttttggctgccgtacaggcccagcttgcagcagttcaggcggagagggaccaggcacaaaccgccgtgattgacttggttgcgtcattgaaagaactcgccaagccggatgcagggaaccgagctacagactag

SEQ ID NO: 527399 - DNA, 198 bp, Stenotrophomonas maltophilia
atggctgaatcgaacacggcatatcctgaccttgctgccgatgtcgctgatgccggcgacatcgaggatgcggtgcggcagatcctcgagcgtcgcaggaagtgcaacgccagcgggcagcgcggggaagacattgaactgattcgtgccgccctcgcaggcgcatccttacgatcaaccgcagtagaggtggcctga

SEQ ID NO: 527400 - DNA, 357 bp, Stenotrophomonas maltophilia
atggaaatgtctccctaccaagcggccctgcggttcattcagcataactccggcactggcggtgccagcagcctcgccaagctgatgttgtcgctgtggaattcgcaatgtgcattcgccatcagcgagtgcctcggcaacctcgaccgccagaacacacgcatcgccctggatgccatcgagaagtacgctcgcgaaggcgaatcggaagagctgtcggaggtttgccgccagatcaacgctgcctatccgcgctattggaagctcggtgcggctgccacgaaagccaagtcggagcttcgtgcccgatgggaggtcgaggacagggacgacgaagaagacgaggacgaaggctga

SEQ ID NO: 527401 - DNA, 303 bp, Stenotrophomonas maltophilia
atggttgacctgtcccccatcgagcgccaggtgctgaccgccctgcaggcggctggcgatgctgggttgaacctgtcggggatcggctacgcgctggttgaggctgggctcgtaaccaccaggcgtgcgcacctgaacccccaaggggctgcgctcatggcttcgccctacatggcacgcttgcgctcgcaggagctgctgcagcgccggttccgaggagcgggttacgagattacccgcgccggccgcgccgccgtcgcatccagtgaggcggcagacggtttgccgctcccatccatctaa

SEQ ID NO: 527402 - DNA, 483 bp, Stenotrophomonas maltophilia
atgattgatatccccgccgccgcccttgaagcgggcgcattggccctgtccagatactcgcatggcaacgggatcgaggaggcctgggaggaggatgcacgggggttcgagttggccatcactgcggccctgccccatctgggcgtcctgccggtgcccgccgatctggccgcccgcgccagcgagatcctgtcctggcaaaagaccggcatactgccgggcgatgccctccagcgtttggccgatcagcgttggcccggggaccacgacgccctgcagctggccgagcaggcaacaacgaccgaagcgctgcgccacctgaccggcctgcagacggtccagaccctggatgtggaagccatgatcacggcctgtgtgccggggggagatgtggcggacccgcaacagatcgctgaccgcctgcgggcctggctgaccgggccggtgcagcttccgaccggcgcaggtaccgcccatggttga

SEQ ID NO: 527403 - DNA, 729 bp, Stenotrophomonas maltophilia
atgacgaaccacaaccgagatctgatggatacggcattgactgcggacgcaggggtgactgctggggacattcaatcgagcgagggcgcccgccgctacctcgcacacttcttcgctaaagatctgcagcgccatgactttggtgactacatcgcaaacgatctcgctgccgacttcgcgtgcacgctggcccgacaccttgccctgcgccattcggatggcacgagcgacgtgcaggagatggctgccaccctggagcgcatcgcggcgggtgcacttgctgattacgagggcgttgcatctgatgagctgcacgtcttacggtgcgcgaagttgcttcgtgaactcgcctcaagggcttggaggccgatcagcagcgctccgagggatggaacgcgcgttgacctgtggctggtgaaccatagaggcgaggggcgccgagttacagacgcctactggaatgaaaagggtcgaacgcgcacatggcgcgatggcaattggatagaagtggatgcgccgtgctggtatgcgtttgctcgcgggtacgactatgaagatgaggacgccagttgcgagacgctgcgggtcttcgtcgatcggcccagagtcatgagctgggtgtttgatgaggcaacccactggatgccccgccccgatgcgccgaacaacaacgatgggcggcgtgaaacgaacgtcgaagatggcatgccaagcgaaggtgcgaaatga

SEQ ID NO: 527404 - DNA, 2955 bp, Stenotrophomonas maltophilia
atggccgctgattcgagctccgcaggcaccgcgctggtggccggccgcatccagcgcggcgacaacgccacgatcgagcggatggacgaaccccgtgcgggcacctactggcggctgctgcaggcggtcaccggcaaggagaaccgcaagcagatccaaagccccgcgctgacggccggaaccgtgctgctgctggaagatgtcgagtttgccgatggcgagccgcacgtctacaaatttgcagcccatccgagcgtggcggaggaaaaagcacgcggcagccggttccatgccgattgcttcttccagtactggacctactgcccggaaggcgcccacatccgcgagcgcgagctgttgggcatccatgaggacatgcagaagacccaggcgctgctgctgcagccgccgccctcggccgcgccggtggcagcactggcgtttgatccggctaccgccgcgtcgcccaccggccaggccctcaccacgccgggtcaggtgcgagatctggccacctatgccgagcagctgcgcgagagcgccgaggccagccagaactggatcaccacgcacgccagtgcgctggccagccagggcgcgcagctggcgcgcttccacaccgagcgtgccacggtggcaatggcgacggccaagggccagctggaggccgtcaagggcattctgcgtacggtggaaaacctgaaggtctataccggcgaggacatggacgtgaccgtcctgcgtgagggtgaacctgctgaccccgatgcaccgctgaccatctaccaggatctgctggcgctggatgaggagctgctgctgcatctggaagaaggcgggctggaccacggccatcttgattccatcgcggccgtgcttgccgacgatgcgctggtacaacgtctgctgccggccgagcgcagtctggtgctgtgcaagttccgcggcggctacaaggagttcgtcaagcccaagggcgaggacgacatgggcgcagccatggcgaacgagcgcctgaaccgcatcaaccagtggcaccgactgctgctgcgcgacggccagaacgtctacctgatcgacaccgccgagttcctgcagaagatcacccagctgatgcccagcgccgccgagcagatctcccacttcagcgaacgcaacggcgacaccattcgccgcgacgacatcgcctacgcacaggcccagcgcagccaactaggcgcactggatgcctatgccaaggtactgaccgccctgtgggggctgcgcgatcgcggcgtggtgctggccaactggaacgtgccagcgtttgcctcgtggctggactggggttttcaggagcgctacctgcacctggtcgaccagagcaacctgatcggcgtacagcgccccagctttgccgtctaccgcgatgagcagaaccgctacctggcccccggggcatgggtggccgtgcgcacctcggcgctgatgacgcaggagttcatcccgggagcgttcgcctctcagaaggtccgccagtgggggggcgattgggactacagtcgcatctaccacgccaaggacacccgaccaatcgtggcctgcgtgcgccaggacaagcgcggactctacgttgaagtaccgctggagcacgagtacaagccgcgggaaatcagcggacgcatgtacctggacaagcaggccatggccgacgtgctggtgctggaccgcctgcatgcggccgatctgacctactacctgacctcgcgcaccgagcggcgccgctacaacctgtacgtggagctgttccaggtcgcgcgggcctgggtcgctgaacgcgaccgtgcggaggcgccgctgcgtgactacctgcgccaggcagtggccgaagcgcggatctcccatgatccggagagcctggaggcggcgatcaccgacgtgctagccaccgcgcgtgcagcccgtagggatcggcgcgcaccggacccggataaaaccggcttccccgcctaccggcgcgccctgctcgacatgctgcacaccctgctgtcggcccagaacggtcgggtggacgcgctgcagcactggtgcaacgcccatggccgacgcccattgcggctggtgtcgaccggcaagggggaattcaaggcctatctggagccgctgcccggcgagcatgaccggatgctgggtgaagcacgtcatacgtcggtggccaccgtgacgttcgacggcgccacgggcgccgtgacgctggccgactggcgccgcgagttgctgcggcccgctgccggcgaacacgtgatctacgactggcagtacctgaccgtcattcccgccaatccggccggtgagtaccacgaacgtctggagcgcacgcgcgatgatggtgctgccgcatggctaaaagcagcctcactgttcggctccctgcgatacgaacaggcgcaggccttgctgcatctccctgcacgccagtcaaagcatttccagaatgggctggatatggactggctgctcgatcgcgccctgggcagcaagggcaagtacatcgtccgccatgactatgaattcgcggtcgggatcgtccacagcggtgtcaaaccctgtgtgctgatcgcttcccacgacatgctggggtacgtctatgccgctggcagtcccgccgacaaggagcgggcgcagcgcttgatcacccgccgttaccagacacccgggcacgcacttgaagacctggagaagggaaaatacggctggttgctgcgctacgtagggctggaagatgcctggcgctgccgcgatgagcctcactgtctgggcgtgggtgccaccagagcaataagcgaagcactgatcgtcgacccggcgctgagcgtgaaggagaatgagggccgcaagctgcgctgcgtgggcctgaccgaggttggcgccgccttgttcccctggctggccctgcgaacggattgcgccctctga

SEQ ID NO: 527405 - DNA, 363 bp, Stenotrophomonas maltophilia
atgacctgtgacgtcctgaccaccgacgaacttcacgtgctgcgccatgcactcggcatcggcgaggctggtaccggccgcgagtaccgcaaccatttcgtcaccggtgacggcagcgccgaccatgagctgtgcagcggcctggtggcagctggcatgatggtgcggcgggctggcaacgctctgtcaggcggcgatgacgtgttcaccgtgaccgccagcggtcgtgcggcggcggtcgctcaggcacctgccatccggcccggccagcgccgctaccaggcctacctgcagtcggacagcccactgaccttcattgactggctgcgtgcccagaacaggagctctgccaatggccgctga

SEQ ID NO: 527406 - DNA, 438 bp, Stenotrophomonas maltophilia
atggtcttgcacgccggccggcgcatcgaccgccccggcgtaattcgcaccaccaccctgtgcggtcgcatgaatgcccgcagtcgcgatggcatgaacatcgccagtactgacgagtcggtcacctgcaagttctgcctggccaagatgcgcgtcccggtaccgggcccggtggccagcgcttccagcgccgcaccggttcgcccccgtcccatcgctcgggccacggccctggagctgctgctggcgatctaccagcagcacggttggcgccgcgccgagggcgaaagcatggacgcccgcgtgcagacgctctacaccgtcagcgccgaaccgggacgcaaccgctacgtggccacccccaagcccgtaaccagcccgggcaccgcccctgacggcggtcccgcccccaatctggagccctccgatgacctgtga

SEQ ID NO: 527407 - DNA, 333 bp, Stenotrophomonas maltophilia
atgcacctgatcgcctctccgctgttgatctgcccggcgttgtcgccgcgcgagcggtaccagctcagcgcgccgtaccgttactgggtcagcgccgcccgggaacagcagcgctggctgttggccagcctgggcgtcggccaaggggtggatcagggcgtgcgtctgggcctggacgtcacgggtggcagcgcggcccagcggcgccggctgcgcgccgaaatgcgcaagcgtcgcatcgccttcctgcgcgaagctcggcagcagcgcgagcgcgtgcgccacgagctggccttgcgcctggccgagcgtgggctggcggtaccagcatga

SEQ ID NO: 527408 - DNA, 267 bp, Stenotrophomonas maltophilia
atgcgtgaggtctcagaaatgcccgtcgcggtcgtacgccactacctggcgtggcacctgaggaggctgcgccgagggcagcatgaggtgcggcggctcaacgccaagctcagcgctgcgcgaggcaagccacccgacgtcggtcggctgctggcgcgctaccgaagcggcgtggatgaggatgctgctgcggtgcttcagctgcgggcgcggctggccgacattgctacagaagattcacgcagtgggaatgccacgccgccgtga

SEQ ID NO: 527409 - DNA, 297 bp, Stenotrophomonas maltophilia
atgagcaagacatccagccccaacccacgccagcggcaaatggacgccgctgccgcaatcttcatcagcatggcactggtgatcacaaccagcatgatcgccattagggtgtatgcgtggctacaccccgcaacaaacagagtattcacagattggcatcaggcgttcatcagcgtcggaaacatcgccctcagcgcactcgggtacatgctcatctcgcatccccaggcccgtgccattgctgcagttaccatgctgttgtctaccgtcaacctcactgccatcgctctcaactga

SEQ ID NO: 527410 - DNA, 465 bp, Stenotrophomonas maltophilia
atgaaaattgacaaactgcacgtagtcctgctgttcacctctgtcgcatgcggagccatcgccatgttgcagtctcaaactgcatcgaaggcggatctagtcgcaacatcccagagtgcagcgcggcccgaagcgggtcctaactcagacagcgggagtgtctctccttcaacggaagccacggcaaggacgatcctccaccatatgtaccaatgtgaggtgcgatcagcgcagatgcagatggccgtcgttggcagtgacgtcgacaaagtcaaagcgctactgaagcgtgaggatcaatacagggatctcattcagaccaatcgagtgcacatgaaaagtgcggtgcgatcgctgtctgagagagatctcttaaacctcaacactgcaagtcgccaagcgatgctgctcttctcccaggacggcctggccgactccccgctgccgcagcgtggcgcgccatga

SEQ ID NO: 527411 - DNA, 1158 bp, Stenotrophomonas maltophilia
atgacgcctcggccgggagaggcactgcttgaaggaagcacgttcccacttgttgtgcccggtgtcactcactccttggcgccggagcagatccaggctgcacgcgagttcatgaataccgtaatgaagcacggcatcagtggctactcgccaaacagcgccaagtcgatgcgagcggactggcgacactggatggcgttctgcgtgggcgaaggccgccagttcatgcctatccagttcgatgacctggtcttcttcctcaattccctcgtagccgcaggctacaagcgggcgtcgctcgaccatattttatttacgcttcgcctgttctcccagatcttcaaatgcccctcacccacggacgccattgaatttcagtggtactggcgggacgtctgtgccagcgaaagcctccggagcgcgcagaagcaggcgaagggacttaacttcgatcgggttgacacgctgatcaacgagacgaacgccgcgcttgcttctaccgggccaggtgcggcggcatccctttcgtcacaggcgattgctgccagggacgccgccttcgttgccatcagttaccagatcatggcgcgggcttcggagatgatcgcattgcgctgggaggatgtcgtgttcgacgccgatgacgcgggtggcgccacctgtgtgatccgtcaatcaaagactgatcgcgacggcgaaggcgtgacgaagtacatccagccagagggagcagcactgctgcagacctggcataagctgcgcctggccacgagagatttgctatggccccaaggccaagagcagctcgacgcaaatccgttcatcttccaccgtgtgccccgctaccgggtgctcccgccgcggcccaacgcaaagactgcagctgcgaggtgggatacggccttaacggtacgggaggctgatcgcattctgaagcgtgccgtgggcgaggcctactcatcgcactccgcccgagttggcgcggcccaagatctcacacgggacggtcacgagcttccctacatcatgcaggagggccgatggtcgagtcccgcgatgcccgcgcggtacgcggagaacgaactcgcgttgcgggcgggcgagaagcgccgccgctcactggagcggcttcgtaagtcagctgggtcgagctcgtag

SEQ ID NO: 527412 - DNA, 1026 bp, Stenotrophomonas maltophilia
atgcagtcgaactatttgcaggagatcatgcagggcaacatcgctgcagcgcagcgcctggcgggcgggccaagccacaggatgccgacgactacgcttgccgaagcggtgcaggcaaccattccgcaaggcctgcaggcgctgctcgaacagcacaggagactttcgctcctgtatccgcgtatcgaggacatggcgacaccgctccaagcggcactcactgcacagcgccacgccggcaccggcttgcaggacgcaaacaagcggctgaagctcctgcaggccctactgcctccggcacggttcgcaggtttcgtgcaggccatgaccattcccgccgcaagcctccaagagcgggttcagcagttcagtcagctgctgacagacaccgatggcggtggcatcccggcgccgccaggcgatcgcaaagtcgacgtcgtagagggcgattccggattcaccattggcgatcaagtgatcgcccacgtctcccggcccgaagaccctgcccgcgatgccgaatggtgggcccaactccccccggaccgtcgtttcgaaatctggatgatgatcatcatgttagttctcgccttgctagcggtgcctgggaacattaaggacgctcgagacttgatgaacggggcacctgaagaaagcgagcaggtatctcacgatcatgcggcggcgctgcgcagttctgttgccctgctggaagacgtgctaactgttcaacagcagaacgcatctcgcgacgctgacttccagcgtcagtctcttgctttgcagagagactcgcgcatgctgctcgactctttagttgctcgaccgtgtgaagtgaccgtggcgaccgaagttcggcagaccggtacgtacggccgtccagggaggagcgttgatcggctacttcctggagacttggtgcgttgtatggggcatcgagggaaatggctcgatgttgcctatgacaatcaagacggggaacgcgtctacggcatggtgcgaaagaagcaccttacttgggattga

SEQ ID NO: 527413 - DNA, 699 bp, Stenotrophomonas maltophilia
atgcctgagctgcgccgcatctacggcgagttcaaagtggacgatagccagatcgaccgacccgacgcggcactggatctggagaccggtcaacgagtcggcatcgaaataactactatcgatgctccagacggcctccagtacatgcgcgaccccaagatcagcgagggcgctgaacgatcgcaggcagacaggctgtctcaaggactctcgcctctcgaacaaccgacaaagttgttgcgtatcgatctgacaagggactacttggcttcgggcgcactcagaaagcaccgaaagtacgcagactatcaagcgaccggggcctttgacgaactggtgctggtcacctttagcgatcacatcagaatgtccacgcccggattttcaagctactacgcccccatggccaactgggtgctgtcccgagagcaatttccgttcgaccgggtcatcttcgtctgcaacgacgctcaggaggcggtcaccatctacgacaagcgcgccccagcacaggccgcccctcctgagtcactctatccagaccggtcttctgaggtcgcaacgatcaccggcaaggtgggcatgaccgtcaacctctacgccgccatgtccaaagctcccctcgccccgagtctcccgccagaagccaggccgggggccaggcgggctcgaaggggcaagaaggagaaaaaacggtga

SEQ ID NO: 527414 - DNA, 267 bp, Stenotrophomonas maltophilia
atgaaggcacccttccattgggaccacattggcgaaggttcctatctgcgattcaactatcgcggtatcggcttcgttaagccggacggtcatggccgttgggagtaccaggtaacctggcaggagtgccggcactccggcgtgctcgcaaacaagtcgaaggcgatgcgttggatggagcgctgggtcagcgcccgccgtgggttaccgatagtgcctaataggagaacatcgaaggctcgttcgatgttctctcctaagtcatag

SEQ ID NO: 527415 - DNA, 405 bp, Stenotrophomonas maltophilia
atggcgggttcacagcgtctcgttggcctggcgctcaccgtgcagcgacttctcatcttgctgagtgcggtgatcgagggcctaggggggacctcggggctggcgaggcagcctacgacggaagcggcgagcgcccacagagcgatcgcgtcggtcgtgagggcaggttctctcaggggcctgcaattcctcgcgggagcaacgaaattttgcacgctggtgtgcctgttgctgctcgcagtgattctttgggtcgttccaccgatgaacgggagcgaggttggccagctggtcggaaggccagaagtttctattggtcttgcagcgatcgccggcgcagccctggtcttgcgttggatcttgatcttcggcagccgcctgctaacgagaaagagccttacgtga

SEQ ID NO: 527416 - DNA, 345 bp, Stenotrophomonas maltophilia
atggcagaaacgaagaaagctgttagctggcctaggcgcctcattctctacgccctggtggcgaccgtactgtacggattcgtacagctcgcggaccgggccctatatgtcttgagcccggtctacccgagcttcatggtctaccgagagcttggagacgttgatggggcagggatggttgccctcagagacggagattgcgcggcaggtcccatcgagtcggagaggaagcattcgtacattctgctgaggtgtggaagtaccgctgtcagcctggatcgccggatctttaccgccaagagctttatgggaatgaagccgctcggtgactctgggagcgagtaa

SEQ ID NO: 527417 - DNA, 198 bp, Stenotrophomonas maltophilia
atgcggtacagatccttgtgcctgcttttcggtcgcagcggtttagttgggtaccggatggcagacgacgacagcccggccagcatctatgaccgattcgaagatgcactggcagatgtgaaagctgagggctggatcgacgacgtggtgataggcgacgaagccgggaacgttatctggaagaagggtggagagtga

SEQ ID NO: 527418 - DNA, 2046 bp, Stenotrophomonas maltophilia
atgagtcagaaccgtacgccctacccgcccagtggcccaggcacgcccgggtttctggatgagctgcgcgacgcgctgtttgcatgcgagcccgacctgtcgcgggaagagtggatcgcgataggcatcgcggcgaaagagtacggcctcactgagaaggacttcgaccagtggtcatctaggggcggcaagtacccaggaccgaaggagatcgcgactcagtggagggctttcggcaaaggtgatcgcgactctgtcagctataagacgatcttccacttcgcctatcagaatggatggaagccaagtcgctcaacgactcatcctagagctggccatcgccagggcggggctcactccggatcgcacaggaacgagcgcagaaccggccccggtgagccgcccgaccaacgccctgatcccggcaaggccgagaaggtcaggatcaagagggagcgcgtagtcgcaatgctcgcggctgcccggccagccgacaagtatcacccttacctggtccgcaagaaggtaacgcccgaagggcttctgcagatcgagcgcagcaagatcaaatcgctactgggatacgatcccaaggcacacgatgaatcgcctctagcgggcgatcacatcctcctgtgccccctccacgatggccgaggtccagcgcatttgctcaccgtggagatgatcgacgagcgtggggtaaagattgctgtcgcgggcctacctcgtgcgaagtctatgtggtctttggattcgatcgatccctcagcaccacgtcacttcgtggtcgaggggtttgccacagcgaagtccatcatcgacgcaacgggcgaacgccaggtgttcgcggccggcgccaagaacaatctggccaacgtggtcgacgcggtgcgtcaccactcgccgggcgggcaaatcatcgtcatttctgacttcggcgaggcatcggagcagaccgcgcaggcggcggctgagcgcgtcggcgggcacattatcgtcccaccagagcaatcgctgcctcaggacggttccgacttcaatgacatggcagccgctgtagggatcgccgaggtacgaaagtggattgacgcccattcggtgcacccagagaggatcacattcgccggtgcccgcgaatggcgcaagatcgactacgttttgcccgggcttgaacgcggcactgtaggcctcatcgttggcccgggaagcgtaggcaaaacattcttttcgctcgagatctgcgcaagtgtcagtttgggactctccctaccgaggctcgatcaagtcttctttgagaagccacgcggtaaaacctgcctgctgctgggcgaagacagcgtcgatcagatcagcaatcgcctccacagcatgcgcaagcaattcgcactctcggagcaacagctggcaaggctagatgaggacatgcttgtcatatccaaagtcggccacgacatgaccctggttgactctgacaatcgcaccgtctcggaaacagcatttgtcgactacctccggcacctgtgctggggcaggcgcttgttgatcgttgacccgttgattcgcctgcataacggagacgagaacgacaacaccgcagcgtcgaggctcatgcttgtcctgacccggaccgcccgcgagaccggctgcgcgatcttggccttgcaccacatcggcaagggtgaccgcgacgactgggcagcggctcgcggcgccagtgcgttcaacacgaccgcacgttggcagctgaacattcgagggatgaacaagaccgaggcagaagagatgaaagtcgagccgaaccttgtccgctccttcgtgaagtgcaccggggcgaagatgaactatggacccggcgtggaccatttctggctgaggcgcgccgatggcggcgtccttgtccatactgatcctgaggctcggtcagacatcgcaaatgcgaacatcgcgcctcctggtagggccaccaagttcacccccaagcctgcgccgcaattccggcaccgcgggaatctaggcagcccatttccaaatgacgacgaatga

SEQ ID NO: 527419 - DNA, 483 bp, Stenotrophomonas maltophilia
atgaaccaaaccagttcagttccagcaggattgcccagcgtcgaagagctggcgcaaatgtcgcccgagggactgaatcagctcatgcagcgcatcaacgaggccaaggttgaaaagctgctgcaggaccacgcgaacgcacgcaaggagtatgcggcgatgatggagcgcgtggcggccgacgtgatgcccttccgattgacggcggtgaagtatttgaccatgacgccccagcagctccagaagcacctgctgacccagctgcgtgatggaactcccgccgccgccgatgctggcgggcgaccgatcaatcgggtaccgcctgtttaccgcaatccttccaatccggaacagacctggaccggccgtggcaacaagccgaactgggtgaaggaactgctcgaaggtggtggttcgctcgacagcgtgcggatcagcaaggacgagccggacggcagcgaaggcgctggccagaaggggtaa

SEQ ID NO: 527420 - DNA, 588 bp, Stenotrophomonas maltophilia
ttggggcctcttccagcaaccgtcaaagcctgcctgcgtggtcggcagccgatctcctatcacgtcaagaacgggaggctggtgcttcgcatcctgaacaaggagcaaggcctggcagaggctgttggtattcgattcatggacgtcctggtcgcttcttcatttggccaggggcactgggcactgagctacagcgaactacctccaccttcggtccggctctccgatcgggaaacggagtaccttatcgcccggcttgatctgcccatccctgtggctgaaggcgtacccagcattgaggacgcggagccttacattgcgcaggccgtgttggccgagcaactcaatatggcagcaatgcaggagaacccggacgaagccctgcactaccttgaagcaaaccgagtgttcgttcgctgctccagaggcgaggctcagtatgccggcgacgccgacgctaacatccgactggtccagtacaccggcgtccggttctccgccaatatcgagacggacggttacgtaagcatcgggcgaggtgtcactcggggcaacgggatgctgttcgctgccgctgagctgcgatag

SEQ ID NO: 527421 - DNA, 1755 bp, Stenotrophomonas maltophilia
atgaaacacaataaacattccagcttttttttagctctatgcatcggcatggccttaagcggacatgctgcagctcaatcaacgatcaatgtcggtgaaggcaacacatccaccgatgatgctccatcctatgcatccggagccattttaattggttatgacaacatcaataatggcgtgcagaacaatctcaatggctttggcaacacaagtatttggtcgtccacagttgttcccgatccatcggtcatgtatggactcacacgcaacaccgcatacggaaatggaaattacctgcaaggctataatttgtatgcgacaggtattgaaaatcgcgtgctggatgggactcaggtctttgtctcaggccgcgaaaatgtgttgcgcggcaataatattttcgtgtccggaaatatgaacgtcagcgacgaacttgccaatggcgcaatggcctacggttcaagcaatggtttgtacggctacgcaatgatttacggaacgagcaacgtaggccacagcggctttatctctggaaccaacaacttcatcatgtcggttgcaggtggcgcagtgttcggcgtgtccaactacgaatacggaacgaacaactacctgttcgggtatgggaaccgtagtgccgaaacagcaagcggcaacctgttgtcgggaacatacaaccaagccaacggaacccacagcacactggtcggtcacttcaataacgcggtaggcaatggcggtttgggtttgggcaacaacaccctggtcaacggcgcctgcgtatcgctgggcaattattcggagtgtggtgaggccaacacggtgtcgtttggcaatggaaacgccaatggcacaaaacgtttgctgttcgtgtccaacggcattgccagcaccgacgcagtgaaccttgggcagttgtcggctgtcagccaatcattgggtggcactgccggctttaccaacggcgtttacaacggatggagcgtcaacctagggggctcgagctatacgaacgtacacgacgctcttgtgtcgctcgacggacgcctcaccaccgtggagaacaacccaggcggtggctcgtcaattcccggccccgctggtcccccaggtcaagacggaaaagatggaattggaattgacggacgggatggcgttgacgggttgaacggattggatggccgcagtgcctatgaagttgcggtgtcggatggctttaagggatcacagcaagagtggcttgagtccttacacggtcgtgatggcgtcgatggaaaagacggcatcgacggcgcaaccgatcctttggccgtgaagtacgacgacgaaagcaagtccacagccacactgcaaagcgcctctggtggatccacccgcgtcagtggcgttgcacctggccgtatcgctcaaggatccactgacgcggtaaacggtggtcagttgtgggacatagagaaccgttggaacgatcgctgggaagacaccaaccgtcgcatttctcaacaggataagcggatcaacggacttggcgcgcaatccatggcaatgagccagatggcgatgtccagtcaatacctgcctgttggaaaagtctcgttcaacatgggcgtgggcttctacggaccagccgctgcgattgcgcttggaggatccgcccaggtcactgagcgcgttcgcttagttggtggcatcactggcggatcgggtggatccagtgttggcggcggtttcggggcttcaatcaccttcgactga

SEQ ID NO: 527422 - DNA, 1434 bp, Stenotrophomonas maltophilia
atggatgcacgtgagaagtttgaacagttcaaggcaaatttggatgaagaagaggtgtcttcttctgattacgctcaatttctgttgggtgaactgtcattggatcagcgtttaaacaatctcgatgttgttgcagacgttcttgagaaggcggggtattcaaccattgagtattggggcggatcccagtttggaacagccagtcgcgagcttgctgaattgtacttgcagtacggtaacgttggtggtggcccattgacgatcaactcccatgcgagcagtggcgttgatttggacgctgaattcaaagttgccgccgaagcacacaatattccggttatgaagttgctctatcagcgtggatgcagcattgacggcgagggcgacatgaaagattcggcgctgcacgtagcggcacgtgtgggcgatcatgaattgtcggagatattgataaacgactttggctttgatccattacttaagaacgccgaaggccgcacgccatacgatattgccatggacagagaactgtgccaggccgctgcgcgtggggatcttgagacggtcaatcaattgattgatgaaggatatccctcacgagcggccatcaacgagtaccgtggtgaaggctactattacgggagctttgagcatggtgttccagaccgcccgctgtatcgtgaacgacccgcagaggacattgaacccgcgtggaaaatagctttggacaatggacacatagatgtgttcatggctttaattgatcgtgctgatcccaatgactattttttaaacgacttgcgcgagcatatgtcggcactgcgttgtgccatggaaataggcgatacaggcgttgccattgagctactggaacaaggtgcgagtatgcattcgctttctcaggagttccattttgccgtatctcaggccgacaccacgttgagcgagaaaatgctttccttgggtgcggatgtgcatcggcaatcaaacattaaagttgacgacccccaaaatccctacttcatgaaatccgtatcagaggggtttacaccgcttcattgcgcaggatccgccgaacaagttcgactgctgatccaacacggggctgatgtgaattccactgccatgggggatgcgtgttggatagtaaaaagcgatgagttcataaccccgaaagggattactccattgcattcggcacgatcaccggaagttgctttagagcttcttaacgccggggctaacagctgggcaattatgccctcaacgatgaatgatattcaccaaaatccttcgctgtcacataggatatctgggcgcgatgacattgccgatgcaattgacagtttcgttcaaaagcagtcactgctaacccaactgacaaatacggctgaactcaaggacgaacagccacgaatgcggcgaaaaatgtga

SEQ ID NO: 527423 - DNA, 624 bp, Stenotrophomonas maltophilia
atgaatgatgatgaaactattacttcaaacagcttcaatattttggagcatcgtcttgacctggcaatcaagcaagatgatgtgggtgctatccaaaagatgatcggggaaggtcttgatcttaacgtgctgaatgcccatggcgtttctttattgtcagcttcgatttggtatgagtctcgttatattgtgcgagaactcattgcggccggtgcggatgtcaacacccaggacgcggatggcgatacgccactgcacattgctgcgcatatcaacgacattgaagtagtgagcttgttgattgatgcaggcgctgatatcaatcgtcaaggcgcctatgggttgacgccactgcaccacacagactgtggaaagtgccaggagctgctagttcggaatggtgcagacccaaccattaaagatgaagacggacaatctgtcgatgttatgaacgctgcacgtgttgaggatcgaatgttcggtggtcagagctacagccaagccgtcggtactatgaacatgtatctggaagcagatcagcgtgcggctgagcagcgcggcgttttacaacaggccattgaagaatgcgttcccagcagacaatccatgacgcgccgaatgtaa

SEQ ID NO: 527424 - DNA, 168 bp, Stenotrophomonas maltophilia
atgcattacgacaatgaatatgtggatagattgaagaagttgtatgaggatcatgtgaaggtggtggaaggcacgtggttgagaaatctttgttttgccgcactgtctgctgccatttttgggtttgcttttgggattgcggtgggatgtttgattgcaagcgtttaa

SEQ ID NO: 527425 - DNA, 501 bp, Stenotrophomonas maltophilia
atgattgcttcgggagagtaccggagcttcaatgatttcgggcactacgatggtgggatgaatttctgcggtgtcctggggcaagttcccaacacccagcctaaaggccagggtgcgcgcttgcattgcaaatgggatggtcctgtctcagtgccgttgccactggatgcctacgactaccacacgcccaacgtgctgtttgacttcaatggctctggtcaacattacgacaacaatgatccacggtacttcttgccgtataagtccaccgttcaagtgttgaagcttgagtgcgacccgatggaacttaaggactactatctgtcgcgcagtacgtggtggaggaagatccgtttcaagtacggatcgcaagaatacaggcgcaatcaacttgaatctctgttggattactacaaccaaaaatgcagcgaaggatctgtccatatccgcatagagcgaggccatcctacgtcctcagacggtggggagttctttaggtaa

SEQ ID NO: 527426 - DNA, 375 bp, Stenotrophomonas maltophilia
atgagcctaatttcgaccgtcttgattttggctgcagctgcatctgcccagcacccgctagctgtggacactacggtcctgctgacggcctacacccgtgacgctgcctctgccgacaggcgctacaagggccaacggctgcgggtcactggggtggttgccgaagagcccgccctgtaccgccgctcgcctcttctgagctttgaaggcacggggatccacgaccggcccgtggctgtgctggacccggcacgcaaggacgaactggccggtttgcgcactggacagcaagtcaccctcgattgcctgggcagcggacacgtctccggcactccaatgttgaaaaattgcacgctggttcatccagccccctga

SEQ ID NO: 527427 - DNA, 312 bp, Stenotrophomonas maltophilia
atggccaaaaagttccacgatatcgatgtgcggatgatgcacaccaccaaccgcattgctgaaaacgtcaatgagggcgccagtcccgacgcaattgcgctgatgattaacgttccgggtgtcgatggcaccttcatcaacacgctttgtgcgctccgcgcggccaacgagcgaaaggctgcttatacaaagaagcagtataagacgatgagccgcgtcactaaggaagttcgcgcggagaagaaggccgaaccggctgaggaaccgtcccaggaagatctggatacctttaaagttacctttaaagaatga

SEQ ID NO: 527428 - DNA, 546 bp, Stenotrophomonas maltophilia
atgaaaagcgcggtgagtgtgaacagatatcagtgggtgttgttgatgttgctggtgctgtgcggtctgcaaaatgcatgtgcggatgagtacgagccggagaataccgaaaattgggcggtcaactcggcctgggtcaaagagctaccgattcttgagcaagaggttgtgttggtttcgttggggcttgctgtatccacccacgtggacaccaagctcatcccggccgtgaagagtcgacgggacatgcagtgggtcttgaaggtcgcaggaacttcaaatgcaatgcttgtgccattagccacgaactcacctcaaatcagggctttttacgaaagccgctccaaagtgtacttggatgccatcaatggcaagattgatgcagatgaatttgagcgcgttatggccgaaataacgcgcaagatggagcagtacacggcgcgcatatccaaagagcagattgaccaagttcggcgcaagtaccgggcgcgactgttggacacggaaacagcgctcattgctttttcaaagctcagggtccaatag

SEQ ID NO: 527429 - DNA, 813 bp, Stenotrophomonas maltophilia
atgaaatggattttcggtgttgccgcaatggccgcgtgtgccaatctgtgggcgagtgcatctccgcttgcatcgccatgcgtgttgactgttggggccgtggttggaacgcatcccacattggaagttgccgcactgctggaggcggcgccgaccaaggatgaattccagacatcggagcaacacgtagcgaacgtaaagcaatttcttgcaactctcccggcacaagtgcagggcgggcaattgtgtgtatcgccaatcgccgaccaaaagttgttcgactacgacgccgatgcccaagttttgtgggcaaatgtggaagaggcatctggtacgcggatatttcggtccactgttggtcaaataacagttcgggacgttgtgtccgacgagtgggatcgagctgtggatgatcgtgttctgacgaacgcaatgggtgtgcaagtggcggggatcaactcaactagtaagtcggcgtcggttggcttcaccacagatcaaatgaatgatctacacaagtcgctgccgtaccaccgcttcaaaagcgcgttcccctctagagctttggctatcccaattgactcagacgctgcccgtgatgtgaagccgcacgctgcaattgtgtatcaatatcgactcagggatccattcgttgcccgtggtacggatgtccatgccgcaacaatcgacgcgccagtgagcatcgccgttgagaaggtcgtggtactggccgatcttgtggctgttggtgtaatagatcttcgggatggcaaagttcttgctgccaaaccaatgtcggtgtcggtgaaataa

SEQ ID NO: 527430 - DNA, 648 bp, Stenotrophomonas maltophilia
atgaaagaccaggccgatcaaatgctcatgcaaaaaatgattgtcaatcggggagagagcatcgatctgcgtagcgcggacggagttcagcagaaggccagttgtgatgacatcgctaggctggccctggcgatgcacgaaagaggacacttcttcttgttgcgcagatctctccagatcaggttcagcagggacatcaacggaagcgggatgcaggccttggatctgtctaggacgggggagcgtgatgacttcaaatatcttctccgtgtccacttcgaacctgttcaccgagacagtgagagtttcctttacgaagctgatcttattcgggatcaggggaaggactacgagccgacagtgaacctcggtaagcatcgatttggcgcccagagtgtttggctgcaaatcgattggagtagcgacgaggttgctcagtggcactccgacattaagcgtctttccatcatcgcccctgatagcctcgaagaatggctagagtccgatctagagatgctcgtgagatgcagggctggattcatttgtggttgggaggcggtcttcaccagagacgaccttgctcgccactgcaatgccggcatgagcttggaggacttaaaggcgttttttgacgccaatcagccctga

SEQ ID NO: 527431 - DNA, 492 bp, Stenotrophomonas maltophilia
atgggacgctatcaccacgtgtttgtcaccaccaagggcgccgagcagaagcaggcgctctttgttgatctgaccgccagcgagctcaagacccggtttgttcgaccctatcggcagggcaaggccgtgctgctggacgacggttcggtggtggagacacgggacattacttggtcccacatccgagccacgcaagatcgggcaggggaagcgctggcccgactggaagaggccagccaccgccatacgcaagagctcaatcgcggtggaaatgtgttgttcatggggcggttctcttggtccaacgtcgatctgatcgaggaaggggagaacctgacccagcgttacatcaccagtccgccgggcgaggcaggtgtctatcggtatttggggtcttggttggccgacaacctgggaaaggcgctgattacgttcctgggtgccttggccttgacggttgcactgacctggcttggcttaaagaagggctga

SEQ ID NO: 527432 - DNA, 576 bp, Stenotrophomonas maltophilia
atggaggccccgttgctgcccctgcctgacctcatggctgccaagaagacccccacccagaaggcgacccctaagaaagccccggtccgcaagaacctagccaaggccgccaaggttgtccacgccaagccggaacgcgaatacgcgccgctcatcgatctggggcagttctctgaggaggagctcgccgagctcatggtggccgccggcgatgctccggggcgcaaaacgtatttcgactacagcgacgaggcgccctatatccgttccggtcagcgaatccacttggaggtgggccgcgattcaaccatgttcgactaccgtgacgagaacgggacgcgtgtggagcgaacgatggtcaccgtgccgccgaagctccgcgaacagatccaggacgtcaccggggaagagcagcccatcgtcacgacggcgatcatcgccctcgcgtcctgggcttgccaagagctcaagaagtcgaagcggcgcttggtggtcacgacggcaaccgatgatttggatccagcgcggaagcaggtccggaaggcgttggtcggtcaggcgcggaagaagcgctga

SEQ ID NO: 527433 - DNA, 303 bp, Stenotrophomonas maltophilia
atgggtcgatttttccgaggggatgggcgcaatcgctctgcaagtattctaccgaagcccttcctgccggtggccaaccgggtcaacctcaagcgcgcggagcaccgccgccggctcgaagactcgaacctggcaggggccatcgtcattccagaacgctcggcgtttgggagctactacgagctcggcgagaccgtgttctccatgcgcggcgcgggggtggcgaaggcacgcgaggatattctacgggtaggtcaggctatccagaaaaggttggccaacacgggccgggggactgcatga

SEQ ID NO: 527434 - DNA, 465 bp, Stenotrophomonas maltophilia
atggccatgccccgcaactcgactccagcgccgtcaaccccggctcgccctgtcgcttccaacgctgcgcagccgctgcgtggcaatgtcatgagcggcgactgcatatcgcgccccatcctgagtcacttgaccaatcgttggggggtgctcgtgctcattgccctgctcgacgacacacagcgtttcagccaactacgcaagcgtatcggcggggtcagcgagcgcatgctctcccacacattggcgttgctcagccagaacggcatggttgaacggcgcgcccatgacgttcttccccctcacgtggattacaccctgacgccgctggggcgcgaggcggcactgaaggtccgtgatctggctgattggattgagctcaatctgccggcgataacccagtcgcaagcccagcacccagcagctaaggactgcgtcgcgttgacggctcgaactgggagctag

SEQ ID NO: 527435 - DNA, 1038 bp, Stenotrophomonas maltophilia
atgaaagcacttgtttatcgcggtcccggccagaaggtctatgaggagcgcgccaagcccgagctccgtgatccaaccgacgccatcatcaagatcacccggacgacgatctgcggaactgacctgcatatcctgaagggcgacgttgcttcctgcgagcccggccgtatcctcggccacgaaggcgtcggcatcgtcgacgccgtcggcgcgggagtcaccgcgttcaaaccaggcgaccgggtgctgatctcctgcgtcagcgcgtgtggcaagtgcgagtattgccgcaaggggatgttctcccattgcacaacgggcggctggattctcggcaacactattgacggcacacaagctgagttcgttcgtacgccgcatgccgacagcagcctctacccgatccctgcaggcgccgacgaagaagcgttggtaatgctcagcgacattctcccgacgggcttcgagtgtggtgtgctgaacggcaaagtcgctccgggaagcacggtcgccatcgtgggttccggcccaatcgggctcgccgcgctgctgaccgcacagctgtactcgccagccgaaatcatcatgatcgacctcgacgacaatcgacttgaagtagcaaagcgcttcggcgccactgcgacagtcaacagctcggacggcaaagcaaaggaaactgtccagatgatgacgggtaaccgcggcgtcgatacggcgatcgaggcagtcggggtgcccgccacgttcgaactgtgcgaggacattattgctcccggcggggtcatcgcgaatgtgggcgtccatggcgtccccgtcgacctgcatctcgaaaaactgtgggatcgcaacatctcgattacgacgcggctggtcgacaccttgagcacgccgatgctgctgaagctggttggctcaaacaaaatcgatgccaaacttctgatcacccatcgcttcaaactcgaccagatcattgaggcctatgaggcgttcgccaacgctgctcagaccaaagcgctgaaggtgatcctggaggcctga

SEQ ID NO: 527436 - DNA, 783 bp, Stenotrophomonas maltophilia
atgtccattgatctgacccaacgactgaatggaaaatgcatcgtcatcatcggaggcggcggcatcggaaatgagctggccctgcgctatgcaagcgaaggtgcctcggtgatcctcgccgaccttaacaaggagaccgccgagaaaggcgcagcctcgctgccctctgggacccgcggtagaattatcgcagcgcagtgtgatggctcgaacgaggagtcagtcaatgccaccgtagccctcgcaacgcagcattttggcggacttgacgggctacacgcgaacttcgccgcgtttctcgatggagcttcgtcggaaggcgcgggcgagcttcccctttccatgttcgacacgatgtccgccgtcaatactcgtggtttcctgctggcaacacgcgcagctttgcccgccttggtcgcgcgcggcggagggtctattctctataccagctccggggccgcctatcagggagagccggttcggccctattacgccatgacaaaggctgctggtcatgcactgatgaggcatgtcgcagcgcgatacggggcggacggcgtgcgggctaacacaattgcgccgggtcttatcatgcatgaagagcttcggaagcacatcagcaccgaatttgcagagcaggcgcgggagcattcggcctacaagaggcgcttgggcgaaccccttgatatagcagcgatgtgcgctttgctcatgtcggatgagggcgcttacgttactgggcaggtgatcagcatcgacggcggaactaccatgcgagggtag

SEQ ID NO: 527437 - DNA, 1029 bp, Stenotrophomonas maltophilia
atgaacagaaccatgaaagcggctgttgttcgcgagttcggcaagccactggtgattgaagaagttgtagtgccgcgcccagccccaggcgacatcctggttaagattgaggcctgtggtgtttgccacaccgatctccacgctgtggaaggagattggccggttaagcctgaacccccttttatccctgggcacgagggcgtggggcacgtcgtggccgttggtcagggcgtgacccatatcaaggaaggcgatcgcgttggtatcccctggctctattctgcttgtgggcattgtgagcactgtctgggcggttgggaaactctttgcgaggctcagcaaaacagtgggtattcggtaaacggcgggttcgccgagtacgcgctggcaaacgcagaatacgtaggacatttgccgaagaacatcggtttcgtcgagattgctcccattctttgcgctggggttacggtctataagggccttaaaatgaccgacaccaagcctggagactgggtggtcatctctgggatcggcgggctggggcatatggctgtgcagtacgccaaggcgatgggcctcaatgtggctgccgtagacgtagatgatgcaaaacttgatctcgctcgcagattgggcgcgaccgtaacagtaaatgcgacgaaactcgacccggttgcatttttgaaaaaggagatcggcggtgcgcacggcgcactggtcacggcagtctcgcctaaggcatttgaacaggccgttggcatggtgcggcgcgggggcactgtgtcgctcaatgggctgccgccaggcacgttcccgctcgatatcttcggcatggtactcaacggggtgaccgtgcgaggatccatcgtcggcagtcgtctggatctgcaagagtctcttgatttcgcagagcagggcaaggttgccgctaccgtgcaaacggatcgcttggagaatatcaacgacgtcttctcgcgaatgcacaagggacagatcgagggaagggttgttctagacttcgcaagctag

SEQ ID NO: 527438 - DNA, 1389 bp, Stenotrophomonas maltophilia
atggcatacgcaactaccaacccgttcaccgggcaggtcgtcaagactttccctgacgccactgacgccgaagtagcacagaccctggagaaggccgacgccgcgttccaaggctggaagaacacaagcatcagcgagcgtgcattggtgctgcgcaaggcggcagatctgcttcgttcgcggcatgcagagtacgccgcattactcacgttggagatgggcaaggttgctgctgaggcagaggccgaggttgagctttcggcgcagatccttgagtactacgtcgagaacgcagcgaagctgcttgctccccagaagctgccgagccagcatccgtcttacacagaagcttgggtggagcacgaacctcagggaatcatactggccattgagccgtggaacttcccttattaccaaattgtacgcattgctgccccacagctggccgctggaaacgtggtgattcttaagcacgcctccaacgttccgcagtgtgcagcggcgtttgacaggctttttcgcgaggcgggattgccggaaggcggcttcactaacctctatgtcaatcgcgcgcagatcaagacgattatcgaagaccctcgagtgcagggcgtagccttgaccggttcggaaggagccggtgcagtggtcgcatcgcaggccggcaatgctctgaaaaaatcgaccatggagcttggtggtgctgacgcctttgtcgtactggccgacgcagatcttgacaaggcagcccgctgggcggtaatcggccggcattggaatgcgggccaggtgtgttgctcgtccaagcgaatcattgttgtggatgaggtctacgatgcctttttggacaaatacaagcgcggtgtagctgagctgaaggctggcgacccgcaggattctgcgaccacgctcgcaccgctgtcgtcaaaaagcgcggtgcatgatctggagtcgcagttggcgcaagcggtgggacacggcgcgacagtcgaggtgattggggccgaggtcccgaagaccggcgcgttcttccagccggttctgttgacaatggccgaaagcaacccggcataccgctgggagttcttcgggccggtatcgcaggtgatccgtgcccgagatgaggacgatgcggtccgcatcgccaacgacagccccttcggtcttggcggctcggtgtttactcaaaacattgcccacggcgtcgaggttgctaagcagatttccacgggcatggtgtacatcaaccatccgactggggtggcggccgatcttcctttcggtggcgtacgccgctcaggttatgggcgcgagttggtaggccttggcatcaaggaatttgtcaaccataagctgatagctgtgactgatattgacggagcattctga

SEQ ID NO: 527439 - DNA, 1410 bp, Stenotrophomonas maltophilia
atggccgcactgctcgttgcactcagtggtttcgtggctgcgatgctttttgtgattgggcttaagcgcatgtcctcgccggtaacagcgtcccatgggattgtgctggcaggcataggcatgctgctggcggtgattgccagctttggctatctggccgatgttgatgaggccgcgcgtccgcacctcgccacgaacttggggctctctttcttggcgctcgcgctgggcgggattctggcttggcgcagtggtcgcaaggtggcggtaaccggaatgccgcagatggttgctctctacaacggcatgggtggtggttcggcggcggcacttgccgcagtagagctgctgcgcggcggccacacaggcggtagcctgcatctttccgtgaccgcattgggggccctgatcggctctatctcgttgtccggttcagtgattgcgtgggcaaaactagatgggcgtattaacaaaccctggcgtttcgccggtcaacgcgcgctcaacggattggtgtttgcttgcgccttggcaatcggcgtgttcttagtcatgtgtccgtcggtctcgatcgtttggccgaccctcttctttgtcgcagcattgacgttcggcgtcttgatgaccctgccaatcggcggtgcagacatgcctgtagtgatttcactctacaacgcgttcaccgggctggccgttggactagagggcttcgcgttgcagaatcctgcactgatgattgccggcatggtggtaggttcggcaggcacgctattgaccttcatgatggcgcgcgcaatgaatcgttcgctggccaacgtcctgttctctaacttcggtgagagcgcagcaactggcgatgtggaagtggccggtcgcatgacgtcggttgaccctagtgatgcagcagtaagcatgcgctacgcgtccagcgtgatcattgtgccggggtacgggttagccgtggctcaggcgcaggcccgcttgtacgagctcgtcaagctgcttcaagccgccgacgtggacgtaaagttcgcgattcacccggtcgctgggcgaatgccaggccacatgaacgtgctgcttgctgaagcgggggttccatacgatctcatcttcgacatggaagacatcaacgacagtttcccagcgacagacgtggcgctggtcatcggcgccaacgacgtggtaaatcctgccgcccgcagcgacaagggctcgcccatctatggcatgcctatccttgacgtggacaaggcgcatcaggcctatgtcatcaagcggggccagggcaaggggtatgctggcgttgagaacttgcttttctatcaagacaattgcgacatggtctacggcgatgcccagatcgtgctaacaaaaatggtgcaagcgatcaaagatctggccgcctga

SEQ ID NO: 527440 - DNA, 333 bp, Stenotrophomonas maltophilia
atggattccctactgctgtcgatgagctggctagtcgcactttacatcttcatgctggcagcgttcactggttatgaggtgatcggcaaggtgccttcaattctacataccccgttgatgtcaggatcgaacttcatacatggcattgtcgttgttggagcgctgcacgcgctattcaacgcgacgagcgtgaccggtcaggtcgtaggctttatcggtgtcgctcttggtgcgggcaatgcagccgggggctatgtggtcaccgagcggatgctggcaatgttcaagcccagtgagaagaaagctgccgctgccggcgagggtggtgcctaa

SEQ ID NO: 527441 - DNA, 1131 bp, Stenotrophomonas maltophilia
atgtccatgatcttggctgttcttcgagaaacgctggtcggcgagcgacgcgtggcgatggtcccatcgcaggtttctaagttctcaaagttgggcttcactgtctcgatggagcgaggagcgggtgacgccgcaaagttccgtgacagcgactatgcggacgttgagttcgcagacgagccaaggggcttggtctcaaaagcggacatcgtgttggcagttcaaccgccgccgcccgagttggtggcgacgatgcggcctggtgcttggctgatgtgcatggtgtatccgcagaaggttcctgaactgctgcaagttctgagggacggccgcatatcttgtatggcgctggagtctgtgccccgcataagccgggcgcaggccatggatgtattgtccagccaagccgcgctcgcaggctacttggccccgatgattggtgccacccatcttccgcgtatcctgccaatgatgaccaccgcggttggttcgctgcgcgcgggccgtgtcctggtaatggggctgggtgtggcggggctgcaggcgttggcgaccgctcaccgacttggagccatcacggaaggctatgacgtgcgtccagaaacgagggaacaagcgcaatcggtgggggcgaagttcgtcgagactggcatcgacgcgcgcggcgaaggcggatacgcccgccagctgacagctgctgagcaggcgcaggcaagtgcggtgctgaccaagcacatccagcaggccgatatgatcatcaccaccgcaaatgtgccaggcaggcgcgcgccggtacttgtcaccaaggctcagatcgagggcatgaaatcggggtcggtcatcgtcgatcttgcagccgacagcggatgcaactgtgaaggggcactgcccggtggggaggtcgagatcggccccgttactgtactcgcgccattcaatgtgccgtcgcaacttccccagcactccagcgaactctactgcagaaacctattggcgctgctcgtactcatggtcaaggatggcgcgattgcaccggacatggatgacgaggtggtcgccggaacgttgctgtcccatgagggaaagatacttccggcggcagcagccgcgctcctagagaaagaggtttga

SEQ ID NO: 527442 - DNA, 192 bp, Stenotrophomonas maltophilia
atgcatccgatcatcctctcgcttgattcctcgctccgagcccatttctcgaccttgagcatcgagtcccttgccgcgtcgctctctgacctgttgcccgacgcgctggagcagctgaagaacggtgccgggagcgtggatctttcaagcaatcacgacctgcgcggccttcgtgcgggtcgcttcacatga

SEQ ID NO: 527443 - DNA, 909 bp, Stenotrophomonas maltophilia
atgtcactagactcaaaaaaagaagcagaagagcagttggtcgagcgataccgagagacgtggggaatgagccacgcagcctttcgagctggcgagggtgtctcttggaagcgcctgaagatggacatcgacagagaagtggaagcagagcaggtccctaaagccgggcagctcatccggccttggacgtcggcagaggcagcagggcttctgagcatgaaccagaaggtgttccgagtcctgtcaacgatggacagcgcaaccggtccgttgttgcaggacgacggcaaacacgcgtcgatcagcgtcgctcgcctttttgagtgggccgagggcgtcccaaaggttcgccgctggcgggagtatcggcgcgacgaggatttgctaggggtcaagatagtcaggtcagctgaagccaccttcaaagtgctgaagggggctcgaattgacctgaacctcatcgcaggcaaggtgacgtctctcgacctctcccaattgagtctggaagagctcgacgccctccgggagttgttgcggggtgggagcagcgcgatccagttggatgagcgcaatgtagccatgctcatgccgtcgacgttgcctgaagctttgggcatgccatgggaggacgaggcgctgaagcaggaatacgtggattcctatcgcgggctgttgggggaggtgcgtgaggaatcatctcagcgcttggtgctggtgtcagcgcagatcagcagtgcatcggcggaagacggagtaggcgaggcgcaggaggctctggatgcactggtggccgcctggcgtgaagaagagcatgagttggcctacctccagtccgagattcgtagcgagctgttgaatctaacgctgcctcctgcagttccgggcaagaggactcctttccgcttttga

SEQ ID NO: 527444 - DNA, 777 bp, Stenotrophomonas maltophilia
atgcagacgattgagacggttcgcagcgaagaggactaccgcgccaagttgcaacgcgcgctggaccaagagttgtcgcgcgcggcagccggtctcacgcccaccgtttccaccaaggctgcagcccagttcctcgggatccatttcgacacgttgggcgagtggcgccgccgatcccctccgttgggcccaccttttcagaagggcgcgggcagcctccaaggcggggccaaccagcacgtccgctacctgtacgaagatctcgtggagtggcagcgcgctcggctagggcgctcggccaaggagcgccggctggcatccgaggaggacgcgctgcgccagcagatccgggagctggagcgggagctcgctgtaaagataggtagggcggaagcagagaggcttaagaaggcgatcgggaagagcttgtccttcctttcgcttcaagattgcgtctcggttagccacgactgggccgtgatcaagggccgcatcgccggtcacgttcttgcagtctccgcagaagtgctggaccgggctttggaggaaggaaacgtgtgggatgcgccgctatccgaagccctgctcgaggtatgggtcaacgtggacgcaagagatccctacgacgtcgccatgagcgctgcgctgggcgacgtggagaagcttctgctgatggcacgcgctactgcacgccaggatgcactggaagcgtctctgcctgacccggtccaagccaatcctgcaggcgacgctgatggtggccgattccgattctga

SEQ ID NO: 527445 - DNA, 561 bp, Stenotrophomonas maltophilia
atgcgtgccttcaacctcaaggatgacgatatgaagctgacgccggatatggctctggatcttgtgcggctgcaacccttgatggataaggccaatgaccctggcgctgatggtgaaactgtcgcgtccgcgttcgccgccagtcaggtgtttgtgcggacctacaatcaagcttttgctgagtatttcgctggtcgattgaatggtgtggcgctttcgttcaatcgcggggagttcaactacagcttcagggacacggcagacgctgcgcacgcatttacgatgctttcgatgcagcaggtcaacgacgccaaatcaaaagcaatctgcgtgggtgtggtcaacctgctcctgagagatatgaaatacaaatcaagcttcgataacgaccagtcttacctcacggcggtgttgatgattgcccattcaatgcacgcgttccgccgaactacggtcaatcagttcgttgccgaaggtcagcgcattcaacgcgccacgttctggcgctactttgtcattggggcggtcactgttgggattgcctatctcatctttggataa

SEQ ID NO: 527446 - DNA, 678 bp, Stenotrophomonas maltophilia
atgagcgacaatgcaaatagttatgatgcatttagtggggcgggtgaattgctggaagtggttgcgttcaaccctgccatgtcatttgatgaggatgaagaggatttagtcattgagcagctgagtgttgtttgcagggttgaatatcttgatgcggacggggatttatgcgtcggatggtatgatgcgtggttggataaaaatggcttgttctttgaagagcctgagtgtcttaggagtgatgatgaagagtctagtcgttggctgtatgagtccgtgagcgatgcgctcgcagaagtcatcgactcacaagtctatgacttgggcgacaccgttgaccacgagcgaatgccagtcaccctgcacgacgctgaaatgacttttgagatggttgaggaacaatacatccatgaaattgatgattgccactacgtgtgcagccatgaatatttaagctcggatgaccagggagcaagcaaaattggctcggtcgctccgttttatgtggtggagcgcaactcagatttcattgcccccatccactctgcctccgaatacgtttcagtggtgaacaatttggatgaagaatttcagcgcttgcgcttgcagcaacacgctagtgaagttcaacagtcaccaacagaggtgcaacgttcggttcaaacccggcgcatgtaa

SEQ ID NO: 527447 - DNA, 1116 bp, Stenotrophomonas maltophilia
atgtatatcggatcaaatttaaaagatgtccaacagattattgcgtcgggtcgcaatattcaggagcgcagtggcataacacaaagcactgcattgcaccgcgcggtcgatggtaagttttacgagcccggtgtcgtgactgccttagtcaacgctgggttggaccccaacgtccgtgaggtcaacaagcgcacaccgtttcactacgcgcgccaccccgaggcgattgccgaactcatcgcaaatggagctgaccccaacttgggcgacgtgaacggccagacgcctttgcagatcaatttgtcgaaggagaaatccatctgccgcatgtcccgtgtccaggctcttttggagggtggggcggacatcaaccaagcagacaacaacggtgtcacgccgcttctttcggcgctggaagcacgtcggccctcagagttcattgaggcactggttgacgcgggcgccgacatcaatgcagtaagcaacgacggacagggtgtgttgtgttggtcaacagcagaaggagacgtggagaatacatcgctcctgatcgccatgggtgccgatatcaacgcggtttccaacaccggcatgagtgtcctgaactactgtgcgcggtttgagcagttggattgcgtgagagtgttgttggaagctggcgccgatcccaccattgccaaccacgacaacctcacgccgttgcattttctggcctgcggaccaaccaatcagtgggatcgcgtgatgggcgagcgctcgcagcgtgcagagctggtgtccaaaatgattgaggccggcgcggacctcaacgctgtggacaacaacggcaacaccgctctccacttcgcagcgaaagcagaacaagacgacgttgtacgaaccctgatcgaccagggcgctacggtgtccatccagaacaaacaagggatgacggttttggatgtggcaagacagcacagcaagcacacaacacagggcaagtcggccaaagaagttgctgacgatgaagggatggtttcactgctgcaaaaccgcgctcagaaggaagcattgcaggatgcgttgaacatccagcgggatgagccgcaagccgtgtcgcgctggcggcggatgtga

SEQ ID NO: 527448 - DNA, 1194 bp, Stenotrophomonas maltophilia
atgttcctgcgccgcagcctgctgtgcctggccctcgccaccgccgccccggcgttcgccgccgacatcaccttctgggatacgtcgcagcgcggcggcaacagcttcaacgagaatccgccggaccgtgcctacttccaggcgctgcgtgccactggcgcgacctgggtacggctgagcccggacaagtggaaaagcgccggcggccgcgacttcctgatcggcgatgccgatcattaccaagggctggtgcaggccgacgtggccaccctgcggcgtgcgctggatgacgccaatgcctcgggcctgaaggtggtgctggtgccgttgtcgctgcccctgctgcgctggaagcagaagaacggtgacaaggtcgaccagcgcctgtggcagtcgttcgacaatcacgccccggcgctacgcttctggcatgacctggccgtggcgttgaaggggcatcccgcactggccgcctacaacctgatcaacgaaccggtgccggagtacggtgccggcctggccgaacatgcgtccagcgaagcgatgcagcagtggtatgccggggtgcaggacggcccgcgtgatctgcgccgcttctactcggagctgatcgcgcgcatccgcgaggtcgacgcggaaatgccgctgatgctggatgccggatggtatgcggccgccgatggcttcaactactggccggcaccgctggaggacgggaaactgctgtacagcgtgcacatgtacgaaccgtacgcggcgacgagtgcgccgaaccagaaacgtgccaagccctggcgctacccgggcagcgtgccgttcggcggccacagcgagcgctgggatgcggcgcgcgtacgcagctacctgcagcagccgatggactgggcgaagacgcacggggtgggggccaaccgcatggtggtcggtgaattcggctgcatgcgccgctggcccgactgcagccgctacctgcaggacgtgctgcaggtactggaacaggacaaggtgcactgggcgttctacgccttccgcgaggatggctgggatggcatggactacgaactgggcgacaaggcgctgccgtggtcgtactggcaggcacaggagcagggaaagtcagcggtgccgccgcggtcgatgcaggcgccgttgttcgcgccgatcctgcagcggttgaaggccgggaaccggtag

SEQ ID NO: 527449 - DNA, 948 bp, Stenotrophomonas maltophilia
atgggccgccgaagaaatttccttaatatcgcccctagcatcctgaatcgtcgaagcgaccatatccacaaggcgatcgacaggcctcttgcttttctcaaggaggaaagattggtttgccgcctcaatatccttacgactcatccgcccatcgggatccgtgaacttatacggattcccgctcgcataccgatagcgattgaactgcccaactggctgctcatatgccgtcaccggatccaccgacaggaacacccccaacagcgcatccatgtaccgctgctgcatgtagctcagccctgtggccgaatcgctcacatgcccggtgtaccccggcctgtccttgacctgcccgcccaactcggcaccatacggctcaaaccggcgtcgctcgacaacacttcctgtgttgtccgtgaccgcaaccgggctgcccagtgcatccacatgcgtccaggtaacacccgtcgggctgcgggtggccagcagtcgaccacctacatggatgtactccgaggcgcccttgcctcgtcgctcctcatgcaccagctgcccggccaacgaatacatcgcgcgcaggcgttgcccctgggcatcgtacgccaccgcacaccacccatagccgagacgaaaagccccgacctaggccggggcttctcatgcaaccttcccggccaacgaatacatcgcgcgcaggcgttgcccctgggcgtcgtaggcatagcgctcggcctccttcacctcgcgcagcctgttgccaaagtcgaagtcgtacttgcgcccgttgcgcagcgggagattgccttaaacatcccaagccaatccggtcaccatacttgcttagaacgcgggccctacgtgcttggaccggaatgcacgacaacgccatgcacacgcaagtccggggacgcctcacatcccgcgctttcgtcctggaaacacgcatga

SEQ ID NO: 527450 - DNA, 585 bp, Stenotrophomonas maltophilia
atgaagatcatctccggcggagcttggctcgtgatgctagtggcatgcagtcctgctccctccgacgtagtgaatgtggcgaagcatacgcctactgaagctgttcccttggtggcaggagttgatgccaatagtggctcacttgcgggcctgcgtattgggatgaccaagagccaacttttaaaggccgggaatcccataattgaacgatcggttatgcaggaaggcgacgaatatatagtcatggatgtctcgttgcccgacggtttggttgtcgaatgctggttcgatcaaggccggatagagaggctgagaactaggtccgagggattggtagatgagaagggaattggcgttggctccacgctagtggcgctgaaggctgcctatccgaacggtcgtcttgtcacgggaaatgaagacggtaggcgctatgccaactttgtcaatcgctccagagtggtcttcgagatggacatggctgggcttcctcatgcgtgtttccaggacgaaagcgcgggatgtgaggcgtccccggacttgcgtgtgcatggcgttgtcgtgcattccggtccaagcacgtag

SEQ ID NO: 527451 - DNA, 282 bp, Stenotrophomonas maltophilia
atgacagcaaagcaaccctacccggaagaattcaagatcgaggcggtcaagcagatcacggagcgaggccacggtgtggctgacgtatccgcccggatcggcgtcagccagcacagcctgtacaagtggatcaaggcctattcggtgccggcggctcagcggcaggcgcaggtgtcccagaccgaggaactgcggcgcctgaaggctgagctcaggcgcgtgaccgaggagcgcgacatcctaaaaaaggccgccgcgtactttgccaagcagtccgggtga

SEQ ID NO: 527452 - DNA, 876 bp, Stenotrophomonas maltophilia
gtgaggtacgcgttcatcaaggcgcacgaggctcagcacacggtccggcgcatgtgcaaggtgatgcaggtgcatcccagcggttactacgcttggaaggccaagccgcagagcgcacgagcccaggacgaccagcgactgactgccctgctcaagcaggcttggctggagagcggcggcgtgtacggctatcgcaagctgacactggacatgcgcgacctcggcgagcgctgcggcaggcaccgtgtggcgcggttgctcaagctcgaaggactgcgctcgcagacgggctaccgccgccgtcctggcgtgcgcggtggcaagcctgcggtggttgcgccgaaccatctgcagcgccagttcacggccacccagcccaaccagtcctgggtgaccgacatcacgtacatccgaacgcacgagggctggctgtacctggcggttgtggtcgacctgttctcgcgtcaggtggtgggctggtcgatgggcagtcgcatcgacaccagcctggtgctggatgcactgctgatggcgttatggcgtcgtcagcccaaggagtcggtcacggtgcattccgaccaaggctgccagttcacgggtcatgagtggcagaccttcctgcgcgaccacaacctggtcagcagcattagccggcgcggcaactgccacgacaacgccgtggccgagagcttcttccaactactcaagcgcgagcgaatccgtcggcaggtctacgccacgcgcaatgacgcgcgcgctgacgtcttcaactacatcgagatgttctacaaccccaagcggcgccacggcactgccggcgacacttcgccggtcgagttcgaacgacgccattcccaacggctcacgggtgtctag

SEQ ID NO: 527453 - DNA, 1209 bp, Stenotrophomonas maltophilia
atgcccccactctccgacctcgcaattcggcgcgcaaagccgactggaaagacccagaagctgttcgacggcggcgggctctacctggagatctccccgagcggtagccgttggtggcgaatgaagtaccgcttcgacgggaaggagaagcgcctagcgctgggggtctaccccgaggtgcccctgcagctggcacggaaccgtcgcgaagacgcgaggcggctgcttgcccagggcgtggacccgaaccagcagaagaaggaggccgccgcggcgaaggcgggcatggaggctcagacctttggcgcgatcgcgcgcgagttcatggatggccggatctggtccgacgactaccgggtaaaggtcgaggcctggatgaagaacgacatcctgccgtggatcggtagccggcaagccgctgagctggaggcacccgacttccttgcactcgcccgtcggatggagaagcgcggcgccatcgagtcagcgcaccgggtcatccagaagtgcggggaggtgatgcggtacgccatcgcctgcggcatggccaagcgcaatccggtggcagacctgcgcggcgcactgcagccgacgccacggaaccactatgcagcgatcaccgaggcccgagagctggtgccgctgctgcgcgccatccccgcataccgcggcaggcaggttacacgctgggcattggccttggcgccgctggtgttcgtgcgccccggcgaactgcggaaggcggaatggtcggaattcgatctggacgccgggcagtggctgatccctgccggccgcatgaagcggcgccgggagcacctgatcccgctttcgaggcaggccctggccatccttcgcgagattcagccgctcacaggcaaagggcagtatgtcttccaagggcggaacagcccgaagcgaccgctgagcgagaacacggtgaacaccgcgctgcgcaagatggggttcgaggatgacgtgatgaccgggcacggcttccgcgctactgcgcggaccatccttgacgaggtgctgggattccggcccgacatcatcgagcaccagctgtcgcatatggtcaaggacccggacggccgagcatacaaccggaccaagcacctggaagagcgcgcccgaatgatgcaggagtgggcggactacctggaccggctgcgcgatgggaacgtggtgcagctgcgggtcgcctga

SEQ ID NO: 527454 - DNA, 255 bp, Stenotrophomonas maltophilia
atgtcattgagcaatgagtgggaagacgagcacctgacaccgtccggttgggtgagtggtagttacaagcacgatttcggacgcgaagagcgtcctgttccgctggacgccgttctaacggtgcgcaagcacgtcgtcgtgggtgccattggtgcattgccgcatgttgatgtgagtgaaacgaatctaacggatgacattggcctgatcgcttctctccgcaagactttcggcgagccgaagttcggttgttga

SEQ ID NO: 527455 - DNA, 795 bp, Stenotrophomonas maltophilia
atgaccagcaacaccaagcagctttcgctgcagcttatccatcgccagatggagaacactctaattgagcagcgcaagctcgatgggtacatcaatgcaaccgccatgtgtcaggcggttgggaagcggttctttgattaccgtcgtctcgaagcgacggggcagttccttgacgagctggctgcggaaacgggatatcccgtttccgagctaattcaagtagttaaggggaatgggccgcagggaacctgggtgcacccggacgtcgcaacccatctggcccagtggctttctccgaagttcgcagtcgctgttgccaagtgggtgcgggaatggctctccggccggcagcccaatggcgggcctgcccctgggctgccgcatcacatccagcgctacctcgctaacaaggacaaggtgccctatacgcacttctcgatactgagcgagttggcgatttcgttgattgcgccactcgaagctctcggttacacgcttcccgaacatatggtcccggacatctctgagggcaagatgttcgctaagtggcttcgtggccaaggagttgatacctcgaaggtgcccacctacaggcagcgatatgcggatggccgcgtttgcgatgcaaagatgtacccgatcggctatttgcattcattccgccttcacttcaatgaggtctggctgcccaacaaggcccatcagtacttccgcgaacgtgatccagcagctttgccgttcctagacaggctactgctggaagcgccgggcattcctaagctcccggctgcgtga

SEQ ID NO: 527456 - DNA, 498 bp, Stenotrophomonas maltophilia
atggaagacttcctacagagcattgaagcggcgatcgagcaatcgaactggaacgcagcgatctcgttatcactcatgctccctgacatatgcccgtcgatgcaagggattcgacggggtcgaaagcgttacatggactggtttaatacctacgcggccgatgatttcagctcaagctttggcggggcgtttctctcatgtgaggactgctacgcgcttcgatgctccatcctgcactcgggaacggatgacatttccgataactcagtagaagcgaccttaagcaaggtcaccttcacaactctccaaatgcacaacatcaggttcaacgatcaactgatcttggatccacgtaaattctcgatgtcgatggtgaatggagcaaggaaatggctttctgacgtcgcgcaggacagcgctgtacagaagcgcttgaggatgatggtaagcgtcaaaaatgatgccttctcccctatcccgggtgtccgcctaggctag

SEQ ID NO: 527457 - DNA, 780 bp, Stenotrophomonas maltophilia
atgggtgcagtgattcattcaagcggcaatagcctgcgcgcgaactcaaagcgcatcatcccgccggtcgatccgacgggcttcaagggtatctttctgttcggcgacagcgttgcgcagagcgtacgcaactatgccggcggcgccgatctggtcgtcaccggaaaccccgtgatcgcatccgacgggcaggggctgatgttgcgagaggcggtggattacctgacgaccggcttcacccaagacgtgaacagcacgatcatcgcgatgttccaggcgcaggctcaagccacgttcccgctgagcacctatccgggtcctcgcctcggggacgcgaccaagaacgacgcggtgggtagcggcgtgcagatgttcaactcagctggcaacgtaggggtgcacgggttcattggaacctgggacggtgctaccgccgggagcgcgagcacgcttctgaccagccccgttccttctgccgcgccgccggcgggaagctaccgcatgttcggggttcgctcggtggctggcatcgctccggccactgtgacggtcgatgacctgacggcaggcaccaagagttcccgctcggccgcggccgggcaggtgcttgaccgaacgacgcgcgcgtatcgaatcgggagcagctatcagaccactgcccagcctgcggtcaaaacgctcggtgctttcatcatcagtcgaatcctcactgatggggagatggcaaccatgtaccagtggatgaagggctactgggcccgccgagggatttccatctag

SEQ ID NO: 527458 - DNA, 2163 bp, Stenotrophomonas maltophilia
atgacgaccttcaacaccggcaatccgctgggttcgaactcgcccaaggatttgtacgacaacgccgagaacctggacaacggcatcaatggcacggggaaaacgtggcaggatcggcgtggggtgactcggaaaagctggtccggcatcgaaacggatttccagcagttcctcgccgacggcagcaccattgagtttccgacctgggcggccgccagcgctgcagctggagcagggcagattcccctcaaccgtcaagtcgcagtaatcggtgatccagggttccacactgatccaatcacgggggcgaccgtgccgaacagtggccgctacgtcatgggctctgccggcctggagtggaggtccgccgacgttctgaccgagaaggccgacaggtctgatctttcaacgctggaaacaaagctcgacaacacggttcggactgtcgctctggacatcccttatgaggtcaatttcgcagacgaagatggttacaccgacaagggtctcagcgagggaatcattgatctgaagacggtgatgctcgccaattcgtcactgattggaacgaccggtgcattcagcttgattgatgccgatggctacttcgttgatgtagtcgatccgacgggtgttgcagggcttgtgcgtgacgccgccgccgttgggctgaacacttcgctttccatccaagacgatgatgggtatgtcgtagagctggtgagtccagagggagcggttgctcagaccgacgatgcatccctctacggcgtgcgcaatgcgtcgaacctggacgcgtcgcgcagagtaggcgcacagatcaacagtgaatccaccgctgtggcttacgactacacccatttccctgtgtatgggcaaagtctcagcaacggcacagagggttggccagccctcagcaagacgcaaccgtacaacaacgtgatggtgggtggttcggtgaggcaggccagcattggatcagcttcgttctctcccgttgggggcagcagtgccttccagccgctggtcgccaatgtgatgagcaccagcatggccgtgcttacggacgcggaggtggccgcgcttccgcctgggaacggtgcttttggtgagaccgttgccgagggcttggtgaattcattgaagcggctgcacaacctgcgcaagggtgtggtcgatgacccgatctcgttcgtggccagcagcagcggcgtgggtggcaggaccatcgctcagctgaccaaaggcgcgagcccgaacatctggaacgtgctggtcgggcattcccaagcagcgaaagccaatgcggtctcggctggaaagtcctatggcattggcgcgtttctgtggctacagggcgagaacgactatcccagcaccaccaaggctgcctacaaggcggcgctgagccaattgtggtcggacttcaaggtcgatgttgcgggtggcgtggccggccagaagctgccaccggtcatgctgatgtaccagaccggcgccagctttacttcggacggcaacgggctcgacaccgcgctttccattggtcaggcccagttggagtacagcgaagaaaacagcgacgtctacatggtcgggcccgtctatccctatacggacaagcacaccagcccggccgccaatggccacctcgacccgaatggctacagatggtgggcaaacctggcggccaaggttgcctacagggtcttggagcttcgtcagggttggaagccgctctctccccgaaaggtggtcacggcagggcgaacgatcagcatcgacttccacgttccggagccgccgctggcattcgacaagccatatctttcgtatacggccaccgacttccccgacaagggcttcacggttcgcgacagtgttggtgtcgtgccaatcagcagcatccggatcgtgttcgaaacgatcgtggagctgactctttcgcgtgaccttgtcggctctgcctacatccgatacgccgacaaaacgtatcacgacggtaatggttgcctccgggacagcgacagcttcgtagcaccggaccgttatgtgtaccaggtaggaaccgggcagtacccggaggcgaacattgccgaactcgttgataagccgtatccgatgcacaactggtgcgtcgccttcaaccttaagattcagtaa

SEQ ID NO: 527459 - DNA, 2505 bp, Stenotrophomonas maltophilia
atgtcccggtcccttggtacgctgaccatcgacgtaatcgccgaggtcggcggcttcgcttccggcctggacaagtccgagcgtcgggcggagaagtggcgcaagaaggtcgaggccgaggcgagaatggcgggcgcggcgcttgccgctggtgttgcagtcggtgtcgccgcactgtccgcagttgcggtgaagttcgggcgcaacagcattgcggccgagaaggaggtggctcagctcgacgccattatccgttctaccggcggcgcggctgggtacacccgccagcagctgctggacatggccgatacgctcgccgacaaatccaccttcagcggcggtgagattgtcgaggcgcagacccggcttctgtcctattcgggaatcctgtcctccaacattcctcgcgcgatgcaggcagtgattgaccagtctgcccgtctcgggatcagtgtcagccagtcggccgagaccattgggcgggccctggaatcgcccagcaaggccgccgccgctctggcacagcagggcttcggtgcagccttcaccaaggaagtgcgcggtacgatcgacgagctggtgaaggccggcaaggaaggtgaggcccaggtgatgatcctggagatcctcgaggaatcgtatgccggcgccgcactggcggcgcgcgataccttcggaggcgcgctgaccgcgctcggccatacactggatgacatcaccacggccaaggacggaagcctcaagggggcaaccgctgccgtcaacgacctcatcgacactctgaaggacccgaaggtcaaggagggattcgacagcattgtcacgctggtggccaatctgtccagtgagcttgcgaatggtgttgttcagatcgccggtttcattaccaaggtccgggatctcgcgaatctagacgctggcggaagcgtacaggatgccggcgaggctgcactcaacgagcagatggcccgactgaacgggttgatcaactacgcgaagcagaacaagacaggtctcctcgggatccccctgacggattcccaggaggctgccaggctcaagcagatcaacgatctgacccagcagcgtatcggcatccagcgggagctgactgagcgctacaagtatcagcgggcggcggaggcattcaagggagtcaccggttcggtagatagcacggcaaagttcagcgacagtgcggcgagagaggctgccgccgcagcagccgcagacgcagacaacgcgaagcagcgcgttgccagccagcagcagcttcagcgcgcttacgaagccagcgggttacagctcaggcgccagatcgagttgttcgacaccagcgcggaccgatctggcaaggccaccgagctgcagcgcctgaactttgaaatgacgcaaggcagcctgcaaggcctgaacgctgcccaccaagagcgcctgcgcgcactggccagcgagattgaccggttggcaggggtgaagtcagcgaatgaggaagcggccaaggccaccgaggccttcgtcaagttgaaggacgagctgaacaggaaggactcgctcggcgtcgacttggcgcgagaccgtctgaaggtactgcaggctgccgctgctgtaggcgctgcaaatgatccagagttcgcaaaggttgccggcaaggcgatcgaacaggtcggtggctcgatgggaagcgagtatcgcgggccggacgcgctctatggcggggccagcggcgagttctccaagatcaacaaggcggtcgaggaggagaacaagcggtatgccgcacaactggaggccctggaggaatacaggaaggcgcgcgctgatctgactgatgagtgggacaaccaagaggcggcgctggcggtcacccatcaggccaggttggatgagctagacaaggcccggtggcaggtcggattgaccgctgcagagcaggggttggccggtgtcgcgggcgtcatgcgtgccggcttcggcgagcagtccggtatctaccgggccgcattcgcaatcagtaaggcgttctccgtcgcgaaggccgcgctagctgccaaggatgcggtcagttcggcactttcaagcggtctgccgttccctgccaacctcgcagcgatggccgccgcagctgcagcagttgccaacttggtaggcgaagtttcggcggttggcatggcccacgacggcatcgacagcgttcccgagacgggaacttggctgctgcagaagggcgagcgggtcaccaccgcggccaccagcgccaagctggacgcaaccctcgaccgcgtgtcccgcgattctgccggcggaggtcggggcgacacctttgagatgaatttcaacgtgaatggctccatcagcgagcgggaacggctgatgcaagagcagacagtaaggcgcgcagtggccttggcgcggcaggaccgtgtagcggacaccacatccggcacaggtccccaatcacgcgcgatgcgatcgaactggaatgtcagaaggaaggtcgggtaa

SEQ ID NO: 527460 - DNA, 207 bp, Stenotrophomonas maltophilia
atgaacgagcaaagcgaattgctggcagccctgcgagcccagaccgaggcgacgcaccaactggtggcggcgctgcaggaaaagaccaaggccgaccaggagaacgccaaggcggttaaccggctggtggactacctctgcgacactgaagacggcgaggcggatccggtcggctccggcagctacctgagcgggaagccgcgatga

SEQ ID NO: 527461 - DNA, 342 bp, Stenotrophomonas maltophilia
atgcagctgatcaccatcgaacaggcccggcagcactgccgggccgatagcgccgacgacgcgatgctggaactctacggtggcgcggccgaggaggcggcgcaggaattcatgaaccggaaggtgtttcctgacgccggcagcatggccgccgccgtgctggccggcacggcagggtgtgacccgatagtggtgaccgacgccatacgcgcggcggtactgctcaccctcgggcatctgtacgcgaaccgagaaaatatggtcaccggcaccatcgtatcggagatgaaggaaggcacacgcagcctgctctggccctatcgaatcgggctcggcgtctga

SEQ ID NO: 527462 - DNA, 477 bp, Stenotrophomonas maltophilia
gtgaaccgcatcgccatctatctgctggtgctcgtcgcctggtccgccgccatgttcggtgccggctgggcctggcgtggtgatcgggccgatggcacggaatcggaccagcgtgctgccggtgccgaggcagtaaaggaccaggtgaaccaggtccgtgccaccgaacaccagcaggccgaagcccttgccaccatcggagccgagcatgaagaagaccgcaccgcggccatggccatccctgctgctgttgctgctggcgtgcgcgatggcagcctccagctgcgcgacgacctcgccacctgcaataccgctcgcctgtcccaagccgccgccggcgccgtcgaacgtggccaggcagcccaactacgagcagaggtcgcgggcgctcttgttcaaatcggacgagacgccgacgaccacgtccgtgcctgtcaagccgtgatcgaggcggaccgaagctcaggaccaggctga

SEQ ID NO: 527463 - DNA, 534 bp, Stenotrophomonas maltophilia
atgaagttcaccgaagagcagcggttgatcgtaatgatgctcgccgatgttcagaaggctctgaaggtacaaggccagctagatcagaacctggtgctcacggctgctatggaccggcaagagttcgcgattggctacaagtacgaccacatttttggggcggccaatgttccgtcagatttccatttcgtagtcgacgtcctggaaatgtggtctgtgcttgaggaggctatcgagaatctcgacatcaacgagaagagcgttctcgaggccgctgcgggtgaactagcgccgagagcgcgtttcactggctttgacggcaatcaagaggcgacgctaagaagctatgccaaattgcttgtgaataccctcggtgatttcgcgcagttcacggggcgaacgctgaattctcacaagccaatgagggagcgttacgaacggatgctggtcgccttcaagcctatccttctagccttggacggacagcgttacatgaacccgtcggaaattgcggctgtgttcagcgcgacatga

SEQ ID NO: 527464 - DNA, 297 bp, Stenotrophomonas maltophilia
atggacgccatcgagaagcgggcgcgggagctgtacgcacaggcgctacgtgccaacggcatggagttcagcgctgatcgggtcggagacatggtcgagtctggtgcggccgggtctcagcgtgccgtgttggattccatcatcgccgccctcacgccgcccgagggctacgtgctggtgccggtggagccgacgccggcaatgatcgatgcgccgctggtcatggattcgcctacgaacgacggtactcgccggacctgggcctacatgctcgccgctcgcccggaggtcccatga

SEQ ID NO: 527465 - DNA, 204 bp, Stenotrophomonas maltophilia
atgaagaagacgaaggccatggcgccgaggatcaacccccagcgtgcgccacgcgagcggaggatggaccacaacaccgtttcccgccccaagcggctgacaccggcgaagtacgcgaccggcccggccgagacggtggaggagttcaaggcgcgcggcggcaaggtgcaacacctgacagccagctgggagcagcgagtatga

SEQ ID NO: 527466 - DNA, 426 bp, Stenotrophomonas maltophilia
atggaatggacgaactggctgacgctagggattgcggtgctgggcgctacgcttggcgtgttcaacgccgtgtggctgattcgaaaggacacggtccgactgaaggtgcgattcgtgacgctctacgtgcccggaaccgacatgtggactggcgcggtcgaagtgatcaacaccggctatttgcccgtgaccatcaatgaagtggccttccattccggccggcgttcgaagacgcgcgccgcagtgattacagacctgttgcagcgcacccagctcccgcaccggcttgagccgcggagcgtcatcagcgtggctgctcatcccgacatccttgggaacatcgacagcggccgattcacctggtgcagcacttcgaccgcctgcgagactcaggttttcgcgaagatcaagcggaagaagagctga

SEQ ID NO: 527467 - DNA, 240 bp, Stenotrophomonas maltophilia
gtgagcgccgtcatcctctacttccctacccgccgtgtgcgtgccgccgctgtcgcccaggccgtccgcctggccgcccttcgcctaggcttccacccgcacaacgccgacttcgtggccatcatcgcccgccgcgacttcctcgaaggccgctgcagcgccgcacgcgccatcagcgacatggtcgatgcgttgaacgaggccgcacgccacatgcgcgccaaaggtggtgctgcatga

SEQ ID NO: 527468 - DNA, 174 bp, Stenotrophomonas maltophilia
atgagcgcccctgtcgatgtgctggcggtgctggatggcgacattgtcgggatcgacaccgatggctgctcgattctttggaactcggacactcagcggggggagaacagcggcgaaatgccgactgacgaagagcgcgccgccctcggccgcgtcaaaggcggtgctgcatga

SEQ ID NO: 527469 - DNA, 243 bp, Stenotrophomonas maltophilia
atgagcgacttcacttcccccacgtcccgcgccccgaagctgattcgtctgaaagaggtcagcgcgcgcaccggcctagccaagaacaccatctatgaccggattcgacggggcgagtttcctgcgcaaatcgacctcggcgggaactgctcggcttggtcagaggacgaaattgacgcctggattctgtcaaaaatgaactcaaggaacgtggatgagcgcggcctacccagtgccgcatga

SEQ ID NO: 527470 - DNA, 456 bp, Stenotrophomonas maltophilia
atgctggccagtctccatgtgctagcgcccctgctggcaggcttcggtgctaccgccctgctgtggttccgcagcgatgggccaggccacgcgagccgcctcggatcgcccgcttcgctggcgctgatcggcttggcaatctggtcggagccgacgccaaccgccgccggtgccacgctgcatctgctgctcgccctcgccaccctgctggtcgccacccagatgacgctccgcctgcgcgccatcctgcacatggccacccgcctgcaggcacgggtggatgcggccgacatggcatcacgctgggcccgtttgtcggcagcggtatccgctctggctgcgcgggatctgcgcgaagggcggccgctggcgccgtcgttgcgtcgcacgctggtgctggccacgctggcctgggccgccaacgaggaagcacaggccatggaacgccgacgatga

SEQ ID NO: 527471 - DNA, 837 bp, Stenotrophomonas maltophilia
atgtccgcgtctcccacttcaatccccccggccggaccgctacgcagtgccgaccatgatcgcggcctgcaggcgctgcaggtccaggtggtcgcggttgcacagccatgcgccagcctgctgcgcctcgtggtccagttgccggagcaggcagccctcgcgccgtggcagcgcgcaaacactgccgtgcgcatccagctcggcgccgccttcggcgatgtgtcacggatctacaccgtgcgctgcgtcgacgcgcacacgcgccgattcacgctggatgtggtgctgcacgaagcaccaggaccgatgctggcctgggtacgtgcgctgcgccccggtgatgccttcgatctgaccgggccgcgcccgcatctgcaggtgccgcagcgtgaaggtgccagcgctctcctgttcgctgatcagagcgccatcccagccctgtctgcgttgctgcagcaatggccggccggtctgcatgcgcaggcctggatcgcctcgaatgatcccttcccggtagacgagctgccccgcatcgatggtgtctgcgtgcagcgcctggccaccggtgatgcgcccttgctgcagcaggcacgcagactgcacccggacgccaacaacaccgtctgggcggccggcgaacgcgaggaaatgcgcgccctgcgccgccacttcatcgaagcggtcggcctggcacgcaccgacgtcgccgttgccggctactggaaacgtggcgagaccaccaccgacaccgaccagcgccgccgccgcaactacgagcgcgtgctggcccgcggcggtggcctgcaggacctcgacgacctcgccgacgatatctga

SEQ ID NO: 527472 - DNA, 837 bp, Stenotrophomonas maltophilia
atgaccacttccatccctcccaaagatctggccaggcgcgacgtacatcgccaggtgcccgcgtttacggagatgcggtttcgcgacaagcgccacgatcatgctgtcgtaattccggtgatcaacgaaggcgaacgcatccgcgcgctgctgtcacgcatggatgacatcggcattgccgatattgccgacgtcatcgtcgtcgatggcggaagcaccgatggatcgctggccgagcagctgctacgcgatcaccgcgtcgcggcactgctggtcaagaccggggcaggcaggctcagcgcccaactgcgctgtgcctacgcattctgcctcgacggcggataccaaggcatcgtcaccattgatggcaacaacaaggatgaccctgcccccatcgcatctttcattgatgcgatgaagcggggagtcgacttcgtgcaggcatcgcgcttcatcgctggcggagttgccgtgaatactccagctgctcgtcatgcggccatccgcatgctgcatgcaccgttgctgagtcttttctccggcttcaaatggacggatacgacgcagggctttcgtgcctacagcagggcattgctcaccgatccacgcatcgatgtgttccgcgacgttttccagggttacgagctgttggcctatctctcgtaccgcgcaccgcgccttggcttccgttgccaggagctgcccacggcacgccgctatccggaaggagaggtcccgaccaagatcagcagcgtcaggggcaacctgcagattctgcgtgtgttgcttgccgcgatcgccggccgctacaacccaaccaacgggcgccaaccatga

SEQ ID NO: 527473 - DNA, 360 bp, Stenotrophomonas maltophilia
atgaacaaatggttgatccttttcgtcggcatcctgtgcaacgcgggagccagcgcgctcatcaaggtcgcagtcagcgcaccaagagagttcccttcgcttgccgatccaatcgccgccttgcggaactggccattctgggtaggcctcgcgctgtatggcggcgcattcatgctgtactccatgtcgctggcacgcctccctctcaatgtcgcccatccaatctccacggcgggtgccattgcgctggtggcctgtatgtcggtgttcgccttccgcgaaacgatgccctggacaacgatggcgggcattgcattgatactctccggcgttgtcctgatcaccgttcacgccccctga

SEQ ID NO: 527474 - DNA, 831 bp, Stenotrophomonas maltophilia
atgagcatctcgatctccaacatcgcctggaacccggacgaggacgacgccgttgcgcagctccttggcgatctgggtgtgcgcaacatcgacgtggctcccagcaagtacttcccggtgcctgcagaagccagcgatgcggcgatctccagggtccgcggctcatgggaagcgctcggcattcgcatcatcggcatgcagtcactgctgttcggaacggaaggcctgaatgtctttgcttcggccgatgtccagctgcgcatgcttgaacatcttcgccacgtgttccgtatcggttccggcctgggcgcgacgcgtgcggtgttcggctcaccacggaaccgtgaccggggctcgatgccgctgcgccaggccaatgaagccggcgcggagttcttccatcgcctgggtgaagccgcccgcccggaaggcatcacgctctgccttgaacccaacccggaatgctacggcgcgaacttcatgacgcacacggaggcgaccgccgaagtcgtgcgcatgacagggcacgcgcacatcaggatgcagttcgataccggttcgatcttcatcaacagcgaagaccccgccgaacttctggcgcggcacgccgacatcgtcgggcatgtacacctgagcgagcccagcctggcccccttgggaacgcgcggcaccgatcatgcctcgacggccgccgccctgaaccagtacatgcacgatgcgccgctgacaatcgagatgcttcggccggcggatggagtagcggcactgaagtctccgctgcagttcgtgctcgaccactatcgcgccccgtcctctggagcatcgccatga

SEQ ID NO: 527475 - DNA, 783 bp, Stenotrophomonas maltophilia
atgcctcatgcgctcatcggacataccggcttcgtgggttccaccctgaagcgccagacccggttcgatcatctgttcaacaggagcaacatcggggatgttgccgcgcaggcctacgaaacagtggtctgttcggctgcgccggcgcagaaatggatcgccaaccgtgagcccgaagccgacagggagaacatccaggcgctgatcaggacactggattcgatcaggtgtgaccacctcgtcctgatcagcacggtggacgtatttgcgaacccggtcgacgtcgatgaatcgacgccggtcgtgacgaccggactacatccatatggcctgcatcggcgccaacttgaagaattcgtcgaatcccggttcaggtcgcggacaatcattcgccttcccggcctggtcggccccggcctccgaaagaacgtcattttcgatctgcacaacaacaacaacgtgcacgccatcgacagccgggcccggttccagttctatcctatggtgaacctcaatgcggacatccaggttgcccggcagcaaggcatcgagctgctacaccttaccgctttccccctgagcgtcggcgaagtggctcgggaaggcttcgggctggagttcgacaatcaagtctccagcgtgccagcccgttacaacatgctcagtcgctacgccgccgcttcccaggggaatgcaggctaccagtatgaccgggcagccacgctcaccgccatccgcgcgtaccatcagaccgagccagcgcattcagtggcgacgcgatga

SEQ ID NO: 527476 - DNA, 1128 bp, Stenotrophomonas maltophilia
atgccactggatgccgatgcgatcatcatcggcggtggcttctatggggccatggtcgcctgctatctcgccagcgagaggggacttgccagcgtcatcctgattgaacgcgaaccccgcctgatgcaacgcgcttcgttcgcgaaccaggctcgcgtgcacaacggctaccactatccccgcagcttcaccacagcctatcgcagcagagtgaacctgccccgtttcatgcaggaatgggactcggcggtgcgttccgatttcctgaagatctacgcgattgcgcgccgcaactcaaaggtcactgctacccagttcgtccgcttctgcgagacgatcgatgccccgctgacaccagcacccgcttcggtggcatcgttgttcaacccgaacctgatcgaacaggcgttcgtcgcgaaggagtacggattcgactccgaacggatgcgccagatgcttgtagccaggctgtcagctgcgggcgtgcatgtagtcttgcagcaggaggcgactgccgtgcaaaaggagggcgacgcggtgcgcgtatgcctgcgcagcattgacggaagcgctacaacctccctcgtggcccagcaggtattcaactgcacgtacgccgggctgaacctgatcgacggcccgcacggccgcagtcatgcccgcctcaagcacgagatcaccgaaatggcgttgatccagcttcctcctgccctggaaggcatgggcatcaccgtcatggacgggcccttcttctccgtcatgcccttccccacgcgccagtcgagcacgctttcccatgtgcgctacacgccccatacggcatggaccgacacgccggagcgcaatccctacaccgagctggaagcccatgcccgttcaagccggattgatcgcatgctgcgggacgctgcccgctacctccccagcatttgcaaggccagctaccagcagtcgctgttcgaagttaaaacggtcctgatgaagaacgagggcgatgatggccgccccatcctgttcgagtcgtatcccgaactgcccgggtacgcgacaatactgggcgggaagcttgacaacatttacgacgtactcggtcatctggataccctcaccttccggcgttgcccttag

SEQ ID NO: 527477 - DNA, 972 bp, Stenotrophomonas maltophilia
gtgtccgaaagcctttccaccaccgcccccccgatccgccgcggacgggctttggtctggctgaccctgattgccagcgtctacctgctgggcttgtggtatgtcgatcgtgacaagcagatcctgacccgcctgcaggcgcttgcgttgccgctggcgggctgtgctgtcctggtcctggccagctatggggtgcgctacctgcggtggcgcatgctgctgagcgcacagcgccagcgcacgggctggggagccggcatcctcgcttatctcgcagggttcgccttcacggcctctcccggaaaggctggcgagcttctgcgcattcgctacttctcccgccttggggttcccgcgcaagtcacgctgaccaccttcatctacgaacgcgcgctggatctgctggtgataaccggattgagccttgcagcggcccacctggttccacttttcggtgtgctcgccagcatcgtgctgtgcctggtcgtggccctttgcctgcttgcctgtgcgccccggctgcagcgcctggccagcgcgtttgtcaaccgtcttcccggccagcccctgcgccgccttgcgcgcttcctgatgggtggcgccatctccttgcgcccgctgttgcgcccgggactgacggtggcgagtaccgtctgcggggcactggcatggttgctcacagcggcagctttcgcctggctgtgcaatgcactggacatcgtcctgccttggcagtacgccatggccatctaccccttggcgatgctgattggcgctctttccttcgttcccgggggcgtcggcaccaccgaggcagcgattgtcctgatgctggcggcatcgggtgcggagccggacgccgccctggccgccgccattggtatccgcttggccagcctgtggttggcagtggccgtcggcatgattgccgcggccgtactggagacgcgcggccccggcgctcctggatag

SEQ ID NO: 527478 - DNA, 561 bp, Stenotrophomonas maltophilia
atgctggagctggatcgccacctgagccggtcactggagcaggcgcggcatacgcccctgaacgtgcagcgctacgggcaatcgtgggtctgggtgctgtccagtgatgcctgggcggatgcggcgcgctgggcggcactggattgtggtacgcacccactgatggcgctgcgaagagccctcgacccgcaactgcggccctggcccgaatgtgcggcggcgctgctgccgcttgaggccggtgatgtacgcgtgctgcaacgcgcggcattgctggtggtgatgcgcagcctgaacagcgcgcagcgcgtgtacgacgacctgcgctaccaccaggcctaccggcagttcatcggcctcgaccacggcacggcctggtcgccgatgcagtgcgtacgcctgttgcaggcctgcgcacatccactgctgcgggcctgtatcgacgacacactgggcagccttccatctccgttgcttgaagcggcgtgtgcgccagcggtacgtgctgcaccgctgcaggcacagccgcagcgaatagcgggcggatgtttatcgtactga

SEQ ID NO: 527479 - DNA, 333 bp, Stenotrophomonas maltophilia
atgggccagcccccgccaagcctggattcacttagcgctcgactcgaccagctaaagagcagagtcaacattctccactcgactactgaaaagagatttgcgttctccgatagacgacatgatgcgatcctcgcggtactgcggcatcagcgggaggtgctgatccccttggcggctgcctcaacgtctagatacgtgtatttctcgtgttggctaacgttatacggggcagtgcttttggctttccccatctggatcagccaagtcatctccgaagtgagcaattctgcgatctacgttttcggcgagctgcaccgcgttttgtggctgtag

SEQ ID NO: 527480 - DNA, 1647 bp, Stenotrophomonas maltophilia
atgaccgcagagtccacgctcgttcgcttgatttcctcgccacaaccgcgagcagtagctctgattggaggctgggggcgaggtaagacccatttgtggcgcaacctagtcgagtccacgccacaccaaccgcgtgccaagtacagctatgtgtctctcttcggagtcaacagtctcgaagatttgaagctggcgatctttcagcgggagatcgacgcaggccctccgctggccgagccgacttggtgggaacggataaaatcaaaagtgtccgggcgagccattgttgaatccgcgacgcagatcgagaacccttggctaaacaacctaaacgcgctctacagaacgattgctttctctcaagtgagagagcgactcatctgcctggatgacctcgaaagaagggggaaagatctcaatctggaagaagttttgggtttagtaaccttcctatgcgaagagcggcaatgcgctgtcgtgctgatcttgaatgacaccactatggacggcatcgatgattggaacaaataccgagagaaggttttcaatgcagaagtgacatatcgcccatcaagtgaaatgtgcatcgacataattctaggaaccgacgttcagaatgaatggtacagaggcgcgcgccacgttctgatgcaactggacgtaagtaacatgcgcatcatgacccgtgtaaaggacgcaattgcacccctcaccgaactatttccagctgcatcgggcccgactcagttccagatcggcgcaacgctggctctgtacgtgtactgccacaacgcctcgggagagggagctccgcccatggatcgagcacttgctcacaatcgattcgcgttcgcgatgagcgatggtgagcacactgaggaagagaaacgatgggaggccattctgagcaaggttgacttctacccggacgagcttgatcttgcggtgacggcctacgtccgggacggctatcctgacgttgcagcgttcactgcccaagtcgctcgaatggaatctgcgcatcaagcaaacagtgcagaccaagctttcactttggcatgggagtcctatcacaactcgttcgacgacaattcagaagatgtcattgccaagttcgccgaggcgttcccagcagcagctccgaccatgcacgcaatgaacgcgaattcttcgattgcgctgatgaggcagctggggcaggatcagcttgccgatgccttcatcgcaaactggatcgccccgcgtcggggcgcgcggcggcgggagctctctctgcatgaggctcagatcttcggcccgcttaccgacgcagggttcattagtgcattggacctagcggagcgagaggaaactaccgagcccgacttggacgaagccttggataccgtagcccgaggccaaggctcgcttgaccgagcgctccatacgatctcccgctcggaccttgaggaggtagttcattggtttgaacgtaatccgggtcgaacgtctagaacctttatcactacgagcatgcaatttcagggtggtgaacacgtggccgttgcgcaacgccgaatccgcagtgcgcttgaaacgcttgccgaacggtctcccatcaattcagtacgagtatcagccatactcagggccattgatggctattga

SEQ ID NO: 527481 - DNA, 873 bp, Stenotrophomonas maltophilia
atgcgaccgttttccgccccccagctgaaccccgccaccgagaccggctggcgccgccggtggttcgacatcatctaccgccacgacagccggccctcgcgcaatttcgacctgatcctggtctacgcgatcatcgccagcgtgctggtggtgatgttcgacagcgtgcagcgcttccacatcgcccatgccgactggctgtacgtgctggaatggggcttcaccatcctgttcaccgccgaatacgtgctgcgcctggcggtggtcaagcgcccgctgcgctacgcggtgagcatctggggcatcatcgacctggcctcgatcctgccgacctacctgtcactgttcattcccggtgcgcagagcctgctggtggtgcgcgcactgcgcatcctgcgcgtgttccgcattctcaagctgacccgctacatcgaagaaagcggcgtgctgatgcagtcgctgtggcgcagccggcgcaagatcctgctgttcctgttcacggtggtcaccatcaccatcatcgccggcacgctgatgtacgtgatcgagggaccgaaccatggcttcaccagcattcccagcagcatgtactgggcggtggtgacgatggccacggtgggcttcggcgatatcgtgccgcagaccgtgctcggccgcttcgtcacctcggtgctgatcctgatcggttacagcatcatcgccgtgcccaccggcatctacaccgccgaactggccagcaccatgcgcgatgccgagctggccgcacgccgtgatgcgcgtggctgcccggactgcgggctggaaggccacgaaccggatgcacggcactgccgcaagtgcggcggcaagctgccggatgcgttcaaccattga

SEQ ID NO: 527482 - DNA, 351 bp, Stenotrophomonas maltophilia
atgaagcctgtgatttatggcgctgcgctgctggcagcgttgactacagcgatcgccagccgccatgtacccaaggctggcttggaactgcagacggttcggaaggtgtccgccgctgaatttgctgtcatgcgcgaggacgccgttcgacttgtgcgcgagggcgtggtgcatgacgcgcggtacgcgggagagaggtacttcgaggtcagctgtcacggtgcacccgtgatgctggtggacaactctttggaacagctcgtgattgtgctgtatgcgaataaggagattgatgttccgtgcgttatgccgctgctgtcgcattggaatagccggattgtaccaaagtag

SEQ ID NO: 527483 - DNA, 648 bp, Stenotrophomonas maltophilia
atggaggcctacgcggccgatggcacaccggtgcggttggcattggagctgccgaccgacgagaacgccgcgctggcgacctatacggcgtctgccggcacagccgaggcgcgcgctgcattgcgtggcacgacgtattggaacgtccgcagccggatgcatgacggccgtcgcagcgaggacatgcttgagctgatcgaggcggtacgcgtgctgcgcagccaagggcgcgacgtgcaggtgttcggctttgatcgcatgcttcccgccaacatggccggcactggtacgcgtgaccgggtgatggccgaagaagtaagagcacgcgcgcgggcgctgccgaagaacgggcggctgctggtgctgaccggtaacgtacatggcatgcgtacgcagccgaagatgattgcgtacccgccgatgacggcactgctgaaggatctggacctttacaacgtgcgtatcgaggcgcgtggcggggaaggctggggctgcacggcacctcaacgctttggtgtacgtccgctgcccagttacaacggtgagtcgcccaggcgacacactgctggtgaccgcagttatgacctgcaggtatggctgccgcgcttcagcgtggcgcggctgctggacagcgattctgtctggtga

SEQ ID NO: 527484 - DNA, 351 bp, Stenotrophomonas maltophilia
gtgttgaacctggaagtcgtgatcaatctcgtccatacgagcgtggtcgtctcgctgccggattgggccgcctactcgtactcagaggaggtgggggacagtgagaattacggaccgccgaagtactcagcctaccaactcgcgccaggcgcggaagcccatgccacgcagttccagcacaacattttcgaaagcaaccaaccgtacgcccggcgactgcacgtgctggccgtcaagcgctgcagcgtggagtggtactgctacgcctctacccggacgttgagcgcaaatcgcaaagccgcggaagcgggcattcgaaagatcatggagagcgtgacgttcgcggactga

SEQ ID NO: 527485 - DNA, 1956 bp, Stenotrophomonas maltophilia
atgccaattgtatttaaacgacttgcatccttgggattagccaaggcaccagcaatcattgagttcgactctctagcaaacttagtgcggggcccgagcgacacagggaagtcctacatccgagattgtctgtggtatctcttaggtggagacaaggtacccaaaccgatccccgagagttccggctacgagtcactgatcctggctttcgcgagcggagacgtggactatctaatcgtgcgggggctacggggaggctcggcccgaattctcacgactgaagttcaaccagagcgcatcgcgatttcgtcggctgatgacgctgcggccgcagcgcctattccgcaagcagtggtggatttggagcaaatctcaccaaatgcgcaggcttggctccccggggcacgaaactactacgacgctcttgagtcggatccttctaagttaattgtttctctaagcggagccgagggaaagcaaattctccggtctgcaagcaaccgcggccctgttaccggcggcgatgtccggcattggttcttgcttgctcaaacggcaatgattagtgatgagccccccagcggtcagaactacactgagaagcctcagcgattggcggcgctaagcctcttcgttacaggaatcgatgactcggccgtagttctcgctccgagcagtcgagagcagaacgtactgcaaggccaagttcaggcgactgaggattcgctaaaacgtgtcgcatcgcttattccctccgatataaacaaacctcaagttgcagacgcgatcgaacgtattgacgcgactctagaggaaatttcgaagcagaacgaatcgcgatctcatcagctaaagcatgttcgcagcgagttggctagcctttccacgaagcttcgtgatgctaagggagtagccgaacattctcgaactatgcttgcccgcttcgaattgttggatgccaagtacggaagcgacgtggcccgcctgaaggcgattgccgaaggggtgagcctgtttgccgcttatgacgagactccttgtcctctatgtctcactccgctttctcagcagacggttggcccgagcgagctcccggcacagcaccttgtagcgcttagagcggaggcggcgaaaatcgttgctctccgcgcaggactgcaagaatcgatacgttctgaacaggctcgcaatgaggcagcaaagtcgagagtggcaggcatttctggccagctcacgctgatagagcgccgcgaatcggcgcttcttgccgctgccaagggcggggatggagctagtccgaggttgttagccgtgcggcgcagtgaatactcgtcgctattggacgcgtttgacgaatgtgaacggctggcgtccgagttggagcgtttaaagagcaagaggcgatctcgcactatgaaaactcagcgtgaatcaactcaagcgtcgaatgaaatatcaaaggttgtaaggcagttgctaaatgagtggggtttcgaggaggttgagtctgtcgctttcgacctggaattgggcgacattcgtgtgaatcatcgtgcccgcctggagtacggtgccggcactcgctcgatatatctgatggcattcgcgatcgctgtcatgcagtactcgcttagctccggatttccccatcttggcactctcgtgatcgactcccctcttaaggcctatgcagatagggaaggtccaattggcgtcgatcctgtcacggtcgctcaaaagttctattcatggctggcggattggcaagggcctggccaaatcaccatcctggagaatgagaagattgcaccagacacggcgctcagattcaatgcgattcagttcactcgtcgaaacgacgttggcagggccggcttctacttggttagcgccgaccccctcaagcctggcgatgattcacaggccggggtggcgcaaccgcaaggacgcccgtaa

SEQ ID NO: 527486 - DNA, 1182 bp, Stenotrophomonas maltophilia
atggcgggcattttgagcatgatcggaaccgttctatgcctgagcatgagggatatacggctccggttccttgcgagagctccctatctacctgtaccgttcgggttcggggcgggggtgaaagcgatggcaggaccaaagccaaatcgaaaaactattcgactggggtcgttcgacccggcgatgcagatccgcggcttcggcgataagcagtgggagcagtttatcgaggacgcctgtcacagaatgttggacgggtccgtgaaactgtatgcgcaagtgaagcgcatcggagggtcgggtgatggaggcagagacatcgaggctcggctcgtcgcgggatctatcttagtggaaagtcgctgggacctttttcaggccaagcattacaaccatccccttcagcccaaagaccttttccctgaaattgcaaaatttttcctcaatcttgcctcaaaaacttacccagctccgagacactactatgtttgttctccgcaaaatgcggggcctgatctccacaattttcttggcaatccggccaatttcaaatcagagctactgaaatcttggaaagacgggacgagggggctgcaaactctcaaggcaaaattttcgcccgatgtcgagaagcttgtatctgcgttcaatttctctgtgttccgggagttcctgtcccgcgacctgctcgaagagcacgcgcgcgatgaggcggcatactgcaagctcttccacattgagatggagcgtggtgacgatccttccgcccccaccactcccagttccgatgaggagacatacgtctcggaacttctgaaagcctactcagaaaacagtccgtcgctcttggacgtatcgtccgtaggatcgtcgaagtatggggatcattttgacgcgtgtagatctgagttctactgcgcggagggattgaagagattcagtcgcgacctttttgttgaagacgaattcggcgcgttgttgaaaatggtacacagcggactcaaagcagtagtcgctgatccagacctgatacgggggctcgacaggctaaaagctgctcagcaacgcgcgtccgttctcaacgtgtccgatagcaagctggccaatcggatccgaggtggggacctgccgggaacctgtcatcaccttgcaaatgagaagaagataaagtgggtaaagtga

SEQ ID NO: 527487 - DNA, 1119 bp, Stenotrophomonas maltophilia
atgccgtccaccacccaagctccaccgttcgattacatcaccgcccagcactaccgctcgattcttgaggccgatttcgcggagatgcagacctgcctgcaggctcgcgcatggaaggccgctatggtgatggctggtagcctgattgaggcaattcttgtggagcatctggagtggctgtcgccgccaagcgaggaagatcgactgcggaagatcatgctcgctgacgcaatcacgcggtgcgaatcgctaggggagattagtgagaccgccgcgaaactctgcagtgccgtgaaggactatcggaaccttattcaccctggaaaagtcgtgcgggatagcgtggcgccgccggaccagaacaacgcggtgatcgtgaccgcgcttgttggaaaaatcacgcaggaagttgcggcgaagcgcaacgctcgcagcggctttactgcggagcagctactccgaaaagtagagttggatacgggggctatcgcaattgtgccccacctcctgcgtcagatgcggacgcaggagaaggctcgattgcttctggaggtgctgccagctgcctacgctaggcacagtacgtatgaagacttcgatttcgatgaggcggttcttacgcgtatctcggcggcctatcgtctcacgctcagcgattcccccgaacatgctgaagcggcggctaggaaattctacaatctgatggtgagcggcgactcaacggagatattccgacatagccgcgcgttcttccgcgctaatgagatccaacatcttgaaccccatgaaagagccgcagtcgtcgactacctgatcgatagcgtcgcgcccctccaagatgaggatgacttctcccaaacgacaggtattggtccatttctcaatgtaagcaacttcgcgcagtacctggcacctgtgctgcgccatgtgcttaccacccggaattcgaaagcagcgaggaaccacctcagcgtcgagctcataagtcttgctgaggatgtcaagccggaagcgaagaagcacctcgagcgccttgcgaagcttcatgagaagcgcggcaacacggagttcgcggcggagctgacggagttcgccggctgggtcgacttccccttctga

SEQ ID NO: 527488 - DNA, 1353 bp, Stenotrophomonas maltophilia
gtgaagcctagcattcggcggtttacttggtcgtccttgcctccacttcaactaaagggtgtcggaacgtcgcgagttgaatctttggagcactacgttctacggcaagcgtggacagtcggcgtgacaatgaccaatatgatgtcgatggttggtccagtcattgagaatggacgtagggggcaggtcatgggctcgggcaagtattgcggtcccagtcgcgactttagtcaccgtatcagcatgctcaagatgctgaccgggcaagacgacttgcagtgcggcacgttctgggttctggaggacgtgctggcaacttacggaggaggtcgagacacaacgcgccgccgctggtgcccggtgtgctatcgcgattgggacgacgatctctcatatgagccgctatcgtggatcgtcgacattcaagttgagtgcgatctgcacaaatgtaggctcgaaaccacctgttcaaggtgtggcgccgaccagccgagctcaacagactaccagcggcgcaaatgttgccacaaatgcaagcaaccgctgtctggtaagggagtcgccgcagcggttactggcgatgaagcttggggtcagcagcaactggcatccatgatcgctctttgcgcgacgccgtcacagccgcagatccctctcgagaactatattcgattcgttgagcggctcgttgacggacatccgatgaggcgctcatatcccaatgctctcaaggcggagttctaccgcgctaccaagaacttgaccagagggcggacgaccattcgtgccattgttaatctctgcgctctccagtccatttcagcacgtgacatgttgctaagcccggatgcggcggcttcggagccgctgttggacctttggtttaactacgcgactttaaagctgcctgttgggaagcatgcggagcggcttgatcgctgtgccaaatgcttctcagatgttctaaaagcatccaaggacgaccactatgtgccgcagatgaaagttgtacttcgacgcttcaggctcaataggcagttgctaaaagagatgcaccttgacgtctacgaggagtacaggttgagatacgaaaggcaaggtccgtacagtcagagagttcactcgaacagggcaatggatctcgcgctacagatggttgaaggaggctcgcagtgggtgggatcccactccaaacttcatcaagcagccaagcagatcggccagcaatgcaatgtatccctggatgtgggattctcggtcctgctcggagcacgaaacgtgctgaaggcgctgcgtgagaatcgcttgcgaaaacaaccgtctggtagctggcgaccacatagcgttgcctag

SEQ ID NO: 527489 - DNA, 1023 bp, Stenotrophomonas maltophilia
atgaagcttgtccagcactcagcatacagagggccgcgagatcgactgagggcaaccctagacaatcacagaccagggcatatcgtcttcgtcatcggtccgtccggtgtagggaagaccacgatgcgccggagcgttatgcgtgagatgtttgggaaccccaacctgtgggggaagggaaaagttcctgcaatcgagacgttcgcatgcttgccagttggaggatacttcagttcacgatatctagcccgcgagttattgcaagagcttaatgcgcccacgcttgtttgggcgttagcggacggatcatctcggtcaagtccccttttcgacattcaagccgaagtccgcgacagagaccttcagctgggtcggtaccaacgcaggctaaccgaagcagagtgttggtcgtctgtaaggcggaccatggttgcccgtgactgcaagtacgtcgctatcgatcaaatttcagcacttctggtgaatcacaaaggaaagtcacctgcggaccaaatactgcacttgatggcgttagccgagtgcactggctcaatgctcattatgactggaattcataaggctgttccactctggtcgatcaattccgagcttcgccgaagtgtgacgtccatctgggttgcgccatatagcgacagaagaaaggaagaccgggctccattcttgcgtctcctttcatcgctaagcgaaaggcacaagttctcgaaacaggacctattgattcgaatggcgggagatctactggtcgcgacgggaggtgtctacggagaggtagttcagcttctgtcgcgagctgcagatgcggctgggcaggaaggaggcgagcggatccttaagcgccacatagaggcttcttactattcagacggcgatcttgccaacctttggcgagatatcgacgattttgaggatgcgatggaggctggaagcgtcacggccagggcggaacagcttaagtctagttgggtgccctcctaccgtggggaggtgcaccgtgaagcctag

SEQ ID NO: 527490 - DNA, 249 bp, Stenotrophomonas maltophilia
atgcaggcgttgcgaatttcgccacgctcggccacgaccgcattccagtcagccgcgaacgcggtgccgatccagaaaccaagcgctgccccgcagaccatgaaaatgacgaagggaaccagccaccaatcgaacttacgcacggccggcctcgtgctgttcggcgtagcgagcggcggccagcagatcgccgcgcttggtggcggcaatctccgcctctgcgagtgcgatgacctcggcttcgcgtga

SEQ ID NO: 527491 - DNA, 135 bp, Stenotrophomonas maltophilia
atggccgttgatcaggtccgcgagttcctcagcgatccgcttgttgtcgccgtgctgggcggcgtgctgcttaccggcctctattggtcgctggtgttcgccctgcgctgcaagggtggtcgcaatggtcggtga

SEQ ID NO: 527492 - DNA, 129 bp, Stenotrophomonas maltophilia
atgaacaattcactgtcggatgtgggatcaatctcagtgctggtacgtgatttctacggccaaccgctggtcatcggccgcaccacgctagacggtgggtggtcgctgtccgccacccacgccacctaa

SEQ ID NO: 527493 - DNA, 129 bp, Stenotrophomonas maltophilia
atggaaatcatcatcgtcaacctggccttccgcgcacaccagatcggcccgttcttcgtcatcagtggggaagtcgaagtcttggccgcgcacgcccgcgagctgcccgacaagggcgcggaatcatga

SEQ ID NO: 527494 - DNA, 357 bp, Stenotrophomonas maltophilia
atggaactgaaggacttcattgcggggacgctggtgcagatcgtggaaggcgtgcacgccgcgcagaagcaggtcgtggagcttgggggcaacgtgaacccctactaccgaaaagaaactccaggctttggaaccaactacaaaccttctgaggtccagaatgtctcgttcgacgtggcgatcacggcacaggaaaacagcgcgagtaaggagggggtgggggtggttgtcgtgggtattgcgctgggcaaacggaacgagtcatccgacagctcgacgagcgtaagtcgggttgcctttactgttccgctgggactaccgacaggtctgaactcagcggatgcgaaacagcgatag

SEQ ID NO: 527495 - DNA, 768 bp, Stenotrophomonas maltophilia
atgcaaactgacgcgcggattcaagaactagacgagttcaagggcatacttaagtcctatttgcagagcggtgaggacacacatcggtcagcgctcaatcgcaaaattccacgcattaagaaactgcttgcggaggcgaattgctatttctacatgacaatcactccacccccagcagtcggagggctgatcgcaaggaaccaagatcccttcgatctgctcttcaatccgccctatggccgttcgccagccccgctcatcgtcgatgcactcgataaggcaattggcgtgtttgaagcggagcctgatacgaccgctgcgaccgcatccgcagacaaagcggctgcggcctcaagttccgtagaacctgtgaaacagggtcagctctttatcgccatgccgattaatccgagcgaccacaccctagtcgacgtattggagagtattcagcaagctgccagcgcatgcaggctgactgcctataggatcgacgaacagcaatccaatgagcgcatcactgacagaatcttagaggggattcgagaatcagaatacatagtggccgatctgaccaacgcacggccaaacgtgttctacgaggctggatacgctctcggaaaaggaaagctgcctatctacattgcgcgcgacggtactcatcttgagtttgatttgaaggactaccccgtgatctttttcaagaaccagcgtgaattgcgggaaggcttgattgccaggctcactgggctcatgcaacgaaagaactag

SEQ ID NO: 527496 - DNA, 600 bp, Stenotrophomonas maltophilia
atgaacaaaattccttccgccctgatcgccgccgctctgcatgtggcccccaagaatgacgttcgcttctacttgaatggcgtgctgattgagtcgcacgccgatggtgcgatcatcgttgctacagacggccaccgcatgcttgtggtgcgtaccagcctgccgtgggacattggcaagatcatcgtgccgcgcaatgcgtgcgagctggtcgccaagatgaagggcgatgtctatttcagcgccgtgggcgatgccagccggttcaaggcggagcgcggaggccaggccattgagtttgctgccgttgatggaacctacccggactggcgtgctgtggtgtccaagccgaacgaactcaagctgtccggatttgcgcctgccgtcctcgaaggcgtagtgaaggcggccggtgtaattcgcaaggcattcggcggcaaggccacttcactgattccggtgactggcggcgacgtggcggccatgttcggtattggcggcatcaccgatccgagcatcaggtgcgcgtctttgatcgtcatgccaatgcgcgactcgtcatacccggaagccctgtgtagcgacgcgctccgcgcttaa

SEQ ID NO: 527497 - DNA, 417 bp, Stenotrophomonas maltophilia
atgaagcggcaaacgggttttactttgatcgaactgatgatcgtcattgcgatcatcgccatccttgcggcagtcgcattgatcgcctatcgcgattacaccgtacgggcgcgggtagccgaaggcattgcattgaccgcgccgttcaagatagcggtggaggagagcgtcgtggagcatggcaatcttgatgcgcgtgcctgcgcggacgtgccgaccatgcctgccgctaccgagaatgttgccgctctttcatgcgtcggcaacggtgtgctgaaagtacagacgactgcggcagcagggagcgtctctctggatttcactccgaccctcagcggcgacgggatgctgctctgggactgccagatgagggcgggcaggcagcggcaagtgccggctatctgtcgcggtccctga

SEQ ID NO: 527498 - DNA, 1110 bp, Stenotrophomonas maltophilia
atggccctcatgttcccgcggctcgcccgcaatttcgggaaaaacgggtacttcccgaccgatgaacccacgctcgaaagagccctcaacgcactgatgcccagcgatgggccgatgtgcatcctcgatccctgcgcaggcgaaggcgtggcgatcgccgaagccgcccacgccctcgggcgcgagcaggccaaggcgttcgcagtcgagttcgacgccgagcgggcacgccatgcccgcggcctggtcgatcactgcctgcacgcggacctgatggatacgatggtctccaagcagtccttcgggttgctctggctgaatccaccgtatggcgacctgtccaaggacgtcaacggcaacatcggataccagggccagggccgtgcccgcctcgaaaagctgttctatcagcgttcgctgtcgctgttgcagtacggcggcgtgctggttttcatcgtccccggctacgtgctcgacgcggaattggtcggttggttgacacgccactacacggacctgcggatctaccgagcggtggaaacgcagttcaagcaggtggtgatcttcggccgtagggtgcgccagcgcgaactggtacccgatggcgtcaaggccatgcgcaatctgctgctgcaggttgggcaaggcgagatcgaagccgaggagctgccgagcgattggccgttcctgccgtacatcgtccccgccagtccggccgagccggagcatttcttccgcgtgacgatggagcccgagcagttcgccgacgaggttggcaggctgcaaggcctctggccgtcgctggacacgcacctgggggccgcgcagcagtcgctgcgtcctccggcgcgggccttgtcccactggcatctcgccctggctctggccgcaggcgcaatttcgggcgtcgtgcgctccaagaccgggcgcgtgctcgtcgtcaaaggtgacacccacaaggacaagacgctccagcgggaattcaccgaacgcgaagacggctccatcgccgagacccgcatcctcaccgacaagttcgttcccgtgatccgcgcgtgggacatgacgcctgactccccgacacagggcgaggtgttgaccatccgctga

SEQ ID NO: 527499 - DNA, 2280 bp, Stenotrophomonas maltophilia
atgtccctcgatctcgataccaccgtcaacgatgcaacgcctgtacagggcgaactgctcgatgcggaatcttcccctctgaccctgagccttcaggattttgtcggcgagttcggcgacgaactgctcgactcgctcaaccgcgccaacccgccggtctataccggccagccgcaggcgcatcgccaactcgtcgtcgccagtctcaagcgcaagctgttccaggctcaggccgaagtcgtccatgccgccgccgagctgctgatcgatcgtggcgaacgcgccgcgatcgtcaatggcgaaatgggctgcggcaagacgaccgtcggcatcgccacggccgccgttctcaacgctgaaggctaccgccgcaccctggtcctttcgccgccgcaccttgtttacaagtggcggcgggagatccaggagacggtggcgggcgccagggtctgggtgctcaacggcccggataccctggtcaagctcatcaagctgcgcgagcagttgggtgtgcagcccacgggccaggagtttttcatcctgggccgcgtcaggatgcggatggggttccattggaagccggtcttcacccagcggcgcacccgccacggcgacgtggcggcctgcccggactgcggcacgctcatcaccgacctcgacggcgagccggtcaacccgatcgggctcgaagccgaggagtcccgcaggaagtgcagccactgcgccgcgcccctgtggacgctgatccgcccgcgcagcctgtccggcagcgaccagtcctcggtcgtcctcaaagccttgaagcgcatcccgaccatcggggaagtcaccgcgcagaagttgatgcagaagttcggtgacggcttcctggcctcgatgctgggtgacaacatccatgagttcatcaacctcatggatggcaacggcgagctggtgttttccgaccgtcaggccacgcgcatggaacgtgcgatggccaacatggagtttggctttggcgagggcggctaccaaccgtccgaattcatcaaacgctacctgccgcaaggcacgttcgacctgctcatcgccgacgaggcgcacgagtacaagaacggtggcagtgcccagggccaggccatgggcgtgctggcggcgaaggctcgcaagaccttgctgctgaccggcacgctaatgggcggctacggcgatgatctgttctacctgctgttccgggcactgccaggacggatgatcgaagacggctaccgcccgaccacgagcggcagcatgacctcggctgcgatggcgttcatgcgcgatcacggcgtcctcaaggacatctactccgagagcgccggcacggcgcacaagacggccaagggcaccaaggtatcggtgcgcaccgtcaaggctcccggcttcggcccgaaaggcgtcttgcgctgcatcctgccgttcacgatctttctcaagctcaaggacatcggtggcaacgtcctgccgccgtatgacgaggagtttcgtgaagtccagatggacgtggcgcaagctgcggcctaccgcgatttggcgggtcggctgaccgcagagctgaaacaggctctggcgcgacgcgatacgaccttgctgggggtggtgctcaacgtgctgctggcctggccggattgctgcttccggtcggagaccgtggtgcatccgcgcacgcgcaacaccttggcgtttgtcccggctcagttcaatgagttcgagatcagccccaaggagcgtgagctgatcgatatctgcaaagcggagaaggaacagggccgcaacgttctggcctacacggtctataccggcacgcgcgacaccacgtcgcgcctgaaggggctgctggagcaggaaggcttcaaggtggcggtactgcgcgcaagcgtggatgccagccgccgagaagactggatcgccgagcaactggaccgtggcatcgacgtgctcgtcaccaatcccgagctggtcaagacgggactggatttgttggagttcccgacgattgtgttcatgcaaagtggctacaacgtgtactcgctccaacaggcagcacgccgctcctggcgcatcgggcagaaacagcccgtgcgcgtgatctacctcggctatgccggttcctcgcagatgacctgcctggaactgatggccaagaagatcatggtctcgcagtccacctcgggcgacgtgcccgaatcggggctggatgttctgaatcaggacggtgattccgtcgaggtcgcactggcccggcaattggtcaccgcctga

SEQ ID NO: 527500 - DNA, 642 bp, Stenotrophomonas maltophilia; identical to SEQ ID NO: 340619

SEQ ID NO: 527501 - DNA, 384 bp, Stenotrophomonas maltophilia
atgttggctccgatctggctgcgcgccgcgcatcgcggcgtgcccacttttctcgtgactgccctgctgctggggcagtcttcgatggcgttggccgaatccccggcacagcgccaggagctgatcgcggcgctgcgtcagctcgacgcgctggagcgcaccgtcacgggcggcgctgcacacgcgccgatccagccgggcgagcgctaccacttcgactacccgcggctcctggctgacctggcgcgcatgcgcgccggcatccagttccacctgacgccatcacgcgcccagccacgcgacccctccgaactgggcggcgactaccgcgcggagcgggccgccccgccatcgctgccgacgactgcgcagggcaggccatga

SEQ ID NO: 527502 - DNA, 357 bp, Stenotrophomonas maltophilia
atgaacccgtcgcatgccagctggctgctcaaccggcgcacgacgaaggcgctgctgtggacggtgttgctcgttaccgccgctgtgggcgccaacgtcgtcggcatttacctcgtcggcagcgtcgccagctgggagcgatggttgacggctacggcgggttacttcatggcgtggcgactgtgcctgtacggtgcgaccgcctacggctgggtctggatgcgccgccggctgctggcgcgtgaggcccaacgcggggcggatagacaggcgcggcgtcgcctggtgcgcagcgagatcgccggcgtcgccgccattgtggcgttggaagccagcctgttgatgcaggccgcttga

SEQ ID NO: 527503 - DNA, 375 bp, Stenotrophomonas maltophilia
atgagcaccacgacccgcatcagcacagcagaacgcctcggccgtagctttggccgtggatggcgcgcctatgtgcgtggcgaacggcgggcgtcgaactggttggtatccaagggtgtgccggtagctggtgccaccgtgctgttgtggttggtcaagctggtcgtgctcggtgtactgctctattccgcgttctggctggcactgctgttggtttgtgtcgtggctgtgggatgggcagcaaatcagagccattcagacgaagagttccatttgcagtttcctaccaccttggaagaacttcgagagacaccgggttatgacccgaatctctacaacgacacatctcatgagatgtacaaggatgatgactga

SEQ ID NO: 527504 - DNA, 1128 bp, Stenotrophomonas maltophilia; identical to SEQ ID NO: 340616

SEQ ID NO: 527505 - DNA, 435 bp, Stenotrophomonas maltophilia
atggaaaataatttggaaaacctgaccattggcgtttttgccaaggcggccggggtcaacgtggagacaatccgcttctatcagcgcaagggcctgttgccggaaccggacaagccttacggcagcatccgccgctatggggaggcggacgtggttcgggtgaaattcgtgaaatcggcacagcggctggggttcagtctggacgagattgccgagctgttgcggctcgacgatggcacccactgcgaggaggccagcagcctggccgagcacaagctccaagacgtgcgcgagaagatggccgatttggcgcgcatggaggctgtgctgtctgacctggtgtgcgcctgccattcgcggcaggggaatgtttcgtgtccgctgattgcgtcgttgcaaggtggaacgagcttggcaggggcttccacagcttag

SEQ ID NO: 527506 - DNA, 351 bp, Stenotrophomonas maltophilia; identical to SEQ ID NO: 10325

SEQ ID NO: 527507 - DNA, 276 bp, Stenotrophomonas maltophilia; identical to SEQ ID NO: 121765

SEQ ID NO: 527508 - DNA, 1551 bp, Stenotrophomonas maltophilia
gtgtccgcgctcgtagcagcagtgggcgcccttggttacggtgctacgcctacagacgaatttgaaagcaaagagcgcagtgttgaacagccaggactccttggcaaagccgcccagtggctgagcggcgagcgcgcggtggagaaaccggcaggtcagctgcatgtggcgatcatcggtactggcggcgccgctgtggcagcagcgctgaaggcagctgaaaacggtgcccgtgtcaccctgatcgagcggggaactatcggcggcacctgcgtcaacgtgggctgcgtcccttctaagatcatgattcgggcagcgcatatcgctcatctgcgacgcgaaagtccttttgacgtgggactgtcggcaacgcccccagttgtcctgcgtgaccgtctgctggcgcaacagcaggcccgtgtggacgagctgcgtcatgctaaatatgaaagcatcctcgaaagcaatccgtcgatcaatctggtgcgaggcagcgcccgattcaaggatggccaaacgcttatcgtggaagcggcagaaggtgacactcgcgaagtggccttcgatcgctgtctcattgccactggtgcaagcgctgccatcccgccgttgcctggtcttgcaggaacgccatattggacgtccaccgaagccctggttagcgaagccattcctaaacggctggcagtaattggcgcctcggtcgtagcactggaactggcacaagcgtttgcgcgcttgggcagcgaggtgacggtcctggcccggcgcaccttgtttgccagtgacgaccctgccattggcgaggccgtgactgcagctttccgtgcggaaggcatcacggtgctgacacagacgcaggcgagtgccgtgacctattgcgaccgccaattcatcctgacgaccgcgcagggcgagttaaaggtggatcaattgcttgttgccaccggccgcacgccaaataccgcaagcctgaatctcgagcgcgcaggtgtgacgtttgactcgcaacatcgcatcctgatcgatcaaggcatgcgcacgagtgcttcgaacatttacgcagctggcgactgcactgaccagcctcagtacgtctacgttgcagccgcggctggtacccgggctggcattaatatgaccggcggcgacgtaaagctcgatctcgacgccatgccggcagtcgtgttcaccgatccgcaagttgccacggtaggctacagtgaagcagaggcccagcgcattggtctgcaaaccgaaagccgtacgctcacgctcgacaatgtgccgcgtgcactcgccaacttcgatacccgcggctttatcaagcttgttgctgaggcagggtccggacgcattctcggagtccaggctgtgacaccggaagcaggcgaaatcatccagactgccgcgattgccatccgggcccgcatgaccgtccaggatctggctaaccagcttttcccttacctcaccatggttgaaggtctcaaactggtggcacagactttttcgaaggatgtgacacagctatcgtgctgtgccggctaa

SEQ ID NO: 527509 - DNA, 654 bp, Stenotrophomonas maltophilia; identical to SEQ ID NO: 121763

SEQ ID NO: 527510 - DNA, 639 bp, Stenotrophomonas maltophilia; identical to SEQ ID NO: 152722

SEQ ID NO: 527511 - DNA, 639 bp, Stenotrophomonas maltophilia; identical to SEQ ID NO: 152722

SEQ ID NO: 527512 - DNA, 348 bp, Stenotrophomonas maltophilia; identical to SEQ ID NO: 121761

SEQ ID NO: 527513 - DNA, 321 bp, Stenotrophomonas maltophilia
atgcacaaaagcaccttggataggcaagtggccgatatccagaacttggagcatcaacttaacgacgcctcggcaaaaaaccgggagcggaagcatgaaagcaaacaattggcggataatattgccgcactcgcaagccagaaagcagatgccgataagcaggtggccgtactatcccaagcattagaggtcaccaaaacggatctgaaagcctctcagaatagagcggaagttctgtccgatgagaacaagttgattcttcaggaaaaagcggtgattcaggggcagtttaagcagcttcaggagtcactgtcgcgataa

SEQ ID NO: 527514 - DNA, 435 bp, Stenotrophomonas maltophilia; identical to SEQ ID NO: 157055

SEQ ID NO: 527515 - DNA, 927 bp, Stenotrophomonas maltophilia
atgagccagccccgtaagccccgctaccgcacaaccaactggaaacagtacaacgcagctctcaaggctcgcggttccttgtccatttggctggacaagcgcatggcgtggtttgccgctgccagcggcaaacgcggacgcagtccgaagttctctgatgccgctattcaattttgtttgacgctcaagaacctgtttggcctggcactcaggcaaacgacgggtttggtggagtctgtgcttcaactgtgtggcctttcttggccagtgccagacttcagtaccttgtgcaggcgacagttagatttgaatgtccagattccgtacacccgcagtaaagcaggcttgcacctgctggtggattcaacaggaatcaagttcctgggtgaaggcgagtggaaatgcaaaaagcatggtcctgagcgccaccgtcaatggcgcaagctgcacatcggcattgacgccaagacactgcagattcgagccatctgtgtgacctcgaacaacgtcagtgacgctgcagtgattcctgatttgctacagcagctgcctggggatgaaacgctagagagtctgacgggggatggtgcatacgacacacagccagcctacgaagctgtcatcaggcgtggtgctatcccaatcattcctccacgcaagaatgctcgaattcgtaggggaagtgtctttgagcaccgcaatgcagccattactgcatgcaggcggctagggcgaagtatctggaagcgctggattggctatcaccgccgaagtttggtggaaaccaagatgaactgcatcaagcgattaggtgaacgagtgatgtctcgcacctttgaacgccaagtgaacgagttgcacatacgagcagccatattaaatcgatttacagaactgggccgtcctcagacggcggccgtggcatag

SEQ ID NO: 527516 - DNA, 219 bp, Stenotrophomonas maltophilia
atgcttgagaacaataagcgcgacccgacactttcgacggttacaagaattgccgaggcattgcatgtgcctgtcggcctgctgttcgttctggctgccgaccaaagcgaactgggtgcgatagacgagcacgtcgccgatcagttaatgcagtctgcgctggcatcactgggagcatcggccaacatgacagcgcaggtgggaggccactatggctaa

SEQ ID NO: 527517 - DNA, 1032 bp, Stenotrophomonas maltophilia
atggctaatgccgaacaactcaaggcgttggtgaaatcccatatcgagcgggatgaccagcatttctattctgttgccatgcaggtcgcggcccgtgaagcgaaggtaggtcacggcaagcttgccgaagaactccgcgacatgatcgacgcggcaaaagcccgtgtctcgccgggtggccccgagggcaaactggtgccgttggcccgtcctcgcggtgagctggcaaacttgctgacggtttcctatccgaagaatcgtctgtcggacatggtgcttgatgcggagatggccgaacaacttggtcgcatcatgaaagagcagaggcatcatttgcgcatccgcgagcatggcctgtcgccgagacgcaaactgctgctggtcgggcctccgggcaccggcaagacgatgaccgcctctgtgttggccggtgaacttggcattccgctgttctccgttcgactggatgcactgatcaccaagttcatgggggagaccgccgccaagctgcgtcaaatattcgatgccatcaatgatgtgcgaggcgtctacttctttgacgaattcgacgccatcggctcacaaagagggctggccaatgacgtgggtgagattcggcgggtactgaacagttttctgcaaatgatcgagagcgaccaatctcatagcttgatcgttgcagcaacgaaccatgttgagatccttgactacgcgctttttcgccgatttgatgacgtgatcgagtatcggctcccgagcgcgccgcaggccaccaagctgatccagtcgcggcttgggaagttcgcgcccaagccctttccgctcaaggccatcacagccaaggcagaaggcttgagctacgcggagatcagacgtgccgtagatgaatccatcaaggaagccgtgatgcacgacgaggagcgcgtaaaagcagatgtgctgacacgtgctttcgatgagcgccgcaaattgaacctcagaatgaacaacaagaaggtcgcaccgagcaatgccggatcaactacaagctaa

SEQ ID NO: 527518 - DNA, 2352 bp, Stenotrophomonas maltophilia
ttgaagcccgctgcagcagaggcggtgcaaggtcagcgagacctgcaactggaaagcgggttgggcttgcaaatccagttttccagccaacctgatgtcgagttggcattcgagagcttggcgaacgaaaccaggaacattgaacttctcagtgttcgccgcgaaggcaaccagaccttcgccaatgtcttcgttcctgatggaaagctggcgcacttcgagaaatacatatccgactatctggaggagaagaaggacagtcgcggtcaagcgcgcgatcaccggaagctgttggatgccatcgaatccatccgaactgcagaaatcagggctctgtggactgacgctcccgaactgctgcctgacgatcttgcgaccgccttctggtgggaggtatggcttccggttcgaggggcggggcagcggcaagtcgttgtagaggacttcaagaagcttgctcgattggcggaatgtgtcgtcagtgacaagcaggtcaattttcccgaacgcacggtgttgttgatgtatgggtcgcagcagcagttctcgcggtcggtgatgacgctgaactgtgtcgctgaacttcgctacgccaaggagacggccgagttcttcgacggcatgggcatcagtgaacaacgggagtgggcggacgacttgctgcatcgcgcccagttgaggccatcaggcgacaccgctccgcgagtctgcttattggattccggcgtgacgcgcgcgcatccgctcttggagccgttgatggatgcgagcgatttgcataccgtggagccggcctggggcgtggatgatgaggccaatcatggcactggcttggcgggcttggctgcctatggcgatctcacagacgccctggcgtctgcggattcgatcaacgtccctcatcggctggagtcagtcaagctgataccggcggaaggtgcgaatgaaggcgatgcgcgccaccatgcttaccttttcatggaaggcgttgcgcggcctgaaatctccgctccgaatcggtcgcgcgtgttcgcttcggcggtgacagcctcggactaccgtgatcgtggtcgtccttcctcgtggtctgctgccgtcgatagccttgctgcggataccgatggggtcggtgaaagcccgcgtctgttcgtgctgtccgccggcaacacgcgcgaccccaatgcatgggcggggtatccagatagcctttccaccaatctcgtgcatgaccctggccaggcatggaacgcgatcacggtgggcgcttttaccgacaagatcgacacggaaggtcatccttccttgaagcccgttgccgaagccggcggcctcagccctttcacgacaacaaccaggacgtgggatcgcgcatggcccttgaaacccgaagtggtgctggaaggaggcaatgcagccaaggatgagctgggggcggtaggcatggccagcctgaacttgttgacgacccataaccagccgttggatcgcttgttcactaccagcaatgccaccagtgccgcatcggcattgtgcgcgggaatggcggcgcagatcatggcggcctatccgcacctccgacctgaaaccgtgcgtgcgttgctggtacattcggcgcaatggagcgaggccatgcgggggatgttcttgcccgcagcgcccaacaaggacgactacgttcacctgattcgccattgcggctggggaaccccggacttgaaccgcgcgctctggagtgcgggagactcgctgaccctactggttgaagacgtggtgcatccttatgcaaaggttcagggcaagggcatcgtgacgcgcgacatgaatctgcactccttgccttggccgaaggatgagttggaggcgttgcaggacacgcccgtcgagatgcgcatcacgctctcctacttcatcgaacccaatccatcagcgcgtggtgttgcatcaaagtatcactacccttcgcatcgcctgcgatttgatgtgcagcgtccgcttgatgcatccaccgagaattttgtcgcacgggtgaatgcggcagcgcagcgcgaggatgagggtgaccctgtgaacccctcagatcccaattggctgttgggcgaacggcagcggcatcgtggttcgctgcatcaggatgtctggaaaggtacggcggctgacttggccagccgtggcttcattgctgtgtatccttcggctgggtggtggcggacacggcctgcgctggaacgttatggcctgccggcgcgatatagcttggtggtatccattcagacccagcagacggacgttgatctttacgctgctatttcccagaaaatccctgtggctaatgttgtggttgtcgatacgtaa

SEQ ID NO: 527519 - DNA, 879 bp, Stenotrophomonas maltophilia
atgaagctcgccatcctgtcccgcaacagctccctgtattccacccgccggctggtcgaggcggcgcgcgcgcgcggccacaccgtgcgcatcctggatccgctgcgctgctacatgcgcatcgccgccgatggtttctcgatgcactacaaggggcggccgatgaccggcgtggacatggtcatcccgcgcatcggtgcctccatcacccgctatggcaccgcggtgctgcgtcagttcgaattgatgggcgcgcgcacgcccaacccgtccgatgcgatcctgcgttcgcgcgacaagctgcgcgcgcaccagttgctggcggccaaggggatcgacatgccggtcacggtgtttggcgacaaccccgatgacactgtcgacctgctctccatgttgggcccgccgccgcacgtggtgaagctcaacgagggtacccaggggcgtggcgtgatcctcaccgagaaggccagtgcttcacgtggcatcgtcgaggccctgcgcgggctgtatgccaatttcctgatgcaggagttcatcggcgaggccaagggcgccgacctgcgctgcttcgtggtcggtgaccaggtggtggcctcgatgcagcggcaggcgccggaaggtgacttccgctccaacctgcacgccggcggcacggcggtggccgccaaggccagccgtgccgagcagcaggtggcggtgcgttcggccaaggcgctgggcctgtcggtatgcggggtggacctgatccgctccgcccgtggcccgctggtgttggaggtcaactccacgccggggctggaagggatcgaagccgcctgtggggtggacgtggcgacacgcatcatcgagcacgtcgagaagcttaaaaagccctga

SEQ ID NO: 527520 - DNA, 600 bp, Stenotrophomonas maltophilia
atgagcatcctcaacgttctgctcactcgtgaccaccttgtcgtcgccgtggataccttggcagaggatgcccgaacaggggcgcattctgcgggggcgaagctgcttctgatccctcagcacaacctggcactggccactcgcggctccacgcagttcttcctccgcatctacgagctagctctgcaagccagtttccgcgcggacttcacgatggagcagctttccgccgagctggggttggtggtggaccaattatggccgaactacgagaaggcagcggccgaggctggcctgccgctagagcagctcgggaccgagttgtcgccgaagaacgggcgaatgatggccacggcgtatgccaagagcgacagtcagcgcccgacccgtgtccagccgatcggcgggcagctggcatcgcccggcgaaccgctccaggcggtgatgccgagcatgtcccagaccgatttaatggcccatgcgcgcctccagtccagctacctcaatgagcagatgggccggcaggtggcgggtggtcggctgctggctgggttcctgcaaaacgggcaggccgtggtcaaggatctaggggcgatctga

SEQ ID NO: 527521 - DNA, 435 bp, Stenotrophomonas maltophilia; identical to SEQ ID NO: 527505

SEQ ID NO: 527522 - DNA, 351 bp, Stenotrophomonas maltophilia; identical to SEQ ID NO: 10325

SEQ ID NO: 527523 - DNA, 276 bp, Stenotrophomonas maltophilia; identical to SEQ ID NO: 121765

SEQ ID NO: 527524 - DNA, 1551 bp, Stenotrophomonas maltophilia; identical to SEQ ID NO: 527508

SEQ ID NO: 527525 - DNA, 654 bp, Stenotrophomonas maltophilia; identical to SEQ ID NO: 121763

SEQ ID NO: 527526 - DNA, 639 bp, Stenotrophomonas maltophilia; identical to SEQ ID NO: 152722

SEQ ID NO: 527527 - DNA, 639 bp, Stenotrophomonas maltophilia; identical to SEQ ID NO: 152722

SEQ ID NO: 527528 - DNA, 348 bp, Stenotrophomonas maltophilia; identical to SEQ ID NO: 121761

SEQ ID NO: 527529 - DNA, 321 bp, Stenotrophomonas maltophilia; identical to SEQ ID NO: 527513

SEQ ID NO: 527530 - DNA, 531 bp, Stenotrophomonas maltophilia
atgtttcttagaacaggaaagtccgcactgctgctggtggcgatcctttcaaagctgggctatcgcgtggtggccgccaccgggcgcccggaacacgccgagtatctgcacagcctgggcgccgccgagatcatcgaccgcgcgcagctttcagaaccgcgcgagcggccggtgagtgccgagcgctgggccggcgtggtcgatgtggcaggcggccctaccctcgtcaacgcccttgccgagacgaagtaccgcggcgcagtggccgcgtgcgggctggcgcagagtgatgagctgcatggctcggtgctgcccttcattctccgcaacgtgacgcttgccggcgtggattcggtgaatgcgccgcaggccgttcgccagcgtgcgtgggaccggcttgccaccgacctggacccgcagaagctcgaaagcaccgtgcagctgattgggcttgccgaggtgctggacgtctacgaccagatcatcccaggcaaggtgcgtgggcggattgtggtggatgtgaatgcctga

SEQ ID NO: 527531 - DNA, 927 bp, Stenotrophomonas maltophilia
gtgcaatccagataccagtcaataccaggccgcgccctccccgctccctcagccgtcctcgccatcgcgctcgcgctttccctgggcgcctgtggatctgaagccgaccgggttcacgcgccttctccatcaatcactgatacggcatcggaacctctgtccgccgccgcgatccggcagggtgctccgttacacgccgccgagaattccgtacttgatcgctacaaccacacagatcgactgcgccccctcattgcggacctcgaatacctgtccggcagcggcgatggcagtgccagcctgatcctgagccgcgtctacagcgaatgcagcggctcgatcgacgccacgctgctcagcgccgcggagattccgcgcgaacgcctcaatgcacttgcgcgcagcagcggatggctgaagcagcgctgtgatggcgtcgccgtcaccgcgcccgaagccatcgaaaggcagcgtcactaccgcgatcttgccgccgaacagggcagtctcgtggcccagatcgaaaagaccgtgctttcgggagcgcttgtcctgaccgacaggaacttctcagtcgaggatcaccggacactggtcgacgcggtcctgatgcaggacgacggcgaagcctacatcgcactcgctggcctgatgggtgacaccgccgccagtcgcacccggcagatgcagcctttcaaggtcggcacgcaggtggatgaagtcgcttggatcctggccggctgccagaaaggagtgccctgtggtaccgactccgccctgctgaaccgcatgtgcgggcaagccggtatgtgtggctatggatcggtcgaggatacctatgccagtggcgtactcaccaacgaagaaatgaacgaggcgcgtacccgcgcttctacgatcatcgcaatgtcaaggaagatgaaatga

SEQ ID NO: 527532 - DNA, 390 bp, Stenotrophomonas maltophilia
atgaacgcatctgtggtacgaaagttgttgctggcaacgttgatggtcccggtggctgttatggctgccaagggcatgggaaaagtgatcaatgccgctgatcgcatctacaaggacctcgccaacgtggtcgatgccagcatcggctccgatctcgggatccggcaggccgccatgttccagatggtgggtgcctaccgcctgtcgcatggccttgcttcggtgaagcgcggcgagacaatcaccttcatctggccggacggctccgccgagaagggactggccgctgatcccttcctgaccactggcatcgagccgattccaggcactcagatgaccaagaaacagatgtccctgcgctgcggctcctgccacaaccagtacaagtga

SEQ ID NO: 527533 - DNA, 255 bp, Stenotrophomonas maltophilia
atgaatcacaaatttccctggtgcgccctcctcattctgttgctctgcgccagcgtcgcgcggatctccaacaccctcctgctcgctgcgggtggcaagtttctcgtagcggcaagtgcagccccgatcgcaagctggggaccccctggatacgggctgctgatcgtcatggggtttcttgcgctggcgtcctggtacttcagggcgagcgcgcaggccgcgcataaggctctgccggcccgcgtcttcatctga

SEQ ID NO: 527534 - DNA, 609 bp, Stenotrophomonas maltophilia
gtgatctcgctggaagacgtgcagttcggctacggcacgcggctggtgctggacatcccgcagttgtgggtcgagcagggcagcagcgtgttgctgcgcggaatcagcggtggcggcaaaagcaccctgctgggcctgctggcgggcgtgctgctgcccggcaagggccgtgtcgaggtggccggccacgcactgcaggacatggggggtgcggcgcgggatcgtttccgtgccgaccagttgggcgtgatcttccagcagttcaatctgctgccgttcctcaccgtgcgcgacaacatcgcgctgggcctgcgcttctcgcgcctgcgcagcgcacgcatcagcgggccgctggatgccgagatcgcccgcctgctgcaggccctgcagctcaatcctgagctgatgcagcggcgggcgggtacgctcagtgtcggccaggcgctcgaccgcgaagcggcgagcgccttcctgcagctgatgtccgcgcagtgccaggcggccggcaccacggtgctggtggtcagccatgacgacagcctgcagacgttgttcgatcgcaccatttcactgtccgagatcaaccaggcaggtgccggccatgcttga

SEQ ID NO: 527535 - DNA, 645 bp, Stenotrophomonas maltophilia
atggccatttcgcgcaggatacaaagcgcgagtatgtcccgatggtgggcgacagcctggctgtcgcttgtgggcgagctggacggtgagcccacctctggcgccaccatcgatcgggtgctggctgctttggaggagcgactgaagcgtaccccatgcaggtcagcgggacttggcaatacgcagtcgcaaccacgtggcatcacctgcaacgtacccgatgcagagcggctttttccctactacgcggccctgcggcgggcagagacgccagcagagcacgatcgccggggccgtcgcttcctggacgcctatgcgacgttgctcaagaatgcaccggatgtcgccctcacgcgaccaagcgaggatgaagcggcagatggcttgttacatgtgctctttccgttcgagatctgggacagaaagctgaacatcccacgccatcaggtgcacttcccgttcgttcctgtgtgcaacctcgttgtcgcccgcgctgcgcgttgcccgggagccgaccagctgcgcaggaagattgggcaggcaggcgatgagagtgaacagcgattgttctgcatcaaggagttctcgacgcgacggctggcggaggaaggtgaatgcgcggaagtggctaccacaagcccctga

SEQ ID NO: 527536 - DNA, 441 bp, Stenotrophomonas maltophilia
atgttcactcgagtatggaagcgtgtactactgaccacgccatggattgttctttacgctgcgtcaaccctttcgggtagccccgccaaagcatcggagcggcacatcgactattcaaaagtcacgaaggctgaaggggcaattgttcgggagcgttccttcaggtatctcgtaatcgccaacaatccatgcctgacaattcagtcctttaggctcggccatccaagcaagcccgatcgcgaaaagttcatctgctcgctcggcgaggcccgctttgatcgcgacttcgctttggtcgacttcaagacactcgatttccacgatgaccgtctggatgtagaagtggaattcactccctcacgaaggggacgcaaggtgatcaggtggtgctccatcgccctgcagcctgattccattggcgatctggtgtgcaatcgatga

SEQ ID NO: 527537 - DNA, 240 bp, Stenotrophomonas maltophilia
atggacgccctgcgcaccatcagggcggtacatgacctcttccgcggtttcgaacaaagggacggaaggatcgcggacaaggtggagaacaacgtcatacaggttgacggtaatctcgtctgcggccgacgcaagctcattcactcgaaccagacgcacccattccacggtgtcgccactcgcacgcaggcgctgcactgcctgtaccaccgatgtatcggcaagcgcctccacgaatag

SEQ ID NO: 527538 - DNA, 243 bp, Stenotrophomonas maltophilia
atggacgggaacggcgaaaagcacgtccccggatgcaaacccaagctcagccagccgcagcgcataagcatcagattgagtgcctcgggcgcacgcgcggggttcaggcacggcgtctggcgctataccctcaacgatgatcagctggtgaagcgcgatacgcgccgcgctgtgttcaatgagcgcaatgatgtgagggaccggcggccagactatcaggtgtcgcaagcgccagttatttga

SEQ ID NO: 527539 - DNA, 1308 bp, Stenotrophomonas maltophilia
atgaaaacagctctattctctctggccgtcgtgctattcagtagcgcatcctggcctgcgcaggcggcatccaagttcattgagattcctgtcggcggatgggatcccggtatgcagattcgtaagcggcacgaggatagcattgtcgactggattcgccgtgtcgacgttcacccagaggcattgtccgacaatgtgatcgaagtggatctcttcgatgcaatcgtgcgattgaagcgcactgcaggcccgcgattgaatgcggctccagacccggtctatgtcccggcgggcacggatgcaggagcagtggccgcgatgccctctgcccggcttcgttggaccggaacgatggcatctacatctacatctacttctacttctacatctaaggcaccgtcttcgtgcgtggatgcggagagagcggttcggatcaccgaggctgctgacggacaactaagggccatctttgacattgggagctttcgatacgaactgcaagaaggtgtgctgattcgaaaggattttcgccggcttccacgcgaggcaccggttcgcgatgtcagcccggatgcactcgatgcggtcagttctgacgacgttgagcaagaggcgaaatcgacagtacgtgtcctgtttggctacggaactacggccctcggcgatgaccgcgaggtggtcttcgcagaaatgcgggaggccgtctgtttagccaacgagagtttctctcatagcggaatcaaggttgaactcgagcgcgccgccaacgtcctttccggctatcaggaaaccggtgttactcagacgcttgacgatctggttgccggaagaagaggcgcactcggcgtcatgcatcaggttcgtgatattgagaaggcagacatcgtgctgatgatcattgataccggtccgtcacggtcggtctgtgggcaatcgcagcgcgtgcttgcgacgaaggaaaccgcattcgcggtagtgcaacggaattgtctcggtgccacgaccagcagccttgcccacgagatcgggcacctgttcggtgcagatcatgagcccgcgaacgccaccgtacgtcccccgagattttcttatggccatggctataaggcgccggaaaatgcgcctggacgatggaggacactgatgtcctatgaatgctccggagcaccatgtggacggataaatctctggtcgtcgcctgacctcagtcataacggtttgcccgcagggacggaagagacccatcacaacgtcagagtgttgaatgagacccgaggggtgattgccaatttctaccccgagccatga

SEQ ID NO: 527540 - DNA, 957 bp, Stenotrophomonas maltophilia
atgaaagaagggaattcaggcgtcgcaaaaggcccgactctgatcaaggttgagagcgtatctgcctacgtcgagcaggtgcgggctatagttcagaacgaagatggtcccgtctggatgcgaggacagtctcaggcagcccacaggctattgccgtctgtcttgcgggaaactattcccctgattggaccgcgaggacaggcactggtaggcaacgagaccttccaagccagtggcgtcatagacaccgggccaaatcctgagcggatgcttgaagattttaagcggagagcgctcccatttataacaagcgtaccgcgcaatgacttcgaatggctgttccttatgcagcaccatggggtccctacccgcctactcgactggaccacgaacgctctggttgcgctctattttgcagtcgatggagttcggagcgcagcgccaagtcaatccgtctcgagcgatccagatgactccgtccaagaatttgacagaaactctgcggccgtgtttctgatgaacccggaaaggatcaatgcagaactgcatgtggacgtgaccacgcctgtggatgtggcgcaggattacgaaacttggcatccgtacacgaggcctatgagtagcgcaagcgagatgagcacgtacgccccactctgcattctagcgccgcaaatctcgccacgaattcgcgcgcaggccggcctattttcactacacggttcaaatttggagccactcgattactacacagtcacgcggcctctaatcaccaagatcctaatccctaatgatgcggcgatcagaattcgccaagaactacacatcctcgggatcaccccgtccttcgtcttcccggacctggacggtgtcgcacgcgaggtgaaggagaacgagctccgggccttcggtcaggagcgcagagtctatctggcgagcttgtcggagcgcgcgagctaa

SEQ ID NO: 527541 - DNA, 240 bp, Stenotrophomonas maltophilia
atggaaaagcaaaagcccggcttcggccgggcttttgtcgtttcggtgtcatgcattcccgggttgccggccagcggtcggtactacccgtggcttcacatgtcagaagggggtggggtcggagcccttttctctgaaaaggatccgaccccggacccctctctggaggagagcccccttgatgttcaagggggcgcgccgacaggcgcggggatcaggtggaatgcgcgaccaaattaa

SEQ ID NO: 527542 - DNA, 2358 bp, Stenotrophomonas maltophilia
atgagcggtcacgatcccgagcagcaggaacgcctgctgcaggcccgcgccaggagcgtccaggcgcagcagcacctggtcgagcaaccgcagggcggtggacacgccaccgaagcggcgcgcctgcgcgagacctatcacgcccgcgagctgggttcgcttgctgatgatgtgtatgcctcggcaaagggcaaaggagaaccgccggtcgggtggacgcgagccagtgccgtgaccgacccggacacgctcaaagcggcgggcatcagccttggggcagccgacctgaagaagctgatgcggccgaacgactcgggtttccgcgcagagatctacattccggacaaaagggtgttcggtgatgacgccaagccggtgctggtgttcaagggatccacgggcgaaatcatcgatccccgggcgaaaggcgggcggcgtgagtccggaggcgaggatttcctcaacaacggacgccagggcgtgggcatgcagagtgactactacgatcgggccatggcactggcgagtcgcttgaagacctccggtacccactttgaactcgccggtcattcgcttggcggcggcatggcctctgccgcttcggcggtgaccggtgtacgtgcgaccaccttcaattcggcgggcctgcatccggccaccgccgatcgctacgcgaaatcccacggattgccggtgttcaacacgcgcgacacggtgcacacctaccagacctcgggtgaagtgctcaacgatgtgcagaacggattgaagcggctcaacgagcatcaccggcagggctttggcctgctggccagcgagaccagccagctgctgcgccagcccggcgtgcagcagatggttacccgcaagctgcaggagatgatgccggccggtgcgcagacggccaccgcccagctggttgaccagctggcgtcgaaatccggggcggaggcattgcgcaatgttccggtggccgcgggcaggatggaactgttgctggatgccaagaccgaagtgaatggaaaggtggtggaccgccgccatcgagaagcgccaagccagcttgccgaatacggtggcccgttggccgaggtgctgatcgcaggtgcgcgtggcatgcgtgccggacgggttgccggtgaacatgtcgagcaggtcggcgcgctggcgggccggggcatgagcctgtccggcgtggccgtcgagcgtgcgtcgaccctgcagggaaatgcgatcggcaccgtggtcgactacggtggaaagagcatgcgggtcggcatcgaaggcggcgcgacggtcattgccaagggacgcgagctgcagggtctggtcgaatcggtcagccaccgcgtgcaggccaagggcagttacggctggaacatcggggccagcgtgctgggtgcgctcggtgccgacgacatggccagacagatgcgcgagcacggtgacgcggcccgcaatcaacacgaaaccaaggcccgtgaagccacccgtgaagcagcggcggatgccggccgcatccgcgccggcggccatcatctgggcggccagctgcagcagggcgtgcatggcgtggccaatgggctgcgcaatggctatgccgtgtacggcgcgactttccacatgggcatgaactggagcagccatcagatcaccgggctgacctcgcaggcgccggccgtgctggccggcaccgtcgggctgggtgcgatggccaacaagggcattgccacgcacctgcccacgccggcactgccgcagaacctggtcaaccttgccaagacgtcgtgggtgatcgggcgcggcagtgcgaccatgggggagtcggtggaccggcatggcatgagcgagacgatgaaccccagtctcgacgcggcaatcgcgagccaggaggcggccgcgcgcaagctgcttggacggccgcatgcgcagctgcaggagggggccgcgaagatgccagcgctgaacgatccggggcacatcgacttccatctgttcaagggcgcgcagaccggcgtgcacggcctcgatgtggcacatggccgcatcccgaacctgcagagcgaccagctggccggggcgttggctgcgcaggccaagcgcgatgggctgcaggccatttcccatgtgctgctcagtgacgaccgcacgcgggcattcgcggtcgacaccccggatctgcaggcggcccaccgccgacatgcgcacgtggacgtggcggccggcatggcccagccgctggccgtgagcacggcgcaggttgacgccctgaacaccggtcgcgaacaggcgacggcggctggattggcccagcaacaggggctggaggcccaggagaatgcccggcggatgggctaa

SEQ ID NO: 527543 - DNA, 402 bp, Stenotrophomonas maltophilia
atgccatggcagaagatcggcgaacttcctgaccagcgattcgtcggcccctacggcatcgaattctggcgtatccacaaaggccaggtcttccaccagggccggctgctgcgcaaggccgacgcggccagtttcgagttcatccccgcacactatttcgtcgcgcgcgatgcgcccgccgcctaccacgccaggacccgcctgcccgcgatcgaccgcgacagcttccgccagcgcggtggttactggcgggacaggcgcaattttttgcgtttgatgggaagtactgatctgcacatcaacggcaacgccgcgcatgcccggcgttgccgtctgcatcggtgcattggcacctgtagagccgagccaacgctcggctgtttttcccgccgaccgcattga

SEQ ID NO: 527544 - DNA, 735 bp, Stenotrophomonas maltophilia
ttgttgagcaacagcagtgttacacgactcggcgagcagctgaagaatggtaatgacgatgccaatacgctcaccgagctagaagcatatcgttcagaattcgtacccgcatacaaccacgtagttcgaatcctgaaagataagcttcttctttcggtcaccgggcgcttcaaatcaacaatttcgatcattgaaaaattgagacgaagcagcagcagacttgctcagattcaagatattgcgggttgccgcgtcgtcgccactacgacaatggagcagcgggagattgccgactctctcagacagtggtttcctgacattaaattcattgatcgcactacacgcccaagtaacggttacagagctatacacgcacttgttcgacatgatggtcgcgttgtcgaaattcaaatcagaacgctcattcagaatttctgggcaagcatctcagagaaggtcgccgatctccatggtcaggaagtcaaatacggaggggggcctccggaattgcagcgccacctcattgacctctcagaagcattcagagtggccgaggatcgcaacgagcagtatgcactgacgcacgtaagcgtggtgcaagcgaagcgttctggcgtctcaaaagacacttggaagaagcttcgcgacgataaatctagcgccaagaagagatatgaaagcgccatgagccacgttagcaagctacttgctagcaagctgcttaagggaatctaa

SEQ ID NO: 527545 - DNA, 1557 bp, Stenotrophomonas maltophilia
atgaccagcaccgaacaacgcgccatcctgcgaagccagatatggaaaatcgccaacgatgtccgcggcgcagtcgatggctgggatttcaagcaatacgtcctcggcaccctgttctatcgcttcatcagtgagaactttgccaattacatcgaggccgacgacgacagtatccagtacgccaagttgcccgacagcgtcatcaccccggacatcaaggacgacgcgatcaagaccaagggctacttcatctaccccagccagctgttcgtcaacgtggccgccagtgccaacaccaacgaaagtttgaacaccgacctggcacgcatctttaccgccgtcgaaagctctgccaatggttatccatcagagcgtgatatcaaaggcctgtttgccgactttgacactaccagcaaccgcctcggcaacaccgtggccgacaaaaatagccgcttggccgccgtcctcaaacgtgtagccgaactcgacttcggcgactttgaaggcaatcacatcgacctgttcggcgatgcctacgagttcctcatctcaaactatgccgccaatgccggcaaatctggcggcgagttcttcaccccgcagaatgtatccaagctgatcgcgcggctggccatgcacaagcaagtcagcgtcaacaagatctacgatccggcctgcggctccggatcgctgttgctgcaggctaagaagcagttcgacgaacacatcatcgaagacgggttctacggtcaggaaatcaaccacaccacgtataacctggcgcggatgaatatgttcctgcacaacatcaactacgacaaattcaacatccagctgggcgatacgttgcggaacccgcatttcggcgacgagaaaccctttgatgccatcgtctccaacccgccgtactcggtgaagtggatcggtagcgacgaccccaccctcatcaacgacgaccgctttgccccggccggagtgctggcacccaagtccaaagccgacttcgccttcgtgctgcatgcgctgcactacctttcggccaagggtcgcgccgccatcgtctgcttccccggtatcttctaccgtggcggggcagagcaaaaaatccgccaatacctggtggacaacaactatgtcgatagcgtcatttctctcgcgccaaacctgttcttcggcaccaccattgctgtgaacattctggtgctctcaaaacacaaggccgacacttccacccagttcatcgacgccagtggccttttcaagaaagaaaccaacaacaacgtgctgctggactcgcacatcaaggaaatcatgtcggtgttcgacagccgcgagaacgtcgatcactttgccaagtcggtgccatttgaggaggtggccgccaaggaatacaacttgtcggtcagcagctatgtcgtagccaaggacaaccgcgaagtagtggacatcgcccagctcaatgccgagctgaaaatcaccgtcgccaggatcgaccagcttcggaaagaaattgatgccatcgtcgcggagattgaaggcgaggagctggaagcatga

SEQ ID NO: 527546 - DNA, 1212 bp, Stenotrophomonas maltophilia
atgagcagcgtgaaatttttggaaaagctgctagacggcgcagaggtgaagtggcgggcgctgggtacccttggcgaactagttcgtggcaacggtttgcaaaagaaagacttcactgaggctggtgtgccggccatccactacggccagatatatacctattatggcctgtccacgactgaaacaaaatcctttgtttcacctgagcttgctaggcagctaaagaaggtaaacaagggcgatgttgtaatcacaaacacaagtgagaaccttgaagatgtaggcaaggcgctggtttatcttggcgaacagcaagcagtcacgggtgggcatgcaagcatactgaaacccggaagacttctgctaggtaagtacttcgcatatttcactcaaacaaaccaatttgcgtctgaaaagagaagatatgcaaagggcgcaaaggtaattgatatttctgccacagatatggcaaaaatctcaattccaatcccctgcccagaagattccgaaaagtcacttgaaatccaaaccgaaatcgtccgtattctggatgccttcaccgagctaaccgccgagctaaccgccgagctaaccgtccgcaaaaggcaatacaactactatcgagatcagttgttgaaatttgaggaaggggatgtggagtggaagacgttgggagatcttgcagagaatcttgattcgatgcgaaagccaataacgagtgggctaagagagtcgggtgatatcccatactacggggcatcgggaattgtcgattacgttaaagactacatctttgattgtgaccttttactcgtctccgaagatggtgcaaatttgttagcgcgaaacaccccaatcgcttttagcatcagcggaaagagctgggtgaacaatcatgctcatgtactgaaattcgaaacatatgctgagcgtaggtatgttgaatattacttgaatagcattgacttaacgccctacatctcaggggcggcgcaaccaaagctaaacaagaagaatcttgaaagcatcagcatcccggatcgctcacctgaagaaaagaaacgaattgtcgcctttctcgacaagttcgatgccctcactaactccattaccgatggtttgccgcgcgaaatagctctgcgccagaagcaatatgagtattaccgcgaccagttgctgagcttctcaaagccggtagccgtggaggcgtga

SEQ ID NO: 527547 - DNA, 1263 bp, Stenotrophomonas maltophilia
atgggaaagacactcaaggaaatcgccctacagctgagtacgcccaagaagattcagaaaacagtccctgaaaaaacgaaggttgttgaagagatcaagcctctcccaaaggttcaactcatctatgccttcaatggcacgggcaagacgcgcctttcacgggaattcaaagaattgtttccgccaataaccggagatgaagacgcacagcgctctgagttgtcgagtaagaaaattctctattacagcgcattcaccgaagatttgttctattgggacaatgacctcgaatttgatgccggagcaaagttgttgatccgtgctaactcattcactcgatgggtgctggaagagcaaggccaagaccagaacatcgttacgaattttcagcgttacaccaacgacaagctgacgccacgatttaatgaagaatataaatttaaagacggcgacgataaagaggtcacagttaaagccttttcggaggttactttctccctggagggcggcaatgatgagcacattggaaatctgaaaatctccaaaggcgaagaaagcaacttcatctggagtattttctacacgctgctcgaacaggcaatttccacgctgaacgatgttcagcctgactacccggaacccaccccatttgacaatctagaatatgttttcattgacgatcctgtcagctctctggatgacaaccacctgattcagttggctgtagacttggctcagatggtcaaatcgaatcaatcaagtatcaagttcatcatcacgacgcataacccacttttcttcaacgtgctttgcaatgaatttggtagcgatgaaaaaaccgaacgctacagctggaaatcaaaatggtttagcaagtcacgcttggaaaaaaatggtgatggcagcctcaatctagtagagcaaccaaacgattctccatttgcctatcacctgcacctgatatcgcagcttgacgaggcgataaagagcggacagattgaaaagtatcacttcaaccttctacgaaatatcctagaaaagacggcgacatttcttgggtacaaaaggtgggaacatcttcttcccgaagcggatgacggcctgcctaatccgcatgcaaaaagaattgtgaacttctcaagtcattcgaagcatgctgccgacgaagttcaaccgctgaagccggaagaaaagacacttctggagaacttggtcaaacacattgtcgagcgacatcgattttggcaggaaaaaaccagatga

SEQ ID NO: 527548 - DNA, 279 bp, Stenotrophomonas maltophilia
atgcgcatgtgcgcgattgcagaaagcaaggatgatgcttatgaaactgcaactggcttcgatggcggcactgattgtgacgttcgctggaatgatgtcgtccggcacggcgagcgcgggggtgccgacccgcccggcagcataacccgctgcgaaccgtttgaagtggagcgttatcgcttccaccagcattgcatcgtgaccatgcccgacgtggacggtgagatcttcctcagcgagtactggatcgacgagtacggcaatccctatctgatgtaa

SEQ ID NO: 527549 - DNA, 1203 bp, Stenotrophomonas maltophilia
atggcgaagatcaagctcaccaagaccgccgtagagtcggcgcaaccccaggccaaggacatcgaactacgggataccgtggtgcccggcttcctgtgcaagattaccccgaagggccgccgggtgttcatgctccagtaccgcacgaactccgggcagccccgcaagccttcgctgggcctgttcggggaactgaccgtggagcaggcccgcgtcatggcgcaggactggctggccgaggttcgccggggcggcgaccccggcggggccaaggccgaggcgcgcaaggcgcccacggtcgaagcgttgtgcaagaagttcatggaggactactccaagaagcgcaacaagcccagcacgcagcgtggctaccaggccgtcatcgaccgctgcatcgtcccgctgatcggccgcaagaaagtgcaggacgtgaagcggcccgacattgccgggctgatggagaagctggcctacaagccggccgaggcgaacaacgccttcggcgtgctgcgcaagatgttcaacctggccgaagtgtggggctaccgcccggacggcacgaacccgtgccgccacgtcccgatgtacccgcccggcgaggaaacccggctcatcgtggacgacgagctggcactgatcttccgccacctggacaagctggaggcggaggcgctggagaactacgtcattccgctggcgatccggttgcaattcgagttcgccggccgccgctccgaaatctgcaccctcgaatgggcgtgggtcgatctggaaaaccggcgcgtggtctggcccgatagcaagaccggcggcctttcaaagcccatgagcgcggaagcctaccggctgttttcgacggcgccgcgccgtgaaggctgcccctatgtcctgccgtcgcccaacgacccgaccaagcacctgacttttggcgagcactacggtggttggtgccgggtgctcaaggcctccggcgtcccgcacgtcggcacgcacggcatccgccaccgctccacgaccgacattgccaattcgggcgtgccgaccaaggtaggcatgaagctgacggggcacaagaccgtggcgatgttcatgcactacgtccacaccgaggacaagccggtgcgcgatgcggccgaactggtggcgagccgtcggcaggccatcacgggcgcacggcaccagccccaagaggcgacggcatga

SEQ ID NO: 527550 - DNA, 423 bp, Stenotrophomonas maltophilia; identical to SEQ ID NO: 347812

SEQ ID NO: 527551 - DNA, 306 bp, Stenotrophomonas maltophilia
gtggcggctcgatactcattggcgaaggcgttgaagacggtcaggaaggcgcgtggcttgagccaggaagccttctctgacgtgtctagccgtacctacatgagtaccctggagcgcgacctgaaaagcccgaccttgcacaagctgtccgaactgtgcgaggtgatggagatccacccgcttacgctgctgacgctggcctatgcgggcgacagcccgcgcaaggccgacgagctcctggcgcaggtgcgccaggagctagcggtggtgttgagcgagcgcgacgcggcgaagccgcgtgcgtga

SEQ ID NO: 527552 - DNA, 777 bp, Stenotrophomonas maltophilia; identical to SEQ ID NO: 347814

SEQ ID NO: 527553 - DNA, 564 bp, Stenotrophomonas maltophilia; identical to SEQ ID NO: 347815

SEQ ID NO: 527554 - DNA, 726 bp, Stenotrophomonas maltophilia; identical to SEQ ID NO: 82559

SEQ ID NO: 527555 - DNA, 4053 bp, Stenotrophomonas maltophilia
atgaaacgcatccgcaaggcccaggccacgctgaacctacccaccctcaggctcgaaggcgggttgttcctgcctgatcaactggaaaaagccgcccagggccgcgccagcgcccagagcgaggccgactacggtacccccaagggcgtcaagctcaaggacgaatacagccgcgctttccagatcgcctgcgcccaatggcagcacttcgccgcgcaaatggaacgcgccgacgtcgatgccgcgcagctcaccaccgccttcgtccacgaactgctgcgcgacgccttcggctataccaccctgcaagtcgcgcaggggcagcaggtaggcgaactgcgctacccggtgagcctcatggcaagtaccttgcccgtcctggtggcaccacacaccctgggcctggacgaggccgacgcgcgatttgccgtgcagggcggcggtaaccgaaagaaagccccgttccaggccatgcaggaattgctcaacgccagcgaaccgctgcaatggggcatcgtcagcaacggcagacagctgcggctgctgcgcgacgctgcctcgctcacccgccccagctttctcgaagtcgatctggccgacctgcttggtggccagcgttatgccgaattcgccaacgtctggcgtctactgcacgccagccgcgcatcccgccccggccagggcgctacggcgtgcatctgggaacaatggcgcagcgaaggccagcaggaaggcactcgggtgcgcgatggcctacgcaacggcgtcgagcaggccctgctgaccttcggcgcaggtttcctgcaacaccctgccaaccacgccctacgcgccgccctgaacgacggcacgctcagcaaggatgactatttccaacaactgctgcgcctgatctaccggctcatcttcgttttcaccgtggaagagcgcggcctgctgcccccccagccacaggcgcagcacgacagcgcccagacacaagccgcccgccgcgcctatgccgaaggctacgccctggcccgcctgcgcgagctgtgcctcaagcgccgggtccgcactcgccacgacgaccagtggcaagccatccgcatcgtcttccgtggtctggcacagggcgagccgcgcctggccctgcccgcgctgggcggcctgttcgcgcccgaacaatgccccgatctggatgtcgccagcctggacaacgcccacctgctcaccgccttgcaacacctgcgctgggcagtggtcgcgcaaggcaagggcagcagcctcatcccagtggactaccgcaatatgggcccggaggaactgggtagcgtctacgaaagcttgctggaactggtgccggctatcgacctgcctgcacgtactttcggcttcgtcggccgtactgaggaaggcagcaccgctggcaacgcccgcaaactcaccggcagctactacacccccgacagtctggtgcaagagctgatcaaaagcgcgctcgatcccgtcatcgaacaacgcctgaccaccaacccagccaaccccaccgcagcattgctggccattcgcgttatcgacccggcctgcggcagcggccatttcctgctggccgccgcccgccgcctggcggaaaaactggctcagttacgcagcctcgaaggcgggcaggaaggtgctatccagccgcaggactaccgccacgctctgcgcgaagtggtggcccactgcatctatggcgtggaccgcaaccccatggccatcgaactggcgcgcatggccctatggctggaaggctacgaggaaggccgcccgctgggctttctcgaccaccacctgcaagtgggcgacgccctgctcggcctgaccgacctgaacgcgctggaacaaggcatcgccaaggatgccttcaggcctttgagcggcgacgacaaggacgtctgcaaggaactggccaaggccaacgccgccggcctcaagcagatcgccaaagacctgcaaggcaagcagatgctgctgggcgtggacaaccgcagcggcctggaagccctgcgcgccatcgaaaccctgcccgccgacacgcccgagcaggtggccgccaaggaacaggcctggcatcactttctggaggagtccgtccacagcccgttggcccacgccgccgatgcgctggtcggcgcctacctgctgcccaagacggaagacacggccgaagccatacccaccagcatcaccctgcacgcgctgctgactgcgcccgagcgcgcccaggccgagcacgccgaccccatcgccactgcacgcacggcctgcgagcaggcccgcgtgttccactggccgctggcctttccgcaggttttcgcgcaaggcggcttcgactgcgtgctgggcaatccgccgtgggagcgcatcaagctgcaagaagaagagttctttgccactcgccaccgcgacgtggcgcaagcccgtaacaaggccgaacgcgcccagcgcatccagtggctcagcgaaggcatgctggcgcgccacctgtaccccgaccttgcccacgaaacgcacgaggacgaggccgaaaaacgcctctaccgcgaattcgttaccgcccgccgcacggcggaggcggccagcgtgttcgctcatgtgaaaggcaccgacggcggccgctatccactgaccggcgtgggcgacgtgaacacctacgcgctgtttgccgaaaccatcctgcaaatccatgccgacagtggccgcgccggcttcatcgtgccgaccggcattgctaccgacgacagcaccaaggcgtacttcggccacatcacccagaaccggcggctggtcagcctgtacgacatcgaaaaccgcgaagcggtgtttccgtccgtacaccgcagctacaagttttgcctgctcaccctgggcgtgacggaacaggccgagttcgtctgctttgccacccaggtcagccaactggccgacccgcgccgccgcttcaccctcacgcccgatgaattccgcctcatcaaccccaatacgctcacctgcccggttttccgcagcgagcgcgacgcggagctgaccaagaagctctaccgcgccgccccggtgctgatgcgcgatgccattaccgcaggcgagggcaagcaagccaaagtggtggaacccgcgcaaaacccgtggggtatctcgttcatgacgatgtttcacatgtccaacgacagccacctgttcaaggacgagccagccgccgaacacttgccgctgtacgaagccaagcttatccaccagttcgaccatcgctgggccacctacacggcggacggcaacagccgcgatgtcacgctgcccgaaaaggccgacccggatttcaccgtcaccccgcgctactgggtcagccgcgctgaggtggaagaacgtctatgcaaacgcgaccgcgatggccgcgtgatctggcaatgggaacgggattggttgatgggctggcgaggaatagcacgtgctacggacgagcgaagcgtcattggcactgtcatgcctttggctggcgttggtaacagttgccacttggtaatgccatttgaagagatctctgcaaggcaagtaagtgcattggtagcgaatatatctgggttgatttttgattttgttgcacgccaaaaaattggcggagctaattttaatttctacataccaaaacagttaccgattttttctcctgaagggtactcggagtccgatttcgatttcatcgtgcctcgcgtgttggaactgacctatacggcacacgacctctcaggctgggcgcaagatctgggctacgatggcgaccccttcgccttcgaccccgaccgccgcgccaccttgcgcgctgaacttgacgcctggtacgccaaactctacggcctcactcgcgacgaactccgctacatcctcgaccccgacgacatcatgggcgagggctaccccagcgaaaccttccgtgtgctcaaggacaaggagcgtaaggaattcggcgaataccgtactcaacaactggtgctggcagcttgggacaagttggaacgcggagaactcagatga

SEQ ID NO: 527556 - DNA, 1452 bp, Stenotrophomonas maltophilia
atgaagatccttgatctgcagaacgaatttcgcgaactgatcgcgcaactccgacatgaaatcgaagccgccagtgcgatggggcagtttgatgcgcataagatttctgagaacctcatgtgtggccttctgcgcgagctgtgtggctggaccgacttgcggaatctgaaccgcgagcaagcgaattatcccggaattgatctcgcagacgatacgcgccgagtggcggtgcaggtaacggccaccgcagacatcggcaaggtcaaatacacgctggagcaatttctcagtcgtgatttgcaccagcgttacgaccgattgattgtctatgtactcaccgccaagcaaggcagctactcgcaagcggccgttgattcggtgtgcgagagcaagcacaagttttcagctggcaatgatgtttgggactacaaggagctgtgcaccctggcagccgatgctgaaccacacaagctgcaagctgcgctcaaccatttgaaagcctatctgcgcggagtgcctgttggtttggcggacgaggacattgatccacctttgacaccatcggaatcgctgacggccaacctcgtggaactctattttccgagcaaactcttcattgctcgattgagtgagaatctgctggaaaagcatggcaaaagaaggccaggtttgtggcgaaccaccatcagagagttcaaccaagagaatggactcgcggttccatctgcctacgttatccacagcggtaacctggtgacgttcttcaatctgaccgagcggaacaatccctatcagcacttgtgtgagccaggcacagtagaagaacacaacactgctgattacttcgccatcgacgatgaccacgagcgcgtcttcaagtcgctgctgagattttcactgcagcatcgcctgttcaaagaacgtgtgtggtgggaaaacgaaattggtgagttcatattcctacctttggaagacggctttaaccaacgagaggtggtctggcaaggagagaaaaaagccaagcgcaatgtcttttcaaggcaattcaacaaaaaagacccttcaaaggtttttctgcaaaagcatctctcgttcgctgcagattttttgcgtctggatggccattggttcatggccataacccccagttggttctttagctatggagccaatttcgagcagtctggtttcagtcacgacaacctcagctggatcaagcgccaggaaaataaccagcaggtgatgaatcattttcgatttatatctacctggctgtcctcaattgacgacgaggatcttttctcagaaaaagggacaacggactccttcctctcatttggggcttcactaatgctgaatggtgccccctctctggaggagtctggctggaaagccctgcctacgatcaatgaagaagattcggcgcagccgagaaggatgttcggttcatga

SEQ ID NO: 527557 - DNA, 1422 bp, Stenotrophomonas maltophilia
atgaaactggtgcatgtcaacgagccaaggcttgagttctttgagggttcacatgtttgtccgaggcgcgggattgcagcctatggggtgtacgacaaaggctctctcacccggagaactcgtatcctaatcggagccatcggcactagcaaagacctcgaagacttttcgagtctgatcgagcgaatgaagtctcctatatcggctgatgtggatgaacacaagagcaatctttttccagacttctgtggattcaacgagcgggttgggtttcatgcggagcttgcgttcaaccaagatttaggccgcccattgaggcaattagatatcgagaaagttacaaaaataaataatcgaacgcagcgtatagaagcagccctcgacctgtactatgaggagatcaagttcctcgcacagaacaggcctgtcgatgtgatcgtttgcgtgctttccaaagctgtctacgatgcagtcagcaaagattcggcgatggaaggtgatgaaaagctggaagagagcatcgaggttcaatcagagttgaatttccggcgggccttgaaggcgaaggccatgcacttgggcaagccgcttcaattggtgcgtgcagattcgctggcatccggcgcaaagggtcagcaggatgacgcaaccaaggcttggaatctcgcgaccgcgctgtattacaaggctggcgcgaccaacccatggcgacttgaaaaggctgaaggcaacatactttcttgtgccttgggtatcgcgttctaccgaagcagagacaagaagacgctcaacactagcttggctcaggttttcgatgaattgggtaatggattgattttgcggggcacgcctgtgcatctcgacaaaggagatagagtcccaaagctatcggaggagcaggcatataccttgttcaagactgcgcttgaggagtatcgcaatgcgatgcgaacgtaccctggcagggtcgttgttcacaagacatcaaatttctctgacctggagatttcaggtctcatgagtgcggcctcggacttgcgtatcgatacagttgattttgtgacggtgatggattcgcgacttcgactcttcagaactggagcatatcctccttatcgaggtacatccctagtccttgatgaccagcggcagttgctctatacccgaggctcaatctggtactacaagacctatcctgggatgtacattcctcagccacttgagttgcgcgtgatccgctcggagcaaagccccgcctttctggctagggaaatcctcggactgacaaaaatgaactggaacaacacccagcttgatggaaagtatcccatcacgcttagttgcgccagaaaggtgggggagatcatgaagtatttggatgaacatgatcggccacaaattcgctatggctactacatgtaa

SEQ ID NO: 527558 - DNA, 1347 bp, Stenotrophomonas maltophilia
atgcttactcatctcaaactggagaacttcaagatctggcgcaccacggggcctgtgcgacttgctccgattactctgctgttgggtaccaattcatcaggcaaatccagtctaatccaaagcctgctgctcatccgtcagaccgtcagaggcgatgatccgagtctcgatctcaatcttggcaatcctgatgctggcgattccgtcacactcggccagttcaaggatgtgctgtgtcgccacggcgcagcaacggaaagcacggcgtccaatcaggtaggtatcgagtttcgctggagcgaaacgggaaatgccgctgaatcggcgatcttctcggcacgctaccgtaaaggccaatccggcagcgctgaactggagttcctgcgcttgggcaaagacggtcaaggcttcagcgtgcaacgccgtaaacccgggatttatcgcctcacgctgggcaatcaaatcaaacctttggggcaaagtgcggattttcgtccgcagcgttcgtttgcattttcaccctctacgctcaacaaactgggtgtgcagggtgaggtgattcggtcggttggtccggcgctgctggacgagttgggtcgcatcatctacctcggccccgtgcgccgtttggcccagcgcgactatgtatgggcgggacgtatgcctgcccatatcggcgacgacggtgccaaagccgtggatgcgttgattgccagcggtgtggcgtgccagcaagccaagaggcgcagtcaagccttgccagcggaagcctatctcttcgagcaaacggtttattggctgaaggagatgaatctggcacatggtctttccgtccgcgcccttggaaattcagcgcgtcatgagttgctggtggaagccgatggccaggccagtaacctcaaagacgttggagtgggggtgtcgcaggtgcttcccgtcattgtggccgccctgtttgcccagcccggccatatcgtgatcgtcgaagaaccagaaagccatctacaccctctggcacagagcaagctggctgagttgctggcgcaggtaagcaaggagcgcaacgttcagttcatcgtcgagacgcattcagaacatttgttccgccgcatgcagaccttgattgcccgcgaagaagtgtccgttgctgacgccgccatgtatttcgttgaacgtgatggcaaaaatgccaaccttctgcctttggaagttgatgatcttgggcgggtaaaaaactggcccaagcatttttttggagacaccttgggggagactcgcgagcaaacggcgctagccatcaaacgagcgaaagagttgagagcaaaagatggcgatgttcctaattga

SEQ ID NO: 527559 - DNA, 543 bp, Stenotrophomonas maltophilia
atggcgatgttcctaattgataccaacgtgatgctcgccgccagtgcgatctccgagctatccaacgtcgctacacgcgccatgccgcgcgagattgaattgcgtgagttggtctacgagtggctggtgcagttcgatcagtcggacgaccatatggtgctggatgacgccgggttggtgctggcggagtacgagcgcaacatgccgtacaactggcaggaacaggagtacgggctgcaggtgttgcagagcaagcgagatcggatgcaggtcgatgatgtgccaatcgacacgttcgaaggcaatggggaacatatcgccgtgttggcagctgaacacgaagcaatcgtcaccgaccgtgaggaccgcaagtgggttgcctgtgcattggccgcgatgattatgttcgaagaatcacctcatatcgtctacggtgcggaaactgactggcatatcgcaagaacgcaattggaggcgttcggaattttctttctgcccttgctgcctgctgcgtggtatcaggacagggttgggtgcctatga

SEQ ID NO: 527560 - DNA, 699 bp, Stenotrophomonas maltophilia
atgacagccaccttctttcgtttccccaccactccgcaccttgcctggctagccaaagacggcatgccacgcgacgacaaggtgttgtcgcccaccgaagcgcaggcgctgttgtccggcgatgtggtcgtggaggagaagctcgacggtgcgaacctcggcctgtctctatcacccgaccgcaccgtgcttgttcagaatcgtggccagtatctgggcgagccctatgttggtcagtttgcgcgtttacccgcctggctggcgcaacacaaatccagcttgcttgccgtcctgcgtcctgagttgatgctgttcggcgaatggtgcgccgcacgccattcactggattacgacacgctgcccgactggcttctgttgtttgatgtctatgaccgcagcaagaggcgtttttggagcacctcccggcgcaacgcgctggcctcagaagccggattgttcaccgtgccgcgggtatcgagtgggcgcaccaccctggcggcgctgaagcaattggttatggatacagccagtcactatcgcgccgagctgccgctggaaggcgtggtggtacggcgcgaatcagccgactggtgcgaggcgcgtgccaagttggtgcgcccggatttcgcccaagcgatcgacacccattggcgcaagcgcgccatcgagtggaaccgggtagattggacgcggacatga

SEQ ID NO: 527561 - DNA, 864 bp, Stenotrophomonas maltophilia
atggacgacttgacctacaccctgcggcagctttgccagcgtaaccgtgacggcagccacaatacccaggccgaccggatgcgctctctcgcgctggctgcgcgacaactacgcgaggccggtttccggcagatgaaggcttcgtcgctcaagggcaagcacgtccaggcgttgctggaccgctggcaaggcgaaggtttgtcgtctggcactatcaagaatcggctctctcatctgcgctggtgggccgagaagatcggcaagtctggcatcttgccggcggacaacacgcagcttggcgtgccagagcgccgctatgtgaccaacatcagcaaggcccaggaactgggaacaggtcttgaacaggtcaccgatgcctatgtacgcatgagccttcagttacaggccgccttcggattgcgtcgagaggaggcaatcaagttccagcccagttacgcggatcggggtgaccacatcacgctcaagggagcgtggactaagggcggccgggagcgaactgtgcccatcaccacgacagagcaacgcgacgcgctccaggcagcacaccacctggcaggcacagggtcattgatcccagcaaacaaaacctacatccagcaacggcacgtctacgatggacagtgcaaggcggcgggtctgagtcatatgcatggccttcgccatcagtacgcgcaaagccgttatgagacgttgacggggaggccgtcgccagcggcaggtggaccattagtcacggagttaagtccaatgcagcgcatagaagaccgccatgctcgtcagaccatcagccgtgagttgggacacgagcgcgttcaaatcactgccatctacctcggtagctag

SEQ ID NO: 527562 - DNA, 312 bp, Stenotrophomonas maltophilia
atgaggcaataccgttatcgcgtaactgtggagcagttgactgattcgcatggcatccccagcgatcgcaagcctctgcaatttgaggccggaaatcatgacgacatcatctccgtcgtgacatggcttcgcagccgaggtgacttcagtagccaggatgacgcggcggcatttgcggtcgggttgaagctgtttgccggggccatcctggcaaacaaggacaacccgcttctgtcttcattcctgccgcatgtatatcagtttgtgaaagaactcaaagcgggaccaggcgacagccaaagaaaagattga

SEQ ID NO: 527563 - DNA, 1035 bp, Stenotrophomonas maltophilia
atggccatgccgaagaaagccaagatcaccagtgtcctgctactcctcgcagtggcagtgggctgtgtcatttatctgaatcgccccgaatccagcgcatcgacccaatccacggacgacgcctatgtacaggccgatttcaccctcgtcgcgccccaggtgtcgggcgtgatcggcaaagtcttggtcgaagaaaaccagccagtgaaggcaggcgatctgctcgccgcgatcgacgatcgggatttcatcgttgcggtggatgcggcaaaggcacaagtcgctgccgccgaggccagcgttgcggggcttgccgcgcgtgtggcgcagcaggaaaccgcgatacgtcaggcgcaggcggccgtcgcggtggacgacgcagaactcaaactggccgaggccaaccaaaaacgctatcggaacctggcttccgacggatcaggctcgatccaagcccagcaacaggccgaggcgcagttggccattcggctggccagccgcgacaagaaccgcgcgggcctgcaagcggcgcggcagcagacggacatcctgaaagccgatcttgataaggccaaggctgcactttcccaagcgcaggcggcgcaggccgcagcggagttgaagctctcctatacccaaatcacggcgcccatcgacggtgtgatcggccagaaggcggtgcgcgtcggcgcattcgtgaatgccggcaagccattggtggcggtgatcccgctcgacgcggtttacatcacggccaacttccgcgaaacgcaactggcgcgtgtgcagccagggcagtcggtggacatcaaggtggacgccttgccgggtgccgtactgaaggggaccgtggagagcctggggccggccagtggcgtcagctactcggcagtcgcgccacacaacgccacgggcaacttcaccaaaatcgtccagcgcctgcctgttcgcatccgcatcgaccccgaccaacctgatgccgcgaatttgcgcgtcggtatgtccgtgacgccgaagatccgcatcggtgaatag

SEQ ID NO: 527564 - DNA, 1572 bp, Stenotrophomonas maltophilia
atgagtgccgcagcgttgcaaccgacagcggcgccgcccgcacccgccgctgcggcagcccctccgaagcgggcgattgcggggctggtcggcatcctcatcgcggccatgatggccggactgaacaaccgcgtgggcgcattggccctggcggacgtgcgcggcgcgctgggcttcggcctggacgatgcctcctggctcaccaccgtctatagcgcgggcgaagtgatcgccatgccgttttcggcatggtttgccatcactctctcggtgcgccgattcgagctgtggatgatcggtgcatgcactttgttggcggtgtgcatccccttcatccatgacctcgatctgctgctggtcatgcgcttcctgcaaggcatcgccagcggcacgatgatccccgtgctgatgatggcggcattgaagttcctgccgccccacatccggctgcacggattggcgctgtatgcactgacggccaccttcgcgcccaacctttcgatctggctggcggggcaatggacggatggcctgttcgattggcgctgggtgtactggcagattcttccgctcgcggcgattgccgccttgctgatcggatggggtctgcccaaagaccccatccagacagatcgtttcccgcaggccaactggcccggtatggctttcggcgtgcccgcattcgccctgattaccgtcgccttggatcagggcgtgcggctggactggttcaattcacccctcatcgtcgtctcgctggtggctgggctgacgctgctgggggcctatctgctgacggagtggtatcacccgacgccgttcatcaagttgcagatgctcagccgccgcaacctggcgctgggcttcaccttgttcatctgccttctagtcgtgctgacctccggcgtgatgttgccgatgacctttctcgggccgctccagagctaccgaccgcttcagatggcaccgatcggtctgatcgtcgcgctgcctcaactggtcctgggttccgtggtggcgctgtttctgtaccggaaatgggtcgatgctcgatttgtgttcgcgggcggcctgctgctgatcgccctggcgtgcttccttggcgcgcaactgacttctgactggaaccgcgaccagtttgtgctgacgcagacgctgcaagcctttggccagcccatggctgtcgtctcgctgctgttcctgtgtaccagtgtcgtgcacccaagcgaaggcccgtatgtgtcggggaacatcaacacgctgcgcgccctggggtcgctaatcgggggcgcggtggtcgggcagctcgtgaccgtgagacagcggttccacgcggaaatgctgctggatcacgccgcgtccgtaggcaactccgttccgcttgtcccggagcccgctcaactgatgggaatcatcggccagcaggcactggtgctatcggtcgcggatgcctatcgcgcgctgggcattctggcgttggtgatggtccccttcgtattgcggctgacctacattcccgcccccgatttgcagcccgctgcccctcaatccatatcgtcgtcccaaggatag

SEQ ID NO: 527565 - DNA, 1536 bp, Stenotrophomonas maltophilia
atgacgtcacaaccgctgctctcacaactgctgcgacaagcaggcacggcgctctgcacgatctccctggtcggctgcgcggttggtcctgacttcgtgaaacccgacgacaggctcgcagccgtccaactgtcgcccagggcggactacacgcaggctcaagaaacatccgccgcgaacttcccatcttcatggtggacgctgttcaacgatggtgtgttggcggatctgcaagcccgtgcgcaggcgggcaacctgaacctgcagatggcttccgagcgcatcgagcaaagccgggcgcagttggggattgcctcctcgctgctgctgcccagcgtgggcgcttcggcaggctattcccgcgaggccatcagcgagcacggcaagtttgccgcgctgggcgcaccgacgagcgcaagcgacttctggcagttgggattcgacgccagttgggaacttgacctatggggccgtgcgcggcgatcgcgagaaggtgccgcagccgccttcgaggccacggtatatgagcgcgaggcggcacgggtggccttgtccgccgaggtggcccgcacctatctccagttacgcggcacgcaagcgcaactggacatcacccggcagaacttggaggtcgccgatcgcaccctccgccttgccgagagccgtgagcgcaatggtgtcgccacgcgctttgaaaccgcttcggcgcgcgcgcaactggcaacggtcgaggcgctggtgcccgaactggtccagcgccgcaacacgctgatgaacgccttggcactgctgctgggggagcagccgcgcgccctcgatacgcagttgcttgaagcgatgcccttgccgtcgcttccttccaatgtgccggtgggcctgccctccgaattggcgcacaggcggccggacatacagcgcgccgaagctcaactccatgctgcgacggcagccatcggcgtcgccaaagccgatttctacccgcgaatcggcctgaaaggcagggtcggcgtcgaagccttcgagttcaacgacctcgatagttgggattcccggttcttctccgtcggcccgacggtctatcttcccatctttcagggcgggcgtctgaagcagcgcctggcgctgaacgaggcacggcaaagagctgccgccattacctaccggcagacggtgctgcaagcctggcatgaagtagacaacgctctcgatgcctgggcagctcagcagaaccgccataccgaactgctggtttcgtatgaacagaacaagcaggcgctgcatgctgccgagcgcggctatcaggaaggcgctgccgactacctgaatgttctggccgcgcagcgtggcgttcttgccagccagaccagcctcaatgccagcgccaccaacgctgcgctcaccctggtcaatctctacaagtcgctgggcggcggctgggaccccgacgcactcacatccgaacggcaggccggcggcgatgcacccctgacgaccaccgcgtcgtcggctacctcgcaacccaaggttgagcaatga

SEQ ID NO: 527566 - DNA, 681 bp, Stenotrophomonas maltophilia
atgccacgcaccaacctagccatgaccgccccgccgcagagcagcggcgagctgaacgccaaggcgctcaccgtcctgcgtgcagcgcgcaatatcttcctaacccatgggttcagcgcggcaaccaccgacatgatccagcgcgaggctggggtgtccaagtccacggtgtacgcgcactacgcgaacaaggaagcgctgttcactgcggtgatcgaagctgaatgtgccgcctttacgaacactgtccatggcatcgagttccgtccgggcaaactgaaagagacgctgacaatgctggctcgggcctacttgaacattgtgctttccccggcagggctggcagtctttcgcgtcgtgattggcgaagcaccgcgctttcccaagctcgcacggacgttctacttggccggcccgcaggtcatgacgacgatggtggctgaacaactggccaatgcagcggcatccggcgaggttgatcttggcgagattggccgcgaaacggccgccaatctgttcatcaacctggttcggggcgagcctcaactccagtgcctgactcatccggatgccgcgccttcctcggcgcagattgaccagtgggcgaatgcagccgtgatgacattcatgcgtgcttatggctgcggtgaggaagcgtccagtaaacgttcccgatcatga

SEQ ID NO: 527567 - DNA, 660 bp, Stenotrophomonas maltophilia
atgcagcaacccttcctccacctgtggcggacactgcgcctgcaaatcatccatctcgcgcgccgactgcgccgccagcaacacgcccccacacgcagacactgccgccaagcagcgcgtcgcttcggccagttcccgaccgcgcgccccgctgagttgccgttcgcgccacacctgatcatcggctgcgtggccacgcgccatgccgcgcaaccgcgcgaagaacgcggagggcggcgcctgttcgtgggcttcggtgagcgcatcttccagcgcttcggctgccgtagtggacagctgcaggccgggcagtgcagcaccgagcagtgcatgcaggcgtggataggtggggtagggcgtgttcatggcagcaacctcacaaggcaaggccacctgcgggatgcaaggtggcgggcggtgcgggttggcgtgccggtgaagctcttcacgaggaatgacgccggcggatccggggatccccacgcaccgcccgccgcagaacgacggacggtgcattgttcgggccggcaacgacgttgcaagcccgctcgtgaaaagcttcattcaggacgccaatcccggtcagcgcaggaggcgccgacggggccaccttggcgcgttgtgcgccccgacgacatgggcaaagttgcaatgtggtga

SEQ ID NO: 527568 - DNA, 678 bp, Stenotrophomonas maltophilia
gtggcaacgcgacgttcagtggccgaggtcttcccagcactaactgaagccaaattaggagcagcgaatgtggctcattccggcttgaatgccccgaaggtaggaagtaagtcttccgccagaatgggtgccaaaaaacttctccttgcctatttaactgccaatgtcgggataaagctgacatccgatcagttgagagaggctgctggcaacgtaagcgagtgggctcgcaggttgcgtgagcttagggatgaggatggatatccgatcaggagccatcgagatctcggtgaactcaagcctggtgagtatctgctagagaatttggaacgtgcagagcctcgtacacgtagcatttccgggaaccttcgagcaatggtgctcgagcgtgacggctacacttgccagatgtgtggtttggaagccgggcaacctgatccaagattcgaaaaaagaaaggtgctgcttcaggtcggccatattaaggacaagagtcacggaggcacggacgaaatctcaaatttgagagcgttgtgctcctggtgcaatgagggagcttctaatgcatctccaactaggccggataggactaggctgctaacggagattcgacgggctgtcgtggaagatcagcgcgccgtgtatgactggctgcagaaaaagttcccatcaagatga

SEQ ID NO: 527569 - DNA, 714 bp, Stenotrophomonas maltophilia
atggaggcccgtcttgccaatggatcagcgcttgagaagacaagggtctatcgggaactggcggcccgccacggacgcacgtccaaggcgtgggaatatcgcatgcagaacatctcccatgttctagatcaggcgggcaagccttggctacccgggcttcttccagcatcgaacgtgggtgcaaatgttgagccgaaacttgccaagctcctcgggctttctggtgagacgctcacgtcggtctctggtcccacaaggggactgttggagcaggagaccaaagcggcggaggcaactggcagtttctctccagcagacgatgtggacgagaggcagcgtgtgctggcggctatcgttcgacgccgcgggcagcctgcgttccgtaagacactactggaggtgtacggcggttgctgtactatgacgggatgcgatgtggtcgatgcgctcgaggcggcccacatccagccctactcaggcctaaagagcaacgatgtcaggaacggtcttttgctccgtgccgatgtgcacactctgttcgatttgtatctgatagccatcaaccccggttctctgcggatcgccgtggcgcctgctctccagcaatcagcctacttcgagttggatggccgtgagctgagattttccgcactgcctgagctgtcagcctgccagaaatcaatcgcttggcatcgttcgcagtgccagtggtag

SEQ ID NO: 527570 - DNA, 1284 bp, Stenotrophomonas maltophilia
atgggatggttcaccaatgcagttgcggcaaccgcacgtttcgtcagcacggcggcacagaaggttgccagcgcggcgcagaagacctgggaagtagtcaagaaaactgcggtcaaggttgtgaccctggtggctaccgacggcgagaagaccgtcgccaaggccaaggatctgtggaagaccgcgcgcccctacgtggaaaaggcgacggcgttgttgcacaaagccggtgtttcctatccgctggccaagaacgttgctctggccgttgatgcactgttggcactggagaagtccccggtgctgcactggattgacaaggcagtgagctggaccatcgagctctccaagcgaatgaacgtggcgatggagcagggcgtgcaggtggagcttgatgctgcggagcgcgcccaggccgagcagtaccagcagaaattccgcgatgttgccggtagcttcagcggcgagcaggcccacgcggtgtcggtggtggcgatggtcaatgatctggtgcttgcacaggacaaggtcaatgcactggtggagaccggtgaggtggtcgacgtcgaccacttcctgcgcctgcgcgctacgcagaagctgctgaaggaagcgaatgcacggtttgcgacggtggatgcggagagccgcattgatgcagacgacatcttcctggtgcgcgtggcatctgatcttctcaatgcggatccctctctgtcgagcgaggatgcacaggcgctggacgaactgctgcagcgccgacatggtcgtggcctgctgccgttcgccttcgaggaaatgctgcctgcatggcacatgcgtaacgaggcactggaggcgcagtggcaggtgcagagcaaggcagtgacccagaagcaggttctgctacgcaggctggaaaccgacctttcgctgtcggcagatggtcgcttgagcgacgaggaacaggccatgatggacgacctgcgggaaagcgtgccgcgcgagcgcgatgccttcgtggcgctgggtgcagagaagttggcacttgcccactacctgcatgcggccgaaggcttcctgcaggtgctcgagaagaccgctgaggaactggaggcagcgggaatgggctatctggtcgatgctgggcagagggtgggtgagctgatcatccagggggctgagcagggcaaggggtgggagcagtttactgctgaggagcaggagctgatcatcgatttcgccaacatcttcgaggaagagtgcctggagcgcgtgcagcgcttggttgaggttgcggcctga

SEQ ID NO: 527571 - DNA, 1731 bp, Stenotrophomonas maltophilia
atgctggggcacgtcgttgacttcatcaagccggatttcagcgagccgttccagctggccttcttcatgatcatcttcggtgccgcagtggctaccgttgtgggggtgtggcgcactgcacggcctgataactggaaggccaactgggaaggcgcggggcgcggcaataccggactggatgtagaccatggttctttcaacgatgtgtgcgacgccgttgccagcaagccggagaagtatgcggagatcgtgccgggactgctcctgatctttggcctgttgggtacctttgtgggcctgggtattgccttggacagtgcttcttccatcctgcgcaacgccaacgcgcagaacgcgcttgatggcggcatgggcaacctgctggaaatgatggggggcttgggcaccaagttcaggacctctacctggggcatcctcggtttcctgctggtgaagttggcattggcgggcatggggcgggagacacagcgccagcaatgggtgatcgcccgcatgaagctggagatggacaaggcccggcttgctggcgagcacctggaagagcggcgtagtcagcgcatgcaggatgcgctggccgaagtggccgtgaacatggatggctcgctggaccagcggctgcagcaggaccgcagcctgcgcctggcacatcatgatggcgccgctgagatgatgcagcaggccgtgctggcgctgggtcagcagttcatggcagcactggagcaggatcgcaacttgcgactgcgggctgatcgtgcggccgcagagcagctgcggacgctgcttggcgatacgtttgagcagctacagcaacgcatgcaggatgatcagaccgcgcaacgcggcgtggccgagcaggctgcgcaggcattggaagcgatgctcgccaagcaggagcagggcaacgatattgcgctggacacccagcaagtgttgatggagttcactgcctcgcagaaggccttcagcgcctccatccagcacagcgccgataccatgtcagacgctgcaaccaacatgaatggggctgcccgcgagatgtctacgaccatcgttgcgtttgacgagggcgtgcggaacacgctcggcacgatcgagggcaagctgggcggaaccatcgaaagcatggaccgctcactgactatgaatctcggggtcatggcgaacctgttgagggataccaccaacacgctggagacctcgctggactcattctcgaccagaacgggcgagacattgggtcaggtcaccggcagcatgaagatcgcctccgagagccagcagaaggtgatgggcgatgttcgcaacgcaatgagggatgtccaggagatggtactgcaagccaccagctccatcttcgacatcagcaaaaagcttgatgacagcctaagggcggtttccaagagtaacctgcagatggctgcgctggttgagcctatgaaggcttcgcagagcagcaccaccgaagctgtggcgtcactgcaggaaacaggaggggcgctgcggtctctggaggctgccctgcgtcgtgacggaagcgagggagagcgcctgcgtgcagccttggcagggggcgcagaaatggtagctcaggcccacgggcgcagtcatgatctgctacagcgccaggtcgatagtctggaagcgctgcgcagggaactccttagcctggctcagcccaaggtagaggatgaggcggagctggccggatga

SEQ ID NO: 527572 - DNA, 318 bp, Stenotrophomonas maltophilia
gtgcgcctgccatgcacgaaaggggaatgtttcctgcccgttgatcgcgtcactacagggcgaagcaggcctggcaaggtcagctatgccttagcgtgctttattttccgttttctgaggtgcccccgttcgggcctgggcggcaacgccacccagacctcggtggaaggcgtgttcgccgccggcgacgtggccgaccagcactaccgccaggcgatcacctcggccggcttcggctgcatggccgcgctggatgcggagcgctatctggatgcactcagaatttccgatcaacagcagcgtaagaacgccgcctga

SEQ ID NO: 527573 - DNA, 402 bp, Stenotrophomonas maltophilia
ttgttccctgacaattggcgggtgcgaaccaagaagtaccccagcgacacgagccgcgagcaattcgagatcatcaagcccttgctggagggggcgcgcaagaagaccaagccccgcaccgtggacctttacgaggtgtggtgcgcggtgttgtacctgctgcgcacaggctgccaatggcgtgcgctgcccagcgactttcccaactggcgtacggtgcattcgtacttcgcccaatggagccagcccgatacacagggcgtcagcctgctgcagcaggccttaaaaaaatcaggttgccgcggcccgcgagagactggggcgcaacgcatgcagcacgctcttgatcgtggacgcgcaaagcgtgaagaacacggacacagcagccttgaagggctatga

SEQ ID NO: 527574 - DNA, 729 bp, Stenotrophomonas maltophilia
atgccaaagccattgcttttggccagaccaagcggggtctatgcccgttttctcgtcccgaaagacgtgcgagcattggttggctcgcgcttcctcgttcgtccgttgcacgctcccttcggagacgtggccaggctggtcgctgcccgcatgggcatggcactctctcaggcattccaagcattgagacaggggcaggcggtggacatcgacgaggtgttacgcagggtgcggcggaatggtgttcagcagctgatcttgaaagggatcacgttccccaacggcgcgggcgtgaccgaggtggagatcaaaacgccggaagacatggcgttctggcgcgagaccctcgaaaagatggccagcgccgatccagtagaaagcatcggcctgcttcctgagcattttctgctcaagcagcaggaggcgcatgcgaagagggaggcgacaggtcgttcggttggactgtcactgtctaaggccatcgaaaaccacctgacggatttgaccaacgcgaagttgcagccaaagacggttctggagagccgtcacacgttgcgattgtttgctggcgtggtagggggaagatctgcctgtgtccgagctttcgcaagatcacgtgcgcgagttcttcagcgcaattcgatggtggtcttcgaatgcatccaagcggcctgcttaccgaggaatgccggtgctggaggtgatggccctggcaaaggccaacgatga

SEQ ID NO: 527575 - DNA, 219 bp, Stenotrophomonas maltophilia
atggccgccggtctcactcacctgatccaagcatgctttgagctgttcgtgaagacgccggtccagaatcaagtcaatatcccctctggctgtgacgagaacagagctacgatccgtgcgcagcacgaagacgttgcgaccgttctgcatgccgaacttgccaagttcaacgcccccggtgctggtcccaagttgccggtgaggcagcgtgatccttga

SEQ ID NO: 527576 - DNA, 861 bp, Stenotrophomonas maltophilia
gtgcttgcgggccaggtcgtgcaggcggccgagacggcgctcgttctcttcgaactgctccgggtcggcatcgaggtcatcgtgcacccggtccagcagcgacagggcttcgtgcagctggatcgaggcgttctcgatcaggccgtccacctcgcccaggcgcgggtcgtgttcgatcaggcgcgacagctcgtggcgcacctgctgcagcaggtccagcgcggagctgccgtcatcgccgttgatctggttgctggcggcctggcaggcgctcagcagggcgctggcgtgggcctggcggcgatggctggcaccgagcgccacgatcgactccggctccaggtcttcgcggtccagttcgcgcagctggtgctccaggaagccgatccggtcactcacgtcgccctgttgcgacagcgccagcgattcatcgaccagtgcctgccatgcggccgcggcgcggcgcacctggcggcgctcgttctcgttgccggcataggcatccagcagggccagctgcgacgggcgcgccagcagggcctgctgttcgtgctggccgtggatctccaccagcaacgaggccaggtcgcccagctgggccagggtcaccgggcggccattgatccacgcccgcgaaccgccgtctgcacggatcacgcggcgcagctggcattgttcttcgtcgtccagctcgttgtcggccagccactggcgcgcggcctgcagctggtccagcgtgaactcggccgaaagctcggcgcgcgcggcgccgtggcggaccacgccgctgtcggcgcgcaggccggacaggaagcccagcgcgtcgaccatcagcgacttgccggcgccggtctcgcctga

SEQ ID NO: 527577 - DNA, 1065 bp, Stenotrophomonas maltophilia
atgcacggttctcccgaccagcttgccccgcgtgcgcgccatctgctgcgcacgctgatcgcgcgttacatccaggacggtgagccggtcggctcgcagacgttggcgcgcgtggccggcctggaggtcagcccggccaccatccgcaacatcctcggcgacctggaggacctggggctgctggcctcgccgcacacctcggccgggcgcgtcccgaccgcacacggctaccgggtgttcgtcgacagcctgctgcagatgcagccgccgggcgagggcgagctggcccggttgcgtcaggaactggctggcggcggcagcacccaggccctgctcggcagtgcctcggagctgctgtcggccatgagccacttcgtcggcgtggtcagcgcgccgcggcgcgagcagttcgccttccgccagatcgatttcgtggcgctggacgggcgccgcgtactggcgatcctggtgttcgccgacaacgaggtgcagaaccgggtcatcgagacccggcaggagttcgcgccaggccagctggagcaggtcgccaactacctcaatgcccatttcgccggcctgccaatggccgagatccgcacccgcctgctgctggaactgcgcgacgcccggtccgagctggagcagctgctggcgcacagcatcgagctggccgagcaggccctgcagccggcggccgacgacatgctggtggccggccagacccgcctgatgggggtgcaggacctgtccgacctggagcgcctgcgtgaactgttcgagctgttctccagcaagcgcgagatcctgcagctgctggagcggaccatccaggcgccgggcgtgcgcatcttcatcggcgaggagacggggatgatgccgctgcagggcgtctcgctggtcaccgccccgtacaccgccaacggccaggtgctgggcgtgctgggcgtgatcggccccaagcggatggcctacgaccgcatgatcccgctggtgcaggccaccgccgatgtgctcggcgcggccttttcacccgccgggcgcactcccggaacatccgacgcttga

SEQ ID NO: 527578 - DNA, 537 bp, Stenotrophomonas maltophilia
gtgaccgccagggacccagacatgaaccacgaacagccagatatcgaatcccagcagagtgccgctgatgcggctgccgccgccggcgtcaacgacgaagtggagcgcctgcgcgccgaagtcgagcagatcaaggccgatgcgctgcgtgagcgcgccgacctggagaaccagcgcaagcgcgtggcccgtgacatcgagcaggcccgcaagttcgccaacgagaagctgctcggcgagctgctgccggtgttcgacagcctggatgccggcctgaaggccgccggcgacgacccgcacccgctgcgcgaaggcctggagctgacctacaagcagctgctgaaggttgccgccgacaacggtctggtcctgctggacccgactggccagccgttcaacccggaacaccaccaggccatcagccaggtgccggccccgggcgcggcccccggcagcgtggtgaccgtgttccagaagggctacctgctgaacgagcgcctgctgcggccggcgctggtggtggtggccgccgattga

SEQ ID NO: 527579 - DNA, 1926 bp, Stenotrophomonas maltophilia
atgggcaagatcattggtatcgacctcggcaccaccaactcgtgcgtggcgatcatggacggcggcaaggcccgcgtcatcgagaattcggaaggcgatcgcaccaccccgtcgatcgtcgcctacaccaaggacggcgaagtcctggtcggcgcctcggccaagcgccaggccgtgaccaacccgaagaacaccttctacgcggtgaagcgcctgatcggccgcaagttcaccgacgccgaagtgcagaaggacatcgcgcacgtcccctacagcatcctcgcccatgacaatggcgatgcctgggtggccaccagcgacggcaagaagatggcgccgcaggaaatctcggccaaggtgctggaaaagatgaagaagaccgccgaggacttcctcggtgagaaggtcaccgaagcggtcatcaccgtgccggcctacttcaacgacagccagcgccaggcgaccaaggacgccggccgcatcgccggcctggacgtcaagcgcatcatcaacgagccgaccgcggccgcgctggcctatggcctggacaagggcgacaacaaggatcgcaagatcgtggtgtacgacctgggcggcggcaccttcgacgtctcggtgatcgagatcgccaacgtcgacggcgaaaagcagttcgaagtgctggccaccaacggcgacaccttcctgggcggcgaagacttcgacaaccgcgtcatcgagtacctggttgaagagttcaacaaggaccagggcatcgacctgcgcaaggatccgctggccctgcagcgcctgaaggacgctgccgagcgcgccaagatcgagctgtccagcgcccagcagaccgaagtgaacctgccgtacgtcaccgctgacgcgtcgggtccgaagcacctgaacatcaagctgacccgcgccaagctggaagcgctggtggacgacctgatcaagaagtcgatcgagccgtgccgcgtcgccctgaacgatgccggcctgcgttcgagcgacatcagcgaagtgatcctggtcggcggccagacccgcatgccgaaggtgcagcaggcggtgaccgagttcttcggcaaggaaccgcgcaaggacgtcaaccccgacgaggccgtggcactgggtgcggcgatccagggcggcgtgctgggtggcgacgtcaaggacgtgctgctgctggacgtgaccccgctgtcgctgggcatcgaaaccatgggtggcgtgttcaccaagatcatcgagaagaacaccaccatcccgaccaaggcctcgcaggtgttctccaccgccgaggacaaccagtcggccgtgaccgtgcacgtgctgcagggtgagcgcgaacaggcccgcttcaacaagtcgctggccaagttcgacctgtccggcatcgagccggcgccgcgtggcctgccgcaggtggaagtgtccttcgacatcgacgccaacggcatcctgcacgtgtcggccaaggacaagaagaccaacaaggaacagaaggtcgagatcaaggccggttcgggtctgtccgaggaagagatcgcacgcatggtcgccgacgcggaagccaaccgcgaagaagacaagaagttccaggaactggtgcaggcccgcaaccaggccgacgccctgatccacggcacccgcagcgcgatcaccgagcacggcagcaaggtcggtggcgaagtgatcggcaaggtcgaggcggccctggccgatctggaaaccgcgatgaagggtgacgacaaggcacagatcgaagccaagtcgaaggcgctggaagaagctggccagtcgctgttcgctgccgcttcggccgaccagggcggtgctgccccgggtgccgacgccggcaacgcaggcaaggcgcaggatgacgtggtcgacgccgagttcaccgaagtcaaggacgacaagaagtcctga

SEQ ID NO: 527580 - DNA, 1122 bp, Stenotrophomonas maltophilia
atgagcaagcgcgattactacgaagtgctgggcgttgcccgcaccgccaccgacgacgagctgaagaaggcttaccgccgctgcgcgatgaagttccacccggaccgcaatccgggcgatacggcggccgaagcctccttcaaggagtgcaaggaagcctacgaagtactgtccgacagcaacaagcgccgcatgtatgacagccacggccacgccgcgttcgagcacggcatgggcggcggtggtccgggcggcccggacatgaacgatatcttcggcgatatcttcggcaacatctttggtggcggcggtggtccgcgtcaggcccgtcgcggcgccgacatcggctacgtgatggagctggacctggaagaagccgtgcgcggcgtcgagcgccgcatcgagattccgaccctggccgagtgcggcgactgcgatggcagtggctccgaagacggcaaggtcgagacctgcaacgtctgccatggccgtggccaggtgcgcatccagcgcggcatcttcgccatgcagcaggcctgccacaactgcggcggccgtggccagatcatcgccaagccctgcaagacctgccatggcaacggccgtgtcgaggaagacaaggtgctgtcggtgaaggtgccggccggcgtcgacaccggcgatcgcatccgcctgcagggcgagggcgaagccggtccggccggtacgccgccgggtgatctgtacgtggaagtgcgcgtgcgcgagcatgcgatcttccagcgcgatggcgacgacctgcactgcgaagtgccgatccgcatctcgcaggccgcactgggcgacaccgtgcgcgtggccacgctgggcggcgaggcggagatccgcatcccggccgagacccagaccggcaagctgttccgcctgcgtggcaagggcgtacgttcggtgcgcagccgcagcgagggcgacctgtactgccgtgtggtggtggagaccccggtcaacctcaccaacgagcagcgcaagctgctggagcagttcgaagccaccttcgtcggtgaggaagcgcgcaagcattcgccgaagtcggccaccttcatcgatggcgtgaagggcttctgggaccgcatgacgtcctga

SEQ ID NO: 527581 - DNA, 798 bp, Stenotrophomonas maltophilia
atggcatatcgcaaaaaggacaccccctgcccggtccgcgagactgcgccgtggaacgaggttccggtgcaccgcccagtgacctgccgcgcccgccactacaagcccggcacccacatcgcgccccaccggcaccgccgtcaccagctggtgttcgccatgtccggattgatggtggtgcgtgcggacggcggccgctgggtggtgccctcgacccgcgcgatctgggtcccggccggcatggcccatgcggtggactgcatcgccgaagtacacatgcgcagcctgtacgtggagccggacttcgcgccgcagctgccggacgaggcgttcgcagtacaggtagcaccgctgctgcgcgagctgctgctggccgccagcctgatcgagaccgcgcatgtggacgacagccgcgacggccgcctggtgcgcctgctgctggacgagttgcaccgcatggacgtgctgccgctgcacctgccctcccccaccgacccgcgcctgcagcggatctgccagcacatccagaagcatcccggcgacgacgccacgttgcaggattgggcgcaggcgctgcaggtggacgtgaaaaccatccagcgccatttcgccagcgaactgggcatgaccttcgggcagtggcgacaacaggcgcggctgctggccgcactggaacggctggcggtcggtgacaaggtcatcgatgtcgcgctggcgatgggttacgacagcccgagcgcgttcaccagcatgttcaagcggcagctggggcagacacccgcggcgtttttccgctga

SEQ ID NO: 527582 - DNA, 285 bp, Stenotrophomonas maltophilia
atggctgtctatgtagtgacctggaacttgaacaaggaagtggactacaacgccaagagagctgcgttcattaaacacttggagcgctatcagaatgtagcggatgcggccttggagtcggttcgttgggtttccgcgaacatcacagcccatcagctctgcgcagatcttcagcaaaagctcgacaagaatgatcgaatcttcgtctctcgtgtgccgcctggtgaatactacggatacatcagcaaggcggctggagactggatcctcaagcatagcggctga

SEQ ID NO: 527583 - DNA, 825 bp, Stenotrophomonas maltophilia
gtgctggtgccgttcgcgctgtggaacaagaccagctttctcgccgagaaggtgctgggcaacgtcgtggccgctggcatcaaagtgctggtgctggctgtgatcgtcggcatcggctcgggcctgttcgcgcagttccaagtccaccccgccgagccgaacatcgaccacgcgctggtcatcatgctggcctcgctcaccttgctcgcgctcgggatcttcggccccggcatcgccacgggccttgtgtccggcgcgccccagctcggcgcgggcgcgatggccggtgccgccgtcggcgcggccggaacggcagtggctgtcggtgctgccgcgacgggcgtgggcggcgcggtggccgctggcgcgcgcatggccccggctgccgccaagctggccggcagcggcgcgcgtgccgccacgtcggcggctggcagcgcgaagtcggcgttccaggcgggttccgctgccgccggcggcggtgccaaaggcgcgatggcgggcttgggcaacgtcgccaagaccggcgcgcagtctgccggacgcgctgccgcatcccgcgcttccgctgccgggcagcgcatggccgcaccgttccgcgcgggctggaacggcgacgctggcgcgtcagccggccaggccgccaccagcgaagcgccggcaggcgctgccgctgcacaggcgcccgagcagcccgcttgggccaagcggctgcatcgccgccagcagctcacccacgccgcgaccaccgctgcccacgcgctgcgcggtggcgacggcggcggctccgggcaaggcccgagcctgcgcggctccgacgactga

SEQ ID NO: 527584 - DNA, 825 bp, Stenotrophomonas maltophilia
gtgctggtgccgttcgcgctctggaacaagacctcgttcctggccgagaaggtgctgggcaacgtcgtggccgccggcatcaaagtgctggtgctggccgtgatcgtcggcatcggctcgggcctgttctcgcagttccaagtccatcccgccgagccgaacatcgaccacgcgctggtcatcatgctggcctcgctcaccttgctggcgctggggatcttcggccccggcatcgccacgggcctcgtgtcaggtgcgccccagctcggtgcgggcgcgatggccggtgccgccgtcggcgcagccggaacggcagtggctgtcggtgctgccgcgtcgggcgtgggcggtgcggtggccgctggtgcgcgcatggccccggccgccgccaagctggccggcagtggcgcgcgtgctgccacgtcggcggctggcagcgcgaagttggcgttccagacgggttccgccgcagcaggtggcggcgccaagggcgcgatggcgggcctgggcaacgtcgccaagaccggcgcgcagtccgctggacgcgcagccgcgtcgcgtgcttccgctgcggggcagcgcatggccgcgccgttccgcgccggctggaatggcgatgctggcgcgtcagccggccaagccgccaccagcgaagcccccgcaggcgctgccgctgcacagccccccgagcagcccgcctgggccaagcggttgcatcgccaccagcaactcacccatgccgcgaccactgccgcccacacgctgcgcggtggcgatggcggcggctccgggcaaggcccgagcctgcgcgattccgattcataa

SEQ ID NO: 527585 - DNA, 351 bp, Stenotrophomonas maltophilia; identical to SEQ ID NO: 10325

SEQ ID NO: 527586 - DNA, 210 bp, Stenotrophomonas maltophilia
atgccccttgccgaaagggaaatcgggccggcccgccgctacgattccggtgacttcaaccgcctgcgccggcggaagcaccaggatgggaattccattcacccacacgccctcagccgcccatgggtcctgtaccggcggcccgggatgcagcgcagacatttcaagaccatcaacgtagacacccgcacgcgtaccaatctcccgtga

SEQ ID NO: 527587 - DNA, 549 bp, Stenotrophomonas maltophilia
atgcgctgtatcctgttgttgattgcgcccctggcgctgctgggctgttcgcggccggcagccacaccggatgcgacacctgccgtgataccggccagcaccgatcagccgtcgaacgtgtcgccaacggcagtgcccggcggcgacccaccggctgcgcaatcgccttcggtcgacccgctgttcgctgcggtggcccccgatgccgagccgccctcggtgatgctcaaccgctacgtgcgcgcactgctcaatcgcgatcgccgcgccagtgatgcggcatggaccttcccacccggcgatgcccggcatgccgacgacgccgcgctgcgccagctgcaggaggtgcgcacgcttcacctgcgcagcagcacgccgattgcccgcagcccggcacagcccgctcagctgctggaggtgccggtgcgggtgcgtgcggtcaccgccaacggcaccttccatttcagcggctggtaccgcgtgcagcccagcagcgacggtcgcgcctggcagatccagtcggcgcacctgcagccaacgctggactga

SEQ ID NO: 527588 - DNA, 876 bp, Stenotrophomonas maltophilia
atggccgccttccgctacctgcagctcgatgtcttcgccccccaccccggcagcggcaatccgctgggcgtggtgctgggcgccgatgggctctccagcgcccgcatgcaggcccttgccgcctggctgaacctgtccgagacggtgttcttcctgccgcccagcgccccgggcgccgactaccacatccgcatcttcaccccgaacagcgaactgccatttgccggccaccccagcgtgggcgcggcctgggctgcagtcacctgcggcctggcaacgccgcgcgacggcggcgcgctggtccagcaatgcgctgccggcctgctgccggtgcgggtgagtggtgccgccgcttctccaaccatcgaactggccagcccaccggcacagcgcctgccgaccgacccgggtcaggtgcccgggccgctgttggcgctggccgccgccgggcatgcgcccgaactgtgggacaacggcccgcgctggtggctgctgccgctgcgtgacgccgccgccgtgcgcggactggccccggacatggccgccctgcgcgactggaccaatgccaccggcgcaacaggcgtcgcggtattcgccgacgaagccgccacggaccatgcccgcgtcgtgcgcgcgttctgccctggcgatgcggtgaacgtgcccgaggacccggtcaccggcagcgccaatgcgctgatcggtgcctggttgcgcgagcgcgtcgtgctgcccggcggcagcggcgcctatgtcgccagccagggccgcgaagtcggccgcgacggccgcgtccacgtgcgcgtggatgccgacggcacggtgtggatcggcggccaggtgcagccggtgatcgacggccagatcagctggtaa

SEQ ID NO: 527589 - DNA, 2193 bp, Stenotrophomonas maltophilia
atgctgaagatcatttgcctgaccgctgccctgggggcagcgctgggttcgaccgcgcaggcggccgacctgcaattcgacggccgccgggcgcgcgccgaagccgctgccggcggcagcttcgcgctgcatgcgccgaagggcgcagtgcagatcgcagccgcaccgatgcgcagccagaccggcagcgtgatgttcgatgcgctgttcgcgctggcccagcaggagatggaccaggatcgcgtggatgcgatccgcgatcctgcattcgacgagggccgaccggtaccgtgcgaatgcttccagaccggcgcgcgctggccctatgtgtggacccgcgatgtcagcttcgccgccgacctggcgttggcacggctggatccgcagcgcacccggcaatcgctgcagttcaagctgtcggccgcgcgcgatgggcatacgcccggcctgttcgtcgcgcaggacaccgggtccggcggcagctggccgatcagcagcgaccgcgtggtgtggttcctggccgcacgccacctgctggatgatccggcgtttgccgaccaggtctggcaggcgctgcagggcacgctggcgcaggaccgtgcgatggtgttcgacgcgcagatgggcctgtaccgcggcgagacctcgttcctcgattggcgcgagcagacctatccggactggacgcgcgaggacgtgcgcttcatcggtgactcgtacgcactgtccaccaacgtgctgcactaccaggcgctgcgcctggccgaacgcctggccggccagcagggcgatgcccgcgcggcggactacaaggggtgggccgatgcgttggcgaagcagatcgatgcgcgcttctggcgcgaggatatcggccagtacatgagctacatcggcgaagccgcgcacccggtgccgtacgccaaggtcgatctgctgggcctgtcgctcggcatcctcgccgaggtgttgccggccgagcgcgcgcggcgcgcgctggcgacgtacccgatggggccggccggcagcccggtggtctggccgcaggaagcgcagcagccgatctaccacaaccgcgcgatctggccattcgtcagcgcctactcgctgcgtgccgcgcgccagctggacgatgcgccacgcattgccgccgagatccgttcgctgatgcagggcgcggcgctggccggttccaacatggagaactatgagctggtcagcctggccgtgcatgtcgatgaaggcaagctcagtgggccggtggtcaactccgagcgccagctgtggtcggtggcggggtacctgtcgatggtgatcgagggcgtgttcggcgtgcaggacgatggtcgtgtgcagcccaagctgccggcggtgctggtgccggagttgttcggcacgcagcgtcgcatcagcctggaagccggcggcaagcgctacgtgctggagcgcccggcgtcgctgggggctggcctgctggtagccggcagcacgcagacccacggcaacacgaccacggtgcagctggtggccgcaccggccgcggcgggaggccgcggcatgaccgccgacgccaatgcccgtgcgccggccacgccgcctgcaccgcaggccacgcgcactggcgccggctggaccgtgccggtggcggccggtcagcggctgtggaaggacggcaagcaggtcgccgccagcagtggccaggtgcacgtcagcgacgatggcctgcagcattgcctcagcctgacccggcgcgagggcgcattggaatcactgcacggcccgacggtctgcgtcgggccgcagcagctgttgcagggcgagcagcgctggcagttcgctacggccaacgccgggcgggtgcgcctgcgcctgcagtacagcaacccgaacgggccgatcaacaccggcgtcaccgcggtggtgaagcaggtggtgctgcagtgcccgggccagcctatgcagaagcagacggtcacgatgccgcacagcgtgggcgtacaggactcgacctcggcaacgttcacggtgcccaaggggcagtgcatggtcacgcttgaagagggcttcaacatgagcgtgctgcagcacttcgcgcactacaccgggggcaagggcggccgcgagggcgtgctcaaccaggcccaggtgcaggcgctgaaggtcgcccaggtggcaacggaagaggacgcacgatga

SEQ ID NO: 527590 - DNA, 576 bp, Stenotrophomonas maltophilia
atggatcgtcgcgaactgttgaagatgatcgttgctgccacgggtgcggccatggtcggtctgccggcgctggtacagggcaaggcaccggctgccggggcgatgcctgccttctccgacgccgatatcgccttgctggacgagatcgccgagaccatcctgccacggacgaaaacaccgggagcgaaggatgccggtgcgggtccgttcatggcgaccttcgttgccgactgctacaccgcccggcagcaggcgacgttccgcgccggcctctccgacatcgacgcgcgctccggtggccgcttcgcatcgctcacgccagacgcccgtaacacgctgctgcgcacgctggatgcagaagcaaaggcacgcacggccgaggtgaccgagacgggcactccggaagagggcgaggcgatgccgcattacttcacgatgctcaagcagctggccatcttcggcttcttcacttcgaaggtgggcgcgactgaagtgctgcactacgttgcggtaccgggtcgctacgatggcgacctggcctatgttgccggcacgcctgcatgggggaccagctga

SEQ ID NO: 527591 - DNA, 1125 bp, Stenotrophomonas maltophilia
atgcccaagcctggaatcgccatcatcggtaccggcatgatcgcggccgtgcatcgtcgcgccgccttgctggccggtgccgacatccgtggcgtggccgcctcttccgcgcagcgcgccgccgaggtagcgcaggcgtggggtgtcccgcgcggctatcgcgatatcgaggaggtggtggccgacccgcaggtgcaggtcgtgcacgtctgcacgcccaaccacctgcaccggcccatggccgaagctgcactgcgggccggcaagcacgtggtctgcgagaagccactggcgaccacgctggaagacgcgcaggcgctggccgcactggccagctcgagcggcctggtcgccacggttcccttcgtctaccgctaccacccggtggtgcgggaagcacgcgcgcgcatcgccgcaggcgacatcggccccctgcacctcatccatggcagttacctgcaggactggctgctggacccggccagcaacaactggcgcgtcgatccggcgctgggcggcgcttcgcgtgtgttcgccgacatcggttcgcactggtgtgacctggtggaatgggtcagcggtgaacgcttcgccgaggtcagcgcggcgttcgacacggtgatcgccgagcgcagcgcctccggcgcgcagagtttcagcaccccggcagccggcggtgcgatgcaggcggtcgccagcgaggacgtggcggcggcgatgttccgcaccggcaacggcacgctggcatcactgacggtcagccaggtctctgccggacgccgcaaccgtctctggttcgagatcgatggcgcccgggccagcgtggcgttcaaccaggaagatgccgagcggctgtggatcgggtggcccgaccagcgcgaagaaaccttcgtgcgtgggccgggagccggcagtgccgaacagcgccggttgtcggtgttgccggccgggcacgcacagggttacgcccagtgcttcgaggcctttgtcgccgacacctatcgcgccatcgacggcgagcggcccgaggggctgcctaccttcgacgatggcctgcgctcggcgctgatcgtcgaccgtgtcatcacatcggccaggacacgcgcctggaccaccatcgcttga

SEQ ID NO: 527592 - DNA, 411 bp, Stenotrophomonas maltophilia
atggcgcatccccgcgctccgatggaacgcctgatccgcgccaatgccgatgagataaaccggcttcgccaggtgatccgcgataccgcaggtacgcgttggcgtgggccggagcagcgggcgctgcacgctgcggcctgcgccgagtatcaactgcgctacgatcagcttgcctttccgggcggctatgaccaagcgttgaaactgctggccgagcatgaccccggcacgctggatgtagtgcttactttcctcgaagtgcggccctacttcttccggtccggctacatgtggaagacattgttgaagcgcgtgcagcgggtgccgatgggcgttaagcagcaggcgcggatgcagagaatcctcgatgcctacggcgcttaccgggtggcacgcctgcactcccgttag

SEQ ID NO: 527593 - DNA, 861 bp, Stenotrophomonas maltophilia
atgtccttgcctgctgttgccatcaccacacgccgggcgctgcgcgacgggcaggtgcccgcatcgcgccgccagcgcctgctgcgtatcggagccctggcctggttgggcagtgccgcactcgggcagctgctgttcgccgtctacatcgtgggcttctacggacgcagcacgctggcgggccagccactgcgctggaacgaggtgatgccgcacggttacgtcgccggggcgaccaccttcaacgccgtgctggcgctgcacctgctgctggcagcgggcatcgtgctggggggatggttgcagttgtggccagcgctgcggcgctgggcaccggccgtgcaccgctggaacggccggctctacgtgttggccgcggtactgctggcactgggtggcctggcgatggtgtgggtccgcggtggcgctgccggtgatgtttcgcagcatctgggcacctcgctcaatgccctgctgatcctgtggttcgcggcggccacgtggtggcgcgcacgccagcaacgtctgggtgagcaccgcgcatgggcgctgcgcctgttcctggcggtggggggcgtgtggttcttccgcatcggcctgatgctgtggctgctgctcaaccaggggccggcgggtttcgatccggaaaccttcaccggccccgcgttgaccgtgctggcgtttgcacagacccttctgcccctggcagtgctggaactgtatctgcgtgcccaacgctctgcaggggcggcgcatgcctggcgggtcggcgtggtcctgctggttgcggctgtggccaccctggccggcagcctcgccgcggcggcactgatgtggtggccaccgcttgcggccggctga

SEQ ID NO: 527594 - DNA, 858 bp, Stenotrophomonas maltophilia
atgagcgccgtcgcgcagccgacggtccggccggcagctgccgcggacagcgcgcgcctggggcgcctggccgtcgccagcctgcacgccgaactggcgctggcgcccaagcccgggctggtcactcccttcgacagcggcagccatcacgacatggacgccggcacattcctgcgcagtctgttcgcgctgcgccactatttcgctgccgtggcccacctcggtgcagccggggcggacttcgatgccctgcgccgatgtggcatcgccgccgaagcggcgatgctgcgcgcgaccgccggcatcaatacccatcgtggcgcgatcttcagcctcggtctgctggtcgcggccgccgctgcctgccgttcccgcctgggccatgccaccagcggtgagcgggtctgcctggaggtacgtcgctgggcggggcacttcgcacatgccccgctggatgcaggcagcccaggccaacgtgcgcgcgtccggcacaacgtgcccggcgtgcgcgaacacgccgctgcaggctatccgctgctgcgcgaggtggcgttgcccaccctgcgccacgcgctggccaatggcctgtcacgcgaagccgcgatgtgccacacgctgatgcagctggtcgcacacaccgaagacctcaacctgctgcatcgcggaggcgctgaaggcctgcgctgggcacggcagcaggcccaccgtttcctggccgacggcggcgccttcgcgcacgattggcggccgcgcctgcgacagatcgccgatgccttcgtcgtgcgtcgcttgagccccggcggcagcgccgacctgctcgcctgcagcgtgttcctgttgcatcaggagggctcatga

SEQ ID NO: 527595 - DNA, 642 bp, Stenotrophomonas maltophilia
atgcctgagcgcttgccccggcatacgctggtctggctgtcggcacacgcggcctggcaggccgacatcgccccgcatgagccgcgcttggccaactggttcgcgcagggcctgccggccatcgtcgcccggcgtgccgccgacgatgccgatccccggctgcgcctgggcgtaccgctgccgccggccgagggcaaactgcgcctggccctgcgcgtgccggcacgcgatgtgctgcgcagcgcaccgccaccatcacttcatacggtgctggaaggcaacgttgcgcaggactggcaacgccccctgcaggcactgcacggcatcgctgcggcgcatgtattcggtgccttcgcgtggcagcacctgaccggcctgcactatgtgcacgcgcgttcggacatcgatctgctgtggcagatcaacagcagcgcacaggccgatgccctggttgcacggctgcaggcctgggaaaccgaacacggccgccgggtcgatggcgaactgtgcctggccggcgatgccgccgtgaactggcgggagtacgcgggacgcagccgcgaagtgctggtcaagcgccacgacggcgccgccctggaactgcgcgagtccgtgttcgcccccgccggggtgaccgcatga

SEQ ID NO: 527596 - DNA, 1644 bp, Stenotrophomonas maltophilia
atgaacccgagctgggatacgttgcaacgcagccgccgggtacgcctggagcgcgcttcgcgctgggcctgcggccatgaggtcgcggccgccgatatcggcgaactgctgcacgcgctgctggagccgggtgacaaggtctgcctggaaggcaacaaccagaagcaggccgacttcctcgcccaggcacttgccgccctcgacccggcacggattcacgacctgcacatggtgcagtcggtgctgtcactgccttcgcacctggatgtgttcgaacgcggcatcgcctccaggctggacttctccttctccggcccgcagtcggtgcggctggccaacctggtggccgaggggcgcatccagatcggcgccatccacacctacctggaactgttcggccgctacttcatcgacctgaccccgcgcgtggcgctggtcgctgcgcaggccgccgaccggcacggcaacctgtacaccgggccgaataccgaagacaccccggtgatcgtcgaggccacggcgtttggtggtggcatcgtgatcgcgcaggtcaacgaaatcgtcgacaccctcccccgcgtcgacatccctgctgactgggtcaacttcgtggtgcaggcgccgcgcccgaatcacatcgaaccgctgttcacccgcgacccggcacagatttccgagatccaggtgctgatggcgatgatggcgatcaagggcatctacgccgagtacggcgtcaaccgcctcaatcatggcatcggcttcgacacggccgccatcgagctgctgctgccgacctatgccgaatcgctcgggctgaagggaaagatctgccagcactgggccctcaatccgcacccggcgttgattccggcgatcgaatcgggcttcgtaaaatcggtgcattcattcggctccgaactgggcatggagaagtacatcgccgcacgaagcgatgtgttcttcaccggcgccgatggctccatgcgctccaaccgcgcgttctcgcagaccgccggcctgtatgcctgcgacatgttcatcggctcgaccctgcagatcgacctgcagggcaacagctccacggccacgcgcgaccgcatcgccggcttcggcggcgcaccgaacatgggctcggatgcgcgtggccgccgccacgccagcgacgcctggatcaaggctggccagcaggccgcccgtcccggcgaaatgccacgcgggcgcaagctggtggtgcagatggtggaaaccttccgcgaacacatggcaccggccttcgtcgatcgccttgatgcctgggaactggccgagcgcgccggcatgccgctgccgccggtgatgatctacggcgacgatgtcagccacgtgctgaccgaggaaggcatcgccaacctgctgctgtgccgcacgccggaagaacgcgaacaggcgatccgcggcgtgtccggctatacggcggtcggcctgggccgcgatcgcgcgatggtcgagaacctgcgcgaccgtggtgtcatccgccgcccggaagacctgggcatctccgtgcgtgatgccagccgcgatctgctggcggcacgttcagtgaaggatctggtgcgctggtccggcggtctgtacgacccgcccaagcgcttccgcaactggtaa

SEQ ID NO: 527597 - DNA, 1128 bp, Stenotrophomonas maltophilia
atgtcacggatgctgatcgtggtaggtgacgccctgcagacgggcggttcggtactgacaggttccccgcacaccgatatcgaaggccgcgccgtggcacgcgtcggcgatcgggtgatgtgcgcccggcacgggcccggctcgatcgtgaccggtgacagcaccctggtcatcgacggccagccggtcgcccgcgacggcgacaaggccagctgcggctgcgcgctgatggcgggcaagcagcagcgggcgcatgtcgtcgccggtggtgggggtggtggtgggcaggccgcgctgggtgcgctggccaaggtggcgggcatcgtggcgccgctgctgaagacgatgccgttgcagacgccgccgttcgcaccgcccggcacgcccgcgccggaagagccggcggcgccgcagtgctgggtggacgatcacgatacccggatcgatcgcgatgtggacggacgctattacgaggcgtacgacgtcaacggtgacaagcacgattacgccttcccggtcagctaccgcatcgaaatcccgctgcatgcgcagggcgaggtggtggtgtcgatcaaggtgcagccgatgccacaggccggggtcaccgcggccgaagtgaccgcgacgcgagcacgcatggagcagggaatcgatcagttctggaatggccgcttcaccctggacatacacgacccgcagtgcggtacccgcagtttcccgctccgctacgaagtgcgctgggtgcagggcggcagcgactacaaattgatcatccaccgcagctacgaccgcgagcaggtcgagtttccggatatcgacgtctcggtatcaacaacgccgtggaccttcgcccacgagttcgcccatacgctgggcgtgcccgacgagtattcctacaatgatccggacgaggaaaccgtgcgctacctccagcccgacggtaccctcgatccggaagtgctggttgccgttcctgattcgcgcgcgctgtccgacccgtcagccaccatcatgaattcggtcgactgcgccgtgaccctgccgcgacatgcctggaacatcgcgcgcgagatacgcgagctgctgagccgccagatcggccgggagataacatgcaccgtcaagtga

SEQ ID NO: 527598 - DNA, 489 bp, Stenotrophomonas maltophilia
atgcaccgtcaagtgatttcactgattgccacttttgccgccgccaccgcgctgccggcccatagcaaggagctgcctcccgtgatcgaacttcatgcgcgctgcgtggacgatgcccagtgccgtttccgtgggcagacgctcaatgtcgagctggagctgcgcaacagcggcagtgagccggtgtcattgccgctggagtacatccgcagtcgtggtccttcggtgaaggtgaaggacaaccactcggggaagacgaccgccctgcgcagtggcatggccgccgctgcgctgcgggatcagatgcaggagctgcgtgcgggccagtccctgcgcatcggttttccgatcaagccgcaggaactgacccggttcgcgttgcgcccaatggatgtgaccctgcagctttcggtgaacctgacgcccggtgcaggcagtaccgaagcgcaggtggtgcaggcgcagctgcgcgtgctcgacgcagactga

SEQ ID NO: 527599 - DNA, 1986 bp, Stenotrophomonas maltophilia
atgaagcatgtaatgctgctcgccgtcctgctgttgctgtgcggtgccagccacgcgcgcgcagccgagatcgcgctggatgactacctgcggcgcgccgagttcaacgacatccagctttcgcccaccggcgagtacctggccatgaccctgcctctggaaggggcaacggcggtggccgtgctgcgcacccgcaccatggaactggtcggcaatttccggccgccgcgcaacaaccacgccaacagcgtcgattgggtgagcgacaatcgcctgctgatcgggctggccgagaagtggggggcgctggatgtgccgcgctccaccggcgagctctacgcgatggatgccgatggcaagcggggtgatcttctggtcggctaccgcgcgcgaccggatgagccgggcctggtcagcggccgtgtggtcgagccggtggcggcgttcctcgccgatccgctggccggagacgagcgcaacgtactgatctcgctgtggccgttcgccaacgacaccagcgcacggcttgagcggatggacgtcatcaccggccgccgcgtgctggtctcgcgctcgccggtgcagcgggcaaccttcaccaccgacaacgccggcgtactgcgctttgcccgcggcgccgccgcggacaacatcaacaagctctactaccggcaggacgatgggcgctggaccttgctcaacgacgagggcagcagccaccgcatcgaacgccccatcggtttttccgccgacaaccacctggcctacctcatcgtcgaacagtccaccggcccggatgcggtggtcagctggaatccacagaccgacgagcggcgaaccctgctgcgcgacgcagtggtcgacccggcctcgatcatctaccagccgggcagccgtgtgccggtcggcgtgcagttcgtgggagcgaccgcgcgcagcgcgttcttcgacgagcagtcgcccaccgcgcggatccagcgcatgcttgagaaggccttccccgggcagcgggtcagcctgctgtcggccacccgtgacaacgcgcgcatcctggtcaaggtcagttcgggcggcaatcccggggactggttcatgttcaataccgccacccgggaagcggcgttcctgaccgcgcgccagcgctggttcgaccgcgacggagctgccagcgtgcgtccgctcgccctcactgcgcgcgatggcctgccgttgcacggcttcctgaccgtacccaagggcagtgacggccgccgcctgccgatggtggtgatgccgcacggcgggcccatcggtgaattcgatgatggtggcttcgagcgggacaaccagctgctggccgcagccggctatgcggtgctgcaggtcaatttccgcgggtcgggcaactatggtcgcgcccacacccaggctgcggccaagcaatggggccaggccatgcaggatgacgtgaccgacgccacccgctgggccattgccgaaggcatcgccgacccgcagcgcatctgcatctatggcgccagctacggcgcgtactcggccatgatgggcgccgtgcgtgagccggcgttgtaccggtgcgcagcgggctatgtgggcgtgtacgacctgccgctgatgttcaagcgcggtgatatccaggaccgcacttcgggcgtgaactacctgaatgagtggctcggcgatcccgcggcgctggcagcggtctcgccggtgaacctggcggcccggatcacggtgccggtgctgctggcggccgggcgcgaagacacgcgtgcgccggtgcagcacacgcagcggatggaagcggccctgaagcaggccggggtgccggtggaagcggtgtactacccgcgcgaagggcatggcttctatggcgaagccagccagcgcgattactacacgcgcctgctggcgttcctgtcgaagcacctgggcggggcgaacgcccaggttgcagcatcggtggaaaaggccaaggcgccctga

SEQ ID NO: 527600 - DNA, 177 bp, Stenotrophomonas maltophilia
atgacgctgcagtctgggcgcctgtatgaggtcacgatgtcggccaccagaacgggcgccacccggttctatagcgcccgattctgcgtgaaggcgaacgccgatggcagcctgcgggcgatccaggtccgctacgacgacgctctgggctggagtcctgcggtctgcctgccctga

SEQ ID NO: 527601 - DNA, 1290 bp, Stenotrophomonas maltophilia
atgcgcctgcgccccaccctgttcgccatcgcactggccgccttcagcggcggcgccctggccaccgagccgcagcaggttgccacgcaactgctggaccacctgcaggccgggcgcatcgccgaagccgaagcgatgttcaccccgcagatggccagcgccgtaccggccgagaagctgcaggggctgtggcaatcgctgggcgagctgcaacagcgcggcggcgcccacagcagcgaactgcaaggcgtgcatctggtggaagtgccgctgcagttcgccagcggcgcggtcgtcgcgcaggtggcggtggatgcgcaggacaagatcgccgggctgatgctgcgccccgctccgccagccaaggcagcgccaccaccggccgatgcggtctacagcgaagctgatttcagcgtgccgcaggtgcgcggtgcgctgccgggcacgctggctctgcccaaggggaagggcccgttcccggcggtgctgctggtgcacggctcggggccgcaggaccgcgacgagactctcggtggcagccgcccgttcctggacattgcccgcggcctggccgcacagggcatcgccgtgctgcgctatgacaagcgcaccctcgcccgtccgcaggatttccagggccgcaccttcaccgtcgatgatgaaaccaccgacgacgccgtggccgcgctgaccgcgctggcatcggacccgcgcatcgacaggcagcgcatcttcgtactcggccacagccagggcggcatgctggccccgcgcattgccagccgctggccgcaggcgcgcggcgcgatcctgtgggctgccccggcacgcaccctgctggaactgctgcccgaacagaaccgctatctgctcagcctggacggcggcatcagcgaacccgaacaggctttcctggacacgctcgacgcgcagatcgccgccgcccgcggcagtgcgccggttgccgccagcgaactgccgctgggcgtgccgcagtcgttctggcagagcatcgaggcagtcaacgcacgcgccgacgcgaaggccctgcacaagccactgctgatgctgcacggcggccgcgatttccaggtgcccgatgcggattggcagctgtggaagcaggcgctggacggtcacaaggatgtccaatggcacgcctacccggccctgaaccatatcggcgtggccggcagcggccccagctcactgaaagagtacgcccagccgggtcatgtcgatgccgggctgatcgccgatgtggcgcgctgggtggaggcgcagcgatga

SEQ ID NO: 527602 - DNA, 627 bp, Stenotrophomonas maltophilia
atgttgtggctggaagtggaaggcaagctgcgcgaactgagcggcaaccgccgcagcctggacgacttcgcgcgcgccttcttcggtgttggcaatggggactgggacgtcaatccgtacaccttcgatgacgtggtcgcgaccttgaacggcatcgcgccgtacgactgggcgacgttcctgcgcggccgcctggacggacatgggccgctgaccggcggcctggcgctggccggttggaagctggtctaccgcgataccccgaacgccgcctacaaggcgcaggaaaagcgcgccaagggcgcattgctcgcctactcgctcggggcgaccgtgctcgacagcggcacggtgagcgacgtgatctgggacagcccggcgttcaacgcagggttggcgcccggcatgaaggtgatcgcggtcggcggccgcgagtacagcagccaacggctgaaggacgccgtggctgacgcggccagagacaaggcgccgatcgtgctgctggtcaagcagttcgaccgcatcgatacgatgaacatcgactaccacggtggcctgcagtacccgctgctggagcgcatcgccggcacgcctgatcgcctggccgagctgtggaaggcgcgatga

SEQ ID NO: 527603 - DNA, 2787 bp, Stenotrophomonas maltophilia
atggcaggaccgggcgcgctgcagtgggggctgctccgccccctgctgtgcctggtgctgttggccactgcattgcccgcggccactgccagcgaatcggcggccacgcatgcctaccgcatcgatgccggcccattgccgtcggcgctgcagcagtgggcacggcagagcggcatcgcgctgctgttcgacgcccgtgagctggcaggtctgcacagcgacggcgcgaacaccgggaccgatcccgccaccgccctgaagcagctggttgccggcatgccggtgacgatcctgcgcacgccttcgggtggcttcgtggtgcgccgcgtcggtgcggccccgattgccacaacacccacgccaaaggccgtggtggctccccgccacgatgccccccggccgccgccgcaggtggaactggcaccgatccacgtcaccggcagccgcctgccacgcacctcggtgcagaccacgctgccggtcaccacgattgatcgggacgacatcctgcgcagcggctacggcagcctgttcgacctgctgcggcacctgcccggcatgaatggcctgccggcgatgagcagcgcgcgcagcggtgactcgcagtacctgccggtcggtgccgcagccactaccagcctcgatggcatggggccgcgcgccaccctgttcctggtcaatggccggcgcctgccgcgctacccgatggtgtcgctggagcagggagggcttaccgacctgggcggcattccgctcagcttcgtcgaacgcatcgagctggtgcgtggcggtgcctcggcgatctacggcgctgacgccatgtccggcgtggtcaacatcatcctgcgcgaccaggccgatgggccggaagccatgctgcagaccggcctgagcagccggggcgacgccgcgcagtatcgcctgcaggcggccaccggcggcctgcgcggcaacggcgatcgctggttcgccggcgtcgacctgcaccgtgtcgaccacctggccggcgaccgccgcgactggcatgcggaaacctcgcaatacctgatcggtgccttcggcgctggccgctactggcctgcacggcgctgcgaagggccgttgaagcggcgcgatggtgcctgctggttcgacagtgcgcgcccacgctcgctgcagcccgcttcggataccgcgtcggcctacctgcgctatcggcatgaacgtggcgaagggcgctacgcctatgccgaggcccgcgccagccacaaccgccagcgcttcgacctcggccccaccgcggtttccctcgccctgtacggaatcaccttcaacaccgtgctgcgcgaagccggcaacgtgcgcccacacgttcgcgccaccgatgctgacgtcaccttcggcatcggccgcgaccagggccggcgcagctgggatgccgggctcagcgcacagcgcagtgatgtcagcctgtccacgccgggcaccgtgcgggccaccccgttgatcgaggccgcgcagtcacttcggttcctgcccggattcgacatgctgcccagcggcgaaacggcgtcctggttcccgatgatccgcaaccgtggccttaccgaacaatggcagggctggtggggcatgcagcgcgaactcatgccgttgccgggaggcaatgcgcagctggccaccggcatcgacctgcgccatgagcgctggacctcgcaccccgatgcgctgctgagccagggtgacctggcgctgggactgccgcagcagcagcgcaggctgtcgcggcagagtggtggcgcctacgccgaactcggcctgccactggcacctgcgcttcgcatggacctggccgcacgctgggaccgtgacggtgactacaccgcggtctcgccacgggccggcctgcgctggacgccgtcgccgcagtggtcattcctgctggccagcgggcgtggctaccgcgcccccagcctgttcgagcagcggcgcccacccggccagttcggcaccctcaccctgcccgcttcggatgcgctgccgccgtgtgcgcagagcgccgcggatggacgctgcagggtgaccgcagacgtggaagaaaacaccatgctgaaagcggagagctcgcgcagccattcactggccgcgacctggtccccgaatgatgcgttctcgctgtcgctgacccacaacatcgtcgagctgcgcaacgagatcctcgcactgcagcccaacgatgcggtctggaaccgcgatacctggcagctggacgaacaaggcaggctgcgcagcctgcgcctgtccttcgacaacatcggccgcaccacgtcgcgcaactgggtgctgcgcggcgagtaccgcatcgacaccggcagcaacggccaatggctgttctcgctggatgcactgaaacagcaggaactgcgccgccagcgcgaccacgaacccgcgatcgacctgcgcggccatgtgacgccggagatggcagcggtgctgaacgtgcagtggcagaacagccactgggacatcgccctgcgcggcaaccaggtcggccgcacccgcgcctggctgcccggtgccgagtgcccgcaggatcaggttgaacagaaccactgcatgaacccccgccagctgcgctggaacctgcacctggcacgccgccttggcccgcgcatcgttgccgcactggacgtgcacaacgtgctcgacacacaaccggtgaactacctggtcggcaatggcgggcagatgcccgggctggacgatccattgggccgctactacctgctgaccctgcagttccgctga

SEQ ID NO: 527604 - DNA, 810 bp, Stenotrophomonas maltophilia
atggcaacccaaaacaaaaaaagtccccgggcgccatcttttggcctggaagaatcgctgagcaatgcgctgaaattgtatggcgaagcacagcgcagctatgtatccagcgatgtcgccgcaaagatcctcggctactctggcgcaaacaacggttctgctgcgcgatctttggcaacgatgaagtcctttggactgctgctctctgacaacaagggagacgtagctatcgcccccgaggtcgaggagtaccgatacgctcctaacgattcgcacagaatggctcagctcaagcgctggctctcgacacccaaggtctatcaagaactgctagccgagtacccggactcccttccatcagatcaggtcgtaacttatcgactgataaagatgggatttttgcccaatggagctcaggaatgcctacggcacttccgagcagctgtcgagttcgccaactattacgacacatttggacgggcacctcaggaattgcgggcacctcaggaattgagcgaacaggccgctaaaacaggcgctaaagtcagcgaaaaccccgaaaaaaattccaacacttcaccactcttccctgacccctccgttcgagtcgagagcgacattcgcaccctgcaacagcagaagagctttaccacagtcgacacacacgccaactcagcggaccggattcctgtgcgcctcagcgggggacgccgtgcatggatcgaggttcccagtccgcttttcactgcagacaaacagatcctcaaaagccaaatcgatctcatcatggctgacgatgagtttgattaa

SEQ ID NO: 527605 - DNA, 135 bp, Stenotrophomonas maltophilia
atgcaggaagcgacatgtgagccggatgagttctgcgggcggcgcgccggagacaagttccgccaggaacccaatctgctcccccgccctagtgcgtatcgcgctcaagctaccgtcaacaccccaaacctttag

SEQ ID NO: 527606 - DNA, 465 bp, Stenotrophomonas maltophilia
atgcgaaagacagggatgtgggtgttcgccgggttgctgctggcccccgccgtgcaggccgcaccggcctgccaggcgccgacggtcgtggtgcgcgcgttctacgaggcgacgacgggcaagggggatctgttgcagccgccgcccgcgctggtgagcccggcattcggcaaggcgctgcgcggcgaacgcgcctgccagctgcgcgaggagggcatctgcacgatcgattcggacccctggctggatggccaggatggtgacattgacagcgcggtggactaccaatggcggcaggattcggccagtgccggcgtggtcgagatgcgctacaccgtgtggaagcaggcgcgcctgacccgcgtaccgatggtccggcaaggcaacggctgctggcaggtcgatgacatcgtgaccagtcgcggccagtcggtgcggaagatcctcgcccagccggtgccctga

SEQ ID NO: 527607 - DNA, 1278 bp, Stenotrophomonas maltophilia
atgactgcagcctgcatggccgccgaacctcgccattactggcgcatcgccctgctgagtacgctggttgccattgtcccgcttgccggatctgcgccgtacaacctgttgaaggccgtgctgctgctggccctgctggtcaccggcgtggtgctgatccgtcgccagccggatgtccgcctgcgctaccgcatcgcgcgcttcatcgtgatcgcctgtttgctgcgcctggcctttgccttcttcagcatcgcctggcacgacctgcgctggagcgagttggacctgcccgcgcagatgctgctctatctgggtacggccgcggtgttcgccgccgtgctggactggcgcctgatctggactctgttcgcgctctccaccctggtgttcggtggctcatgcatcgtgcagcaccacgtgatggggttggaacgtgcttatggtttcagtggtggcgaatggacggccatcgagttcacgatggtcacgctgtgcatggcgctgttctcggtcatccggttgatccagccgaacgtccatccggccgagcgctgcctgcatggggttgccgttgccgtgggcgtctacggctcgatcctggcgcagagccgggggccgatcctggccttcattccggcgatgctgatggtgatgacggtgcacgtgtggcgtacccggcgctggcgtggcccgctggccttcgtcggcgccctggtcatcggcgtgctcggtgccaccacggtgctcaaccatcaggtcatccaacgcttcggtgaggtcagtggcgagatcgccggcttcaaccagcacaacgaagtgggttcggtgcgtgagcgcatcgcgatgtggggcgtggcggtcgacgccattgccgagcacccgctgaccggggtgggcctgaaccagttcggtacctatgcgcgcgagggcattgcccgcggcgaggtgtccgacgcgatctctcgctacaaccatccccacaacgagtacctggaagcggcagtgaccggtggcgtgccgctgttgctgatcatgctgctgatcttcatcctgccgggtattcatttcgtgcggcggatcggccatgccgatgaaaccacggcgatggtcgccaccgccggccttgccgtggtcatcgtctacgcgctctcggcgttcaccgacaacgtgttctatcgggcaatgccgcattcgttctatttctacctggtgctgggcttcgtcctggcgaccgcgttgccggtccgcgacctgcgccgggacgggagttcgcactga

SEQ ID NO: 527608 - DNA, 429 bp, Stenotrophomonas maltophilia
atgcagccgttaccggcgaacggctacagttgcggcatgtccctggtcctgcacatcgacggcgcatccatcaacgacatcgccagcctgtacgcggaaatcaaccgtgtgttcatggccagcgagaactggcagctgggagcaagcctggacgcgcttgatgacctgctgtggggtggctatggcgtgctcgccggccactccgccgcgaccgtcgtctggcacgacatcgcgcatagccgcagtgtattggggcgggacgccacgcatgcgtggctgcggtcaaaactcgatcagcccggcaccttcaatgtcgcggccatcaacgagcagatcgcggcgctggagcacggccagggacagacgtacttcgagatcgtaatggagatcttcgacgggcatccgcagatcaccctggtcgctgcctga

SEQ ID NO: 527609 - DNA, 615 bp, Stenotrophomonas maltophilia
atggaacgacgagaaagtagaaataattcacctgaaataaaaaacaacatatttgtaaactacccaaaaggattcaaatcgcaagagaaattcaacagaaagatcagaaattatacttcaaaaattatccagccatcattttcggcaatttccgatccagaagaactccttgccagctactgcctttcgaacggatccacattccatcaaacagaagacgcagcaaatgactgcacacacgcaatactattcctagaccagaaatcagactcatcaccaatagccacactgacaaaaagaaacatcccgcagaagagaatccccataaaactaacgacagttgcaaacaaggacagaggtgaaatttttgacgtgtatataggacgaggaacagtctggggaaatccgtatccaatcggaagagaaggagatcgcgaagaagtactaagaaagtataaatatgattttgatcgaaagctcctcagattctttgaaaaccacgacgccaacatagagtcaatcagaggaaaaattcttggatgtcactgcaagccatccgcctgccatggagacatcattgccgattacgtaaactcgcttgacgacggactatga

SEQ ID NO: 527610 - DNA, 444 bp, Stenotrophomonas maltophilia
atgaagatatcaaccatcggattcacaaaaaagtctgcgcagcgattcttcacactcctggaagagtcaaacacaaaaacactgattgacgtccgacttaacaacgtctcccaactttccggattcgccaagcgagacgacctaaaattcttcttaaagaaaatatgtgggatagagtacatccacatcaccgaccttgcaccacagaaggaagcactcaaagcatatcaagacaaaaaaatgtcatgggaatcgtatgagtccgaattcatcaacctaatggaaaaaagaaacatcgagcacaccctggagaagagcgtaattgagcacagctgcctcctctgcagcgaagacaaaccacaccactgccaccgccgtctagtggccgaatacttgaaaagaaaatggaacgacgagaaagtagaaataattcacctgaaataa

SEQ ID NO: 527611 - DNA, 300 bp, Stenotrophomonas maltophilia
atgagcgtgcttgcactgctgttggcggccgccgccttcgcctgcctggccatggcaatggaacgccaccaccgcgatgtggccggccatgcgccaccaacgccgcgccgtcgcctcctgcaggtgctgggcgcgctcgggctgctcgccagcctgttggccagcatcacagcctggggcgctgcacagggttttgttggttggtgcggcgtgctcgccgcaggtgctggggccatggtgctctggctcagtttccgaagcccggccaagccggcgccacgcccgtcttcccgttcctga

SEQ ID NO: 527612 - DNA, 840 bp, Stenotrophomonas maltophilia
atgcaacaggcaaaaccgacctgcttcgtgattcaggcctttgatgggaacgtctatgaccgaagatatagggaaaccatacgcccagcactcctacttgcggaagtcgaaccccaacgagcagacgagatacttggcctaaacccgataattgagaaaattgaaagcgcaatcgctagtgcatccatatgcatcgccgaagtctccgaagacaatcccaacgtttggttagaactcggctacgctctagccctcaatcggccagtcgttatactttgcgagaagggaaaacgccccagacttccatttgacgttcagcatcgacctgtcgtcttttaccgaaccgattcaagaagtggctacgaagaactagaatccaaccttgttaagctcatccaacatgagctcagcaatgagcaacgatcacagcttgcgccaacactgaatccgaacattgcgaacaacacagatcttgatgcgaatgagattgcggtcctgtcactggcattcgctttttggcccacagaaattggcagtatcagtcactgggatttggacagaaaactctccagtgcaggcttgactgaagttggcattgccctcggggtggccacattgaccgaaaagaacttcctgatttcacggagtctcgttgaggaagattccaacgggcaaacgtaccccgtaaagcactaccaaataactccggagggcatccaatggatgaagctccacaaagacctgcttgttacgcgaaaagaaccggctcgccccattcctcgcaaagaatcaatgcaccctaacaataattttatcgaggatgatgatatcccgttctga

SEQ ID NO: 527613 - DNA, 978 bp, Stenotrophomonas maltophilia
atgccatacgaactaaaggaccgcttggtagtaggtgtcgcatcgagtgcaatgttcgacttaagcgaatccgacagggtttttcgcaatgagggagaagaagtctatcgcacataccaagaagagcatcgaaacgatccgctccaaccgggaatggccttctccttcatccgacgcctgctttctctcaatgacctaagccccgcccccaatgccccgctagttgaagtcgtccttctttcccgaaatgatccagacacaggccttcgagtgatgaactcaatcgctcaccaccacctgagtatttctcgggcgatttttcagcaaggcctatcaccttacgcatatattccagcactgaacatctccctgttcctatcaggaaatcagagcgatgtactcgaggcgatcgcgctcggactaccggccggatacgtaatggactcaaagaaaattgacgacccaaacgacacgacgcttcgcatcgctttcgacttcgatggagtcctcgctgacgactcgtcagaaactgtgatgcagcacggcaacctagcagagttccacagccacgaaaccgcaaatgtcatggagcctcacggcggcggcccgctgaagcaattcctcctaaaaatttcgaaaattcagaaggctgaggaacaaaaaagaaagtcagacccagcctacaagaacaggcttcgcgtctccatcgtcaccgctcgaaacgctccatcacatgagcgcgcaatcaacacattgaagagctggggtgtgattgtaaacgacgcattcttcttggggggaatcgagaagcgactagttctcgaagttctcaaaccgcatatattcttcgatgatcaatccctccatctcgccgcagcaagtcaagccgcaccgtccgtccacatccccttcggaataacgaacaattcggaaacggccccacctcaaactgacgaagccacaacagccagcgaataa

SEQ ID NO: 527614 - DNA, 438 bp, Stenotrophomonas maltophilia
atggcttccgtcccgcccccgttgaacgtgccgcctggctggaccgcgctccagatcggcggtcacctgcacacgctcaggatcctgttctgcgtctacggcggcatccagctggcgctgtccgttgtcctgctgatggccgcactgggtggctacatcagcgaaagccggacccccacggtgggcatgtcgcctgtgctgctggcggcgatcctcgctgtcgcggcgctggccatcggtgcactgggcatactcagcctgaccgctgcgaaccggctggggcagcgctgccagcgcacgttgtgcctggtggcggccggtgccgcctgcctgggcggcgcgctgggcatcgcgctgggcgtatacgccctgatcgtgctgctgcgtgcggatgtcgccgccagctttagcgaaccgggcggcgcggtggtcgcatga

SEQ ID NO: 527615 - DNA, 798 bp, Stenotrophomonas maltophilia
atggtccgttccatgtcgcgctggctgccgctgctggccctgctgatgatgaccggttgtgcctcgctgccggacagcgcgcgtggtcgcttcgaagcccgcgcagtcaaagtggacggcgagaccgcctactaccaggtgttcattccggccgggctgaaggccccggcgtccgccagtgttccggtcatcctgttcctgcatggctcgggcgagcgcggcagtgacggcatcaggcagacccacgcggggctgggcccttatctgcgcgagcatcccgacttcccggccctggttgtcttcccgcaggcggcaaaacactcggaatggagcggccacaacaaccgcatggccgtagccgcgctggacgcaacaatcgccgagtttggcgccgacccttcgcgccagtacctgaccggcatgtcgatgggcggctacggcagctggaacatcgccctggacgacccacgccgctttgccgcgatcgtgccggtatgcggcgccgtgctggcaccgcgcgcgaagcgaccgaccctgttcgtcgagcaggtcgcgcatgagtccgatccttacgcggtgatcgcccagcgcctgcagcacgcaccgatctggatcttccacggcgcactggatgatgtggtgccaccggacgacgaccgcaggctgcacagtgccttccagagcgccaacgcgcgcgacgtgcgctacaccgagtacccggaaggcaaccacaacgcctgggacgccacctacgccgatccggcgatgtgggcctggctattcgcgcagaagcgctga

SEQ ID NO: 527616 - DNA, 387 bp, Stenotrophomonas maltophilia
atgctgctggtgctgctcgccccgctggtgagccgctggctggcgcatggccacgttgcggccagcgcaacggtgttggcgatggaccacagcctgcacgcacagcatgcgatggacggccaccacgaccatcatgcgatggcgatgccgcacggcgaagcggcaccgaagcctgctgccgacccccatgccgatcatgagatgggcgtggactgcgattactgcctgatcgccgcacggatgatcaccctgctggtggcagcgttgctgctgctggcaccgatgacgccggtctgccgtgcgttgcgcggggcggtgcaggccctgccgcaacggatcagcggcaccctgggagcgcgtgggccaccggtcctcagggccgcctga

SEQ ID NO: 527617 - DNA, 552 bp, Stenotrophomonas maltophilia
atgattcccgcctccctcgacagtggccatcgcatgatcgccgacaccctggccgcattccgtgccggccccgccctgggccgcacgccgctgcggcctgccccgcaggcggtgggcccgctctacatcggcatcgccggcgccaagcatgcgggcaaggacgccctggccaatggactggcctctgcactggcgctgccctgcgacagctttgcggcaccgctgtgggcgctggctgagctcatccctcagcagttgatgcagagcgccggcaccggatcggggtgtgattgcaacctccccgagctgcgggtgcgctcgttgttcgcacgcctgcctgcaggcggactggtgccggatgtgcgcttggccgatgaagcccgcgcgatccgccgccgtggcggtgtcgtgatccgcgtcagccgtccgggccatgccagcgaacaggccttgccggaccacctggtcgacatcgaagtaaacaatgacggcaccccggccgatctggtgcgcaggacgctggaccagctgctgtcgcgcggcgtgatctga

SEQ ID NO: 527618 - DNA, 378 bp, Stenotrophomonas maltophilia
atgaccccgctcgcgctgaggctgcgcgtcggcctgctgctgctcgtcggcagtcatgcgggtttcgcctggctggggtggaccctgcgggaccgcagcgcggacctggccgttgcgagcgcccaggccgcgcagcaggcatcccgcgctgatacggcgctggccgcacatcagcaggaactcgccaatgcccgggccggcgcccgggccgaatcacagcgcctggccacacaggccgagcgcacccagcagttcaacgccctgcaacgggacatcgacacccatgccaagactcctggccgcgatcgcggcgacgctgatgctgagttcgtgcgcatctggcgcgaagccaacgccggccatgccctgccacgttga

SEQ ID NO: 527619 - DNA, 261 bp, Stenotrophomonas maltophilia
atgccctgccacgttgacctcagcatcgcaccggcacagttgcagacaccccctgagctgccggacctgcagggcgccgacgacgatgcgctgctgcgcaaccacgtcgccgtcgcgcgccgataccacgaactcgccgaccagctgcgggcgctgttgtgcagccttggcaaccagcgcggtttcaccatcaacggtgcgttgccggtcgcgcctgccagctgcggcactgcagccggcgccagcaggaccctgccctga

SEQ ID NO: 527620 - DNA, 552 bp, Stenotrophomonas maltophilia
atggcgaccgattccccacctccgacgctcgacgcgctgcacagcgccatcgaaaccgcgatacgcgcgcacttcccgggccttgccaccgttgcgttctatcgggaatccagcacggacaacatgcccatgccggcctgcctgctggccatgacccgttgtgatcgcaacaaggaaaacagcgacggcagcggcctgctgcacgccctgctgcgcttcgaggcacgcattgtcgtagcggccaatgccgatgcagcgctgcaggtacgcaatgccgccgtcgccctggcaacctggctgcaccagctcggccgcttccccggggccgccagcggcgccatcgatgtgatcgccgcgttgcccgaagacgttgcgacggcacagcctggtctccgcagctgggtggtcgagtggtcgctgccgatcgccctgggcagcaacgcgtgggaggacaccggcggcgtggtgccgcaggccttctacagcttcgcgcccgagatcggccgcgcccatgagccacgctaccagccactgccggagcacgcgccatga

SEQ ID NO: 527621 - DNA, 1062 bp, Stenotrophomonas maltophilia
atgagtgatcccaccacgcgcctgatcaacgcacgcctgcgcggtgcggtcgatgggcagaaccttcagttccgtcatccgggtggcgccctggcttccctgcagtcggtgtaccgcaccgactggcaggggcgcctgaagttgtcggacacgccaagacgcaacctgcagcgcttatcggcaaccttcaacgtgccccgctggacgggctactacgtcaagcctgccaatctgtctgccgggtcattcgcgcctgatggcagccccaatgccttctccttccctgcctccgatgcgatcggcgggccagggcagcgcttcaccggcctggtggacgaagatggaagcgcgtttcccgatggcgccgtccgcaccatcagcgtctggctgcgcgcaaccgagccgtgcgtcatcggcttcggcatgcgcacgaccggcccaggcaggacccagctgcaggtgggtaccgagtggaggcgttacagctacacctacaccgccactgcggatgacccaccacgcggcatgagcatcgtgctggatcggctggcagccgggaactctggcctgaagccggacagccgcatccacgtatggggcacacaggccgaagcaggccctgtggcgacgagctacatccatgccgtcgcgcaacccatgacaaggatcgactacagcatggccggcaacgtagtcaccttgaactacctgcctccccccggcgcgatcatcgatggcgatgcgctggtcagcgtacctgctgccgcacatctgttgccccccaactccacccgtagcgagcaggccctggcgcgcgcagcggtcacacgcccgctgccggtggacatcaccgcactgtgggatgccgaccgctgcccggccgcgctgttgccctggctggcctgggcactgtcagtcgacgaatggaaggcctactggcccgacaaggtgaagcgtgcacgcgtgcgcgcggcaatcgcgatccagcgccgcaagggcacgtggggcagcgtgcgcgacgttgtcgccgcgttcggtggctcgatcctgatccgcgaatga

SEQ ID NO: 527622 - DNA, 576 bp, Stenotrophomonas maltophilia
gtgcccatcgaaccgcgcttcgcgcactcctacgaccccgacacccgcgcctacatgggcaaggtccgtctgcagccctcccccgacggccgctggaacctgcccgactacaccgtcgacctggccccccgccagcccgccggcgagtaccagacgctgcgcctggccgatgatggcacgcgctgggaagcggtcgccgacttccgcaactgcatgctgtgggacacccgcacagcaatggcggtgcccaatcgcctcacgctcggcgagcccctgcccaaggacgtgacgctctccgaaccgttccggctggacggcaccacaccgcagtacaacgcgtggaacgctgggcgccgcgaatggacgctgctgccggactacagcgcacgaccgttgtggaacaagagcgatgccagcttcgcgactccactgccgcgtggcgtcgggttgccgcccacggtgaccgatctggcaccaccggccgatcgcagctacccgatcatctatgacgacgccagcgcggcctggttgatcgtggccgatcccgcaacacccaccccgcaaccgcaggcgtga

SEQ ID NO: 527623 - DNA, 564 bp, Stenotrophomonas maltophilia
atggacgccgaacacctggagtacttcaaggccgccctggaaggccgcgcaacggtcggctggaacgtctggtttgccgccaaccagcaggcgctcgcccagcaagtgagccgcgctgccctgctgcgtctcaagttcaatcatctgcatgaagccgagcgcctgctggccgaagccggcatcgtgccggccagcacggcaggcaagcgctacgagatgtactgcgcgcagttgtcagcagacgtggtggacgagaacggccgtccgttgcctgcggtgtggcgtgcagcgcacggcggtgccattggcctgcttgccgatggcgaacacgaagcgggccgggcaaagctgcttgcggagttcagccacgcgcgcaagcgcgggctgcagcaggcgcatgaatggttgagcgatgtgtgcttcgaaggcgagatggagctgagcggcggcaatgccgtagtgggccgcagcctgctggcggtggtggtgcaggccggcagcggccacgacctgctggatgccacggcgatgatcgcgcgcgagctgctgggggatctcaactga

SEQ ID NO: 527624 - DNA, 315 bp, Stenotrophomonas maltophilia
atgacccttgcgccggaggcccacaacctctatcagtccaaggcattgaaggctgagtttgaacgacgctgggatgccgaggatcccgcattcgagcccagtgcgtatcagacctattgtttgaccattgcaaatccggaagcgttaatgcccaaacgcgaggctttgaacggcacaacgatcacggtcaaaggaaaatttctcgccgactacttgcaaggcaagatcgacttcggcgcatgcccgttaccaacggccattgtgatcgacgtggacgatctgaaacgccgttacccgtctatcttcgccaactga

SEQ ID NO: 527625 - DNA, 1443 bp, Stenotrophomonas maltophilia
atggattttgcttcgatcgactggggaaaggacgattcaaagggcgataccggcctagcacagtattttgtgcccttcccgaattttgacgctattcgagctggcacgaagcgctacgtaatcgggcgcaaaggcgttggcaagacagctgcgatcgaacggctacgactcgaaggggttggagactacagttttttcgcatctgacatgagcctgcgtaattttcctattcaggatttgcgcgagatgagaaataagggggcacgcgataagtcgcagtacgtgcctgcttggctatttctcatatacgtagaaattgcaaggatgattgccgctgacaatgcggcaggacctgctgaagtagtcgatgagttgaaatgcttccttgctgccaataatttggacaacgaactgggtttctcccatacggtgacccagttaaagagtcataaatcgcagttgaaagtggcggcctattggttgactggagagctaggccgtgacgagtcttcccagcgtcttgtggagattcattatcaaaaagtcgtaagcgcattggaagcccggctgcgtcaggttgtaacggaaagtacgtactggatattcattgatgagttagatgagggttatcgatacggcgatgaagtcgctcgactgctaatattagcgctcattcgagcggtggaagactccgtcgctgctctttcattgtcaaatttgcgctatagaccattgcttgttctccgttcggacatatttgatctgcttgaagacaatgacttgaataagattgacgagagtcttgttcacttgtcttggactagtgatccaggggatacgcagttttctttgcgtcgaatcgtcaacgctcgtattgcctcctcagttcatgatggcggggcgctgaaaaattggaactctgtcgttctagacaatgatccggatttgccggcaaaggtcgactcagtttggagttacgtaaatagtcgaacttatggtcgtcctagagaccttttgaagttcttgaagatatgtggcgagaattgtcaaggatcagtgcttacctttaacgatgtaaagcgcgccgaagttgcgtactcagcttggttgtataaagagctcagggacgaaatacatagctatttgccctgctggcgagaggcgctccagtgcattacccgtctaggtaaaggcattttcagtaaggcggagtttgaggaagagctgaagcgtgatcgtattgtgtcgaagtggattgataagtccggcggccatgtggatgatgtcatcgagaagttttttgaatttagcgttctcggaaatgttaataattctgtatggctattcaaatacaaggatcacgacttggcttggaatccggccatgtcgttaattgttcattatggtcttcacaagaagctaagaattagttcaaggctttga

SEQ ID NO: 527626 - DNA, 1122 bp, Stenotrophomonas maltophilia
atgagctcgaccgacaccgctcacaccgcctgcgagaactgcgacaccgccctgcatggccattactgccatcgctgcgggcaatcggcgcacaacccgctcaagcatgtcggccacgccatcgaggaagtgttcgaatccttctggcacctggacgggcgcatcttccgcacgctgcgcgacctctgggtgcccggccgcatcgcgctgaactacctcaagggccgccgggtgggatacgtccagccactgcggctgttcgtcatcctcacgctgttcaccttcttcgtcggcaagctgttcgtgcacgtcgacgatttcggtgtgggcggcgggcgcgactcggtgtacgccaaggccaccaccgtggaacaggtcgaagccgcacgcgcacgacagctggcgctgatcgaccaacagcaggccagctcccccgccaccggcaacgccggcttcgccatggcgaaagctgcagtgaatgctgccgccgcacagcgcaaggcagagctcgagggcacccgctccgtcgcccctgctgaaaccaccacgggcggatacggcaccttcttcgatcacaccgtcaacggcaaaccctgggatgcggacagcaatcccatcgtcctcgatggttggccgcagttcgccaaccgatggctcaacaagcgcctgcagaacggcaacaccaacatcaagcgcatgggcggcaaggctgatctctacatgcaggcgatcctcaccgcactgccgggcgccctgttcttcctgatgccggtgttcgcactggtgctgcgcatcgcctacctccgtcgaccgatgggctatctcgagcacctggtggtcgccctctacagccactgctggctgatgatggtgctgctggcaacgttcctcgtcgccggcatcggcaatgccttcgcatcacccacgatcgccacgctcagccaatggctgtatgccctgctgtggctggcggttccggtgtacctgctgtggatgcagcagcgcgtgtatggcggcaacaaggcgttcaccgtactgcgctacctcgccatcggcggcgtgtacctgttcctggtgaccttcgtggtgatgtacgcggtactggcgggcatttcggcctga

SEQ ID NO: 527627 - DNA, 444 bp, Stenotrophomonas maltophilia
atgaaactccgcctctaccgccccacggatgccagcgcctgcctgtcgatcttcgacagcaacgtgcccacgttcttcgccgccgaagagcgcagcgatttcgaacgcttcctgctcgtgcaggcggtggactttgccttccaggtcatcgagcgcgacagcagcgtcatcgcctgcggcggcatcacacgccgtggcgatggcagcgccggcttctgctggggcatggtcgagcgagcgctgcaccggcagggcatcggccgcgaactgacgctggcacgcctgcgccaggccgaagcggactcgtcgatcacgcacatcacgctcagcaccagccagcatacgcaaggattctatgccggcctcggcttctacgtgacacgggtggtgcccgatggccacggcgccgggatcgacgccgtggagatggagcggagggtatag

SEQ ID NO: 527628 - DNA, 1137 bp, Stenotrophomonas maltophilia
atgagcatggaccaatacagcctatggaggcgcgtcgctgacgggcctttctacgtcgagtttgtcggaagtaacggcaagcggaaacgcctcagtacggggaaaaccatcgaacacgaggcgcacgaggcggccaagcagatggtcaccgaggaccgcctgtcggccggtagcacggcgaagaatggaaccctaggggacgccctacgtgtcaccctagagaaggtctggagcggccagaagtcgtatccggagaagcgcaagatggtcgggaagatcgcccgagagattgggcactggccggtggactggatcacccacgaccggctgcgggactacctcgactgcctgcaggtgggcacggcgcaccccaagcccatgaagcccgccacgaagaaccgctacgtctccgcgatcagcaccgcgcttggctacgccttccgcgaggacaacacctaccgcgtccccaagctgccctcctggcccgagaacaacgtcaaggagcgctacctgacccaagaggaagagcagcgcctcatggcgtggtttgcggaccacacggcccccggcatgaaagagcgggtgtacctcaggaaccttgtggtcctcctgctggacaccgggatgcgggccaccgaggcgctggaggtgatgactcgggaccggctggtccaagaccgggacggggactggcttgtccacctcccgcacggggacacgaagtcaggcaggggacgcatggttcccctcactgcccgcgccgctgaggcggcccgcgccatgctcgcatcgcccatccacgggcgctggacgagccagaacgcgggcagggcgctgcaggtcatcatgctaaagctgggcattgaaggggtgacccttcacaccatgcggcacaccaccgcgagccgcctgatccagtcgggggaagagatttacaccgtggccgcgttcctgggccatagctcagtcgaggtcaccaagcggtacgcccacctgtccgcccacaacctcaaaggggcgatgaaaaagctccagtcagcggatgtgccccagccaacggaaccccgcccaaatggtgaggcacagattccttcgcatggcacacgaaacggcgcaaagctgttcgtagtcaagtag

SEQ ID NO: 527629 - DNA, 321 bp, Stenotrophomonas maltophilia
atgatgaacacgatggacttacaccgcaccttgaagctgaatcgcctgctggcagaactgctgggtcaggacgcgacgctccgtcaggcccttacgctgctgatggtcgccgaggctggtgactcgggcgcggagcaggcatccattgtgaaagccacaggcagcgcgcagagcaccacgtcgcgcaacctgcaaatcctctgccaggacttgaagctggcggagttctacctggacccagccgacggacgtcgtcggctcgtcagactgaccaaggcgggcaagaacgccatcgccaagataactggagctatgggatga

SEQ ID NO: 527630 - DNA, 129 bp, Stenotrophomonas maltophilia
atgtttgctatcgagcctcttctgaacggggagattgccccgctcgtgtcctattccatcgactgtggtatcttaaacctcatgttggtggttttccgcacccggtttatttgcagtctccgcctataa

SEQ ID NO: 527631 - DNA, 273 bp, Stenotrophomonas maltophilia
atgaccatccagaccgccctgattccgcaatccgttgtcgaacgcctgatcgaagccgcttgggcggcccgtgtccacatcagcactggcgacggatcgcacgacgcgcagatgcgggacgagctgagggaagcctgcaatgcggcgcgtggctcgctggtcgcgctggagctgaccgccaccaaggtgtacggcgatgcccctttcactgagctggcaaaggcggaccctcttgtctcttgcgagctgcgcggcctgtgtcaatgcaagtag

SEQ ID NO: 527632 - DNA, 156 bp, Stenotrophomonas maltophilia
atgagcaccggcctgagcttcacccgtaagcgcacccagggcggcctgcagtaccgctttcgcagccccgacggcagcgccttcaacgtcatcgcccaggactacgccgaggctgcggccaagtaccgccgcgcccacatgagggcggtcgcgtga

SEQ ID NO: 527633 - DNA, 339 bp, Stenotrophomonas maltophilia
gtgaacgaactgcacaccacccgcgtccagccggacgccctgaccatcgcctacatcgccattggcgcgcgctccgcactggacgagctgaaaagccgcgactacaaccgggtgaccggctgcgacgccggtacgggcggcgagctggacctgattgacgaggtcatccgtcacgcccttgcgatggacacggcggccgatgccgtcgaggacttctccggggtgttcctctacgaggtggcggagccgttcggggaggcatacgtcaaggctctagcgcgcggcgagacgccggacgctgcggccatgatcgccgacctcatcgcctcgtgctcgtga

SEQ ID NO: 527634 - DNA, 165 bp, Stenotrophomonas maltophilia
atgcaacccaagccaaagccgatggacgcccaaaaggtagaagcagaaatcgccaagctgatcgcggaaacgtccaagatcaacgcggaaagccgctggtatcccttcatggtgggtgcggccttctttggtgccgctgccgccttcgccaagctgttcctgtaa

SEQ ID NO: 527635 - DNA, 237 bp, Stenotrophomonas maltophilia
atgaacgaagcaggccacaccgtcattgagtacgtcgttgaacgtgtccgcaagggttttgagtttgagattgagagcagcatctggcacggcgttcttgaggtgatgccgcacaccatcgcgggggctttcggctggagtctggaaagcggccattacgtgatcgtgggcggggtggttgtggtctgcgtggcggccatcgtggtccgccgccgctatcgcggagtacgggcctaa

SEQ ID NO: 527636 - DNA, 198 bp, Stenotrophomonas maltophilia
atgatgcgccgttatcaggtccgcgtggcctacgaagaaaggccgggggaatgggtggagctgtatagcgcccgtgcggacggcctctacaccgaatccgccgcgaaggcccgcgtaacccgcgagcacaaaacgagctggcaacgcggcctgacccttacccattcgcagattgagcgcatcgatccgctcacatga

SEQ ID NO: 527637 - DNA, 216 bp, Stenotrophomonas maltophilia
atgagcaccttgtctgtaatcaacatccgccgccacggcgacaccttcccgacgccttggtctttcgatcacccgttgcaagccttcctgagctaccgcgcagcggaacgcatgggccatgaggtgagcattgcggacccggtagacgagtgcccgctgggcgactacgtgaccgactgcatcgaatgcctgcggtggctgcggagggacgcatga

SEQ ID NO: 527638 - DNA, 198 bp, Stenotrophomonas maltophilia
atgacccctacaccgattcccgagcttccgcacacctgcaattcgtgggtggtcacgtcgcccgatggcggccgccgctgcgaactgtggacgcgcgccaacgtggagaaagccgccgccgcagggtggcgcattgagaccgcacacgcctacctctgccgcatcaacgcggaaatcaaggcggccaccaatgcctga

SEQ ID NO: 527639 - DNA, 417 bp, Stenotrophomonas maltophilia
atgaatgcacaggtcgccaccctttccgctggccgcgagaacggcaagaaccttggtcaggagaaagagactatcgacacctacagtctggtggttcgcacacccgaggatggcatgttcacggcggtaaccctgaggctctacatggggcgctcgcggggtgcctcgacggtctacgcgtcgatttgggtacacggccagtacagcggcggcgctccctatcacacggcaggccacgggcaggcgggcggctggggctattgcaagcggtcagcagcggcggcgtgtgcgatcaagagtgcaggcatcgaattgcacaagagcgtttcaggtgtcggcatgagtgccgtgcgtgatgccttgctcgccatcgggagcgcgatgggctacgccgaaatgttgatcgtggaggcgtga

SEQ ID NO: 527640 - DNA, 273 bp, Stenotrophomonas maltophilia
atgagcaacaactttgcatcccgcctcgacggtgcggattacgtcatcactctggacaccgggaccacggtggagtttggcccgcgaaaggatgacggcgagggcggcatgacggcctgcctcgatgccgatgcgcaggtgtggggcatctacgttcgctatgcccacgtcggcactgcggagtgggtcgccgacgcttcctgccatatctacgccgcagcgatggcggacggcctgcgccggatgctggactggcaggcggtgcaagcatga

SEQ ID NO: 527641 - DNA, 1665 bp, Stenotrophomonas maltophilia
atgttcgatgacttccgggtgttcctgttcgtgctctggcggcacctcaagctgcccgagccgaccaagcgccagtacgccattgcgcagtacgtggcaaccggcccccgccgccgaatgatccaggcgtggcgcggtgccgcgaagacctggatcacctgtgcctacgccctatggcgtctctacaggaacccgaacgagcgcatcaagatcgtctcggccaacgaagacaaggccgtcgagaacgccgtcttcatcaagcgcctcatcgtagaggtgccgcagctccagttcctgcgtgccaagtcggggcagcgcgacgccatccaggcgttcgacgtcggcccttcggatgccgcagtgacaccttcggtctcctgcgtgggcattaccggccagctgactggcggccgcgccaccatcctcatctccgacgacgtcgaggttccgaagaactccctgaccgagaccatgcgggaacgcctcgccgaactcatcaaggagtacgacgcgctggtggtgcccgaaggcttcgacattatctacctgggcacgccgcagaccgagcagtccatctacaagaaggtccgcgagcgcggctacgactgccgcatctggcctgtccgcttcccggcgaacccggagaagtacgaagggtgccttgcgccggacattgtggccgacatgcaggcgaaccctgggtgcgctgggtccaccgtggagcctacgcgcttcaccgatatggaccttgtggagcgtgaagcctcctacggccgctccggcttcgccctgcagttcatgctcgacacgtcgctggccgacgccgaccgctacccgttgaagaccgccgacctgatcgtctgcgacgttgacgacgagcgcgccccggccaagctggtgtgggccgctgatccccggctgatcctccaggacgtcccgaacctgggcttcacgggtgaccgcatgtaccgccccctgcacacctcggagcacttccgggaataccagggtcgcctgatggtcgttgacccgtccggccgtggcggtgacgagactgcctacgtggtcctgtacctgctggaagggcaggtgttcctcaaggcgtggggcggcttccgctccggctacgacaaggcgtgccttgatggcctcgcaggtgtcgccaggaagcaccgggtgaaccacatcctgatcgaatccaacttcggcgacggcatgttcctggccctgctggaacccatcatggcccagcagtacccatgcacccttgaagaggtccgtgcgaccggccagaaggaacgccggatcattgacgacctggagccgctgctcaatcagcatcgcctgatcgtggatgccaaggccgcaagggctgatgcagaagcctgcaagggcgacgagagggagcagcggtactccctgctgtaccagctcacgcgcatcaccaaggaccgtgggtgcctacggcacgacgaccggatcgatgccctggctcatggtgtccgctggttccgtgagagcctgagggtggacgctgagaaggccgagagggaacacatcaaggctcttgaagaccagcgatggtcagactggatggcccgacggatgggggcgaccgctcctggagcaggttcgaccaatctgacccgatcccggttccggtga

SEQ ID NO: 527642 - DNA, 249 bp, Stenotrophomonas maltophilia
atgagccgcgccagtgaagaagcagccgacgcgctgcacgcactgacctttgaagtaatcaccgccgaaatcaacgcctaccgtgaggccggtgaacgcattcccccggccctgatcgctcaggccgccaagattctcaaggacaacggaatcgagtcgccggttcgcgctgcgaaggcgcgcgatgacctggctccccacctgccggacttcggggccgagaccccgatgacgaccttggcgcactga

SEQ ID NO: 527643 - DNA, 252 bp, Stenotrophomonas maltophilia
atgaacctttccgcatccgccctggtgactaaggtcatcttcggcatggctaccgcaggtgccctttgggcagcgagcgccattgtggacggcaagacgaccaacgccctccaggacgcgcagctgcagcgtcatgaggacacgttgaagaagatcgacacgctgtccgaccagctctccgaagcgaacaagcacatggctgtcctggagacccgattcaacgacgaggtgaagcatgagccgcgccagtga

SEQ ID NO: 527644 - DNA, 162 bp, Stenotrophomonas maltophilia
atgagcactttcgcagccatcgtcggcatcgtcgctatcgccgcagccgtcttcgtcatccaccgtcgcgtgaagcgcgacagcgtcccggttgaaccgaccgccccgtcgggcagtggtgccgacccgcgcgccgtcccgaagagcgaagagattcgctga

SEQ ID NO: 527645 - DNA, 465 bp, Stenotrophomonas maltophilia
atgccgtccctaaagctccgatcaggtgggggatgggtactgccgagggggataaagattcgccagaacggcgcttgggcttccccccgcgcaatctacgttcgtgtcaacggcgcgtggcaggcagcgtgggccgccttctctgccaccgccacgggcggctccttcacgcagaacatcggcaacaagaacaccccacgcaccatcgccaccgctgtgggcgcatcagcaaccccgaatggcggctccggcaactactcctacagctggagcgtaacaggcagctccggcgtgcagtcggtctccttggcaaacgccaatgccagcggcgtgaccgtcaaggccacggccattcttaacacccgtggctccgtaagcctgcaatgcgttgtcaccgacaacgggctaggtatgtcggtgacggtaactaccggcatctcctacaactacttcaacaccgtctaa

SEQ ID NO: 527646 - DNA, 210 bp, Stenotrophomonas maltophilia
atgcagttcaagtttgacaggctgaccaccaatgtcagctccacgagcttgccaacggacaagactcacgtcctggcattcgcccctactgcggtgaccgagcagccgacgatgtacgcatcgaccttgcagctcgtaatgacggccgacgaggccgcaccgtatgttctcggcaacgtatacgaactctccctgacccctacgaactga

SEQ ID NO: 527647 - DNA, 699 bp, Stenotrophomonas maltophilia
atgcttcgcatcttccctgcgggggctgacggcattcgcttggactccatcacctctgatggctccgccttcgctcccctggaccttcggaccacgcagctgcagatcaatggtgtcgcattctcgccggacagcaaagtagatagcgcggcgggagggtacttctcttctgacgccaatcaagtgctgaacaacaaactcgggccgatggctgatcccacgaccaacacgcctaccggctcttggacgcaaatgctgtccaacaccagctcaggcaactggggctatcagctggcgaagccttggtttgaagagaacctctacttccgccacctccacgacgcttcctggggttcctggcgcaaggtgtggcactcggggaacttcaatgccgatgctcttggctggaacggtctccagccggtgaacaacgactggaacaacgcaatgaacaccggctggttcatggccacggacgccgcaaatgctcctacgaccgggtggttcatgggcatggtccacgttcacaacaacgattgggtgcagcaggagctgtgggcattcaccgagttcccgacccggcgttaccggcgctccaagctgggcggtaattggtccggctgggtgcgtgatgccgacgtaatcgtgtccagcgctgaccccggtggctccgacggaaacatctggattcaaatctaa

SEQ ID NO: 527648 - DNA, 1320 bp, Stenotrophomonas maltophilia
atgcagcctcagggttcgctcaggccgccctggctgcgcgcgatcttgcagagacctacgccaacgaagcgggcacctacgccgccaacgctcaggtctacgcaggacacgcggccgatagcgccactgctgctgcacaatcggcagcagatgcgaagcagaacctggatgccctggccgaagctgtcagttcggcgcaggattccgccacggccgcagcagcctctcagagcgccgctgctggctccgcatctgcctccgctacgtccgcctcggcagcggctacgtccgccaccaaggccgcctcaagtgccactgcggcgagcaattcgcagaaggcagcggcaacctccgccaccaacgcctccaacagtgcctcggcagctgcgacgtccgctaccaacgcggctacgtcggagaccagcgccgcaggttccgcgtcgagcgcttcgtcggcccaggccgcagccgcgtcgtcgtcgtcggatgccagtgcgtccgccaaggctgcatcggattcggctactgcatctgcatcgtcgcagtctgctgccgccgacagtgccaccgcagcttccggcagtgctaccgcagccgcctcatcggccaccgcagctgcatcctccaagaccgcagctgcaagttcggccaccgccgccgcgtcctccaagaccgcagcagcaacctcggcaaccaacgccgccaacagtgccaccgcaggtgcaacctcggccaccaacgcgagcaactccgccaaggccgccgcagattccgccactgcggctgcatcgtcgcagtctgcagccgcttcgtcggccaccgctgctgatgcgtccgctaccgcgtccgctggctcggccagtgatgcaagtagctctcaaactgccgccgccgcaagcgcgaaggccgcagccacgagtgcttccggtgcatccacttcggctaccaatgcgagcaactcgcataaggccgccgccacctcggcgacgaacgctgcaagcagcgccaccgctgctgcaggttccgccacggccgccgcaggttccgcttcggatgcctcaggttccgccacggccgccgcaggttccgcttcggatgcagccgcatcgaagtccgcagtggccgcctcggcgtccgccgcaagttcctctgcaagcgcagctgcggcttccgcaagtgccgccaagacgtcacagaccgctgctgcctccagtgcatcggcggcggctgcaagtgccacgaaggcggcgacgttcgatcctgcatcgaaagccaacgtcgccgatccgcgcttcaccgggattggcatatttgacgtag

SEQ ID NO: 527649 - DNA, 2370 bp, Stenotrophomonas maltophilia
atgacctcccgagtagctctcgctattgaggcggcggactatcagttcgctgtcccgttcccgtacctctcacagacccacgtcgtcgttgccttcaatcggctcgtcaagcgtgagggtctcgacttcttctggcgcgactccgcgaacattgagttctaccgcgcgccgggcaagggtgtcctggagattatccggcagacgcccgtggacagggcaatggttgccttccacaacggttcggtcctgacgcaggacgaactgaacctcgcgttcctccaggcgctctacgcgaccgaggaaacccgcgactactacgatgccctcatcaacggctccctggacgccctcgtgctccagagcggcgctccgtcggcagggccggtgatcgacaaggtcatcgaacagattctctccagcgagcagctcaaggagctgcaagcacgcatcaacgacattgacctcaacgcccggaccatcacggccacggacattgacctgcagtccaccaatgagcacctcgggagcctgcagcagatcgtagacgccctcacgtcacccgacggcggcattgccaccatcgtcaagcatgagacggacgcacgcgttgaaggcgacaaggccctggtcgataccatcgacctgatcggcgcgaagaacggtgacggtacggccttcattgccaacaccggaactctcatggtgtcacctacggagtccctggggcagcgcttcgacgcaatccagtcgaagatcgccgatggcgattccgcatcgcaggccgcagtgtcatccgaggccaccgcacgtaccaccgcagatactgcgttgggcaagcgagtggacgccgtccaggcttccctcacgagcgctaccgggcctgtgcagactgccatcaacgcagctgtcgcctccgaagcctccgcacgcacgggcgcagacggtgccctgggtactcgcatcgacaacgtgcaggcgtccctcacgagcaccgacggtcccgtgcagacggccatcaagtccgccgtgagtgccgagagtaccgctcgggccaacgccgatggagcaatggcgaagcgtctggacgtcattgagtccacctacgccaccgacaaggaagtgtccgcgcagatcgccgccgagcgctccacatcggcatcggagctgcagtcggctaccgactcgttcacgcagcagctgtcgcagtacaagaccgacgcgaacagctatgcgcagtcgctggtgcagaccgagacgactacgcgcacctcggcggataccgccctgggcacccgtattgatggcctgcagagcaccgtcaaggacaacaaggccctgttcgatcaggaggtgactgcccgtgccaacggcgactccgccaacgcgcagagcatccagaccttgcagacccgcgtcggcaccaatgaggcgtccctgcagactatcggtcagaccgtagacggtatgtccgccagctatgtggtcaagacggacgtcaacggtaacgtcgctggcttcggtctgtggaactcggggctgacctcgacgttcaacgtcctggccgatcacttcgccatcgtgtccaacaccggctccggtgcagtggtgcctttcgctgcggacgccaacggcgtctacatgaacaatgcgtacatccgcaacctgtcggtggacaagatcactggcggtgctatctccagcgagtgggcactgaacagcagcaacggccgcatcgtgctcgacaccggggcgttcatgaaagtcctgggcgtcggcttcggcgtcttcaacgacctgatcgaatggttcggcccgaagatggccatcagccagtgctccaagaccaacgcagtgacctacgtgggtacggacggaagtgcgtacttcggcggcaccttgagcgcaggcaagctctacaacgcggcgcagaccaccagcacgatgggcgacgcctacgtgatcgtcggtcctttcagctccaacggaaagacgaagcgtgtggtggtgagctacacctactccgcgtactacaccaatcaggtgatgaacaggcagggcttcaccgctccgggaacctacggcggtgtgaccgtgaccctataccgcacgctcaacggcggcggcgaggtcgctgttatgtcgaagaccctgggccagagcgcctacaacatcatgaacgagttcgacggccccgataccgcaagcagcggcatgggcggcagcttcacgttcgatgacaacacgggcgctacgcagaacatgacctacgtcgcgcggctctccggcttctccttctcaaccccaggcggtgtgtcgcccactggcatcaacatcagcgctcgcctgagcgtcatctccaccgaggaataa

SEQ ID NO: 527650 - DNA, 4692 bp, Stenotrophomonas maltophilia
atggcaacgcaagacgatatgcaggtcgccctgcagcaagctgttctcccggacgaccaagtctccgttgccccaaccttggtggccccttccgacgtcgccccgaagggggcggcgaaggaggacaactcgttcggccacttcatgtcgctgtggaagaacagcgactccaccggcaactccctggcccgattcgcggccgaagggcagattaccgacgatcccaacttccgcgtcgaagacctcggcgaggatgagaagaagcaactgttcgacggccttccgcagaagaccgtggacaatctgttctacagcgcacgcagccgggaagacctctacttcctgagtgacgaagcgcgtcggcagatgcaaaacgaagagcagctcgccgcttacggcggctggggcatggcaggccgattcggcatgggcattgttgaccccggaatgctgctgctggcgatgggcactggcggtgtcggcgcaggcgcgaaggtcgcgcagatcggcgacgcagtgaagatagctgcttcgacaaaggccctggcccctctaggcgcagagctggccgagatgcagagcactggcttcctgacccgcatggcctacggaaccgctaccaacgcggcggagaacgccgtggtccaggctggcctgcagcagggcgacgcaaaccgtgacggcaccgacattgcacttgcggtgctccagggcatcgccattcacggcgtcatcggtggcatccacacccgcagcgagatggcgcagatcgcctccgtcagcggcgagtatcagaaccgcctcaagctggcgcagctggccgacaagctggatgagcagcgcaccgcgttgatcggccaactggctggcggcgaaggtgtcgcgcgtgccgccgaaagtgacctgatgggccgcgtcggtggcttcatggcaagcaacaacggcccgacggaagattacccggcattccgccgcacgctggaatctggcggcaatgccaccgcgcacaacgacaagagcaccgccacgggtgccgatcagttcctcgacaagacctggatcgacaccgtcgcccaggcgaagccgcagtgggccgagggtctctcccgagagcagctgctggacctgcgtaaagaccccgccaagtccggcgagatggccgacttcctggacaagcagaatgctgcccacctggagaagtcgggtgctccggtcaacgtgttcaccctgtacgcagcgcatcacttcggtcccgagcgggcagtagcgttcgccaaggcagcggatgacgtggcgatggacaagctgttcccggccgcagtgctggatgccaacccgtacctcaaggggaagacgaaggccgaggtcatcgcaaactggaccgaacgcgcccgcaagggtggcgtcgatatggacacgatgctgggccgcagcggcatgacggacgccgagggctaccgcaccgcacaggtgacagacttcgaccccgaggctgtcgcggagcacctacgccagctcaatgctgacccgcagcgtctcaagcagctggactttgaagcaggcaccgcgatgcgtcctagcgacgttcgcaagctggaacgtgccctggacctggacgatgcgaacctgagggataaccacggtactcctttgggtgccatcaaggcccaggtatcggagctgcaggagtccgtcgccaagatggccgcaggacgcgacgagcgtctcgccaaggcgcgcgagcaggacgtggcggtacacggtgcatccgtggacgcaccggccgtggtgaagctgcgagagcgttcggtggaccagtccatcgcggacgccaccgcacccctcaaggctcagatcaagaagctgcagggggaccggaaggaactccgcacccgcgtggaaggggagcgcgccgacaaggtggctcgcctggatatgcacaagggtgccctggaagcgaaggccgaggccaagcgtgttcgcggttcgcagcagctgcattccgacctgcgcgccgcgctgggcctgcacgaacagcgcacccagctgcgggatgagctggtcgcttccgccccgcgtcgagagacgctgcggcagctggacaacgtcggcaaggtcgccgagggcgtcaccgaagcccgctcaacgggcaccttcggttctgacaccctgtccgccgcgaaggctatcggctattcggatgacctgttccccggtgccgtcggtgcccaggaatcggtcccgcagatgaagatggcgaagtggaccaacatggcgaaccgaggcaccttcgcgggtgtcctgcgtggctccgacgtggccgctgttcgtgacaacttcggccgcctcgtgggcaacgtcttcggcaacaccgacggctccgccgtcaaggaaggtgcgtcggagatgagcacgctgatgcagaagcgcttcacgggccacttcaacactgccgtgaaggcaacctacggctcctggatgaaagagcagggcatcccgatgcgtcgctactacgaccgtcaggtgcgcgctcagttcatgagcgacgtgggcctgcacatccgaggcggcgaaagtgaatcccaagccgtcaagacgatggcctcgcgcgtcagcaagattttcgcagacgtcctcaaggaagcgaaggaggccggggtgcagggcttcgattctgtcgagaccaatgcgcactacctgccgcgcgtgttcgacttcgcgcgcgtccacgagctggagcagcgcttcggtacggaccagctgtcgaagctgatcgccgagggcatgaaggaatccaacccggagctgcccgatgcaatcgcagcgaaggcaggtgcccattacgtgcagaagatgcgcgagctgcggatcggcaacgatcctggcgtcctggcgggcatgaccttcgatgacattggctacctgcggcagttcctgggcgaggccggtgtcagcggtgacgaactggagagcgtggtcgctcgcttcgccgagaccaagctgggcgagcagggcgcgaagggcgaaggctccttccgcaatgcaaagcgccgctccaagttcgatgagaacttcgcaatggaactgcgtgttcgtggcggtgcaggcgagaccgagaaggtccgcatcagtgacctgctggacagcaacgtcgaaggtctcatggggcgctacctgcgcaccgtgtcggggcacaccgccctggcgaagatcggcatccgtagtgcagccgagtgggcagaccgcgtcaaggccgtgaagaactccctggagggacacccggacgccgacgcgatcctgcagaagggtcaggccgcctacgacattgtcgcgggcaagccgctggaggaagccaacttctggagcgagatgatgcgcaccacgcgtgacattacctacgcgactcagatggagaacgctgggctggcgaacctgccggacctgggtgcgctgctggccgggggcaacctccggtacaccttcaagcacctgatgaacatccgggaaatgttcccgcgtgacaccgacggccgcctcaagagcgagctgtggcgcgagcaggaagagtggatgggcatcggcaccgactacctgaacaacaccgtgttctcgtcctacgacgtggctggtgcataccagggcaacgcggctgcaaccttgggccgcacggtcctggcgaaggccgccgatgcggctgctacggtttcccacgccgcgcgcgtcacgggccgagctgtcaccgtcggctccggcatggctggtctgaatgccttcgcgcagcgcgccgcagcgatgaacatcctgctgcgcctcaaggatgacctgttcggccgtgggagcttcaacaagacccgcatggccgccctgggcattgatgacgccatgagcaagcgcgttgcagcgcagatgaccaagcacacagagtgggcacaaggcgagctgggcgggaagattcgcaaggtcaattgggcagactggacggacctggaggcgcgtgacgctctcctgtacgccgtcaacaaggaagcccgaaagaacatccaggaggacgacctgggcgacaacttcctgtggcaacacaagtccctcggcaagctgctgtcgcagttccgccgcttctccatcaccggctattccaagcagttcctgcggacgctcaacgagcgcgatgcggagtcggtgatgcgcaatgccttccagctcctgctggcaggtggtgcctactacgcgaagaccgaggcgcagctggccggtatgcaggcagcaggcgtcgaggccgacaagatcgagaagtggaagcagcagaacatgggctggtccaacaccggccgcgccgccgtgcgcaacgcgggcttcatgttcctcctgccggacctgtacgactccaccgtgggccttgcaaccggcgagccgctcttcgacttccgcaactccggcaacagcaccaaccttgtcggcggcgtccccggcgtggccctcatcaacaacctcagtgccaccgccgctggcatctcgcaggacattctgcgtggtgatcgccagttcaagcagaaagacctgcgcgcgatccagtcgctgattcccttcggcaaccacctgatggtggccccgctgttcgccagcgtggcgcaaaagctgcctgagacggatgacgacgacgacaaggatcacgtcaagtggttctggcaatga

SEQ ID NO: 527651 - DNA, 2145 bp, Stenotrophomonas maltophilia
atgccccgcgaaaccgtgacggcgtcgcgtcagcgcgcccaacagaaccccgaggtcatctcgcagccgcagctgcaggtggccgcgcaaatccaagcgccccgcgacaactccggcgcggagtcgtggaacgccctcaagaacagcctcctgttcggagcacaggccctcggcactgcgcgcaagcaggaggaagccaatgcccaggcatggcagtcgcagggtcaagccgatcagatcgccggtcaggtcaacgacgactacgcgaaggaacacatcgcgtatcagcagggcgttacgcacgctgctgcggtgacccacggcaatgccgcgctcgccgatgccttcactgaggctgacgacaagatcgaccgcaccgcgcctatcgatcagcagatggcgcagttcgatcagctgattcagaagggccttgccccgctggtcaccgatccgactgcccgccgcgctcttgcgccgctcatccaggacgcctaccagcgattcgcaggtgcccgcgtggctggcctgcagggtgaccatcaggccaccgctgcggatgccatgagcgcgcagattcaggccctggccgacggcgctgatgagaacggtacgctgacccccggcacgatcatcgggactgccgcaggtgtcctcgggcgttccggcgcttgggaaacctacatcgaccgcgtcgcgcagctcgcagaagagaagcatgacgacaagctcctgcagctcatcccgaagacctacaccgacgacaacggcaacgaggtcgcttcgccaatcaacggcgtgaaggcccaggcacgcctcgcgctgaccaaggcccgcaacgctgagtacgccgcgaagatcgccaagccgcagcaggagtgggacaaggtcgtcgccacggctccctacgaggaccgcatcgacaatggcctccccatctcctacgccgaactcaagccgctggtcctgtcgggcaagctgaccgaagagggcgcatggtcctacgtgaaccgtgcccaggccgcgatgaaggagaagaacgccaaggcgcagaagtggtccgatcagaaggccctgctgtccacctacggcgtccagacgttccgcgacattgtcggcgtcgagaacggcccgaagtccgacggcgaggccgcgcagtggaacagccgtgtccagaacgaaatcctcgcggccaccgtgggtggcggtaaggaattgtccggtcccgagatgctccacaacgcccaggcgctcaatcaagtcctggtcctgtcgaagaagatgcgctcgcccaacgataccctcaagggcgcgctgaacaacatcgacctgtccaacggcgacaccgtggtgaagcgcttggacgcctaccgcgccgtcaaggcgatggggctgacctcgcagtatttcaccgacgacacgcaggccgcagtatttgaagcggcgctctcgcagaaggatatgggggcgaaggatgaggacgtggtgcggaacatcgcccgctattccgatccgacgttccgtgcctcgcagtccgaagcccgctcgcagattgagaagaaggtcaacggcctctccttcgacactgccggtgccgggttcctcggcatgttcaacgacaccgccatcggtgaccttgaccctgcgtcgaagctgtacgcgacggccaagatcaaggaactcgccaatgtgtatgtcggcatgggcgagacgcccgacgccgccgtgaagatggccgaaggtcgcttcaaggacaccaacaccgcaatccaggtgaacggcaagtctctgctggtgcccaccaccgcaggtaaccccgagcagctcaaggccgtcctggaatgggcgcagccgatgctggtcaagaaggcgcaggaagagggcctgcagggtgccgacaagatgaccctgaggttctatcccccggccaacggccaggacgtgcaggtccgcatgatcgacgcccacaacatcgggcagggaccgatgctgaatctctccgcattgaccgacctgtggcgcaagtctgagggcggcatcaactacgagcaggcccacaaggaagcagtgaagggtcgcatctaccgcgaccgcctgcgtgaggtctacagcccggacaacccgttcgcaaccaagatgctccagtaa

SEQ ID NO: 527652 - DNA, 495 bp, Stenotrophomonas maltophilia
atgtgcgtcgtagtcgcacccgtcgtcgcgtggactatcgcggcggtcacggctgctgccgccgtggcacaggacgtatccgcaaacaaggctgcgaagaagcagacgaagattctgcaggatcaggccgacgaacgcgccgagcagctcgccgatcaagcatcggctgaaatgaacgcgcgcgccagcgagctgcgaaaggccaccgcatcggcacgcgcatccgcttccggtgccggtatcaacctcggctccggctccttcctggcccagctgcagtcctttgacgagcagcttgacgaagcccagggtctccagacgaagaacttgaacgattcggtcaaggccaactcgaccgcgctcaacgtctccctgtcgcagatcaccaccaagaccggactcggcatgggcatcgacgctgtgcaggccggtgtcagctcgtacagcgctatgggcggctcgttcgccaagaagccgccgtcgagcaccacctaa

SEQ ID NO: 527653 - DNA, 459 bp, Stenotrophomonas maltophilia
atgacacacattgtccccaccagcgatgagcacatcgcgtacatgagcatccacgctcgtgagtccgacaaggacgaagtcttcaaggccaccgggggttccctcctggacgccctgctgtactcccgcgacgaatccgaagagtgcctcacgctggtaggggacgatggcgttcccgtcgtcctgttcggtgtggctccggcgcatgacgtgccgggccttggcatcccctggctgattgccacggacgaactctcgcagcaccgcaagaccttccatcgctacgcgcggcactaccgcgacgagtggctccagcgctaccgcgtcctggagaactacgcagatgccgacaacgtcgagaccctccgctggctcgccgccctcggctacaccatcgactccccgatctacaacgagcggggctacctgattcagaggttccatctatgtgcgtcgtag

SEQ ID NO: 527654 - DNA, 2184 bp, Stenotrophomonas maltophilia
atgctcgtttccaaatccatccccgccctctacggcggcgtatcgcagcagccggacaccttgcggagcgacattcagctccgcgagatggtcaactgctggtccaccatcgtggacggcatcggcaagcgcgcaccgcgcaagcacgccgcgaagatcgccgacgcactcctgcaggacgcctacatccacatcatcaaccgtgacgtggacgagcgctacgtggtggtcatcaccgacggcgacgtcctggtctacggcatggacggcaagcagcgcacggtcaactggccgtatggcaagcagtacatcacggttccctcgggttccaccgcaagggccaccttcgccgccaccaccgtcgccgactacacgttcatcgtgaacaagtccgtggtggtgaagcagggcgtaaaggactccgaccggaccacctccggctacgactactacaaccccaatcgcgcccctgggcagaccggggcggtgtacggcacctacgcgccgaacccgtccaagggcacctacggcggcgtgaagcagaccttccaggacttgccggaaacggcggccgaaggtgtcacctacaagattcaggcaacctccgacagcaagttcgtcggatattgggttcgccgcacgcagggtacgtggatcgaagttactgacccgaacggtaacaacacgattgacgagaagacgatgccgtgggcgctggttcgccaagccgacggcgtgtttgaagtcgccccgttcgcctggggtccgcgccgcgcaggcgatgccgctaccaatccggggccgtcattcctgggccgcacgatcaacgacgtgctgttcgtggagaaccggctgggcttcctgtgtgacgagaacgtggttctgagtcgcgcaggcgacttcggcatgttctggcgcatgacggtgacgcagcagctggccgacgactacatcgacattcaagcatcggagacgaaggtcaccaagatgctccacgcgttgccgatgctgggttcgatcctgctgttctcggatcaagtccagttccgcatggagaagggcagctcaggtgcattcaccccgaccgactgttcgctgacccccgtgacttcctacccggccgcaaagagcgtgccgcccgagtccgttggtagcgacatttacttcccgtcggaagagggtggctgggcgaaggtgctccaatacttcgtccgccaggacggaaccaacggcaccgacgccgacgacgtcaccgcgcacgtcccccgatacatccctcaaggtgtccgagggatcaccgcaagctccgacctggacgcggtgttcgtcattaccgacggcgcgccgaactgcgtgtaccactacaagttcttctggaacggcgacacgctggcgcagtccgcatggggccgatgggagttccccgaaggtgaccatgtgctgtccatcaaggccctgaatggtgtcctttggatggtgattgcccgagccgacggcacgtacctggaaagcatcgacttgtccgccacggccaccgcgccggggatgggctacgaggtgttcctggatcgccgtatggcactgcagggcagctacaactccgtcaacgacgtgaccatcttcgacttccccttcgcggtgcccgacaacgagcgccacctgtggcaggtcgtgcgtggcccgaatgcgccctcaggtgccggtggtctcgtggacccgaacacctatcggtggatcaacgcctacacgatgaccgtaccgggaaacctgagccaaggcgtctccttcgtgggcgtgcagtacacctcccggtggacgttctcgcgctggtatcagaagaacagtcagggcaacccggacctctccggccgcctgcagattcgcacggtgaccctggcgtacacccgcagcggctacttcgccactgaggtgtcgccctacggaaccgagccggacctccagcctgtggtccccgcgctgctctcgcagttcaccggcaagaccatcggcaacgccgagctgctcgtggggtctcccacgttcaccgacggggactactcgttccaggtctacggcgacgcgcaggacgcggtcatttccatcatcaacgacagccacttgggcagctggtttaccagcgccgaggtcgagctgttctggcagaagcgagcacagttccgatga

SEQ ID NO: 527655 - DNA, 591 bp, Stenotrophomonas maltophilia
atggcgcttccgccgctgaactacgttccgctgactgagctggacagcgtcaacaacctcctgctctctatcggccagtcgccggtaaacaccctggcagtacccggcgtcaaggacgtcagcattgcccagctcacgctgcatgacgtggcgcgtgaggtccagtcgaagggctggagctacaacgtcgataccgcatacccgatgccgagcgacgtggacgggaccatcccgattcccgcgaacgttctgcagatcgtgcccgacgacgacacctacgtcgagcgcgcacgaaagctctatgacacatcgaaccgcaccttcgtggtcgataagaacgccaacgtgaccgcagaggtcacatggttcctggcctttgaagacctcccgcagatcgcgcgcaagtacatcgaacgccgcgcgggccgcatcttccaggcaaacatcgtcggctcccaaatcctctatcagttcacgaaggagatggaggccgaggcttcggccgaacacgaccgctatcagctccgcagccggaaggtgaacttctactctagtccggccgcgatcaaccgcatctacaaccggagctga

SEQ ID NO: 527656 - DNA, 1008 bp, Stenotrophomonas maltophilia
atgactgacgcaaccatttcctacggcggccagatcggcggcgctggtgataccgacgcgctgcgcctcgtccagtacggcggcgaagtgctggaagccttcaactccagcgtcgtgatgaacggcctgatccgcaaccgttcgatccgaggcggcaagaccgcgcagttcccggcgttcttcaaggcgttcgctgacctgcatactccgggccaggaactgaccggcaaggacgtcctcaagaacgaggtgaccatcgaagccgatggtctgctgatccacgacatttacgtggaccgcattgacgagatgctgctgcactacgacctgcgtggcccgtatgccaacgcccagggcaagggcatcgcccgcatctacgacgtcatggcgcagatgctggtctacaaggcgtcgcagggcggcgagctgttccccggtgacggcggcggttcgactgtgaccgagtcggcgtcgcaggactacatgacctctggcctggacctgatcgacgcgctgaacgcggcgaagctggacctggagcagaaggacgtggacaccaacgtcctgcaggccgtgttcctgccgctgcagtggtcgctgatcgcaaacagcgacaagaacatcaactcgctgtacggcggccagggttcgctggcctcgacggtcctgcagaccgtgtcgggcatcaacgtccacaagtcgaacaacttcctgttcggccgtgacgtgaccgcctacaacgccaccaccaacccggacggcctcgtgggcaacccgaccgatgttcgccgactgccggccaccatcgccgcgaagtaccagggtgacctgtcgaaggtccgtggcctcgtgttcaccgaggacgccgccgcgatgctgcacgtcctggacctgaacaccgagacctattgggacgcgcgtcgccgcgccaccctgctgatcgcggaaatgtgcgctggcggtgacgccctgcgtgcgaagtgcgccgtggccctcaagggcaagtaa

SEQ ID NO: 527657 - DNA, 306 bp, Stenotrophomonas maltophilia
gtgcgtgtccccaagcgtttccgtttggggccacacgagattgaagtgcagttcctcctgcagtccgaaatcaacgacaaggccggtggctctgtcctaggtttgtgggtgccgggggaactgaccatctacctcgcaaagccctccaagacactcaagaaggaagtgcagctgcacaccttctggcacgaatacttccacgccctttattggtgcctcggccgcatggacgagagcgctgatgaggtgctcgtggatcagtgcgggctgctgacgatgcaggccctgcagagcgccgaatactga

SEQ ID NO: 527658 - DNA, 756 bp, Stenotrophomonas maltophilia
atgactaccgaagcaaccaccacgggcaccaccgaaggtgtcccgcagcgccctgagaacatcccggagaagttctggaatgccgagacgggcgcagtaaacaccgaagcgctcctggcctcctacaccgaactggagaagaagcagtccgcgccgccgactcccgagcagcctgtcaccccgcaggcaccggaagcgccgccgaccgtctccaacaaggccgcctacgaggccgccgttgccaaggcaaccgaagagctggctcagtccgacgcggtctccgatgagacctacgccgcgctggaggccgctggcgtgtcccgcgcccaggtcgatacctacatcgcaggtcagcgtgcagccaccgagctgcgcaccctgcaggtgaccagcgccgtcggcggcgaggacaactacaaggccctcatcgaatgggccgtcgctggcaactacaccgccgaggaagcgcagaccttcaactctgccgtcttcggtgccgacaaggccgcagccctggctgctgtggcaaccctcaagaacaggtacgacaccgcaatgggcaccgacgctcgcatggtgatgggcgagagcgccaacaagctggctggtggttacgccaccaagagcgaatggctcgccgacatttccaagaaggaatacaagaccgacccctcgttccgcgcggaggtggagcgcaagctgtccatcgccatcaagaacaaggtggacctgggcgtcaaggtcagccggagctga

SEQ ID NO: 527659 - DNA, 1590 bp, Stenotrophomonas maltophilia
atggcaaccaagactcccgcgaacgccccgcaggtgtccgcgaagagtctctggaacgacaatgcaaacgcgcagtccgcgccgctgcagcgtgcccgagacgcctccgcgctcactatcccctcgctgctgccgcccgaaggcagcaacgacagctcgtccttgacgcagccgtaccaatccctcggcgcacgaggggtgaacaacctcgcatcgaagatgctgatggccttgttccctccgggcactgcgccgttccgctacaccctgtccaagatcgcccagcagggcgcaggcgcagaggatacctccgaagtggaggccgccctggcgcagcgcgagagcgacattatggatcaggtcgaggcatcgccccagcggccgatcctctacgaatacttcctgcacctgatcgtcgccggtaacgcaacgctgtactaccccgatatgcagaacatgcggatgtatacgctggatcaattccgatcccgccgcactccgtcagggcagatgctcgacctcgccattctggagaaggtcagccccgccgccctggacctcgacgtatgcaccgcctgtgacgttgacccgacgcagaaggatgacgtcgagctgtataccggcgtccagtggcgcaacggcaccgtgacgtggtggcaggagattaacgacattgtcgttcccggctcacagggcaatgcgcccgtggcgaagtccccgtggctcgtgggtcgctggaaggcagtacctggttcccactatggccgaggccatgtagaggaactgatgggcgatatgattagctacgacggcatctgtcaggccatcgtgcagttcgccgcagctgccgccaagatcgtgttcctcaagcatccctcgtcctcgacgcggatggaggacattgccaacgccgagagcggcgactgtgtcaccggcacccgtgccgacattgacattctccagctcgacaaatacgccgacttccaggtcgcccaacgcaccgccgaagacctctcgcagcgcctctcgcaggcattcctgctgcagtccggtactacccgcaatgcggagcgcgtgacggccgaggaaatccgggcaaccgcgcaggaacttgaagacgttgtcggtggcatctacaccgtccagtcgcaagacctgcagctcccttgggtcaaccgcaccatcgccatcctggagaagtccaggttgatcccgctgctgcctaagggcagcgtcatgcccgtcatcgttaccggcttccaggccctgggccgcaaccatcagctgaaccagctgcgcggcttcatgcaggacttgttccagctggtgacccctcaggtggccgtcggtctcgtccaggctcctgtcctggcgcagcgactggcaaccggctggggcgtgacgaacgcaagcgaaatcgtgaagacgccggatcaggtcaagcaggaacaggctcaggctgcacagcagcagatgagcgccagcatgatcgacaaggctaccggcccgatggcgcaggcgatggcgaagggtgacatagacccctcacagctgcagcagatggctgcggctcagaagagcactcaatga

SEQ ID NO: 527660 - DNA, 297 bp, Stenotrophomonas maltophilia
atgtgctccgtgcatacccctaaggctcccgagaccaaagagaagccgctgcagtacctgaccaacgtatggctcgacggcaccgccgcgtcccaaggcgttgtcggccgcaactccctgcggatggacctgggtggtcctgcgcagcgcgtcccggtgaacaccaacgccacccctgcggtgacccaagcaacccccgcgcctgcgcctgcagccgccgtgacgccgccctcaggtggctccctcggtatgggcagcacgacccggcgcgtaaacaccccctggcaggccctctaa

SEQ ID NO: 527661 - DNA, 192 bp, Stenotrophomonas maltophilia
atgcccacgcataacgaacgctgggcagaagccatcgcactggaggccgctggcctcgtgcagctcctgtccgagacccgagacctgacgccgcgccccaccgacaccgaccgcgaggtctggatgaagatcggtgaacagcgcctcctgacccaccttcggcagctcgccgagaacgcgaggctccgctga

SEQ ID NO: 527662 - DNA, 771 bp, Stenotrophomonas maltophilia
gtgagcacaaccctcctgatcgacgcggacattttcgcgttcgcagctgcgtcggccaacgagggcgtctacttcttcaacggggtcgagaacgatcccgttgttgacgccaacctggaagacgccctggtcaccgcgaagcggcagatcgaagacgtcgccaatcagctcaaggccacgcgcctgatcgtctgcctgaccgacgaagagaacttccgctacggcgtctacccgcagtacaagggcaaccgcaaggatgtgcgcaagccgtccaccctgcgtgccgtcaaggattacctcgcgcggaactacgagacctacaagcgtcccggcctggaagcggatgactgcatgggcatcttgtcaacccacaagacgctcattaccggcaaaaagatcgtcgtgtcgtctgacaaagacctcaagaccatccccggcctactgcataacccgaaccaacacaagccagggcaggtggtcgaagtgtcccaatgggccgccgaccgctacttcatggagcagacgctgaccggcgacgccaccgacggttaccccggctgcaagggcatcggcgcgaagtccccctacgtcaccggcctggacgcctgcaaggacgtcaaggagatgtgggagcttgtcaaggagggctacgcgaagaagggcttcaccgctcaggatgcgctcatccaagcacggtgcgctcgcatcctccgggccaacgattgggactttgcgagcaagagggttcgcctctggaacccgcccgtttaa

SEQ ID NO: 527663 - DNA, 261 bp, Stenotrophomonas maltophilia
atgaaggacatgatgggcaacaccctggcagcaggggaccacttcgtgtacgccgcactgcgctaccgcagtgtgggcatgaggatcggccgcgtcctggaggacggccgcctgcgcatcgcctgtgaaggcagtgtgcgaaaggaggacggaacctggggccgtggctgggaactgatgaacggccgcccgaacccgagccagctcatcaaggttcccgtcgagtgcctgagcgccgccgcgcaggagagccttgcgtga

SEQ ID NO: 527664 - DNA, 318 bp, Stenotrophomonas maltophilia
gtgacccggaaggatcgcatctacgccgcagtgttcgctgccggtgcggcggcgttcctggccctgatcttcctgcccgactggaagccgtcgcccccgtggatgggggactacggcgcgtgcctcgccagtcatgaagaggacagcgtgatgctgatccccgacagcaacggcggcatgaccacggttccgaccacggacaccgtatgtgaccagcacgagtacccgaacggtgacggccctgactaccagcgccgctacaccgcatacgaagcccgcctcgcggcgtggctgaaacgacacccggagaaccaatga

SEQ ID NO: 527665 - DNA, 132 bp, Stenotrophomonas maltophilia
atgcgcgtcttcggagccgtccttttcagcatcctgtgggccgccgtaagccttgcctgcaccttcctgccgctcgttgttgcggtggccctggtggtgtgggtgctgcgcctgatgggggtcattcagtga

SEQ ID NO: 527666 - DNA, 585 bp, Stenotrophomonas maltophilia
atgaagaagattctcgccgccgccgtcgctggcctgatgatggtcgcgggcagcgcctcggctatcaccgtgtcgtcgcgcccgtcgtctttcagcagtgcccgttcgttctcgtccagcagtttccgcagcagcggcagcagcttccgcagcagctccttcggcagctcgcgctcctacgctggcccgagccgctccttcaatgcaccgaaggtctctccgacgtacacccgtccggcgactgtgcggaacaccaccgtgcggaacaccaccgtgcggaacactaccatcgtccacaacacggccgtcgtgagccactacccgacgtacagcttctatcacccgatggccgcgtatccggtctacgtccacaactactacgccttcgacgccttcaacgcgatcctggcgtggcagatgctgtcggccgcgcagcgcgctgcaaccccgatgccgcctgcggctgacctgtcgggcctgacctacgaggaactgtgccgcgccatttgggccgacggcaagatgaccctggccgaggtgcaggtgctgaatcagtggaaggcagttcacgggggtatccgctaa

SEQ ID NO: 527667 - DNA, 366 bp, Stenotrophomonas maltophilia
atggacgcatacatccaggccgccaagggcctcgtcctcttggcattcctgggtgtctgcggctacttcgtgtggaactacgaccacatgagcgcgcaggtcgagcagatcgctcccctgcaaacgcaggtagccacgctgcagaagcagcagcagacgctcgcccaggaactcgtgacccgtgaccaacttgccgccgccgtccgcgacgcgcgccagcaggtcgttacccgcatcgaaacggtgaagaccaatgatccgcaagctcgcgcttatcttgatgagcgcatccctgacagcctgcgccgcgcacacctcaatcacgaggccgcagctgtccccgttcctgcaaccgacggtcattga

SEQ ID NO: 527668 - DNA, 351 bp, Stenotrophomonas maltophilia
gtgatcgcagaagccctcgacgcgttgtcgcacgtccgcgacattccccgtgaggcatggtccgtagtcggcggcatcgccgctggcttcggcctgacccaacgcatccgcgcactgctgccggatgcttgggacgacaagacccacgaggttgcatcccaagccctggtgttcatcgttgcctatgcggtgacgttcttcacctggggcgggaagggcgatgacgccaacgccgcagcccttgtcaccgcgctgatgaccccagcactttggaacatgctgctggttgtcatcggctggtggaagccctcactccgcgacgccctcgtggcgcgcccgacgtcgaagtaa

SEQ ID NO: 527669 - DNA, 426 bp, Stenotrophomonas maltophilia
atgagcatcaagaccgcaatccgtgaactgcgtgaagcccttccgtccatccgtgagcacctggaggaagagcgcgcaggtctcgccgaactgaccgccgagctgcgcgacgaagtggaagagcacgagctgcgcctcaagtacatccggcagcacgccgtggaaacgctgcgtgacgaacgcaggtgggtccgtggcctgttcaagggttacttgaaggaacacgccagtgccctgtactacggcttcctggccgacgtgaagcgcggcgcggagttcgccctgaacttcgcctacgaatggctgtggcagttcccgctggcgctggtcgtgtgggcgctgctgttcgtgaccgctggcgtaatcagcctgggctgcttctcgctgtcggcgggcaaggagttcatggaggacgtcgtcgggtga

SEQ ID NO: 527670 - DNA, 369 bp, Stenotrophomonas maltophilia
gtgacacccactgagctggcgtatctcgctggcttcttcgacggggaggggtccatcggcactgccggtggctccctctgcgtccgcatcaccaacacctaccgcccgacgctggagcgcttccagcgtgccttcggtggagccatcgacgtccacaaccagggcgacgagaagacccgcctgtcgtgggtatggcgcatctacggtgagaaggctcaggccgtgctcgtcgcaatcgaaccgtacctcgtagagaaaggccctcaggcgtacctggggctgcacttccgtgaactgcccaagggccaccaccgtgatcgcgtggttgaagccctcggcctcctgaaacgaaccactcatcacaggtga

SEQ ID NO: 527671 - DNA, 1920 bp, Stenotrophomonas maltophilia
atgctcatcttcgacctggagaccgatggtctccttgagaccgtcaccaagattcactgcttccacatcctcgaccgcgtcacgaagcgggcgtaccgcttcaccgacaacgccacctatcacgacggcactccgacgccgcgcgacggcaccatcgccgatgcactggcgctgctcgacagcaccgaatgcgtcgccggtcagaacatcatcgactacgacctgccggtcctggagaagctgtacggctggcgtcgccgcaagggcgtccgcgtccgcgacacgctggtggagtcccgcgtcatctggaccaacatggccgacgtggacttcggtctcctgcgcagcggcaagctgcccctggagttccagaagaagggcctgattggcctgcacaagctggaagcgtggggctaccgtctcggttgctacaagggcgacttccatcccgaggacttcggatacacctgggccaacgtgccgttcatccgtgagatggatgactactgcgcacaggactgcaacgtcaccgacaagtggttcgacaagatcgacggcaagggttactcgcaagagtgcctggagctggagaccgctgtcgcgctcatcatcagccagcagtcccgcaacgggttcgccttcaatctgcctgctgccaacctgctgcacgcgcagctgctgaaagagaagatcacgctggaagagaacctgcgtgactgcttcccgccgtggcaggtgctgaccaagcgtgcaatcgccaaggccaacaacaagaagctcggccgggtgaagggcgaagtgtacgaagtgtggaagacgatggtgttcaaccccggctcccgcgatcacatcgccgaccgcctgatgaaggtgtacggatggaagcccaccgagttcaccgacaagggcaagccgaaggtcgatgaaacgaccttgggtgcgctcccgtgggatgaggcgaagcgtctgaccgagtacctgaccatcgtcaagcgcttgggtcagctggccgacggcaaggaagcgtggatcaaggcgtgccgtaatgggcgcatccacggccgcgtcaataccaacggtgccgtcaccggccgtatgacgcacagcaagcccaacgtcgcccaggccgataagtggaagccgatgcgccagctgtggaccgtgccggaaggcaaggttctcgtcggctgtgacgccgaagggctggagctgcgcgctctcgctcactacatggcccgctgggatgacggcgcgtatggcgacgccgtggtcaacggtaagaaggaggacggcaccgacgtccataccgtgaaccagcacgccgtaggtctgaacaagcgcgacgcagcaaagacgttcatctacgcgctgatctacggtgccggtgaccacaagctcggcagcgtcatctacgacgatatgaccgaggcgcagaaggccaagttcgacgcatcggaaggtgcgaagaaggaccgtgaccgcgccctggcaacgctgggccgcaagcgtcgtgctcgcctgatggaacgcctgcccgcactcgcggaactgaccaaggccgtcaaagccgccgcgcagaagcgtgggcacctcaagggcattgacggtcgcctgctgcacgtccgtgggcagcactccgcgctcaacacgctcctgcagtccgctggcgcggtcgccatgaagaaggcgctcgtgatcctggacgaagacctccgttcccaccccaaccctcccatgcgcgaagtcctcttcgtggcgaacgtgcatgacgagttccagatggaagcccaccctgatgttgcaacagaccttggaaccctcgcagccgacgctattcgccgcgcaggagagcacttcggattccgatgcccccttgccggtgccttcgacattggaagcacctggggtgacacccactga

SEQ ID NO: 527672 - DNA, 657 bp, Stenotrophomonas maltophilia
atgcaactgaccatctacggctacgccaaggcgctgttcgcgctgctgccgagcttcacccgtagcaccgcaatgatcgctggcggtgccctgcgcgcctactacgacaagaccccggtcgctgacgtggacctctgcttccgcagcaacgaggactacgagcgtgccctggccgagatgcacgcacaccccgcgttccgcttcacgggcaccaagggccgcaccgctgtgttcaagagtggcgacggtctggaatacaacctcgtgggcttcatgccgggcaccccgcaggaaaccatcgggcgcttcgacttccgctgctgccgcatggtcgcgtggctgaccaccgacggtgtcctggagttcctggccgcgccgggtgcgatcaacgacgccgtgaccaagaccctgatcgtgctgctcaacaacggcaccggccggaccatcaagcgtgtcgcgcactaccaggacgactacggctacgtgctcgacctgaccgccgacgaacacctggaaccggccgagccggagcagctggacctgttcgccgacgaaatgcgcgacggcgacgtccgcgccgaatccaccccctccaatgaaaccgtccgctacctgtcgcgtgttccgcgcgctcgtggtggctacggggaggactga

SEQ ID NO: 527673 - DNA, 591 bp, Stenotrophomonas maltophilia
atgagcaacagtggtaactacacggtgacgccgcagatcattgcgagcggcttccacatcctgcccgaagagccgaagcaagtcggcgacgtcacgagcaacgcccgtggctccggcgcgcgcttcaacagcggcaaggctccgctggacctgatcccgctgtggatcatcgccaactccttcgccggtcgtgtgtctgacgaagcgagccgcgacgtgcagaaggcgctgtacttcctgggcgagttccagaccacgcagaacctggaaagtctggaccgcgccatcgtgcagctgcgcgactactggtcccaggccgccaacgtcttcgactacggccgccgcaagtacgccgagtggaattgggcgaagggcatggcctggagcgttccgctggcgtgcgctgcacgtcatgcgctgaacgtcctgagcgacgaagaagtgaccgacagcgagtcgggctacgcccacgtcggccacatgctctgcaacctcgtgatgctccgcacgttctacgtgagctggcccagcggcaacgacctgccgaagcccgaactgttcacgccaccacctgtggcccccgagttctaa

SEQ ID NO: 527674 - DNA, 1665 bp, Stenotrophomonas maltophilia
gtggaacagacgacaaacgacagcgaactcgtgagcaagggtgcctgcgatgaatgtggcagcagcgacggtaacgcgctctacaccgatgggcacacctactgcttcgtctgcaacacgcacaagaagggggagggcgctgcaccgcagggcactggcgacaccggcaagaggccgcgtgcgctggctcaaggcgaggtgcgcgccctcccagctcgtgagattaccgaagagacgtgcaagaagtggggctacctcgtaggcgaggttccgcatccgaagaccaagaagccggaacggtgccagatcgcacagtaccgcgacgagaccggccgcgttgtggctcagaagctgcgctgggcagacaagacgttccaaaccgtaggcgacttcaagtccgctggcctgtatgggcagtggatgtggcgcgacggcgggcgtcgggtggtggtggtcgaaggtgaaatcgacgccctctctgtcagccagctgcaggaccacaagtggccggtcgtgtccatcccgaatggcgcaccggcagcgaagaagaccctggtgcatcacctggagtggctgctcaagttcgatgaaatcgtcctgctgttcgatgacgacaaggtagggcaggaagctgccgccgaatgtgccccgctgttccctgtgggtcgctgcaagatcgccacgatcaacggcttcaaggatgccaacgacgccctcaaggcgcgcgaaggctcccgcgtgatcgacgctatctggcaggccaaggcgtatcgcccggatggaatcgtcaccatcgccgactgccttgcgcaggcggtgatgcctgtcgaaatgtccacccgcgcgtggccctggcagggcctgaccgagaagacgtatggccgccgcttcggcgaggtctacggcttcgcgggcggcacaggcatgggcaagacgacggtgttcaagcaggtgcaggcgcacatcctccagaacgagcaggcaccgatcgctctgttccacctggaagagccgacgcatcacaccgccaagaccctggccggtgtgatcgatggcgtgcgctaccacgtccccggtgtggactacgacgtccagcagctgcacgacacgctcgttcgttatcaggaccgtgtgttcctgtacgaccacttcggcggtgccacctacgagaccatcgtggagaagatccgttacctgcgccacgcgcacggtgtccgcgacttcttcctggaccacctgaccgcgctcgccgccgtgatggatgcgcaggatgagcgcaaggctatcgacaagatgatggccgagctgtccgcactgatgatcgaactggacagcaacctgtacttcatctcgcacctgaccacccccgagggcaagtcccacgaggaaggcgggcgtgtcctggagaagcacctgcgcggctcacgctccatcgtctactggagccacttcgtgttcgccgtcgagggcaacaagcaggaacccggctcgccgcgaatcctgcgtgtcctcaaggaccgctacacaggcgactccaacggcctgtgcgtcggcctcatgtaccagcaggccaccggacgcatgaccgaatgtgcccttgacgacgacagcggcgaggggcgtagccacggcttccgcgacgaaaccgacaccatcccgttctaa

SEQ ID NO: 527675 - DNA, 456 bp, Stenotrophomonas maltophilia
atgaccggcccgacctacaagagcctggacccttcccgcgtccagttcatcgtcgtgcattgcgccgccacccgtccgtcgatggacgtgggtgtcgcggagattcgcaggtggcacctgcagcgcggcttcttcgacattggctatcacttcgtgatccgccgcgacggcaccgtcgagaagggccgaaacctggacgttccaggtgcgcacgtcgagggctacaacggccgctctgtcggcgtctgcatggtgggcggcgtgtccgagcacgacgtcaacgtgccggagaacaacttcacacccgctcagttcgacgccctgcgaaagctgctgggcgagctgcgccgtgaccacttcccgcacgcgcagatcgtcggccaccacgacctcaacaaggggaaagcctgcccgtccttcgacgtgaaggactggctcaaccacaacaccatctag

SEQ ID NO: 527676 - DNA, 429 bp, Stenotrophomonas maltophilia
atgcgtttcaacatccaacgggcagcgatgcccaccccgcgtgcccgccaccgtgccttcatggcgaacggccgcgtcatcagcagcacgtacaacccgaaggaatacaccgaatacctcaagacgctggaaggtgacttcaagcgcctgaacaccgcgcacgatcccatctgcgtgccggtggaagtgaccatcagcgccaccctgaaacgccccaagacgaccaagctgccgcatccgaagccggacgtggacaacttcgccaagggcgtgctcgacgcgatgaccaaggctggcatctggaccgacgacaccctggtccgcgtgctgcacgttggcaagcagtggggcgaaaccgacgtgatcgaagtggaagtccggggaatcccggaaggctacctcggtctgctgccggaggtcgctgaatga

SEQ ID NO: 527677 - DNA, 720 bp, Stenotrophomonas maltophilia
atggcaaagaacaacaactacccgtccctgaacctgatcctgccgaaggcagctgccatcttcccgaagctgaactcgccggacaccaagttcgacgccgacggcgtctacgagaccaagctgcgcttcaacccggaagacgccgccgacggcgtgatcggccgcaacaacgtggacctcaaggaaatcctggcgcgcctgaccaagctgcgcgatgagttcgccgagcagaagcgcgatgaactggccgcaggtgacggcaagcagaagaagaaggccaaggaactgtccgtccgcgaaatcggcgaagccgagtgcgacgacgataccggcgacgaaaccggcaacctgatcctcaaggccaagatgaaggccagcggcatcagcaagaaggacggcaagaagtgggagcgcaagcccaagctgttcgacgccaagggcaaggaactgccgaagaacgctccgccgatttacggcggctcgacgttgaaggtcgccgtccaggccgtgccgtactacgccgccaacgacaacgaagtcggcatcacgctgcgactggaagccgtgcaggtcatcgacctggtatccggtggtggccgcagcgccagcgcctacggcttcggtgccgaagacggctacagcgccgaggacgtcggtgacgaagccggtgaagtggacgactccaacgccgacgattcggacgcaccggacgagttctaa

SEQ ID NO: 527678 - DNA, 384 bp, Stenotrophomonas maltophilia
atgaagaccactctgaaagctggcacccgcaaggtgctcctgatcgacgtcgaggctatctcgcgcaacgccgaccgtggcacgggcaactgccagccggtggtctccgtggccgaagtagacgagaagggcactgtcctgtccatgacgcgcggcctgcaggtcgaggtcaagggcaccgtggacttcgagtattcccagcacgcattcctgttcgtcatcgaccgcgtaccgcatcgcggtgcctgggtgacggacggcgaagtcgtcgtggatgacggctccgacgccgcccccgtggcatccgagctgaccccgcgtatccccaaccgccccgcccgccgcaacgcgagcaacaccgcaaccgaagaggcaatcgcctaa

SEQ ID NO: 527679 - DNA, 129 bp, Stenotrophomonas maltophilia
atgcgcaccggccacatcaccgccgcacgctccgagctggagcagaacggctacatcagcgaagacaccctggcgaacctgtcgccggatgaggtgctcttcatcatcgaacagaccacccaaggctaa

SEQ ID NO: 527680 - DNA, 156 bp, Stenotrophomonas maltophilia
atgcagatcgaaacccgtggcccgttcaatcgcaagcagcgtcgcaccctggcctcggccatgcgccgtcgcaagccgcagattctgcgcgccccgtacttcaacgaaggccagcgcgccgtcgtgaccctggcgttggctggaggtgccgtctga

SEQ ID NO: 527681 - DNA, 246 bp, Stenotrophomonas maltophilia
atgcccgacctgacgcagtgccgccaactggcggtccatcagatcaaccacgttcaacaggcatcgcctgcgaaccagctcgtcgccactgccatcgcaatcgttgcgatgagcgaggcggttgacctcaacccctacgacgtcatcgccgtggcgcgccgcgccatgaacgacgccgagtccccgttcacccaccaaatccaagccatccgcgactacgccaagagcgagctgcggcgcatctaa

SEQ ID NO: 527682 - DNA, 624 bp, Stenotrophomonas maltophilia
atgccccgtccgtttgaaaccttccacaccattgcggagacgaacatcgccgtcccgcaggacatgctgcagcgcctgagctgcggcttgttccgatgcccgctgccgctggcatacgacctgatgcctgagctgcaggccctctacgacagcgccccggtgcgcgatccgtcgcagtgggagctggacctgaaaatccacatgctgatgaaggatcagtacccgtgcatcccgaactggcactgcgacaacgtgccgcgcatcgggggccgcatggactacagccacacgagttcaacggcaccgccgatgctcctgtgggtatccgacggtcccgagaccgagttcctggagcacatgctgttcctggataaggagccggaagggcaccgcgagctggccgaggccatccgcgagagcggcattggtgtccgcaagatcacaccgcagacctggatcagcatggaccagcgcacgccgcatcgcggcacgcaggccacgaaggatggctggcgcgtcttcgcacgcctcacgcacaacagcatcacgccggatcgtccggtcctgagccaccaccgcaggcactgtcaggtctacctcgacgccactgcatttgagtggtga

SEQ ID NO: 527683 - DNA, 2493 bp, Stenotrophomonas maltophilia
atgagcaacctcaagagcaaccttagtgacgacctgatcgaccggcagaccgagctggaaatggagagccggatgctcggcgctcaggcgtacatgaaggcccacgaacgcggcctggagtcggacacccgtccgggccaggagctgctgcgcaaggcggtcgaaccgacggccgacaggatcatccagttcctggagtcggcgatggacggcaaggccggtcgcaagcacaacgccctcccgtacctcgccaagatcgatcccctgcaggcggcctatctgaccgcacgaggtgccatcgacggcgctgcggccctcaagcgttcggcgcagaacgtcgccatcaccatcgcggacagccttgaggaccacctcaacctgaccaagctggcgacggagaagaagggcctgttcaagaaggtggagaagcaggtccagaagtccacctcggcccgtcaccgcactgcggtctacgacaaggtcatcgccaagtacagcaagaaggaggtcagctgggacgccaaggagaagctgctggtgggcatgaagctcctggagctgttcattgaggccaccggcatggtcaagctggtccgagtcaccacggccagccacaccacccctatggaggtccaatttgaggacagctggctcccggtcctggagaaggcgcacgagcagtgctccctcctgtgccctcagttccagccgatgctgaccccgccgcgcccgtggaccaatgcgtacaccgggggctacctgacgaacaccatcagcaccccgctggtcgccacggccaaccgcgcctatctggacgagctgggcggggtggacctttcgcgcgtcctggcgtccatcaacgccgtgcaggccaccggctggcagatcaatgccccggtctatgacgttgtccgggagctgtgggacaacgaggggaacagcccggtgctgcccgaaggtcaacctgcgccgctcccggtgcgcccctatggcatcccggtggatatgaagaccgagcacatgacgatggaccagctggaggccctcaaggtctggaaggtgtccgcgtccaaggtccacgagcagaactccaagcgcgtggcccgccgcgtgcaggtcgcaaaggcactggccgtggccggtaagttccgcgacgagccggtcatgtacttcccgcacttcgtggacttccggggccgcgtgtacccgtacccggcgtacctgtccccgcagggcaacgacattgccaaggggctgctgcggttcgccgagggcaagcccttgggcgaaacgggggcctactggctggcggtgcatctggcgaacaccttcggtgtcgataaggttccatttgaggaacgtatcgattgggtgatggaaaacgaggaaatgatcctttcttccgccctcagtccgctggatggtgaccgcgcgtgggaagaggccgacagcccgctgtgcttcctggccgcctgctttgaatgggcgggctacaagctgcagggcgacgccttcgtgtcccacctgccgatccacatggacggctcgtgctcgggcctgcagcacttctccgccctcctgcgtgacccggtgggtggcgctgcggtgaacctcgtgcccggcccgcgcccggccgacatttacacgcaggtctacaagcgtgcccagcagatcaacgacgacctcgtcgccgaaggcccggacgccaagggctggtcgccgtatgccgccacctgggtgggcaaatactgccgctccgtgtccaagcacccgaccatgacgctgtgctactcggccaccaagctgggcatggcgcgcatgatcgagaaggcagtcgtggaaatgtccaaggacaagccgtacctggagctgcaggaagggcaggaggtctatggcgcggccgtgttcgcggcgaagaccgtgtgggacgccctcggtgacgttgtggtcgccgcccgtggcgctatggactggctgcaagccgcgtccaaggtgctctccaaggccaacctgccgatgcgctggacgaccccgctgggtctgccggtgatgcaggcgtaccgcgaagagaccggcaaggtggtcgaggcgttcgtcggtggtcagcgcgtgcagctgacgctggtgaagggcacggagaagattgacgcccgtcggcaggctgctggcatcgcgccgaacttcgttcacagcatggacggcgcgcacctcatgcgaaccgcgctcctgtgcaaggagaacggcgtgtcctcgctggcggtgatccacgactccttcggcacccatgcggctgacaccgagacgctacatgcggtgatccgtgaggcgttcgtgcagcagtactgcgagaaccgccttgaacagttccgggatgaaatcgtgagccacctggaaatggtggaccccggcctagtcgccgaactgcccccgctgccccccgtcggaaccctggatttggaagctgtccgggaatccgactatctctttgcctga

SEQ ID NO: 527684 - DNA, 2436 bp, Stenotrophomonas maltophilia
atgacgacttggcaagagaacgacctgcacgccgcccagctcgaactggagaaggaaagcaccagcctgggcattgcccgctacgagaagatcagggagcagcgccaggaggccgagaccggccccggccgcaagctggtcatggagagcatcgacgccaccgccgccgcgatcatggcgttcgtggccgaagccgacaccggcaagccgggcaagcgccacgccgccctcaagttcatccgccacctgaacccccacgccctcgcctatctgaccagcttcgcctgcgtcaacgcgctggtcgccgatcaccgcaaggcggtgtccgtggcgatcaccctgggccacgaggtagccaacgagatcaacttctccctgctccgcgagaagcaccccggcctgtaccgggtggtccaggagcagctcaaaaagtccacctcggcccggcactccaccgccgtcatgcggcacgtcatcgccgacgccgagttcgcccccgaggacgacaagcgcctctacctgtccgacaaggacgcgctgctggtgggcatgaagctcatcgagctgttcgtcgaggcgaccgggctggtcgagctggtcaccgtggccgagcgaggcaagcgccacctgctcatcgccgggaatcagaaggtgctcgactggctgaccaaggcccacgacagcgccgccctgtaccagccggtgctgatgccgatggtcgtcccgccccgtccgtggaccacgccccgcgacggcggctacctgaccgacatcggcggccgggctgacctcgtgcgtacccgcaaccgcgcctacaagcgcgagctggcgctggtcgatatgcccaacgtctaccaggccctcaacgccatccaggcaaccgcctggaaggtgaacgtgcccgtcctggaggtcatgcgcgagctgtggaacgcaggcggcggtgtcgccgggctgccggagcgcgagctgatggacctgccgagccgccctgccctgctggagaccgacccggactacttcaaggagcaccacgccgacgagttcaaggaatggaagcgcgaccgcgccaaggtctacgaggccaacgcacgcagcgtgtccacccgcctcgccgccgcgcagaagatcgcccttgcggagaagttcgccgagtaccccgcgatctacttcccgcacaacctcgacttccgcggccggtgctaccccctgcccccgacgctgaccccgcagggtgatgatgcggccaagggcctgctgacgttcgcccaaggtgtgccgctcggcgaggacggtgcctactggctcgccatccacgtcgccaactgcttcggcgtggacaaggtgtcgttcgaggagcgcgtggcctgggtgcgcgagcacgaggagcagattctcgacagcgccctcgatccgctggacggccaacgcttctggatggacgccgacagcccgttctgcgcgctggccgcgtgcttcgagtggcttggctacagcctcaacggccgcgatcacgtctcccatctgcccatcgcgctcgacggctcctgcaacggcctccagaacttctcggccatgctccgcgactccgtgggcggcgcagccaccaacctgatcccgcagccgaagcccgccgacatctattcgcgcgtgaaggacgtggcccaggagaagctgcgcgcccgtgccgagagcggcgacccgctggcgatcaagctggacggccagctcacccgcgacatcgtgaagcagccggtgatgacgctgccctacggcgtcacgaagtcgggcatgcgcgcccaggtgctctccaagttcaagaagctgggcatggaggacgattgggagaccgccgagtacctggcgaccctgctgtgggagtgcattggcgaggtggtgatcgcagcccgcgcggcgatggactggctgcgtgacgcctccaaagtcgcctcgtcggcagacctgccggtgagctggacgacccctgctggcttcccggtcctccaggagtaccgcgaggaggaaggcgtccgcatccggccgcacgtcggaggccgcgaggtgaatttagtggtcaacatcggcggtactaagctcgaccgtcgcaggcagaccctcgggatcagcccgaacttcgtccactcctgcgacgccagccacatgatgctgaccacctgcctcgcggcagagaacggcatcgagtcgttcgccatgatccacgactcctacggtacgcacgcgggccaggcagcaatcctcgccgccgcgctccggcaggcgttcgtcgatcaatacagcggcgacgtactggccgacttccgacagcaactcgtcgagcagctcccgccagaagcggcagagaaactcccacccctcccgccgcatggcgacctggacctcagcctggtgctggagtcgcgctatttctttgcctag

SEQ ID NO: 527685 - DNA, 240 bp, Stenotrophomonas maltophilia
atgccaccacataaccgcgagaacggcgaaccatacgataagtgggacaccgatcacgaactggagaagcaaatcccttgtgtactctcgtcctaccgcttctgtcagagcagcgtcgaggattggcacagtagcgtccacaacatccagtggggtggcgtcatcgttgagcagagccttacttgcttcggcgcgtgcttccgcttctcgcatcttgacgtgctggtagagcgcgggtga

SEQ ID NO: 527686 - DNA, 288 bp, Stenotrophomonas maltophilia
atggccgatatcaatcgactgcgcacgatggcgagggttcccgtcgcgctggtggcactggtggcactggtggcctgcgcgcccggcagtgatccggcgcagaccgtcgagcgcgatgccaacgtggaggctgttccggcacggccggtatcgccggagggtggcgccgcccctgatgtggtggagctgcgccgtgctgacgaggggggcgtggaggtccgcgaagcggatccagcagccgggcagggcgctgcaacggcgcccgcccgaaccgaaccgccgcactga

SEQ ID NO: 527687 - DNA, 762 bp, Stenotrophomonas maltophilia
gtgatcgatatcgtgctgggcgtgctgatcggcgcctccgtactgttcggtttcatccgcggctttgtcggcacggtggtcgcgctggtgtcatggttgctggccggctggatggccttcaccttcggcaatcaagcctcgcactggtgggcggccccccaggcaccgggtaccggccactatctggccggatacctgggcgtgttcgttgtgaccgtggtggtggtggggctgatcggcctgctgctgaaggccgccatcaagctgaccctgctcggcggcgtcgaccgcctgctcggcggtaccctgggcctggtccgcgggctgttcctgtccagtgtcctgttgctgctggccggtttcacggcgctgccgggcgaaccggcctggcagcagtcgcagctgcggcccgtgctgcagccggccgtggcctggatgcaggcccagctgccgcaactggacgaactgttgccgcaggccctgccactggacggcctgttgcctgtgcagctgcccttgcccctggccgagaatgccccatctacaccgcaggtgttgggcaagccgacggcgacaggcgataatggtgtcctcaacgcggtagtggcgggtggcggatggccgcagcccgtggacgtggagcgggagccccggccggcccccacactgcccagcaacatcgagccggcgcctgcgcgtccggcgcggcccgcgcctgctgcgggcgcccccccaggccaggtacggccaccttccctgtaa

SEQ ID NO: 527688 - DNA, 1563 bp, Stenotrophomonas maltophilia
atggacacccttcgcctgctcgatctggacattgacccccctgcacatcgggtcagccgcgccggccaggtcctgccggtcagcggcctgagctggacgctgctggacgtgatgctggcgcacggcgccgaggtcgtcgatttcgacaccctggcggcgcaggtctgggcgccggccgtggtcggcgaagatgcggtcagccaacgggtcaagctgctgcgccaggcactgggcgatgacagccgccggccgcgctacatccgttcggtgcgtgggcgcggctaccagctgtgcgcgcagccgttgccgggtaccgcacagcctgcccggtcacgttggcgcggcagggcagggtggggcctgatggcggccgtggcgctgggcgtcgccgcaacgctggtgtggtggccgcggccgactgcacccggtgcggcgcaggcggcgctgcagcgcgctgattattacgccggcatcggccaggccagcaacaacgagcgcgcgatcagcctgtaccggcacgcgctgcaggtcgatccggagtccgcgccggcgcggcggggactgtcgcgtgcgttggcggcgcagggctgcctgttcaacggctcgccggcacaagtgaaagaggcgctggccctggccagcgaggagcgcaggcgggcgccgcgcgatgccgccgcccatgcgctgtggggctatgcgcaggactgcctcggcgacatgccgcaggcgatggccggttacacgcgtgcgctggaactggatcccgccgacgaacgcagccgcgcgtcgctggcgtatctgcggcaggagcgcggccagttggtgacggcgctgcgcgagaacctgtcattgaaggcgcccgagcgcgtgcgtttccgcgacgtgcaggtggcgcgcgagctggaactgctgggcttcacccaggctgcagcgcaacgccacgcgcgcaacttccagctctacccggacaacgtcttctccaatatcgcctggccacgcagcttgtatctggccggcgcgccgcaacaggccaggcaggcgctggacgaggcgctggcgcggggcacgccacacccgcagctgctgcggatgaagggagagctcgcgctgctggccggtgacccggtgatggcggcagatgcgttcgagcgcggccgccagctgcggccccagcaatcactggggcagacgctggcgggcctgtacggcgcgcagccggcgcaggacgcgtggctcgggcagcgtctgcagcagctcgacgccagcgccggcgacggctggtccgacacgagcgtggagcgggcactgctgctgcaggctgctggacgtgcagatgcggccgtcgccgcattgcatcaggccgtcgatgatggcttccgtgacgtggcatggctgcgcgccacgccgctgctggtgcccctgcacggcgccccgggctggcccgcgttgctgcagcgcatcgataccgacatcgcccggcagcgcgcgcaggtgctggccgccgcgtggcggccggaggacctggccgccctcagcgcagcgccggcagcaggaactcggtga

SEQ ID NO: 527689 - DNA, 1002 bp, Stenotrophomonas maltophilia
atggacatgagcagcgaccacgacaaccccgatgacggcgcacggccggacgacgccacgcgcgacgaactgcagccgctggaagcccgtgcctatgccgcattccacgaaggcgacctcgcgcgggccgtggccctgttcggtgaactgaccgggcatgccccggaggttccctacctgcattacatgcgcgggctcgcgcacaagtacctgcgcgactggccggcctcgctgcaggacaacctgcagtcggaacagttgcatgtcgagttcgatgtagccaccgcatggaatgccggtatcgccgccactgcagtgggcgactgggccgaagcgcggcgccaatggagccgctgcgggatcaccgtgcccggcgacgcggggccgatcgacggcgatttcggcgtggcctgcctgcgcctggcgccgtggtccaccgccgaggtggtctacatgcgccgcatcgatccggtgcgcgcccgcatcgacaatgtgccgctgccggaaagcggcttccgcttcggtgacatcgtgctgcatgacggcgcctcgaccggccaccgcacctaccgggagcagagtgtgccggtgttcaatgcgatgcagcgcctgcagccatcggacatggccaccttcaccgtgttcgtgcagtgtgattccgccgatgacatcgctgccctggaagccctgcagctgcccgggatcggcatggtcgaggattggaccgcgaccgtgcgcaggctgtgccgccgttgcagctacggaacgccgcaccagcacgatgacgcagcggagcgcgcggacggctggacgcgcgcgcgcgatctcggcattgccgcgcaagggcgtgcctcggtggaaaaactgctggcaacgtggaccgctgcggcaccgggacgcgtgctggaagccatcgaacagcgcgagcatccgctgagtgagcccgagccgggacaggtctggtggctgggggaggaagaagaggaagaagatgccgggtaa

SEQ ID NO: 527690 - DNA, 264 bp, Stenotrophomonas maltophilia
atgtgggcgcgcgcgtttgccggcatattcgccggcttcttcatggcggccgccgccaccggactggtcacctggctgccaccgggcccgtggcagaacgccctggtgcctgcgctgatcgccttcgtgccgctgtggatgctggcggctttgtgggccttcagtttccgccgcgctgggtatgcctggctggccctggccggcagcgcggcggccggtttcggtgtgctcgggctgctgcgcatggccggcgccgtgcaatga

SEQ ID NO: 527691 - DNA, 2127 bp, Stenotrophomonas maltophilia
atgtatacgctgtcgctgccggcccgtgccggcctgctccgtgccccactctccgccctcgcccttgccgtctccggcatgcttccgggcctggccgcggccgacgaggcgcgtacgctcgacaccgtacaggtgactgccccgatcgccaccgagagcggcagcgcgaccaagaccgataccccgctgcgcgagatcccgcagtcgatctcggtcatcaccgaccggcagatgcgtgaccgtggcatccatggcgttgaagaggcggtgtggtacaccgccggcgcccagggcggccagtacggcgaagacacgcgcagcgactggctgctggtccgtggtttcaaacccgcccgctaccttgatggcctggccacggtggaaggcacctggaccggcgaatcacgcctggagccctatggcctggagcgcatcgacgtgctgaagggcccggcctcggtcaactacggtgcgatgccgccgggcggcctgatcaacttcgtcagcaagcggccgcacgccaacccgttgcaggaggtggagctgcaggtcggcaactacggcctgaagcaggccgccttcgacatcggcggtgcgctcaatgacagcggcagcgtgctgtaccggctggtcggcctggcccgcaacagcgacaacgtgatcgaccacgtccatgacgatcgctactacctggccccctcgctgacctggacgccggacgatgccaacgcgctgaccgtgctggcccgctaccagaagaacgacacggtcgaaaccggcggcttcctgccttaccagggcacggtagtgcccggcgccaacggccgctatatctcccgccacttcttcagcggcgagccgggcgtgaacgactacaccaaggaaagcgccgcgctcggctatgaattccgccatgacttcggcgatggcaccgtgttcaaccagaacgtgcgctacagctgggccgaagtggacgccagccgcggcagcctgggcctgttcggcctggtgtcgccggacagcaccgagctggtgcgctactactacccgcgcctggacaagtccgaaagcgtggccatcgacaacaacctgaccttccacttccgcagcggccgtgccgagcacacggtgctggcggggctggactaccgtcgcgcgcgcaacgattacgcctcggcattcctgttcggcgcgcccggcatcgatgcctacaacccggtgtatggcgcgccggtgcaggtgcccgactacacctcgcgccaggtgcagacgcagagcacgctgggcctgtacctgcaggaccagatccgcatcgaccgctggctggtcacgctggccggccgccaggactgggtcggtaccgataccgagcagcgcatcggcaccgccagccgcgcccaccagagcgatgacaggttctccggccgggtgggcgtgaactacctgtttgacaatggcgtgagcccctacgtgagctggtcgcagtcgttccagaccaccatcggtaccgactacgcggggcgcgcgttcgtgccgaccaccggcgagcagttcgaggccggcgtgaagtaccagcccgagggtggccgcctgctgctgactgccgcggcgtaccagatcgagcaggacaacacgctcaccgtcgacccgcagcacaccctgttctcgatccagcagggccagacccgcgtgcgcggtgccgagctggaagggcgctggaacatcggccagggcctgagcgtgtacggcagctacacccgcctcgacgccaaggtccggcatagtaccgatgccgcttcggtaggcaagcgggtggcgctggtgccgaaggaaagcgcgtcgctgggcgccgactacacctttaccgccggcgcgctgagcgggttcggcttcggtgccggcgtccgctacaacggcggcatctacggcgacatctacaacgactggtacacgccgtcgttcaccctcatcgatgccagcgtgcattacgaccgcggcccgtggcgcctgcaggtcaatgccgccaacgccgccgacaggaagtacgtgtcggcctgcaacagcgcgacctggtgctactacggctacccgcgtaccgtcaccgccagcctgcgttaccaatggtga

SEQ ID NO: 527692 - DNA, 450 bp, Stenotrophomonas maltophilia
atgacatcgccggatccctccacgacgacgctgcagatccgcgacgcccgccccgccgatgccgccgcgctgatcgcgctggacagcgtggcggcacatgatccgcgacgggcgacgcagatcgaccggtggctggcgcagggccatgtgcacgtggccgagcaggatcgcgtggctgtcggctacctggtcatccatcaccacttcttcggcgaagccttcattgaaatgctgatggtggccccggcacggcgcggccagggcatcggtgccgccctgcttcgccacgccattgcccgacgcggcggcggcaagctgttcacctccaccaacagctccaacagcagcatgcagcgcctgcttgctgcgtcgggcttcgtcgacagcggcatcgtgcacggattggatgagggcgatgcggaacggatctaccgcttcgcgggtgattga

SEQ ID NO: 527693 - DNA, 570 bp, Stenotrophomonas maltophilia
atgtccgcatcttcctcccgctcgcgccgcaaggcgcccgacagcgtgcgccagtcgctgctgcaggccaccatcgacgtgatcgcacggcagggactggccgcagtgaccgtgcaggacatcgcacaggcggctggcgtcagcaagggcgcactattccatcacttcgccagcaagcaggcgctggtcgatgccgccatcgccacgctcatcgctgagttcgaagcgcaggtacgtggcctgatggcaggcagtgcgcactacggctgcttcagccgcgcctatgtgcgcgccaacttcgaccacctgctgcagcaggaacgggtgaacgacatcgggctgaccctgggcaacatgcttgaacctgcgctgcttgcgcagtggggggcctggctgcggcgcatgctggccgagttcccggaggaagccgccaatccccgcctgtatgcggcgcgctgtgttgccgacggctactgggccaccgcttacggccggccgctggacgaggaagaacgcatcaatgcactggccatggccgagcaggccctgaagctgtgcgaccctgtgtaa

SEQ ID NO: 527694 - DNA, 258 bp, Stenotrophomonas maltophilia
atggtcatcaccgtcaagtgcagtgcagcgcagtggtccctgctggaccccgccgcaggcgtggccgaagccttcagcagcggcgccgccgccttcgatgccgcggttggccgggccagcgcccaccaccgacgcaccggccagggcagcacggtgcgcgtggaagcgctgggcaacagcgtggaagccgtgcatttcgaggcgctgcccgccgccgccgcgccggtcagcgggctgcatcctgcgccagtggcgtaa

SEQ ID NO: 527695 - DNA, 432 bp, Stenotrophomonas maltophilia
atgcctgctgcattcacccccaccctcgtcatcgccgatcccaacccctgggtccgtcgtgaactggtgcgcagcgtccagccccatctggatggcaaggcgctgagcgaagcccgctcgcccgccgaggttctggtgcagatcgccaacccccactgcaaggtgctggtcatcgatccctgcatgcccaccgtgggccagaccgatggcatgccgctgctgcgccagatctgctgcctgcgcagggacctgctcatcctggtcctggcccagcaacccctgcgcctgctgcaggatcgcgccctgccagcccaggtcgggcacgtctatgcgaagacggtcaatccactgtggctgtgccgtttcatcagccaggcactgcgcgatgaatcgacgggcgttacgccactggcgcaggatgcagcccgctga

SEQ ID NO: 527696 - DNA, 471 bp, Stenotrophomonas maltophilia
atgaatacatccagcaaagaggctggccgcaatcacgtggcgtcgatgaagccgagaggcttcaccttggtcgagctgatggtggtcctggccatcatcggcatcctcggcgtgatcgcattgcctcagtaccaacgattcacggccaaggccaggttggccggcgcactcgcagagttggcacccggcaaagccggtgtagctgccatcctggccgaaggtacgtcgttgtacgacacatcggtaacacctgcatcactcggcctggcaacgcccgcaaaatactgcgaagggttcaacgtaatggtggagttcggcgacctgagataccgcatggtctgccacgtgagaacgttcatggcttatggcggcaccggcaagatggaactcgtactggacaaggatttcaattggcgttgcacaagcaccgttgccgacaagagcctgctgcctgaaggctgccgctcctga

SEQ ID NO: 527697 - DNA, 459 bp, Stenotrophomonas maltophilia
atgaataccgcattcgtcccagtaccgcgcacaggcatgcgcgcttcccggcagaagggtttctctcttattgaactcatggttgtggtggcgatcatcggcatcctggcgatgatcgcgctgccgcagtaccagcgtttttcggcgaaggcgaagctggctgcggcgctggctgagatcgcgccaggcaaggtgggcattgaatcggccatcgctgagtctggcgattccctgagcaccaccctggcagactccgggcttcccagcgagagttcccgctgcacgaccatttccctgccgttcaatgcaccggactcggtgacgatccagtgcgacctgcatatggacaacacctatggcggagggaccctcagtctgatcagggacgaacgcggtgcatggacgtgtgaaggcaccatcgatgatcagacgctgctgcccgcggcctgcagatcctga

SEQ ID NO: 527698 - DNA, 447 bp, Stenotrophomonas maltophilia
atgccagctggatcgtcagcgcacgcagcacgcgacgtgccaccgcgctacccgccctgggctgcgacgggcattaccgtcgcgctggtcgccgtctacgcgattctgttgcttgcccccgccgtggacggccatgccagccgcgtgcgcctgcgcgatgcggccaacgcgctgggcagtgccatcaccaccgtcgaagccagttacgccgcgggcgatctcaccttgaccgaccagcacctgggcttgcctggcagtgccgcgtactgcagccatctgcgtgcctcgctgccggatacaggacatgcggtgctgtcctgcgagctgcgcgaaacggccgccctgcgcggcagcgtcaggtggttgcgtagcgcttccggcgagtggcggtgccacgcgcgcattcccggcgtgcgtccatttccgctgcaatgccctacggaatga

SEQ ID NO: 527699 - DNA, 2073 bp, Stenotrophomonas maltophilia
atgacagatggaattgcgaaggacggcctttccgccgaggacctggcctggcgtgcagcagcgcgcgccgcaatgcaggaacggcgctacgccgaactggatgcactgctggcaccgcacgaacaggcatggctggatggtgaaaggccgctgccgggcatccgctggcgcctgcgcaacctgcatgacaaggcactgaccctggacgagcgccttcagcaggcgcagcaatgggtcgctgccgcgccgcacagctactacgcgcacctgcgcctcggcgcctgctgggaatccgccgccggcgaactgcgcagcgccgacgtcgccgcactggtcgaagacagccagtggctggccgcacagcaggcgcgcgaccatgccgtgcatgcctacctgcaggcaatcccgctgtcggcgcgaccggcattggcgctggatggcatcaagcgcatcaccagctacctgcgcgagccggactggctgcgtgcgctgcaggccggccaggtgcccgagcccgaggaagtggcgctggccgagcactatccgcaagcctggccgcaggcattgcagctgctgtcacgcttcggcgctccgctgcggacgctgcccggcagcctgccgcccgtgctgcgcgagcgcagccaggacgatttcgatgcaccgttggcctactggatgcgcctggtgctggaacagcgcgccgacgacctgagcacgctggaagacaccctctattacctgtacccgcgctggggcggcagccatgaagccatggaggacttcatcgaaggaggctggtgccgtggcctggagcttgcgcagagcaacgcgctgcgttggcgaaaggaacaggattggatggccgacctgccacaccgcgaagatgccgacgcggtaggcgtgcacgagcgtgcgtatgcacagatcctggactggcacctggaccgcaacctgcgcgccgaggttctggcccagcgttcggggctgcgctaccggctcggccggatcgaaggcagcgaagaccaggtgcagtgggacgccgggcacatgcgggcggtgttcgaggatctgcagcaggcgtgggcgctggaccgcgacatggtgctgcacgaaggcttcagcaacctcgaagcctgcacctggttcgcccgcgtggaaggcgccgaggcactgttcgcgcaggtggtggactacgctgcacgcgaaggcgactccgcgatcggcctgctctgggccgccaccgccgtcgagcatggactgctcggccagaccaccgaccccatgcgcgccgatgccctgctgcagcgcgccctgacgctggcgccgcaggacaacacctcggcggtcacctttgcctccaacctgttctgcgatgtctcgcagtccgccggactctcgctgctgcagcgcatggccgaagccggcgacgccggcgcgatgtcggcactgtgcgacctgtacaagggccgcctcggcggccgcgaccagccgcagttcgtcgatgcggaaaaggccgcctactggcaggagcgtgcggtggaaggcggcgacctgatcgccacctacaacctgggcgtgcgcctggtggcggccggaggcgagcacaacgaagcgcgtgcacgtgaactgtacctgcgctgcctggccgggtccgaggcaggcgagcgcgtctggggccccacctgccgcaacctggcctgcctggcgatggatggccggaacgacgcacacaagcgcgaagcggtcgaacgcgcgctgatcccgctgtggtggcgcggtgacgacgacgacaagctgtgggccgccggctacctggccgacatctaccacttcggcaacggcgtgccggccaacgcgttcctggccctggcctggctgcagcgcgccagcgagatcgacccggagtacgtggacgtggtgcgcatggcgccgctgatcaatggcgaagggcgctggttcggcgccagccgtgcgcgcaagcagcaggcgcaggaccggcagcaggtggacaccgcaacctgggccctgaccttcggccagcgcagccaggaaagcgacctgaccgcggtctga

SEQ ID NO: 527700 - DNA, 801 bp, Stenotrophomonas maltophilia
atgggcaccagaatcatcggcccgcggccctggcttgggcccggcatgggaggcggtaacggcagcgtggatgaagacggcaatccggtggaaccctatggcgggccgaccaccggtgacgtggccgatggcattcgcgatgtagtgggcgatatccagcagcgggtgcgcggcaaagcaaagccggatgcgcgcgctgagccgacggccaaggcgcgggaagtggactgctcgcagatgcccgacgagaccgcgtgcaacgagtgcctgctgaaggaagggttcattggtccgccccgcactgggcgctatgtcacccggcgcaatctgatcaactacgagtaccagctgtacatcgccaacctgcgctcggcaccgctgcgctttggattcatggtggcggacaaggccgatccggcgcggacgttcttctcagtggatacgttgtttgattatctgcaccggaagggcttctcccgtaccgtgcaggagtggcacttcaacgcctgtgagtttgacgggttctggttgaaggactgcacggtggtggaggcgaaggggaggtatgaccagtttctggatgagaacggaaaggcgaaatacaaatttgtgcggcccggggtcttcgagccgctagggttgcagatgactcgacagcgttccgctatcgcgatcgctgagccacagggaaagctcctgtggtttttcatgcagcaaaagacgatggcagcggccatgctaatgggcgacttggatccttcgctctgcagatatgaaccctttcctggaggtggtgcatga

SEQ ID NO: 527701 - DNA, 801 bp, Stenotrophomonas maltophilia
atgggcaccagaatcatcggcccgcggccttggcttgggcccggcatgggaggcggtaacggcaacgtggatgaagacggcaacccggtggacccctatggcgggccgaccaccggtgacgtggccgatggcattcgcgatgtagtgagcgatatccagcagcgggtgcgcggcaaagccaagccggatgcgcgcgctgagccgacggccaaggcgcgggaagtggactgctcgcagatgcccgacgagaccgcgtgcaacgagtgcctgctgaaggaagggttcattggtccaccccgcactgggcgctatgtcacccggcgcaatctgatcaactacgagtaccagctgtacatcgccaacctgcgctcggcaccgctgcgctttggattcatggtggcggacaaggccgatccggcgcggacgttcttctcagtggatacgttgtttgattatctgcaccggaagggcttcttccgtaccgtgcaggagtggcacttcaacgcctgtgagtttgatgggttctggttgaagcactgcacagtggtggaggctaaggggaggtatgagcactttctggatgccgataacaatccgaagtatcacttcgtcgagaagagcatctttcttccttggaacgcccagatggccaggcagaaggcggcaatatccattgcaggacgtcaggcaaaactttcgtggtttttcatgcaggcgcgaacaatggcggtagctactcgatttgcagggttggatccactcatctgcaagtatcaaccttatccgggagaagcgagttga

SEQ ID NO: 527702 - DNA, 264 bp, Stenotrophomonas maltophilia
gtggactatcaaatagaccgccgcctgtatcaacaccgggaattctttggctggatgggcttcgtgcctgcccagatcagccacgcgcagatccgcgacgcgcatgccgtccacccggtcgatggcctgggtacggtgatcgtctcggtgccgggcgtgtttgaccccaccgacgacgcgcaggtggacaaggtgcaccgcgtcgaaatggatctggccagctatgacctgttgccggtgacagatcctaacctcaagggctga

SEQ ID NO: 527703 - DNA, 438 bp, Stenotrophomonas maltophilia
atgaaattctccctgctgctggccctgggcctgctcgccaccgcgctgaccgctcctgcggcgcaggcggccggcaacatcgactgcgacctgcgctacaacttgtccggctggtcgctgttctacaagaccgcctcgggtaccggcaccatccagtgcaccaacggcgcgcgcattccggtgcgcatcaaggtcaccggcggtggcctgaccgttggcaagtcgaagatcgtcgacggcaagggccgcttcaccggcgcctattcgctggacgacctgctcggcaagtacgtggcgctggaggcgcacgccggcgcgatccgctccggtggtgccgtggcgatgaccaagggcgacgtgtcgctggcgctggccggtagcggccgtggctgggacctgggtgtggacggctcctcgttcgtgatccggcgccgctga

SEQ ID NO: 527704 - DNA, 252 bp, Stenotrophomonas maltophilia
atgagggcgctgctgttggccgcgctggcgcaggtcgcgctgcccgcactcgctacaccggcggtgccgccgtcgtctgcctggctcgagcgccagcagaccgcggccgccgacgaagcggatgccgcagcggcggcgacaccgaaagcccgggagcgctgccgggtggtgaaggaatggaaggccggcgatacggttgtgcagcacaaggtctgcgacgacccaccgaagaagccggctggaaaggtgtag

SEQ ID NO: 527705 - DNA, 873 bp, Stenotrophomonas maltophilia
atgatgaatcttgcccattggcgcctgctggttgccgtggccgacgagggaaccatctcgcgcggcgccgatcgcgtcggcatcagccaatccggtgccagccaggcgctggcccagttggaggcctcgctgggctttgcggtcttcgtacgtgagcggcgtcaggtggagatcaccgcgctggggcagcgagtgctcgaacacgcacgcagcatgctgggcggcctgcaggccatccgcgcgctggccgacgatagccggggggtgagtggagtccgcatccgcctggccagctttccttcgatcatctcgggcgtgttgcccccgctgttgcgtgatttccgacggcgtcacccgggcatcgaggtggtgaccgtggaaggtaccgacgtggaggtcgagcactggctggcagccggcatggtcgatgtcggggtggtgatgaaccccgctgctgatcgagacccgctggcactgggcagcgatgagtggatggcggtgctgccgcaggcgcatccgctggggcgtcgcgccaccgggggcggggtggcgctgagcgagctggcgggcgaacccttcatccttgcaacgggcggctgtacggtgaatggtcagcgcctgatgagtgacgctggcctggaaatggcggacgtacgggtgaccgtgcgcgactgggccagtgcctgcgtactggtccgcgaagggctgggtgtttcgctggtgcccgaatccacgctgcctggggaccggcatggcctgcgggtgatgccgctacggccgctcatccagcgggtgttcggtcttgtcagttcggatgccggaaaggcatcgcgggcgacccagctgttgctggacgagctgcgcggccaatga

SEQ ID NO: 527706 - DNA, 561 bp, Stenotrophomonas maltophilia
atgcaaccgcgcaagaccgatctcgcccgaaccgcgctgcaggcccaccgcgcgccgctggacatgcgccagcgccggctgctgatcctgtgcgacggccagcgcactgtcgccgagctgaccgacctgctcggccaggaagcgcccgccatggtgatccagctggtgcagagcggctacctggacaccgggccgaccacagcaccgctgccggcgcccgccgcaccggccgcacgacccgctgcgccaccggccccgacgcccgtcacggccagggcgcccgcaccagcgcccaccgcgccggtcgaacgccgccgctcgctggtggccgcgcgcatctatgtactgggcatcctggaaatgcagcgccacccgcaggcggcggcgctgttccgcgacctgcagcaggcgcgtgcggaagacgaagtgctgcagcggctgcagtcggcgatgcagatgctgcccggactgacctcggacggctattgccagcgcgtgcggcagcgcctgctggaggcactgccgctggagcattgcgacgccttcgccgaagccgcgtaa

SEQ ID NO: 527707 - DNA, 666 bp, Stenotrophomonas maltophilia
atgcgtccgcttagcaaggaagaagaagcaagcgtttccggaggtcgtacctacaaaactccggcaggcaacacagtcaagttcaatgccagcctttccgacgctcaggcagcgacactgggacagatcgtggactatgggaaagcccacaacatgctggctccagagattcgaatggcagtcaaccaggcgttttatgaaagctccctgggttcgatgaccagcaatcccaccaactccaacgttcaaggcctgtaccagtacgacgctagtacttgggactatctgggtcatggagcgctcgatcgatcgagcacgaacgatcagatcgcagcgatgtacgacgacattcgcaacttcgaatctcgatgggctgcgggccgccaagccggaacgattccgactacccttctgatcgacgactacgtggagatcaagcaccatctcgggcccaacagcacgcaatggtcgtctccggttgtttccgactacaacggcaaggttacggtgctcggcttcaccagcgtttccaccggaacaacggcaccgcctgatggaagtacggggggcgccggcagtggtggccactctggaggaggtggcgggggttcaagcggcggcaccggcggtacggtcatcgttggccctccgcagcgtcagccttga

SEQ ID NO: 527708 - DNA, 489 bp, Stenotrophomonas maltophilia
atgaaagccaagctagccacttgcgtactcgcaggggtgctgatgtcgaccggcgcctcagctgcggagtgtggaagcgcggtagcggagtacgtttactccggcaaccctgcactgcacgctcgaatccagccgctaacaatgcctggaacagggaacacacttggagtcactctggaagaccgatcccggggcttcaaggcttggttcatcgccgacaagggcagcggttcgtactcgtcccttgtctacgtagatgactttacgcagccgtcatggcaccagcccgatccggatgctccccgggccattcgggacatgcccatcttcggttgggatcagtccctgcatgtgaatgaagatctaaggaacctcaagagtgccccgcagtttctatttgttccggacctcgcggaagtcgtgtcacatggcattgagcagccgttccccctgactcaaggcatcttcaatcgaatcagctgtcgctag

SEQ ID NO: 527709 - DNA, 1251 bp, Stenotrophomonas maltophilia
atggaactgtttcgcaaggaagccgagactgctcatgcagaccagtttggcgccgtcatcgtttcaacgccaaaggctcacttcgcagctggtgttagcgccactgcactgtgcttggccgcactcgttctctcattccatgcccactatgctcgccgggaacaggtatctggtcatctagttactgatacgggcgagagccggattctagcgcgtcgatctgcaaccgtctcagaggtgtacgtcagagagcaccaacacgttcgaaagggagatccgatcctgcggctatccagcgaaatgcacacccgcgggggtgccgtgcatgccagagtcgaggagaacattgagaatcaaatcacctcggtccacgcgagcgtcgcagctaccgaggcagcgctgatcagtgagcagcatcagttgagggagcgtgtcaaatctcttctcgcccaggcatcggatcttcgtcagcagattggctatcagcagcaggccgctgagcagaagcagcggacactgacgaagctgcgtccgcttttgaaggatggatttgtggctgagtatcaagtccaggacctcgaaagtgcgcttctggatacccgggcgcagacatcaggcctgcatcggcagcttgaagatatctctcaacagcaacgcgaaacaagccgcaagttgacgagtctggagatcgattcggaactcaagttgaacgatcttcggcgagagcaagcgagattacgcaccagcctcgcccaggatcagagcgagcttgagctggtggtgagggctcaatcagacgcgctagtcagctccgttcttgttcagccagagaactatgttgagcctgggcaacctattgcctctctcattccgacacctacgacgctgaaagcggaaattttcattcccagcacggcaatcggctttgttcatcgaggcaccaaggttgccatgcactatgcggcattcccctatcagaaatatggggttcaatacggggttgtcgaacaggtttccgaaaccccgactcaacctgcacagctgtcagccctgcttggccagcagccgccagcccagccaatgtacagagccatcgcgtcgttggaaaggcagcagatcgtgactgatggccagcagcgagcgctggttcccgggatgcagttggaagctgcgcttctgttggaggatcgctcaatcatcgcttggctacttgagccgatcaccgcatttcgagcgtctatacaggactga

SEQ ID NO: 527710 - DNA, 2151 bp, Stenotrophomonas maltophilia
atgcaagtcgccaactccacagcagtcagcccaaaacccggcgatctattgcgtcaatggatgaagcgtccggtcaagatcttctaccagagtgaagccaacgagtgcggcctggcctgcttggccatgatacttgatcaccatggccatcggctttctctggaacagctcagggcattcgccggatcctatccgcaaggaatgtcggtatctgatatcagcgatgttgcggagcggaaaggccttgtggcgcgccctcttcgggctgagccagatgaactggatcagctcgtactgcccgcagttctgcattggaacatggaccacttcgttgtcctggaaaaggtgaaggcgaggaaagtcgtgattctggatccatcccaaggccgcatggagatctcctgggcggcgcttggccggcacttcacaggggtggcaatcgagctcttgaagggacccgatctcaagaaggctcaagcgcgcagtagtcttcgtctgaggtcactcattgggccgatctctggtctccgaccagcgctggtcaacctggggcttctttcagttgcgttggaactcatggcgctcgcttcaccccaaggcttccagatagtcatcgaccgtgtactcgccgatggggaccgtgcccttcttccggttgtcatagtgggactgagccttctcgcccttcttcagctgctgctgggttggctgcggtcctgggcaattgtttggctgagcagccagatcaatattggatggagctcgggcgtgttcgctaggctgctgcgcctacctacccagtacttccaaagtcgcagcctgggtgacataacatcgcgattcacgtcactaaacacaatacagcaggccataagcacgcagttggtcgctgggatactagatggcgtcatggcccttgcaacaggagccatgctgtttgtctacagcccacttctaggcgcatttacaagcctcacagcgctggcttatgtaggcgtcagggccatctacgtgaagcgactgcaacacgcaacggtttcctccttgaccgaggacgcgcgccggcagtccatgctgcttgaatccatccgcggtgcgcagactttgaagcttttcgggaagactggctggcaatcgtcccgctttgcgaaccgaagcgcagcagcaatcgcagcatccattgccgttcagcgtacgagcttgtcctacgcatcctggggtggcgtcctgctgtctgtaggtaggcttggtgctctcgcaatcggcgcatcactggtgatggagggacggttcactgccgggatgctgattgcgtacgcctcgtactcagagcagttcatctcgcgtctgagtgcgctttccgagtacgcaatccaactcgcgttgctcggttcacatgcggaaagagttgctgacattgctcttgcacccgttgagaaggagcccgctgcacctttgagcgcgcgcgttcaacccgttgaggttgagctccgcaacgtctgcttcagatatgcagacaatcagccatgggtgttgaacaacgccagcgccattatcccagcgggccagatgactgctatcaccggtgcgtcgggtacaggcaagagcacgatcgccaagctccttgtcggactgctgaccgtcaacagtggggaaatcctattgaatggcatccctttgagccatcttggtccgacccgggcccggcgcatgtttggatgcgtcatgcaggatgacgcgcttttccacgggagtctggctgagaacatcgccctgttccaggaaggggctccgcagcagcagatcgagcactcagcccaagccgcttgcattcacgatgacatttcaagaatgccgatgggctatcgaacatcggttggtgacatgggatcgaccttgtcaggaggacagcgccagcgaatcatgctggcccgggcgctctaccaacagccccaagccctccttctagacgaagcgaccagccatctggatgcagaaactgagcagagtatcaatgctcatctcaagcagatgtcactcactgtcattcagattgcacatcgattcgagacaatagatgctgcggattgtctgctgcgtgtgcatccagatgggtccgtcagccgaaggggaagggctgccgcctactga

SEQ ID NO: 527711 - DNA, 876 bp, Stenotrophomonas maltophilia
atgctcagatttgccatgtccgtaatcgacccgaatgacattgccggtgcgcagcacgaagtgcaacggcttgtcggtcgttgcattctgcgccttcagcagtgcgagcagctgatgaagtccatgctggcctttcagaagttgtcgggtacaccggaaacactcccaaagagcttgaacaaccgcaggactgagatcggcggcaagaccatgggcgctttggtgggttgcctgactaccgaatgcatgctgaaggaaggcggcgaagttcccgacgtcccatcaggtctcgaccatgattcaagcccttttggcctgcacatagggatcaatctgccaggggaatcccatgcggccctgcgaacggatctacgcgcgctggtgaacctcaggaatacgctcgttcaccacttcttcgagcagtacgacatccggactatcgatgaatgcgtcaaggcccaggatgcgctcaggcacgcttgcaccgagatcgatcggcagtttgaacaactgcgcacgcttgccgcagttatggcgcagggcataacagcctttgctgaactggtgcagagcccagagttccatgactttctggtcaacggcatcgcgcctgatgggcagatccattggccgatcgccggcattgtcagtgcgctgagacaggccttccgagaacgggcgatcgacggttgggtgaatctggacacagccgctctgtggatggcagagcatcatccggaacaaacccccgggaagtatggctgcgcccaatggctggacgtcatccgtgattcccgtcaattcgagctgcgcgacttcgcgcacaacggccaacggggagcgtggtttcgcgagcggcctgagtcgacgggctga

SEQ ID NO: 527712 - DNA, 357 bp, Stenotrophomonas maltophilia
atgaccaagccgcactcccctcccccgcgccccatccagcagccgccatcacccggccctgccctggaccccaccagcctcatcgccgtcctgcacgccattggcgcgggcgctgcggccgacggccagccctggcccgagcgccatcagctgcgcagccggcagatcgcgctgtccgacgccgactgcgcggcgaccggccagcgcatcgtgcaggagatcctgctggcggccgagcgcacgcgccagaacggcgagcccgagcagtacgtgggcgaccgggtgatggaggggctggtgatggccgatattgcacttactgctttcatccacgagcggatgcgacccagggattga

SEQ ID NO: 527713 - DNA, 1206 bp, Stenotrophomonas maltophilia
atgtacgtgccaaagactctggtggccttgatcgtggccgccgcactcgcccctgttgattcggcatctgcgcaggccctggtgcagggaggaggcgcctcaatgcccgcgtccctgtacaagggagcgacggacaacatcctgccggcagaattcagctatgtcgtgctgggttccggcaatgggaagcgtgcgttcctcaacaatgagcccgcgctgctgcagacgaccggaacggtccattacgcaggcagtgacgcggtgctgaccagtaccgaactggcggcgtacaacagcacctacaattcctacgggtccggcaacgcctatgggccgctgatacagatccccgttgcgctggctccgatcattgttccgttcaacaagcctggtggcgtgctggacctgacggtttcccagctctgcggagtgttctccggcaggatcacccgctgggatcaactgccggcgggaggtcggacggggcagatcactgtcgtctaccgggcggagagcagcggcagcagcgagatcctcacccgtttcctcaccgccgcctgccaaacgagcgacgtctcgggcacaacgctgaaatccagtggctggggtctggtgccctcgttctcggtgcagcccacgttcgccaacctgttcgttggcaacacggtaccgtccaacttcatggctgcgccagggccgggggacgttgcgctctacaatgcggttctggttggagacggtcggattggctacaccgggccggatgtcgttgcaaacctcagcgatgcgaccaaggttgcaaccgtgaagggatactcgcctgccgaagtcagcctgcaggcgaccatcgaaaccgtctcgccgccgaccggagcggccgccaatgatccagccaactgggtgcctgtgttcggcaacccctcggtgggttatcccatcgttgggcttacgaacctgatcatcggccagtgctaccagaaccggatggtcggcaacagcctgcgcagattcctgctcacgcattatggaagtgcccaggtcggaggggttgagcagggtcgaaacgatgttgccgttcgaagccacggcttctacccgttgcctaccagttggcgagatgcgattcgcacgcgcttcgcactggctggcaatgcggctggcctgaacaacccggcggtctgcaacggcatcgggcgtccgctctag

SEQ ID NO: 527714 - DNA, 699 bp, Stenotrophomonas maltophilia
atggacccgaccaactcaaactcgccagaaaacgatgtaaaggcgacccccagcaatcgcatgcctgacaatcgacctgaaaactccggacggaattcttcgcgcgaggcccctggcgatactgcccgcactccaatggagcgcataaagagccaccctgtcagcacagcactgacccttaccgcaatcatactgggaagcgctgcgagcattacttcgtacgccggctatcacctctacaagtcaagtgatgtaactaccaacgccgagatcgggcgcagctatgtagcgcggtcaacgcatgaaaaagaggtcgccggcctgaaacaggatattgctcgtcttgatgcgtcactgaagacgctcaccagcgagaatttggaccaggccaacaaactgcgagaagcattgaacaaactggcgaggcaagatacctctacggccagggtagtgcgattctgcgaggaacttcgagatgatctgcttgcccaagagtacgcgcaagagcaggtcgaaaaggcgattcggaacggaggaagctccaccatggcttaccaggagaaagtaactcctcagagacaggctgagatgcagcgtgaagtgctcgatctgaggaggcgctcagatcagcttcaacaaagaatctcgcagatacggtcgactctccaaacgtgttcggcctatccaccccaggattga

SEQ ID NO: 527715 - DNA, 609 bp, Stenotrophomonas maltophilia
gtgcctgtgagggagctcagatacgacagagcctcttcgcttgttacagtctcgactaccttccctgccaacttcggcggcagggccgtccataccaccccagaaacagattttcgctctgcccaaccgctcaggccgggtaagcactccggtgaggcatcgcctcttctccagacgcctactaaagagttggcgttccttggggaaacgccctcgcgactagcaagggctgcgcgcgcctcggacagatcagtgccgtcaaatttcgcccagagcgatgtcaccaacaatgcatcagggctaagaaccagcgtcaagcgtccatcagcagactggcgctggaattcgacacgtacttcgggaccgtcagtttgccaatgcccgacgatcggcagctcgcgcgggtcccatataagtgaaccccagccgatgaatgcgatcacaccatctccttccagaactataaaggtcggccaccgcagcgctcagcgagggagatacactttactcactagcgattggatgtgtacgcaaggatcaaatcttggtctcaatgtacttgtcagtggctgcgaccaagtcacatatgaatcgaatgtgcttccgtag

SEQ ID NO: 527716 - DNA, 1272 bp, Stenotrophomonas maltophilia
atgcaccagccgtctatcgaagatcctcgacagcctttgctggacaccccgccctcatcatctgagtgggtgtgcgtatcttgtctgaaggatgaattcataagagagatctgtgcgcccaatgactggcagcttcgctgctgcggttgcggcatgtgcgataagtttggtgctcgccttgacaagattgcagaccgtattcgtggcgccttgcagcagcactacgaaccggacatcgggctctatcgaggctacgagctggacttgccgcaaatcgtctcgcgggctatcggttgtagaaacgcgacggtgaccgaggcgatctcttctattctggaagatagagagtctgaggaagaatccggcgactcgctcgacgagaattccttctattatcccggacagacctacagtagggtgcgaagtccttttgattcagaggatcatgagcgttggtacgtggtgagcgattgggaccacgtggcacatgatctggttcacggtcgtcgcttcttcaacgataaagcacgggaattcttcagtcgccttctcaacgaggccatggcggctacctcgctggaggcgccaggctcggtagctgtaatgcgaattctgccggagggaactctcgtctatcgttctcgagtatccaatggtgaggatcagacgcgtcgattccgagagtggcccgcacaggagttgggtgccgctccgcggagaattgcggcaaacaatcgcatgagcgccgctggtgtgccggtgttctacgggtctgccgagattgagacctgtattgccgaagtacgaccgtccattggcgatactgttgtagctggccagtttcgcaccacgaggtcattgaagctgtttgatttcacgagactggactatcgccttagacacgagccgcttagccttctggatccgaagcacgaacagcgctcaatggacagaaccttgctgtcatacttgcacgaagagattgcaaagcccatgcgctccaacgacacggggtacgtcgtgacacaggccctgaccgagttcatacggtacgggagggtcgagaacttcgatggggttgccttccagtctgtccagcggcagaacggtttgaactacgcattgttcgatgatgatgatccgtctgctccccaatcgctggatggcagatcacggttccctgtcgaaatactttcaggggccgtgactgagcacgttgtggactcactgagctacgccctgagttgtccccagccgacctcctatcggtag

SEQ ID NO: 527717 - DNA, 1173 bp, Stenotrophomonas maltophilia
atggcgccggatcgacatccatacggcttgggcatccccgacatgatgacctttgcgactgacaactatggtcactatgttgacagcgccctggcagctttaagccaagccaatctgctgatggctcaagaagaccttgttagtcggtatgcgcgtttgccgcgtgccgctgaactccagttggacatggtttctgtcgcccagcggcttcaagagcgctacgacctagagacaaagagctcagccctcctcgatctggccggtcggcacggcactgacgtggcaagcgatgcactgtggtcagcttctcgcgtaagcgtgtatgagcgggccattgacaatctggttagcgccatccgtgaggagcagcaacttgatcggcttggcttggttgactacacgtgggggctgatcgagagctacatcggcggcgggcgcgacgcgcgacgtctggcgcagaatattgctggtcccgcagatcctgcagcagctctgcaaggcctatacgaccgcgccagctcgtacgcagagtactcagccgagttcttaagggaagttcaggaggaagtgttctcctacgatcagatcgatctggacatcgatgaggaaacagaagatctagatgcagcatcggcaaagagcaaagcacttgagagcaccgtcgccaagctaagttgcttgccgaaggagccaagtcatccgctgtcaagtgaaaggattgctctaatatctgtttgcctggccttggtctttggtctggctgatcagctcaagtggtacctggatgcgctggagaagcgacgggaagctgcagagtcggtactggagcaggaagtgattgccgagcgtcaccgagaggcgatggagtcggccgcacgcctgaatcgtacgatggaggtccttgttgcgcaggcgctcagccaaggcatatccgtcgttagacgtccagtggccgtcaggtcgaggcctggaggtggactagtgctcggaactgtgtacccgaaccagcaagtggaaattacgggtaagcattcgcgctggctcaaggtccatttccgagatcacattgaggggcgagagattgagggctgggttctaaagcagtatctgagccctatgaataaggctgcggagcttggtgcggctgcagagcctgagcgcaatagccgctag

SEQ ID NO: 527718 - DNA, 1314 bp, Stenotrophomonas maltophilia
atggagttggctcctcagtccgcccagagtcccgctgatctgtgcgtctccttcgatgaatggacccggggaaggaagatcgtgtccattggctccaacgccggagctgagcgacttcccttccagggctggcaccacttcaaggaggcatttgcccctgaggtgattgcccgtgccgtcaacgagagccaacgagaagtgctgtcctgcctggacccgttcgggggatccggcactacagcattggcctgccagttcttgggtatcgcgcccagcactgtcgaggtcaatccgtacctggctgacctcattgaggccaagctgtgcagctacgactccgatgacctggcacttgacctccaccgtgtcgtcgctgcagtcaactcacgccggcgtggctccctgacgcgcttcaggcatttgcccgtcactttcatcgaggctcccggccaagagcgctggatcttcaatcgaaacgtcgctgagcgtattgcatgccttctggatgcgattgaatcgctggcccggcctacacaccgcagattgttcaaggccatgctgggcggcatgctcatctctgtgagcaacgtcctgatcaacggcaagggccgcaggtaccggagcaactggcaagagcgcgacataccgccacgcttggtcgaccagctgttcgaggagcgcactcgccaggcgattaccgaaattcacgcacacaggatgcgcaggtaccgtgcgtatcagatcctgcgcggtagctgccttgagcagctcggaaagagcagccgaactgacctgtccgttttctcgcctccctatccaaattccttcgattacacagatgtgtacaacgtggagttgtggatgctgggctatctgggagacagggacgcgaaccgtgatctgcgtatgtcaacgctgtgctcgcatgtgcagatcaagcgccaatttgcacctgcgccaaagggatctcgacgcctgacggttgccctggggcgactggcgcgcctgaagggcgagctatggtctccgtggataccggacatggtcggcggctattttcacgacatgaaagaggtcattggtgcgctgcatgggcgcctcaatgagcacggtgagatttgggctgtagtcggggatagtcgctacgccggcatccgcattcaagtggccaacatccttgcagacctagccgagcccatggggtttgaagtggccaagatcgagccattccgttccatgcgctcatctgcccagcaaggcggacagcaggagctcgacgagaccttgctggttctccgcaagattggccgctaa

SEQ ID NO: 527719 - DNA, 1062 bp, Stenotrophomonas maltophilia
atggcaagtaagggtggtctctggtccgaagatagtcttgttgagaccgtcagcgggtacttggggaatgggtacgaccagaatctgccggcgtttcgccagttctgccacgccgctgccaagatcattcagcgcaggcgtgcacgagaagacaatacgctgttgcagggtgcggtgatcttcgtgatggagggtatcgttcctatctcggacctgcaaaaggagagccgacctctctttaatcatggggtcgcgagtattgacggcagggtctggacagggtcttccaggttggcaaccgccaccgggatagccctgcctcaggggggcgcagccgatcgagtaaattttgtcgtagagaagcttggaatgggctcaaggccggcaatctactatgacgcaagcgaggaggaggcagtcatgagggcctaccccgcaggccttgagcagccggacaactgtgaggatctatcgttgaactcggctgagttcaccatagagcacctgaaaaggttgctcgatcacgctcatgcgaaattgctgatcagtccatcggggtcaaaccttgcgcgtaacctttggtccgacaggcaagcgattattcccattggtgatgccgagaagggagtgcaggacattctgcatgttgcactcactacggggcttggatttggttctatcgcggtccgagccgagggctcatcggaaatggggcgctatgacttcttccttgaggagcaagatcctttgaatgcctcgacatggacgcaccatgccatcatcgagctcaaggtgctcaagagcttttccgaggcgggcagccccgtggcagacgcgaagaacatcaaagccgtaagcgacggccttacgcaggccgcggcctaccgtgattcgcactactgcaggttcgctgcactttgctgctatgacatgcggaccgcacccgatcctgagggtgcggttgcacacgaacgcaagcgcgccgcacaccttgacgttgcgatgtggtcttggccgctgtatccatcggccaagctcgcccgtgaggcgttggtcaattag

SEQ ID NO: 527720 - DNA, 654 bp, Stenotrophomonas maltophilia
gtgagccaagcgtatgcaagcttcgtagacccgcgccggcgtcatgcggtccttgtaggactcttcgacgcagtggagcgctccggtgccaggcctgtcgattctaggctgatgcataccctctggtatttatcgaacgctctggctccggcatggggacttcctccgtttgactcggcagtgttgaagactgaagggcagccctactttcccagcctccagctggatatcgactcactagtcgggatggggatgcttgtcgttgccgagatcaggaccgtcgatgaagaacagcggatgcagggccgatttgtactgaaccggcaattcgcggaccgagttctggcagtgatgagagagattcctgaagatcgcgatcttttggaatttcttgatgacgtggttcaagccgccaataggctttccggaggagagcaggtagtggcgcttaccgaggatgccacctacggtgatcctggggttgactccgggactgtgattgatcttggcctttgggcacgtagagacgccaccacgcctactcagtacattcttgatcgcctcaggagtgttgccggtcgggatcttatgccggccgaactaatggagatgtacgtggatcaccttggcaggaggctgcgtaatggcaagtaa

SEQ ID NO: 527721 - DNA, 2004 bp, Stenotrophomonas maltophilia
atgacaagctcagtgagcttcccggtattccagcgcctaagcgtcaacgagtatggtctctaccctggcactcccaacaagcctggcttgcagctggagttcagtcctggactgactctggttgtagggaccaacggactcggaaagacgacgttggccacgatgctgtttcgattgctcagcggcccctctgatctgttcgttactaccctcaacgcatccgagttggggggctcgtcgttggacgcgaccacgctctccgccaagcagcgctccatgtttgccgatcgggtgagtgatcgtgctgccaacgcgtatgcggtcctagagcttcgccttggcggtagcgatcttaagatcgttcgcagcttgaaggctctggggcttacagagtactgggtggatggtgagctgcttgccggcaaggagtcggtgtaccaggaatcggttgtcgccctggcagggcagtcatcgttcggtgactggctgatgttcctgaggcagttggtcttctacttcgaagatcgacgttcgctagtgtgggacgcttccgcccagcggcaggtgttccggatgctgttcttaccgccaaatgcttccggcaagctctatgagcaagaacgcgacatcatgcagatggacagccgcatccgaaacgacagtgctgcgcttcatcgcctgcaggagagagtggcagaggacgatagtaagcagagcagcagtcaggacgccgccggtcaggtgaagtcactacggccgctgcaagagaaggacctggaaaagcaaagcaaactgctcgctgagatcaacgatgtcgatgagcaccgccgtgcactgaggcgccaactcttggaggctgaggatgttgcaagccgacaacaagaacgtcttgaagatggtcggcttaagatcattcatcatcagttcccctccaagtcggaaacggctaagtacttgctttctctgctgctgttggatgggagatgtgcggtctgctctgaggtggccaacgatttcgctgtgtcgattgaacagcgtatggctggggcgtgctgcgtgctttgcggaagtccttcgcattccagtccctcaccagataaggatgttcccagtgtcgaaagcttgaatgagctacgaaacgcgctaagtaagtcacgtgtgcgcgttgagcagctccaagccgagctgcgcgtggtgtccagcgactatgaccagagaagcaatcatctggtgaagctttctgatgagatcaaggcgcgcgagcagttgcttgctgcattggtgaagtccttgccggctgacgacgaagagcagctgaaggcaaaggaagagttgaagggtatcgctgccaagatcgcaaaagatcgggttgaacttgaagtcctcaatggcatcttcagcgtggatacagagcgcttcaatgcggttgtcctgaagcgggcggaggagatcaaagcagctttctcccagtacgcgcaggactttctttttgaggaagtcgcgctcaagtgggcgccacagacgcgcccactgggccagctgaatactatcgagatggcctcgtttgatctggacatggggggcacggacttcggcttggtgcataggcgtgacggaccgtctgcggtctctgagagccagcgggagttcatcgatctggcgtttcgaatggcgctgattgaggtggcaggacaggggcagggcggcacgctcgtgattgatgcgccggaatcatctttagacgcggtcttcgtagagcgagctgcagaagttctttgccgattcggcgacgcctcgggcaacaaccgcttgctcattacctccaatttgatcgatggacgtttgctgccggacttgattcggcttggcgttcccaaggaagagagggagcagaggttgcttaacctcatggaggttgccgtgccaacggccgcagtgaagttcgagggtgccaagtacgaagccgaatggaatcagatcctcaaacagggcttcgggtcgtga

SEQ ID NO: 527722 - DNA, 1206 bp, Stenotrophomonas maltophilia
atgagcgcagagtacgagacggacctggattcgaaagagctggatgaggccgcgcaggctactccatcgacttccggcagcgaggagcagcgatttctccaggatgcatctgattggtatcgtgaatggcttggtgtcaacgatcacctgctaaagagcaacgccatccctactagccgcgttctggtaatcgtgttcagtgaatcccctgacgttgagcgtgagcgcctcaaggcgatcggcaccgagagagagcggatcaaccggggcggacatgatcctgatattcagggagtggtcctggcaactcagaacatgcggaacatcgtaagaatccgtagcggacttgcctcgctcaacgaggcgattaacgtctgccgcgatgagcttgatgaacgcgataccttcatgatcattccgttggcgcagcgtcgtatgctgattcatcttgcggatgctcctttggatacctggggcgatgatccgccgtccttgtcaattggtgaaggcgccatcgaagtttcgcctgatcagatcgataaggacattgcggtgttccatgacgagggacttcgatacgccaagaatcccctgtcccagatgatctggaaagggaagaagtacccgtatgagtttctgcaggatccggagcggcgtatccagtcctatctgcttcttacactcaagcacagctacaagcatctcaacgccagtgtggatgaggaggttgtggggaaaggcgggcgatgtgacattcgggtcgagtgggacggaaagaccgtgccgaagactcgcgtttcttcgatgattgagctcaaggttctgatcaacaagaacggtccggccgccaatctagactgggcgctcagtggtgtgcgtcaagcgaacaagtaccgcggctccaattcagttgctgcatttgcttgcatctttgatgggcgaaaggatcagaccgacccaatgagctcgctcgatgcagaagcgtccagccttgacgtccgtctccgtcgattcgcgatggaggcgcctgtcggggtcgcgaaggcggctaagaagcccaaggcggccccagctcctaaggcggctggtagatccaaagccaaaactccggcaggaaagacccatgccatctcctcgggcggggcgtcagcgagcaagcctgcgagaaaggggcgcccgccgaagagtattccgggaactgggtag

SEQ ID NO: 527723 - DNA, 693 bp, Stenotrophomonas maltophilia
gtggctaagcttaagcatgtgactgttgcagatcatgagcgactctacttcataaggtggatgctcctgttgatcatcgcaaatgatgcagctggtttacctgaggccaatcggcaacggctgcacgccttgctctttgtctcattcgcgtcgtcaaagttctacgagatcaagccgctgcggcagcgcgctcgtaggaccgatcacgggccttactaccgtatggcccatatcgcacttggacatcttgtgatggcgggtttcgtcgacgtaactgagttcagaccacaccccgcacctagggaccttcagttcgagggcatcttccgcccaacgcttgccggccttcgcgctggggaggatctccgtaagacgctcactggtgaaaagatctatcgtcttctattggatatctgccttgcttctgccgaggcgcttggaccagagcagatcgccgacgagggaatggtcctcgatcagaccctcagtgaggacctgacgtatcagcgggcactgcgtaagcacggagagatgcttgagcttgaagatccgggcgattcgcagacgcctacggtgcgcggtcttatggcaattgatgaaaggctcaagggccgaggattcttcaataagagagacaccgtagcggtctatcaaacgctcatgtccaagcgtgcactcggagccaggcaatga

SEQ ID NO: 527724 - DNA, 2016 bp, Stenotrophomonas maltophilia
atgcgctcaccgattcaacttccggttatagatcggcttcaggtttctgactatccgctctacccgggcagtgccaagcaaggcctgaacctagtcttcgatgccggagtgacggtaattgccggcgttaatggcatcggcaaaacgacccttttgaacctgatcttgcgaatgatcctggggccgagtaaccccagtaaggctgcgaccaaggacattggcaaagcaagtcgccggggactggttaacagcagcaagttcaagttcttctccgatcgcgtcccggccatgccaactgcggcatctgcaacgttgaccttcagtgtcggcggtcagaaggtcgtcatcaagcgcagcctgattgacctgagcatactgaagctcaccataggcaaagagtccgtcaaggacactacgaacgcgaagttccttgatcgcatggcacgattggctggtctaagctcagcgtacgactttcatatcgtcgttcggtatgtgcagttctttaccgaggagcgattgcctctactgtggtcgccgagcgctcaggtagagctcttcaagattctgttcgctgagtcaaccaacatgaccagtttgaacgagctgtataccaagcttcagaaggtggacagtgactaccgcaaccgcgtttatcagctcaatgagcgtaagaagacccagaagctcattgctgaggtctccggcttggattcgttgggcatcgagaacgttcgcaagctcattgatgagacgaaagcggaaatagaagcgctggacaaagttataggtaacatcaatgtcgacgtggccgcagcgcgtgaatctcagcaaagaggcgtgcgggagctagaggatctagagaatcagctggacttggaggagcatgcgttccaccagctggatgcgcagtacatagcgcacatcctcccaggtcagcacgacaagcttcagctgttgactcaggggttgggctccaatctcggctgcttcatgtgtggcagaaccggtacaaaggaaatggccgcgctcaagaagcgcgtacgcgatcataaatgcatcgtctgcaattcaaacgtacccacggcgtctcaagcagatttagcaccatcgttggacgaaatcacaaggattgagtcaaggattgaggagatcaagaatgagattgctgttcgaaagtcggttcagaacaccaacgatgctcgctaccagcaggcgcttgtggcgctaaagccggtctccctcaagcggaatgagctagctaataagtacgaagagatcgtgaggcggtggccaaaagaagtcatggagcttcgtcggccagatctgacaggtatcgccacagagcaggcggcattggatgtgcttgagcatgagcgcaccaatctaagccagcagtacaaggatcagatcgcagagcttagcaccaagatggcgggctacgaaaaggacctggccgagcgactgaccaagtacgctgaggagttcttgctcgagagagtagccgtcgagttctcccgtagtgcccaagttaaagtggttacaggcgtatccggggttcgtgtgcctaccttcaaggttctcatgacctccagtacgcacgcggcagcgcatgagcgcgcaaatgcggcgagcgtgtccgagtcccagaaggagttcttggatctcgcatttcgtatgaccttgttggacatgattgcccacgacaaagccaccatgcttgtcatggaaacgccggaagcaagcttggattcctggttcatggaccgcgctgccctgatgatccgccggttcgcccaagcgggacggggtacgaggctcattgcgacctcaaacgtcaacggcaccacgatgatcccagatctgttgggacttcagtcgggtgagaagctccccgccgaccagcagcaccgtcttatcaatttgatgaagctggcagcagagccgggtgtgctgaaagattcagaggctaagacttggttgacgaatgagctggaggcttacgccggtggctaa

SEQ ID NO: 527725 - DNA, 234 bp, Stenotrophomonas maltophilia
atgaccgtgggacagcgagttccggcagttgaaagccagctggtcaggctactcaatggagacgattggggctccgaagagctggccgctagcgtgcgcctgctgggcagccccggctgcaacctctcgaggattcgccccaagttggccaagtacgcctgggtacgcctccgtaccgcactgaatcaggctcagggtatggaacggcggtcccttgagtatctggacccatag

SEQ ID NO: 527726 - DNA, 396 bp, Stenotrophomonas maltophilia
atgaatgtaaccacgtttgatcatgagcccaacggcagcaattgcgagaaggtcagccaagtgatggcccgtgtcggtgagaagtggagcatgcttatcgtcatgtaccttgatggtggacctcaccgcttcactgagatcaagcgctctgtgacagggatctctcaacggatgctgacgctttgcctgcgcgggttagagcgcgacggcttggtaaagcgcactgtttatacggtgatgccgcctcacgttgagtacgagttgacggcgctgggtaggtccctgacggaaccggtgaaggcgttgggcacttgggccaataagcacctcatcgacatcgatgcagcaagggttgcgttcgaccagcggcaggatccatcgacaaatcctcgctag

SEQ ID NO: 527727 - DNA, 648 bp, Stenotrophomonas maltophilia
atgccaggtgtagcggtgacgcttatccattctcaacgccagctgctcgacaaagcaccgggaaagttcgctgactgggcaaagcagttcttggaggatgaaggggtgcatactgtcttgggagagctggtcacttctccgcagatcggaaaacagcctatggatggcaaggtccagaccaacgctggccgaatcctggcggcagatgttgtcatctgggctgccggcatccgccccatcactggcttcattgccaactcctggcctgagacggttgaggtctccggcctggtaaaggtagacaactacctgcgcgtagtcgaccacccaaccgtgttcgctgtgggcgacgtggcaaatacgcctgagaaccgactggccatcatcgccggactgcatgtgaagtctgtcgttgccaacctgaagaagttggtggccaccgacagccaatccaaagtgaccttgaagccctacaagccggcgatgcccggccaaggagcgggcaagctcatgatcgtctcactcggtcgaaaggacgggctgacttctctgccattcggccagttccgtgcccccttcatggcacggaagatcaaatcgcacgatatgttggtcggcatgtcaaagaaagctctgaagctgagttag

SEQ ID NO: 527728 - DNA, 933 bp, Stenotrophomonas maltophilia
atgaatgcaaccggttataagaaagaaatcgccaggattcttgaatcgctccgcgtcaaagaggcggaggggagtgacaggtcctctggtgcctcgctgtacgctgcgcactatacgaggttacttacaccgaagttcatgctggagaagtccggcacgaacaagatgagacagttcgatggcgattacatgaacgatccggaggaaggtcgctatcttgtagacgtaatgatcgacgtcgctgagtcgtgtccccacgatctcaagtccgagttcgtgagtaggcttgccgctcttcgggatgcacctttgctctactcagcttacggacgcgccactttcttgtcatgctggacgcgtgtcgagatcaaggcaggtacggagagcgagaaggactctctggatcactggaggttctacggcgatgatggcaggggttcgtgcatcatggtgcccatggaacacttgcggacgatcttccctaatcaactgtatgacgtgacgtatgggtccgatccgcgtggtggaggtaaagctgcggctgaccggcctgtcagtcagtttaggaaggcgctggcggatcttattaagaatttgcctaagaccaaggcacgtgcgatggagcagctcgaagatgtgatcaaggcgacccatcccttgctgttcctcttcaagtcctctcattacgcagccgagaaggagattcgaacgatcgtccatacggatggctacgggactgcggaccacgtcttctttgacaccagggagcccgcaagagcttacgtcgaaagccccgagggcctgattagtgatgacgcaatcctgttctacgggcccaaggctagcccgcactgcgctattgaagctcttggcttggcccacaatcacaatcttcggcttaaggcgttctcaagtaccaagccctatcggtag

SEQ ID NO: 527729 - DNA, 279 bp, Stenotrophomonas maltophilia
atgtacaagatcaaagccaccctccgcaaagaactcagcaccaaggaggcatcggacgcgtacagcatgctgcgcgggctcgcagcaaacatcgacggctaccagaccattgccggcaggaccaatgcaaggctcctcgctgaaggctacgtcatctttgactttcgagatcaggagcgagctgatcgcttccgtaaaagggggcagacctacttttcctcgagcttcaggttcacgcgattggtgagccgtcgttccacgcgtccaactcgtcgatag

SEQ ID NO: 527730 - DNA, 921 bp, Stenotrophomonas maltophilia
atgcagaaggatctgaaggaacgtcttggtgaggcaatgttcgaggttgagcatgccctaggactgtatgcgaaaggctattgcaccctgccggcggagacaatttacgatcaggaactgcttgctccaatgatggagcttattcaggattgccacatctacttgatcggtcttgtacccaagatctccctggatgacgcaaagctcgagggaggaaagctcaccttctacatgactgttttgggcaagacctatgaggttccgctccactgccctgacgactggacactggttgaagcagaaggcgagtacatcgtgctttccccctcgggtgagaggtatcaggttgatccagagtacctccagtccaggcttagcgacattagcaaagtgatcgacttcgaggtcaagtacatcggccaggcatatggcacagacggctctcgcaatgcactcgatcgactactgaagcacgaaacgctacagaagatctcccttaaggggataccagccactcacaagctcacacttctgctgctgaagacgttccctaacggccagctctttaccgtcttcaatccgtttgcaaaaaacagagatgatgatggcgcgagaattagggcaggcatcgccaagcttcacgacactaacgagcaggagcggataacgctatatgaagcttcgctcattcgctacttcatgcccgagtacaacaaagagttcaagaacagcttcccatcgacgaacctaaaggttcttcaggattgctacgagaaggacttcagcgcgatagtagcggagatatctatcgatgacctgccgttccgcctgttctccagcgcagttccgccggcgaactcccacatcgcaaggcacgccctccacgatgaagcggacagaaagatattcttcagcaggtag

SEQ ID NO: 527731 - DNA, 804 bp, Stenotrophomonas maltophilia
atggacaaggacgagatgcgtgcttcgttcttttccagacatctggcatccgtgaattttcagctcactcaacgcatgcgggccgagatccgaagtattgacagcgtgaggccaagcgacgtcctggcacactacacacgcggcactggattgttcagcgcccaggtgaagaaggatcagtttcccgacgccttcatcttcgccgcaatcaccgcagatgtcagttcggacagaccgctgatcatctggtcaagtgatggagatttcactcaagcttgtgatcagggcgagcacctcactcaagtgaaggccatgcctcaactcttcgacgcgctggggatcgcaccggaaggtcccgcgatggtcgaactgctggagcgagacactgagattttcgttgtgccgctcgaggatgccttgatccatacggatgtagaggccgaagactcggatgaagtgcttttggagatcctgcaagtcctgcgagtcagcgagttgtccgtttcgtccctctaccgaatcagtggggaagacagccagtacatcggctttggcagatgccaagccactgtgaatgctagcttcgtcgctcctgactgggactccgccgtttggaacagtgaggataagaagccaatagcggtcgattcgattgagggacaagctgaggtcgaactggatgagtttggtttcagcttcctggcagagatcagggacagcgtggtgatcagcatccacggactggagcgcaaaggtcgttgggcgttgaccgcacgtctttttgatggggtcagagcccgatag

SEQ ID NO: 527732 - DNA, 375 bp, Stenotrophomonas maltophilia
gtgcccgagtctgcgagtgaacagcctagcgatctgaagggcgccgcagttcggacgttcagtcgaatcgccgagtcttggtctctgggcgagagtcagcagcgccagatgctggcgctgtcgcagcttccacagagctgggacgacacggaaaacttggttgatgatcttgtgcttatgcgcattggccatatcatctcgatctatcgtgcgctccacactatctttcgtaatcccgaacaggctaattcgtggatccaccgcgacaatgcggcagacgtcttctgcggcgcgcccgcgatcaagctgatgtgcaatgggcacattgaggaccttgaggccgtgcgctgctacctggaggctcaactccaatag

SEQ ID NO: 527733 - DNA, 759 bp, Stenotrophomonas maltophilia
gtgaccggcctgtcagcagccttgcttctagcgctgtccggctgtggcggggccgcagacaaggcgctggccacgggcgggtccaagcaggactacagcacggggcttgatcagatcagcaagggcctcagcgagcacgagcgtgccgctttcaactgggctgtatcggacatggacttggccaagctgcaccgcgcctacccgaacgggacggttcgccaagtgatacgtggcgaggtgaagcaggtcaaggacgcctatccatcaaaaattgaagagtggaagtccaaggccgccgcggaggagtctacgatggacgagctgggcaaggtctccgctaagaacgcgacgcttaacctaagcagcgggttcttcggcatcaaaccgaccgtcaaagccactctggtcaacgcttccaagctcccattgagccgaatcagctggcgcgcaagcctctatttgaacggctcagatacacccgtcgccgaatcaatcttggccagtgatttccgctccatcgggggccttgccgcagagcggcaacttgatgccaccttccagattgggtttgtaaaaggcgatgagagttggaccacactagaggttcgcaactcgaccgatcgtcgagtcgtacttgaggcgcttcccgccacagccatggactacagcgacaagcgctacctcgcaagcgactatggcaagcagatcgcagcctacgagaaggccctccaagaggcagagagctattcggacatctga

SEQ ID NO: 527734 - DNA, 1968 bp, Stenotrophomonas maltophilia
atgacggatctgaccgacttccccgacgaccctcgcgtgtacttcatccgttacatcgacggctacacgcagccccacaaaggcacggagtccacgtctgttcgctgctacctggcacctatacctcttgcatggggatcagagccttccaagctcgacgatcgtcagatagcacgcctcttctccgacaagaacagtgagtgcttcatcagtacggtgttcgctggatcgctagccacgtacgtagcagggcagtgtttcgtccgcggagaggatggcagaggaatctacgcaggtatgttgactgccaagcaacgcaggttggggaaggccctggcctatggcgaggagtccaggttcttcagggagcacgaagaggatttcgaggctgagctgttcccttgcacgaacctcggcaaaggcccttcaggcgagccaatcgtagtacttcctgccagccagctatacctgcacgatgccatggcctacagcaccaagatcctggtggctcgggacaccaagcaccctgacgaacggcatcaagtccagtacatcatccccaggacggttatctttcgtgcgttctacgccttcagctcgaccatagctgacatcttcaccgcaggcccttggaacagcgtccgctccaaagcgatctccgagcaggagttcgctggtcacctcacagggatcgacgacaggactggcagctggaaggtcgtcctcgcattgggcatgaccttggacgacggtccgatgatggctctattccgcttcaatcactacgctgagacccgggccaagcgcatccacgagccgattctgaaggcccagttggatgccgcgacttggggagaagaggaggctatttggtactcaaatgccgagatccccttggatcccacattaggcccttaccgtggcacagtctctggctacttcttgaggcgtcggagggatggcggatttgccggcagaactttcttggtgacagcaatccatcaaatgtctttctcaaagcggctgccggcaatcgctcccatcctggtcaatgacgcgactgagggtgagaaggtcatccatacaggcggccccaggccgcatgacactggcaacaaagggcgtaagcggcgtccaaatggcaaggcaaccgtcgatacgcacgaagcgaccgagaaaaggcccggcttcgacatgccctcaatctcctttgctttctatccaaagccaagaatcattcgactgaagaaggaccagagcttcaagtacagctccaagagaaggaaggaagagcaagagcccacaactgagatctccgggggccgcaaagccggcaggcaggaagatctcagccacgctcacagcgcccaggagaagcgcgaaccatcagagctgctaactgggctgatggcgatcctgaagacactgatgcaaaagggaaccattacagagtaccgagtcgtctcaccgattgaatcagagcaacgagttcaggtgggagcctatccctgctggaacttccttggttcggatgagcgcaaggcagtccgcagcggcaaggctgattggggcacacgatcgtgggtgtacctccagaaagagagatcacattacaccgcactggctcgtacagcgtttgtgattcgggtgaccctcccaaatggccttactgggctgtggatcgagactgagcgaaggagcaagaaggacgggacaaaggagcccatcgcttcggcatttgtcatctcaagcgaccttgccatcagagcggagacggcggcttcactgagcatcatccgctcatgccatggcgtttcgctgagcaaggcgttcgaaagcaggggaaagatctgctatccacacccgcactacatggagaaggcgggcagtgagaaatggagtctcgctcctttggaggcattctttaaatccctagctattagccaggccagcctcctccgcggctag

SEQ ID NO: 527735 - DNA, 348 bp, Stenotrophomonas maltophilia
atgaaattttccgacgttaggtttgatgagctgagcagcgatcagctacagaagctgccaaaggaatggcttgctcactacttgggcaggcccaccagggccaggatcatcagtgcacgacgctggctgtggctccgatctgtgctgatcgccgttctatgtatctacacctttgtcatgcaggggacgcctcttctggccactctggagttgtgccttatcggctatgaaatcgcgtactacaccttgcgaaacgccactttggaggccgattttcttagtcacctcagcgcctacacggacgacaccaggaggctccccgagtggtcagctaccgaggacaagtga

SEQ ID NO: 527736 - DNA, 441 bp, Stenotrophomonas maltophilia
atgcctatcgatgagctgctccgactcaataagtttgaactcttcctgattttgctgcgcgagtgggatgagatggagccggtccggcgtaggctttcagatgttccttcttgggatcaagcgatatctaacccccagtctttgctagcaatgcaatggttggacttcaacgagttccgacgtcaggtgctccttagagtggggctcgcgcttagcaagatgtacaagaccgccctagatctcaaaacaatcatctgcgataaatttgactactgcgccaagacaagccttccggtaggcatgctgctagccggaatcgccaaggcgctctccgacatgctgcctgagaatgtagcgaacgtcatcgctgtgcttctctttagccatgacatattgcagaacctgtgccactgcaatctcttgccgtcaccaggcccatag

SEQ ID NO: 527737 - DNA, 1482 bp, Stenotrophomonas maltophilia
atgagtaccgataagcaaggtcggcgtacctgtgatggctgttacgccccgatggtcaccgctcacaagctgtacaaaggcaatgaatactgcgcaacctgctatagcaggcagtttgtgagttccaactgcccaacgtgcgaggggagggtggtccaccacgcctcagaggagcagcctccgtcctgtgatggatgccttcgtgaccagcgacgctgtgtcaggtgtcaacggcctgcgcctgacgcccgcatcatccaggatgttgcgccaggtcccgatgatggggcacccgtcacacatgagcacattgtgtgcctgtcatgcttcccgtacaccacgcctgagatcccttgtccaatctgcaagcgaccgagtcagcgcctagccggttcggcacatctgccggataacctaaaggcatgcccttcttgtgtgaataagcaaacccatgccacgtgcacgcggtgccgaaagtacaggaagaggatctcgttcaccgagggtggcggcccattgtgcttagcctgtagcggcgaccagccagcagagcacaggtgtcccgactgcgggttcatggttaagggggccggaactgcgcggtgtgatgcatgctcgatcacggcaaggcttagacgagaggttgccctaaacgcggcaactatcgagcgagaatgggtcgcctctctatacaccgccttcggtgagtggttgctcgtcagaaacgctgccaccggggcactacctaggacggctgtgcgtgccacgccgttcttccgtgcaatcgacttggatggtgatacccatcagccgattgtgccagccgatctgctgcggatcttcgattccaagcagctcagggccaatctcaacgtgacccgatttatctgtgagcgctacgggttccagattgacgaaagcgctcgggctagagctcgagatgaggcgctgatcgagcgaggactgcaggagagtgcgtccaaaccttgggctgagtatctgaatgactacaggacgtggctggagggtaggccaagccggacccaagcactgtaccttcggacagctcaagcgttctgtgaggcgaccgagctgagcggcccctttagtcaggagcatctcgtcaagtacttggagtcagcgcccggctcccgcgcaaacttaagtgtttgggtgagctttgttcgagcacagtatggctgggcagtgactatgccaccgaaggtcccgaagaggacaaaccttaggcgtgatgcgcaggcactgatggagctactgcagcgggttgaggttccacgcgatgcatcggatgaggacctagctgccacggttgcccttgcttacggcttcgagttgagtacgctgcgccgccagatcactgggatgaccaaggccggtgatctggttaccggagacggcatcgtggaggtgaagagggagctcagggagattgttaccgagtggtcaaggcggacgttctag

SEQ ID NO: 527738 - DNA, 1038 bp, Stenotrophomonas maltophilia
gtgcgcatcgtctggccgccacaagtaccggacgaactgctttccagctacttaacccgggtgtcaattgcatatggcacatcaccccataagctcatgacgctctatgccccaggctttcaggtgtggaccagagacattgatgtctgcgcttccgaggcgctgctgagatgtctcgaatatccgtcaggaaagtcgctgcaaatgctcaatggactcacgcttgctggatggaacgaggtgaccaggcgaagtgccgatccaccacagggggtctaccattggatcaacagcataggtgtgcttcaccggactcgccgccgacacggtctagctttctgtcccaagtgcttggcgcaggatggtgcgtatctacgtcagtggcggctctccttctggacggtttgcccgttgcaccaagagcttctgcaggacgcatgccccgtttgtggggcggtggtccagccgcaccggcatggcttcgacgtacgcatgtgctggcactgcaatcgatccttgaccgcttcagcctcggcagcaacggaggtttcactcctgcagtcatttcttttcagatgtctgatgaaccccaccaaggaatttgagttcagtggccatgcctgccggggagccgaggttctctgggggggcgatgcgcttctctcggcactcaagcctgcttgcaggacgctgagtatgggatcggagcgcgggccgcggatcgagatgcggcggctaccagagcgccacgcggacatggctttgctcgcccacctgctaagccttgggcctgctgccttggtagcgaaggcgaagtcgatgagtgtcactcagaggtgcttccgccaacagatgcccccctggatagaacggctggtggaacaactccctgagggccgcatccgccctgtacctgtctccaatcggagcgagctgaggtccgccggcgaggctcagcgaaagcgcaccaacggatggcgtgaaatgagagcggatgtcttgctcaagatgattggaagaagcaatgagtaccgataa

SEQ ID NO: 527739 - DNA, 1113 bp, Stenotrophomonas maltophilia
atgcgcatgaaggccactgtgctgggaatgatcctgatcggcctggcgagcgtcgccgccgccgacgaaaccgggttggccggcgagcgccacggcaccacgacggtggacagcgccgcggtgcgcgatgtgcagcaccgcgacgcgctgcgctacacggtctggtatccggcacaggccggcagccgcgaaaccgcgttgaccatcggcccgcccgatgcgcccctgttcgacgtcggacgtgcagcgctggatgcaccggttgcgggcacgcgcctgcccaccctgctgctctcgcatggcaatggcggcagcgcgcgcatgatgggctggctgggcacggcgctggcgcgcgccgggtatctggtgatcgcggtcgatcatcccggcaacaacggtgccgatccgatgaccctgccgggcagcgtgctgagctggttgcgtgccgatgatctgcgcgctgcgctggcggcggtacaggccgatccggtgctcggtgcacacgtcgatcgcagtcgattgggggtggtcgggttctcggccggtggctacaccgcgctgctggccgccggtgcacgacccgacctgcaacggctgctggcgttctgccgtgcacatccggatgacggcgtctgccggccgcagcaggaggccgccacgcacaccatggaagcgcgcctggccgccgcggcctcccctgcactggccccctggatctcccactctgacgacgcgcgcgtccttcccggcgtgcgcgcggtgttcctgctggcgcccgcgatcgtgcaggcgttcgcgcccgggcagctgtcctcgctgcagctgccggtgtcgatcgtgctgggcgatgctgacaaggttgccccgccgacgagcaatggcgaagctgcacaggcattgattccgggtgcgacgttgctgcgcctggcggatgtcggccactacgatttcctgtccacctgtacggctgccggcgtgcagcggctaccggacctgtgcaccgctgcgacgtcaagggcgggaacccaccggcggacggtggatgcagcgacggggttcttcgacgctgcgctgcgtgagccgcacgataacgaaccgttgcatctacggtga

SEQ ID NO: 527740 - DNA, 1404 bp, Stenotrophomonas maltophilia
atgagcgggctgcgagcggtcaggcggagctgggccacggtagggctgttgctgctgtgcctgttgccgatgatggcgatggccgccgtggcggtgccggcgctggatgatccggtggtggacaccgcccatgcgctgtcggtggacacccgcaacgcgctgcgcacgcaggcgctacagctgcaggcgcgtaccggcgcgcagttgcaggtgctggtggtcgaccaggttggcgacgagggcatcgaagcctatgcacagcgggtgttcgagcaatggcagctgggccgcgccggtgtcgatgatggcgtgctgctgctggtggccgtgcaggaccgccgcgtgcgcctccagaccggctatggcctggaaggtgcgattcccgatgcctatgccgcacgcatcatcgacaaggcgatcgtgccgcgcttccgcgagggcgacctcgaccaggggctgctggatggaacgaaggtcgtggtcgcgctgattgatggcgaggcgttgccgggctgggaagatccgtcggcacgcaacgtgctgccgccggactggcgcagcgcggattcggtggttgccctgtcgctgctggccggcttcctcgccgggctgtggcggtcgccgccctcgcggcccgaggcaaggacgccggacgacttcgcgcgcaggcatcgccagcgccggcgcggaacatcgcgtgcggccgccacgccgcagacacgaccgaagcggttaccggcctggggccgcccggtgctggtgactgcggtgatcgccgccggtgtgctggcggcggcgctgtgggcaccccgccaggcaatggcggcgctctgcttcgtgctggcgctgtgcgtacccgtggcgagcctgctcggctggtgctggcgccgcagccggggcctgcgcgttgtattgctgggcctgctcggggccaatggggtgttcttcggggtgatgctgctgcggggccagttgccgcccagcctggccctgcacgtgttgctggacctggccgtgggtattgccgcgatgctggtgtttttcatcgtacaggccggccgcgcgcgctggcacaaggatcgcggcagcttcgcggtacggttcacggtgttgttgctgctgagcgccggctacgcactcttcgcactgctggccatcgatcgggccgagccggcggcgcgccttgcggcgacgatcgggtggagtgcgggcacgctggtgctgtacttcgtgtggatcttcaccctgctgccggctgacagggcacgcggcggcctgcgctcatccggtggctctcgcagcgcgtccagcagtgcgtcgtcacgttcatcctcgagcagttccagcgattggtccggtggcggcgggcgcagcggcggcggtggcgcgtcgggcagctggtag

SEQ ID NO: 527741 - DNA, 1836 bp, Stenotrophomonas maltophilia
atgcaggctcgcaggatgcgcactaccgcagtcgttgccgtgattctggcgatggcccctcttgccggtatccgggcggaatcgctgcaggccgatgatcgtgcctacttcgccgatgcggcggccgagcagcgcgcgcgtgatgcgctggagaagcagctggaggccctgcagcatgcggccggcattgcgcccgcgcaacgtttccagcaggccgaggccatgcaggcacagtgcctgcgccatcatgcctacctgcacctgcaggccgcccgcaacgcgcgcgaccaccgaccggcacaggcgctggaccaggtgatggggctgtgcagccgcatcgcccgaactgctcgcgctgtactgcgtgaggcgcccgttgacgccgagtggacagcaccgtatgcgttcctgcgcgcgcgtgcactgaaggaagccgccgtcccggccgatgccgcgctggatgaggcggtggacgccctggcggatccggcgctggacagcttcgcgcgcctgcgtgggcagatcctgcgcagcgccgagtacccgcagatcgagcgcgatggacggcactgggataccgggcacgacaagcaggcgctggcccggcatccggaccgcgcgctgcgcgaggccggttggaagggctactggcaaggccttcaatcacgccgggagccgatggcctcggtactgctggggctggtgcaggtgaacgatgccgccgcacgcctgcagggcgatggctcggccccggcgcgtggttaccagcgcatgggcctggatacatcggcggtggatgcgacgttgctggcaatcgaacatcatgctggcgatcggcgtggctaccagaacatgctgctgcgccacgccgcgcgctcgggcatcgatgcgccgcagctctgggataccacggtgcccgatgccggatacaccccgccggtgctggcgctgccgcagctgcgcgacaccgccgccgatgccatgcagcacctgggcccggcgtatgttggcgagctgcgcgcgctgctcgatccggccaaccggcgcatggacctggccaccgagcgcggtgaccgcagcctggatgccttcccggtgagcgcacctggcgcaccggcaatgctgttcgtcggcgtgcgcagcggcgagctggagagcgatgtcgagatcgcgcacgaagccggtcacgcgctgcatggcgagtggatgcagcgtggccatgcgtcgccgctgcagcgcaatggcagcccatggctgaccgaggcgttcgccatctacaacgaactgcgcttccgcgaccagctgtaccagcaggcgcaggacccgcgggccaaggcctactacctgaagtcgctgctggacgacatggtgctgcagctgttcacctcgtccgaggaggcgcagctggagcagtcgatctaccggggcgtggccgacaacacgctgggtaccgccgatgacctggatgcgctgaccggccaggtgctggcgcgcttcggccaggatccggagcactatccgcagctgcgcaacagctggatcggcaagcgcctgatgtatgacgacccgaactatctggtgaactacctgtatgcagggctgttggccgtgcagctctacgtgcaggaccagcgcgaccctgagcggttccgtcagcgctatctggccgtgctgggcgaaggctttgatcgcgcgccgaacgagcaggtggcacagctgctggggcaggcgccggattggccggccctggtggatgccgatctgcaggtgttcaaccagttggccgcacagctgcgggcattgcatgcgcggatcgagcaggggcagggcgcatga

SEQ ID NO: 527742 - DNA, 1128 bp, Stenotrophomonas maltophilia
atgacgccaccggatctgctgaaactggcggcaggcgccgcgattctcggcctggccgcactgtctaccggcgtgagcgtcggccgcacggggcgtggcaatctgctgctcactgcgttcttcgcctgttttgctgccgccagcctgtccgggctggtgctgctgggtggccaggcctggcttccgcccgatgccgttcgctggctgcgcgtcatcgaagtgccgttggtctacctgctgggcccactgctgtatggccatgcgcgcgcgctgctggcacctgtaccggaatctgcatcgacattgccggccgggcatctgttgccggccgtcctcgcgttcgtcatttccctgtgcaacgccctcacccccttcgaggcgacgccactgggcagcgccctgttccagctcagcttccacggttggctgctgcagggggcgccgtacctgctcgccacggcgtggctgtcattgcgcaggtccaccaacacgcagggatcggccatgcagcgtagtgggctgcgcggactggtggtggtgatggccggttgctggctggccagcgcgatgaaccggtggccgccggacgccgctccgcttctggccagtatcgggctcagcctgttaaccacggcaggtatgtacctgctggcgtgccaggtcgtacgccagcagctgcgtgcaagtgtggtcacttcggcacccgtcctgatggacatgcccgcatccgccgaggatacgccccgcgcacgctacgaacgctccggcatcgatgcaacgcagtgcgcggccattgccagcgcgctgaccgcattgatgcaggacgaacgcctgcatgaagcgcccggactggatctccagtccctcagccagcgcagcggctggtcatccaaccaggtctcgcaggccctcaaccagggcctgggccagaacttttccgagttcgtgaccggcttccgtgtggctgcagcgagaacgtgcctgtccgatccgtccgacctccgcagcgtgctggacatcggccttgccgccggcttcggcagcaagtccaccttcaacagcgcgttcaagcgcgccaccgggcagacgcccagcgagtaccggcgccgtcgcaccacgtccgactga

SEQ ID NO: 527743 - DNA, 1878 bp, Stenotrophomonas maltophilia
atgcgtttgcgacggatgctgtgtggcctgctgtggatgctggcggttcctttacacgccgcagcggtggatgctgccgatgtgctggccagggcccgcgcagccagtggcggcgagcgctggcaggctacacagcacctgcaggctgagggcgagcagtcgctgggtggtctgcatgggcggtgggagctcaatcaggatctgcgcgccgggcgctatgtcgaacaggcgcaactgggcaccttcgccgttgcgcagggctttgacgggcgcctgtcctggcggcgcgactacggcggcgaagtcggcctgctggatggcaccgtgccacgccgcaccgcgcgcacgcagtcctggctgaccacccgcggctactggtccagcgcctacccggcctcacgctttgcaggcccgcgtggcgggattcacaacggacagcgctatgacgtgctgtcaaccacgccggagggagcggacccgatcgagctctggttcgacacccgcactggcctgctcggccgggtggtcattgcctccgcgcgcacacccaccgccaccacgctggaagactaccgggccgtggaaggtctgatgttgccccaccgcatcatcaccgacaccctcgatgcccagggccgtgccgatccacgattgcgcagcgacgtgcgggtgcagcgctatcgggtgaacagcccgatgccggacgcacggtatgcgccaccggcgatggccgccgacagctacatcgaggatgccagcggcaccacccgcgttccgttcgacctgatcaacaaccatgtctatatcgaggccgaggtggatggccagccggcgcgcttcctggtcgacaccggcgccatcaacctgctgacccctacggcggccaagcgcctgggcctgaccgccacggggcgcctgagcgtgcacggcgccggcgacaacgccagcgacctgggcctggcacaggcccgccacctgcgcatcggtggcgcgcaccttgcaaacccggtgttccacatcatcgacctgggccagcagatcaactcgatgggcgtgccacacgatggcttcatcggctatgagaccttcctgcgctttgtcaccaccttcgactatggcgcgcgcgcgctcagcttcacccggccgggccactaccagccgcccgccaacgccgtgatgctgccgttcgaacaggacgatcgcgcaccggtactgaatggcgagctggacggtatcccgctgcgtctgtggctggacaccgggtcacgcaattcgctgagcctgagcagcccgttcgtgcgcacgcgtgggctgctggagaagtaccacgccagcgaggaagcagtgcttggctggggcctcggtggcccggggcgcgcgcgaccagcacggctgggtgtgctgcgcatgggcagtgtcgaggtcaatggcctggtcggtgatctgtccagcacggacaagggtgcgctcgccctggccgactatggcgcgattctcggtggcggcgtgctgcggcgcttctccatgggcatcgactacgatgccaagcgcctttatctggtgcccaacgctgaaagcacgcagcccgatgccttcgatcgcagcgggttgtggctacaggccgaggacgctgcactgcgtgtggccgatgtggcaccaaccagcgccggggcgcgcgccgggctgcgaagggatgaccgcattgtcatgatcgatggcgagccggtggccacgcggaagctgggcgactggcgcgcgcagctgcgcgagcgcccggtgggaaccggcgtgggcgtccgttatctgcgcgatggccggcagatggatacccggctggtgctggccgatcgggtagcagagcgctggcctgcgcagtga

SEQ ID NO: 527744 - DNA, 1533 bp, Stenotrophomonas maltophilia
atgcggaagcggtcgaagatctggctggggggcgcagcactgttgctgctggcagggtgcaaccgggcgccatcaggcgaacaggcgggcgcacagcctccgccgcccaccgccggtgagaacgccgcacccgaggcagcgccgccggcgtcctccactgcggccgatggcgccgcactcaccgaccgcgatggcaagccggtgccgctggtgccgttcgacaccggcagcgtgccgctgagcgctgctgcgttgggcgaactgccgttcttcagcctgccgcagggctatgcgccgcagaacgcaccgcacccgcgcgcgtgggcacgctttccgttccgcatgggcgagggcgtgcattgggtggaaggcccgagctggtcggcacgcatcgtggccgacagtgaagcggcacccggcaaggcgttctccgcactggaagtgcagcgcaacgtcgacggtgtgatcacggccgccggtgggcgcaaggtgtttgaaggcgcgctgctgcgcgatatctactatggcccgcagctggaaggcgagatcggtggcggcttcatcgatgcggtgaacggcgaacaggacgcgcccaccacggtctacgtgctgcgccaggccaaccgcaccgtctggctgcagctggcggtggacagcaacggcgctggcctggtggtggtggatgaggtgccgttcaaggccactgcgcagtggtcggacagtttcccgcacctgtccctgccggccggctatggcgaccgcaacaaggcccagcaacgtgatttcgatgcgttcccgttctggaccggcgatcacttcgagcaggtcgagggtcgtaccttcgccgccgatttcgacaagggggagcgcgagtactcgatgcacgaggtgcgccgcaacctggaagcgatgatggcccaggtcaacggcaccaaggtgttcgaggggcgcatcccgcgcgaggcggccgagggggtgccgaagccggtgcagtcggcctacagcaatgcagccagcttcaactggaacaactacgacagcgtggtctaccgcgtcgatctggccgatggccgccaggtgtgggtgcacgcgcggctggaatacctcagtgccggctgggtggtggccgaacgcaagggcttcacccagaccgcggcgctgctgccggccgatgcgttgaagaagaagctggacagcgacggtcgggtggcgatccaggtcaacttcgccaccgataaggcgcagatcctgccggcctccgaaccgcagctggcgcaggtgctgcagctcctgcagggtgatcctgcgttgaagctgtcgatcgaaggccacaccgacaacagcggcgccgtggcgcataaccgcagcctgtcagaggatcgcgcacggtcggtggtggccgcgctgaccgccaagggcatcaccgccgatcgcctgcaggcggccggcttcggtgccgacaagccggtggccgacaatggcagcgaggaaggcaaggcacgcaatcgccgcgtggagctggtcaagcgctga

SEQ ID NO: 527745 - DNA, 1026 bp, Stenotrophomonas maltophilia
atgaaccggcatccatccgacgtggccgacgatggcatttcccgcgaggccatggactggttcctgtgcaatcgcgaggggacgttgagcgaggccgagcgcgctgccttcctagaatggatgaagcgttcgcccgagcacgtgcgcgcctacatgcgggcgctcgcgctgtaccgtcaggtcgacgaggcactgcaatcgccgctgcccgaggaagtgctggcgccgccactgaaggccgcctcggcgaaggtggtgccgctgtttggcagcgtgccggagccgctgcgcagtgtgcccaggcgccaccgcgcgcgctggctgggcctggccgtcgcagcgtgcgctgccctgctgggcgttggcctgcttccgttgctgatgcctgccgagcagatgtacagcgccgaccacggtgaactgctagacctggtcctggccgaccagacccaggtgcagctcaacgcggacagccgcctgcgcgtgcggatgggctggttcagccgcaaggtggaactcctgcagggcgaggccacattcgacatcgcccacgaccggcggccgttcaaggtgcaggtgaacggcctggagatccgtgacatcggcacggtgttcgatgtgtcgcggcggctgcagggtacgcgcatcggcgtggtctccggcgaggtcgaggtctggagccagggagcaggtgcccgccgccttgcgcagctggacggagggcgcgtggtgcaggtcgacacgcgcagccatgccgtcgaatcgttggatatgccattgtcgatgctgctggactggcagcagcgcaaggtatcgttcctggacgagcggctggacgaggtggctgcggccttcaaccgccacaaccaggtgcaggtgcgggtgctggacgaaggcgccgcatcggcgcggttgtccggcagcctggatgcgcatcgcatcggtgcgttgcaggtcttcctcgaacgcgatccgcgcttcgtcgtccgtcgcgaaggcgatacggtgcgggtcggaagtcgttga

SEQ ID NO: 527746 - DNA, 969 bp, Stenotrophomonas maltophilia
atgagaatggccgacgtccgctcctccgccggtgactccatgcatgccctcacccttgccgacctggaccacctgggccgccgcagcggcttccgctatcgactgccggaaccgcttgccgttgctggcgaaccctgcgtggtcgagggcagggtggagcagcgctgcctgcgcccgggcttgaccctggcgctgtcggatgtggttgcgcaccagaccttcgaggcgatctcggaagtgccgccggcgttctcggccatcgtgatgctggaaggctgcgccggtgctcgcctgtcaggtcaggcgcagatcggaatgcgcccgggcgcgggcgcgaggatactggccgatgcggcgcccatgaccgcgatccaccccgcggggcagcgcatgcgcagcctgaatgtctcgctggacgcatcggcgccgctggatgacccggtgatcaacgaactgctgtccgcgcaccgctccgacggccggccgttgcatagctggcaggtacccgcgcatctggggcacgcggccgaccagttgctgtcgggtgtctgggacggcgcgatgcatgcgctgctgtgcgagggcgtgggcctgcagatgctggcactgtccctgggcgcgcctgcacgcaatgctgcattggagctgggcgtgtccgcgcgcgatcgccgcatgctgcagcgggtgatcgattgcctgcaggcagcgccggccgccgatcacagcctggacgatctggcgcgcgtggcctgcatgagccccagcagcctgcgcctgaagttcctgcaggtgtatcgatgctcggtgtttgcctggctgcgcgaacatcggttgcagcgggcctgcgagcagctccggcagggctgcagcgtgcagcaggccgcacatttcgccggctaccggcatgccaccaatttcgcgaccgcgttccgtgcacgctatggcatcgcaccgagccggttccgctga

SEQ ID NO: 527747 - DNA, 450 bp, Stenotrophomonas maltophilia
atgaactggaagcaagcgatttcccttggggtgttgttgaccatcacctcgggggcaggtgccgcatctgcgatcacctacgacaaggatggccgctacggctactcgatgaaccagcattcccttaccaccgcgatgcagcagtcgctgcactactgcgcgctgcaatcgcgcaattgtggccagtctgccagcacgaccagcgaaggctattcggccatcgcgacgggcacggttgcgttgggctttgcactgggtgagaagactgcggacgccgcgcagcgcaaggccgaaagaatgtgcagggagcgcgccaacgactgcacgcttgccttgttgtggcgcgaaaccccaccgcgtgatctcgagccgccacagcgtcctgctgccgccgctccggcacctgcaacgacgcctgctgcagtacctgccatccgtagcgatcactaa

SEQ ID NO: 527748 - DNA, 489 bp, Stenotrophomonas maltophilia
atgttccgctttgcttccgctctcgtgctgctcatcgtcgcgccattggcgaccgccgccagcgatccgcgtgacgtggttacccgtctctacgacgccatccaggcaccggcgtcgaacgaaacggccattccgccgctgctgggcgatgccctgcgttcagcgattgatgctcagcgcgcttacgagcgggcctgcagcgcgctggccgcgcgcgacgaaaagccgcacatgctcgaccagagcccgtatctgctggccccggatcgaccggaaacgatatccgtaggaatgcccgcatcgagcggtgacgccacctggatccgcgttgacatggccgtaggcgactatcgctggaccgaccgggtcctgctgcagcgccaggaccgcgactggaaggtcatggatatccgctgggggcagggtggcaacctgattggccggctcaaggcgttctcggccttccgctgcacagcttcgggcagctag

SEQ ID NO: 527749 - DNA, 330 bp, Stenotrophomonas maltophilia
atgaatacgagcgcgtcggcccgcggttggccctggggcctgatcgcgctggggctgtccgtgctcgcctgggcgtccctgctgctgggtgtaatggcctttgcggccagtttcggctcgccgggtgacggcaaccacggcatgcgggccatgcagtactggattctggccgctctggtcatgctcggcctgtcgttcgtcggcagcgcggtggcgatggtgctggcctggcgacggcagcgaggaccggtctgggcgacccttgccggcgtgttgctggtgatgcttctgtcgctggccctgatcgtgatcgggtccagctggggttga

SEQ ID NO: 527750 - DNA, 468 bp, Stenotrophomonas maltophilia
atgaagctttctgccctgatgcttgccctgctctgcaccgccagtcttccggcgttggctcagtcgcactccgatacccgtcgcaatcgcgatggcagcatggacatccgccacagcgatggttcgtccacccgcatcacccgtgacctgtccaaacgcgtgatcgccgagcacagcaacggcagccgctcggtcaccacgaccgatctcagcggacgcaagcgcaccacctacagcgatggcagctactccgacaccaccaccgatctgagtggcaggatcatcacccagtacagcaacggtgcccgctcgaccagcacacgcgacctgagtggcaggtggcgcaccgagtacagcgatggttcgtactcgaccagcgtgcaggacctgagcggcaactggcgtaccaccgccagcggcggcatggcggccaggcatccggagcgcggcttcggcaagaagcgctga

SEQ ID NO: 527751 - DNA, 546 bp, Stenotrophomonas maltophilia
atgaagggaattctgcttgcggtagccctgatggcgggtagcgcgccgctggcgtcggcccaggtctacaaatgcaagggcgcatccggggaaacggtgtacagccagaatccgtgcgcggccggtgctgagccgatgaagctgcggtccacccgtccctcgaccgaatctgcgggggaggcgtcgaaccgcgccgccgtgtaccagaacaccgcgctggcggacgccggtatcgccgagcgcaactgcgtgcagggcgagcgctcccgcatctacggcccgttggagtcacgcagccaacaggtgggccgccagatcgctgaactgaaccggcaactggctacggccggcaccaacctcgctggtgccacccaggattcaggcattcgtgcacagatcgccagcctgcagcagtcgatgagtgcggagcgggttgccgcggacacccagatgtcgaacgcacgcgagcagtgcgctgcgacccgccgcgaacgggagcgctcggtgcgcgacacgttcagcaacacgcccgcgaccacgcgctga

SEQ ID NO: 527752 - DNA, 498 bp, Stenotrophomonas maltophilia
atgttgatccggccactgcaacacgacgacgcggacacgctgtgggcggcccgcctgcaggcgctgcgtgaatcacccgctgcgttcctttccacgctggccgaggccagcggtgagaccgcacaggtgatgcggactcaactcgatgacgcccatacccgttacttcggcgcctttgaccaggcacagctggttggcttcctgcgctatgtgcggcccgtacgtttgtcacggcggcacacggcggaaattcacagcgtccacgtgagcgcagggcatcgtgggcacggaatcgcccggcagctgttccttggggcatttgccgccgcacgcgcggaggacatcgagtcgctcaccctcacggtgctggcagacaacgctgccgcgcgcggactgtacgcgtcgctgggattcatcgaatccggcaccgagccgcgagcggtgaagcgcgatggccgctacgtggacatggtgtcgtactggattgcactggcctga

SEQ ID NO: 527753 - DNA, 2400 bp, Stenotrophomonas maltophilia
atggttcccgaacgatccgctccacccctgttcggtgggggcagtgccacagggctggtgctgggcgcgctggcctgcatgcagctgccggtgctgctgccgctgtggctgtgcgcgccgttggcggtcgccgctggcgcctgctggctggcgcgctggcgtggccggggctgggcgatggccgtgttcgggctggcatgggcgacgctgcacgggcattgggcgctgcaccgccagatgcctcccgctgcaccggcgcaggatgtgcgggtgcagggacgcgtggtcgagcttccacacagcgggcccggttacacgcgtttcgtactgcgtgtggacgaggccggggcgctgccgtcgctgcgtggtacgcgcctgcaggtgacctggagcgatccgtggcgcgggcctgcaagcgctggcagcgggggcgggcgccatgcggttcgcgccggggcgcactgggacctgtcactgcgcctgcgggcgccgcgttcacggatcaatccgggcggcttcgatgccgagcggcatgccttgcagcggggcatttccggcaatggcacggtccgtgatccggcaagcgcacgtgagcggctgcccgcacggggcctgcaggcctggcgtgaacgcagcagcgccgcgattgccacgcaggtggcgcatccggctgcacggttcgtgcaggcgctggcactgggcgacacccgtggcgtgtccgatgccgattgggagcacctgcgcgcgctgggcctgacccatctggtcgccatttccggattccacgtgggcgtggtggctggattcggtgcgctgttgtgccgcgtgtcgtggtggttgtggccagcgctggggcgggtccggccacggccgcaggccgccgcgtggggcgccgcactggctgcggccgcctatgccgttgcggccggtggcgcgctgccgaccgtgcgcgcggcgctgatgatcggcctggttgcgctggcccgggccggacgccgcccggttgccgcagggcaggggctggcgctggctgcgatggtgatggtgctgccggcgccgatgtcggtcctgtcagcagggttctggttgagctttggcggggtgctgtggctgttgtggtgcctgccgcgcaccgcgccggagggcgttggcggtggcctgcgcggtttcctggcggcgcagggagtggcgagcgtgggcctgctgcccctgtgcgtggccttgttcggtggcaccgcgcggttggggccgctggtcaatctgccgatcatcccgtggtggacgttgctggtggtgccgatgtcgctgttggggaccgctcttcacgccctgcacgacggcgccggaggatgggcatggcgtgccgccgccgggttgttcgaggtcagctggcaggccctgcagccgctggcgctgcacccgcgggcgatgtggtggctggccgaggcgccgggctgggcggtgccggcggcgttgctgggggtgttctggtggctgctgccgcgcggggccggcggtggcctggtggcgctgttgctgtgcctgccactgctgtggccggcgcgcggggcacccgcgcagggtgagctggaactgctggtgcacgatgtcggccagggcacggcggtgctggtgcgcacggcgcggcacgcgctctggtatgacgtcgggccgccgaccggcgccgacggcaatgaacggatcctgatcccggccctgcgcgcgctgggccaggggccgcccgagcaggtgatgctcagccatgaccatctggaccacatcggcagcctgcccagcctgcggcgtcagctgcccgggctgcatgcgctggcaccgcccggcagcgcgattgccggggccaggccctgccggcagggaatgcgctggcagtgggacggtgtcgacttccaggtattgcacccggcgccgggcagccggcagggcggcaacgaagacagctgcgtgctgcgcatcgccagccgccacggcgttgttctgctgcccggtgacatcggccgttcggcggagcgggcgctgctgcaggcttggccgaccgcgttgaaggccgacgtggtgctggtgccgcaccatggcagcggcggcagctccagctcgggatgggtggcggcggtggcaccgcggctggcgctggtttcggccgggcaccagaaccgcttcggacacccgcgccgggaagtggtccagcgctggcaggcgcagggggccgaggtgctggcgaccgccgacgccggggcgatccgcgtatggcttggtgcgcaagggctgcagctgcgtgaacagcgtgtccacgcatcccgttggtgggatgccgctgggcgggcgcggtcggctgctatcctatcgtcgattgaacaagcggccgttgggccggagggttga

SEQ ID NO: 527754 - DNA, 570 bp, Stenotrophomonas maltophilia
atgatcaagcgcgtcctgttccctgttgtggccctgttgctgtctgcgctgatcgtcgcgctgggatggcagaaccgccaactgcggcagatcaaccaacagatggcctcgcagctgcaggagatgcggcttgaagcgcacggcctggcacttggcagcctcgccgccccgcttgcactgacgaccacgcagcaggcccgcgtgcagattggtggcccacgcgccagcccgcagatcctctatttcttctccacggcctgccgctactgcctggcctcgatgccgcatgtgcggaagattgccgctgcacggggcgccagtgaactgatcggcgtgggccttcctccctacgatgaactggccggctacgccggcaggcacgatctgcgcttcccgatcgccatcgacagcggaggcgatgcatcgaagcgctatcgcgcaacggtcacgccgatgctgatcgtgctgggtaacgacggcagcgtggcctacaagcatgtcggccagcttgatgagcaggtcgtacatgccgccatgacgtcgttggcgccggacctcgccctgccctga

SEQ ID NO: 527755 - DNA, 321 bp, Stenotrophomonas maltophilia
atgccgatgcttgccctgctgctgttgtgcgctggcttgttcggccgcgatgccgatgccggggatgtctccctgcgccgccagatcctgcaggccgatgccgggcacgcgggcgctccggcggcacgggatccggccaccctgcagctgtaccggctgcgccaggaccgcgtactgcgtgttggctaccagcctctggccgcagacggccagcagcaacggtccaggccggcgcgctacgcgcaggtctgggaacgcgtcgagggccactggaagctgcagcgcatgatcagcatcgacgaatgggtcgcgcagcgctga

SEQ ID NO: 527756 - DNA, 537 bp, Stenotrophomonas maltophilia
atgcgcctccctcctgcttccagccccgacacacagcacggcatgcatctgctcgaactactggtggtggtggcggtccttgccgtcctgctggcagccggctggcccgccctgcaggaactgatgctgcatcaacgtgcggaatccacccgcctcggcctgcagtccggcctggccaccgcgcgctaccaggccatcatgcgcagtgcgctgatcggcctgtgcgcaagccccgatgggcaccactgcggcgacgattggagccagggctggatcgtgtacaggaccgacgggcgacgacagcccccctcctccgtcgactccatcctgctgcaccagtccggcctgtccagcgtcaggatcagcgccgccagcagcagcggccggccacagatctacttccagccggatggccgcagtcccggagcgaacctgacgctgcgcatctgcgcggacgaccgggagcatgcccgcgtcatcgtcagcaacagcggcagaatccgctcgacccgcagccaggacggcccgccctgctga

SEQ ID NO: 527757 - DNA, 423 bp, Stenotrophomonas maltophilia
atgcgtacactgtggatggcgggccgcgtggcccgcggtttcagcctgatcgaactgatgatcgtggtggcggtcgtggcgatccttgctgcgatcgcctatccgaactacagcgcgcatgttctcaagtcgcggcgcgcgcaggccaaggccgatctggtggagtacgcgcagctggccgagcgctaccacaccatcaacaacacctatgtgggcttcaccttccccggcggagctgagtccatcaactcgccacgcgagggcggcaccgcggcctacaccctgtccatggagaccgggcagtcgacgttcacgttcacggcagcagcggccaatgcgcagaccaaggacaaatgtggcgacctgacgctcaatcaggccaacgtgaagacgtcgcaggcaacactgtccgactgctggtga

SEQ ID NO: 527758 - DNA, 3750 bp, Stenotrophomonas maltophilia
atggcttcgcgcaaattccgcttcatggccgcaggcggcgccgcactggcgctggggggaggctatttcatctacagcctgatggccgcccaggcccagggcacgttggcgcaggcgccgctgaacatccaggtgcagacgccgccagcgttcctgatggcgctggacgattccggttcgatgctgtgggaaacgctgaacaatacgcgcgacggtgcttatcgctgggatggcagcagcttctacaacaagggaacagccaacggattcgatggttcggggcagcgttacctgtatgtgtttccgagttatgggcgggatagcaatgtggctatcccgccgttggataactttggattcgcgcgttcgccagatgtcaattcatcctattacgatccccgtgagagctacccgggctggaagacgggactgtctgcgccggcaacctccaattacctggagatcaaagcggccagtgcacctctcgatccccggccggccggcgcgcccgccaagatcggtggtgcgctgaatctgacggcggactcgctgttgaccagcatgcagactggcggcagggattcgggaagctggcgattccgcttccgttccgggatgaaactgccggtaggcacccgtatcgagcgcggtcggtgcagcttgagcggtggagctgtgcagggggagggaacgtttgacagagtcacccgtgagacttccatcaacagctcaagctgcgacgctgctgtggctttctacccggcgacgttcttccttgagaatcccgctacgcttcctgcggattacggctataccgccacaccggtagctattgccagttcgccgggtggccggccggggacgctgtacaagtacgagatcaagcttgcgaacttcggcaataaccaagcgaagtacgacaatgccatgcagagcttcgcaaactggttcagcctgtaccggactcgccgcgaggcgttgatcggcgcggccaccaatgcgctgtatgacaccaccaatctgcgagtgggctggttccgcatcaatggtcgacgtccagtgaccatgttcgacatgacgaccgagtcgcaaagggcgaagctgctcagcgaaatcaccagtgaaatgcgggccgacgacagtacgcccaatcgttctgccgccgactacctgggcaagcagttccagcgcacggatgaaggggctcccgtgcttctggcctgccagaagaatgcgggcatgctgttcaccgatggttacatcaatgaagatggaaacacgacattgatgaaggacctggtggcgccctactacaagggccctctggttccttcgcttgataacggctcggtgccagttcctgcagagtgcaagggttccagtccggacgcttcactggactgcaacaagcagctgcacatgaatttctacggcgtgacgctgggtacgcagggcaaggagttcggcgtcaagtatctgccggacccggagcggccttgggtcctgagtcccgacccctacgtgacaaaacccaatttcccgaccacaacgcagaacctcaagccggaggcagtcgacgagctgtggaacgcggtgtatgacagccacggcgaaatggtcaatgccacgcgtccaggcgatatcactgctgccatgcgccgtatcatcagcaacgtcgcccagggcgcaacgccgtccggttcacgttcgttgaccggtgcgcgcattggcgtgggctcgctgtcggtggagccattctacgaggcaaccaacaacggcacggactggtatggaaagctgcatgccttcaagctgaaggttgatgcgaccacccgcgcgatcgtttctgaagaagcgtgggaagcggccgcgcagatgccggcggccgcatcgcgccgcattcgcttctggcgcgatggtgcgctggtggacttctccggtggcaatgtcagtctggccaatctgtgcgacaagtcgggtgtgatgtctccgggcatcctgatctgcagcgcttcggaactggaagggctggctacggactcgacaacggcagtggcatacctgcgcggagatgtcagccatgagaagcgcaacggcggcaagctgcgcgaccgcagtacggtgctgggcgacatcatcacctccaccccggccctgagctcgccgctggatgactacggtttccgccgcctgccaggctcgatgggcaccagttatgccgactacatggtcaccaagcgcaatgaccacaggtatatggtctatgccgctgccaacgacggcatgctgcacgccttcgatggcggcatgggggccgacggggagatggacggtgaaggtggcaaggagctgtttgcgtacattccatccacgtcgctgggccacatgggcaacctgctgctgcccaacgaccccaccaaccagaacgtccagcgcttccagcatcgctactacgtcgatggcccggtaacggtcagcgatacctatggcagcaacggctggacgacctcgctggtaggcacggccggagctggcgggcgcagtgtgttcgcgctggatgtgtccgatcctgcccagttcggcggtgccggctccctgctgtgggagatcagcgacctcaacgccgcactggatgaagaggtgcgcgccaacatcggccacgtgctgggcaagccggtgatcgtgccgatgaagaacgccgacggttctgtgggcttccgcgcgatatttggcaacggctatgaaagcaggagtggcaaggccgtgttgttcgttgtcgacatgctggccagcagcacgccgaccatccgcatgatcgaggcggtcgagtcgggtcagaacctgcctgccggcaacaatggcctgggcaatatcgtcgtggtcgatcgctggggtgggacgagccagaacgaccgggtgcgcgacggcctggccgataccgtctacgctgctgacaagcggggtgcgatctggaaattcgacctgcgcgacgatgcagcaccgacggcgccgctgttcaccaccgatacccacgtcgatcgcagcgaccagcggacctaccgccagccgattaccggtggcatgacggtgaccacgggggcctccggtggtgtgatgctgatcttcggcaccggcagcttctcctactacggcgatgagaacgacgcggcggtgcaggcgctgtatggcatcaacgacaccgaagtcgggcagcccggaacgacgctgacctcagccaacctgcgtccgttcacggcacagttcgacaatggcatgcgcaccctttcgccagggactgttccggcgcagagccgtggctggactgtgacgctgtcaggcaaggagcgtgcggtgggtaatccgcgcattgtttcgggtgtggtgttcatgccgacctacattccatcagagtcccagggctgttcggtggatggtgcgaactgggtgttcggcctgcaggccagcagtggcgaggcggcgatgtcacaggtgcgctttggtgctcctgatggcgcgtcgcccggcgcaggcacggctggcgtgcccttgagtacgggcggcaacgcgccggtgcgggatgtcaccacttcggtggtgccacggctggcgccgccggacccgggcaagcctggaagtccgccgccgaaacccccgggcgatgcctgcatgatgcagatttcggtggctggcgcggagccgatgtacctgccgtacccctgcggtcgccagtcgtggaggcagatccagtga

SEQ ID NO: 527759 - DNA, 519 bp, Stenotrophomonas maltophilia
atgactcctttcccgcgctccttccggcctgtcgtcgctcccgcccagcagcggggtgcggtgctgtatgtggccctggtgatgctcatcctgctggcgctgctcggaattgccggcatgcaggtggccggcatgcaggaaaagatggcggccaactaccgggcggccaaccgcgctttccagaattcggaaggcgtggtgcgggcggccgagcgttcggtggaacagatcaccaatcgcgaaagcgtgagcgagggcagcctgctgcaggcaggggatgtatcgcgtgtctgcgatgacggtttcgatccggccagctgggcggaggaccggcgcgacgagacgtcgccggccgtcaacgtgcggcagatcgacagctgcgtggtcggcgaatcgtcgctggacatgggccgaccgctggatgacaccacaccgatctaccagatcaccgggttcgctaccgacgatgccgatgcgagctcgtcgtcggtggtgatcgacaccgtattcaaactctga

SEQ ID NO: 527760 - DNA, 1161 bp, Stenotrophomonas maltophilia
atggccatgaaccgtcgtgccgccatgaccggcctgtcgctggttgaactgatggtcgcgctggtgatcagcctcgtgctgatgctgggcgtggtccaggtgttcatcgcctcgcagacggcctcccgcctgtccgagggcgcctcccgcgtgcaggagaacgcgcgtttcgcgctggatttcctggagcgcgacatccgcatggccggacacatgggctgcgtcaacgaccaggcccatgtggtgaagaaccagggcgacccggtgtcacacctgggggcaacctcgggcgacggcagtccgctggatttcagcgtgtccatccagggcttcgatgcgcccgagacgacgccgggcgggagcctgacgctgggcgcggactggtcggctccgaccggcctgcctaccgcgatcgaagggctcatcccggcacccgccggcggcagcgacgtgctcgtcctgcgcttcttcgcgccggaaggcgtgccggtcacggccatttccacggacggcggcaacgcgctgctggacatggacagcacccgcgtcgcccgcctgactggcggtggcgtgggtgatccgaccctgttcggcatcgccgactgcggccacgcggatgtgttcgcgggcacgttgagcgccgcacgggtcaccgccgcctcgctcgacctgtcgcgctatgccgcgcagcccaccgggcagacgatgctgtatcgcgccgagtcgatggtctattacgtgggcatcaatccggagacgaagcagccgggcctgcgccgcgcgcgtgccgacagtgatggcgcctactcgatcaacgaagaactggtggaaggcatcgaaagcctgcagttgatgtacggcctggacaacaccgccaacatcagcctggacacgccgccggccggcaacatcacgcagttcgctgcggccgatgacgtcagcactgatgccgatgccgcgggtgccgcgcaatggctgcgcgtggggcaggtgcaggtggggctgctggcacgcagtccgtcgccgtcgtcctcgacccgctcggccaatgcgctgtccgtgctcggcgtgggctttgccaacggcgacaagtccgatggtcattaccgctccagctatgaagtgtcgattgcgctgcgcaatcgcctgttcggaaactga

SEQ ID NO: 527761 - DNA, 516 bp, Stenotrophomonas maltophilia
atgtctttgcgccgggaaagcggcttcacgttgatcgagctgatggtcaccatcgccgtggtggcgatcctggccgcgatcgcgtttccgagcttccagggcaccctgcgttccagccgggtgacctcgggcaacaatgaaatcctgggcctgctcagcctggcccgcagcgaggcgatccgcagcaaccgcggcggcggcgtgtgcggcagcagcgatggcgccagctgcgacggcagctggtctggcggcatgctggccttcgccgataccaacggtgatggcgagatgtcgtcgggcgagaccgtcctgcgcttcgtcaatggaagcccgaagctgacggtcagcgggccgtcggaggtgatcgccttcgatggccgtgggcgccgcagggccagcgccgatcagcagatcctgctggagccggatgtctgcagcaaggacgcgctgcacaagcgcacattgacggtgaacgcctccgggcagatccgcagcaccaaggaagcctgcccatga

SEQ ID NO: 527762 - DNA, 3183 bp, Stenotrophomonas maltophilia
atggatgcttcactcgcgcatgccgcgcttgcttcgctggtcgggctggagccggaccatcaactgcaccgcctgcgggccgatggcctgcccccattgttcgtcgaacaatggtggggccatgaatgcctggctggcggattcgattactgggtggatgtgctgcatccggacgcgggcctcgcgttcggtgaatggccgggtcgcgaggcggcgctggtcacccgcctggacgatggccaggaccatctgcgctgcgggtatgttgccgctgcccatcggctggagagcgagggcggcctggcgcgctatcgcctgcactgtgtcccatggacctggatgctggggcatgcacggcacagccgcgtgtaccaggaacgcaccgtgcgcgacatcgtcgaggacgtgctgggcgggcatggtgagttggcctgctggcgttggagcgaggacgccgtagccgctctggccgaggcgcctgcgcgcagctactgcgtgcagtatcgcgagccggacctggccttcgtgcagcgcctgctggccgaagagggaattgccggcgcattcgagagcgacagcggcgggcggctgaccctcgtgctgttttccgacagtcgagcgcagccggagaaccctcagtccgcccgcgatggcggcatccgtttccatcgcaatgacggtaccgaagcggcggacacgctgcagcagctgggcgcacgtcgcctgctgggcagcaaccggttgtcgctggtcaccagcgattaccgggggccggtgctccgccatgtccagttgccgttgcaggcgggcggccagagtccgcgcgagatctacgacccggtgggcgcgcatgccttcgcccaggcggccgatgggcagcgccgggcgcgccgggtagccgaagcgcacgaggcgggcctggccggctggctgggcaccggcagcgttcgaagcctgcaggcgggccgcttcatccgcgtgctggcggccggaaccgccgccgccccgaccctccttccaactgaagtactgcaccacgggtgcaacccgccgccgatcacgcaggggcgcgggcagcggcgggccgagccacctgcgccctggctcgcggccagcgcagggctgccgggagccccgctcgaggcgtcctcggcgttgggctacgccaaccggttccgggccgtcgaccagcggcagccatggcgcccggtactgcaggacggaacgggggagcgcatcaacccgcggccgcttgcaccgggctaccagaccgcccgggtcatcgccggcgatggccggagtgacgccgatctgcatgccgacagccagggccgggtccgggtgcgcctgcatctgcagggggccaccgacgccgaggcaacgtgctggatgcgggtggcgcagcgctacgccgggccaggcgtgggttcgcagttcctgccgcgtgtaggccaggaggtgctggtcggcttccttgagggcgacatcgaccggccgctggtgctgggtgcgctgtacaacggccgtggtgatgccggcgctgctcccacgcctgccggtgcggccgcggccggtagcgacgcaggcctgttcggccaggccgccgacaggcgtccgagtgcgcagggcaatgcggccggcggccacgcccctgcctggcatgcgatggcgcccggtgaaggccagcaccggcatgccggtgccttgtggggcatccagtcacgggagtggtccggtaccggctacaaccgcctggtattcgacgactccgatgcgcagctgcgcctgcagctggccagcagccatgccatcagcgaactgaatcttggccacctgcggcaccaggccgacaaccatcgcgggtccctgcgcggcgagggcgcggaactgcgtaccgatgcctggggtgcactgcgcgccgagcgtggcgcatggctgatcgcgcacccccgcgcgcccgcttcgccggccggtgaggccgttgccgccagtgcgctgctgcagcaggcgtcaaccctggccgggtcctggcacgcgatggcgaccacccaccgggcggtcggcatggccagccacgctccgccggacgacagcgcgggcctggcaggcctgcagcgggtcgcgcgcgccagcgtgcccgggcaggactacgcacaggcccgcgcaggtggtgagggtcggcccaccggcggcgccgtgccgcataccgaagagcccatgctcgggctgcacggccatgccggcctggccatggtggccgggcaggcgctgcagtggagcagtgcccggcatgtggtgctggccagtggccagcacagcgatgccagcgtggccggtagcgcgcgcctgcacgcgatgcaggccgtgggcgtgctcgcagccagtggccggacctttgccggcgaggctgctttgagcgtcgtggcggggcaggcggcgctggacgtccgcgcccagtccgcgcagatcaacgtgcaatcgcgtgcctctctgcgtgccgccagcgcccaggcggccgtggaactggccgcgccgcgcaccctgcatatcgccaccgccggtggcgccagcctcaccctggagggcggcaacctggtggtgaactgtcccggcaccatcaccgtgcatgccgggcagaagtccttcgtcgggcctgcgcagctcagctatgcgctcccggacatgccaaccagcaccctcagcgagcagattccgaagctggccttccgcctgcaggacattccggggccgcaggggcatccgctggcaggccagccctggaagatcgtgcgtacccgccgggcgctggacgaggacatgcgagatggcgcgctggtgccggccaactgggccgagaccgttgccgaagggcaggccgacgagcagggcgacgtcagcctggatgacgccctgtgcgcgaagatctggaacgatgccggccggttcccggggcggctgttcctggtgcatggcatcgacgtgattcccctgcagcgtccgcgcccctacagcagctcgccaggcgtgcgcgccaccatggacacgcttgaagcgatcaactacggcaaaaccctggccgaccttcccgatgatgcggcgctgtatgcctaccggcagcgtgccgagtacgagttccagtcgcatatcgacgccgacccggcccagcgcaaggagatccagtga

SEQ ID NO: 527763 - DNA, 609 bp, Stenotrophomonas maltophilia
atgatccagcaaggcagcttcatcacgctactgatcgtgggcggcctcttcgccgccctgctggtgctgggcgtgcgcaccgtccggcgcatcgctgccaccgatcccaccgggcagcactggctgctgcgcggcctggcgctgctgtcgcccctctgcctggtggcagggctggcgatcggcatgatcgggccgtacctcaacgaccgggcgcagcccgcacacggccccggcctgctgacgatctcgatgctgctgatgctggcgggtgcgctggcgctgccggtgctgtggcggatgatgctgcaacggcgcctgggccggcccgccaatgggctgccgttcttccatgcctcgcgcacctcgctgctggtgctgtacgtactcgccgcggtctacatgatgctgatccggaatgccgggccgaacccgatgccctggctgatggacgctgggctggtgccgaccgttgcctgggccatcgcggggctgctccacctcgcgatgctgtcggtgctgatcaccctgccgctgatgttgctgcgtgcagtgatgatcggagtcgcccgccgtatcacccggccgttcacccgttcctcggggctatga

SEQ ID NO: 527764 - DNA, 5601 bp, Stenotrophomonas maltophilia
atggatcagacggcagcggcaaaggcgagcgaagcatcttcttcgcttcgagggacgggcagcttaagggataaggtcgagaaggctcgcttggagcttttggacttgtccacccgaaatcgactactgcataccccgcgcggtggccgagccaagactgtcgaggtcgttcatgagttggctaaggcgatgtaccagaccttggtcattgatggtaagcgattcacctttgtggcgggcaaagaagacccaaagcaaggcagcccactacttgatcttgaagatgaggaagagatagtcctgctcgacgaggtgccggaagatctggaactcatcgcgcagccagacttcgagctggatgaaaacggacgcgtcaaagcgcactgggatgcccaactaactacccgtctgacgccaaccggattgcagaagcgtctgctggatctctacaccgatgctcgcactcttcaagaagagcagggcgtcaacgttctctatctggcggctggctatctacgctggcgtgccacttctaccccgcaaaccgatcgcttcgctccattagtgttgatccccgttcaactggagcgaagcacagcgggagagaaattccacctcaagtggaccggcgacgagatccaagccaatttgtcgctgcaactattcttgcagcgcgagttcggactccgcctacccaacatcgacgagttcgagacgttggatattgaggcctatatggcttcggttgaagcgatgttggacggaaaagagacttggggcgtacttcgcgatgacgccattcttggcctgttctcgtttgccaagttcatgatgtatcgagatctcgacccacaaagctgggaagggattggcgggatggaggctattccgatgcttcgcggcgtcatgcaggatggctttcctggcgcaagcctgaccgatgagtccagtgatctcgaccgcatcgtgccacccagcaaaatgcgtcatgtcgttgactgcgattcatcgcaagccctcgttgtgcacgatgtactccaaggtagcagcatcttggttcaggggccgcccggcacgggaaaatcccagaccatcgccaacatcatttccgctgcagtagctgagggaaagcgcgttctatttgtggctgaaaagatggctgcgcttgaagtcgtgaagcgccgcttggaccacgtaggtgtcggtgtggcttgtttggagcttcatagcaacaaggccaacaagcgttctctcctagaagagctccggcaaacgttgagcctcggcgaccctaaacgaaacagcactgcgcctatcatcgagcagctcacggagcggcgggataccctcaatgcccatgcggagcgtcttcatcagccgcatgcgccctcggcactaactgcatatcaagtatttggacagctagttcgcctgcgacgccaaggctatacgacacagagcttaaccttggaagcgccaaccacctgggcgccgcatgagaaagacgctcgcgacgcagtgcttcgcgagctgatcgagcgtattgaagagatcggcgtgccgaatgagcacgcctggagtggcgtccagaacgatggactattgccgaacgagcgcgaccgattcttgaacttggttgaagacctctctggccgattaagcgcttgggagtcatcggctaccgagcttcatgcgacgctggaacttcctccccccgctcgtttttccgacgccaatctagctgtccagcggatcaaagcgctgcttgaagcacccaacatcggctcggacgctcttaaaagccctgtctgggaggaccaagggcgtgcggcggctgctattaacgcgctagaaagcgcccagaaagctaaggcggcgattaaggcgaagattaatgtggaggcattggcggatagttgggaagccaccaaggtcacgctgaacgccttgccaagtaacttcttcctggcaaaggagcttgtaacgctggcagctgcacacggtgccacgacccgggttcttcctgacttgaaacggttgacgcaacttctcgctgaggagtcaacgctgacgctggaactatcccttcgactagtcgccattgctgagcgtgcaacaagcatcccggaacttgacagggacgccttggtggctcacatatgggagcggggcgttgatgcagtcgaggaaatcttggcagccgttgaaacggttcagcaagccaaatcaaacctatcctcgacctttcgcgacacagcttggagcaaagacagcacggagcttgaggcggcgcgcgcgcaacttgccatgcgcggaactggcttgttccgttttctcagcggtgactggcgtcgcgccaatcggacagttcgcacactgctaacgaatcctaagctcccggctccagatatgcttgtggcactcgatgtgctgctagacgctaggaacgctcagaagagtatccttgagcatgatgctcaaggacgagaggcatttggatccaattggcagcgcgagcgctccaattcatcgttcctgcggggagttgtggcctggatgcgcacgctacgccccttggggagcggagtgcgcgaacgattggccaacattggcgaccggcaactggcaaccgaaattgccatgcgagtgaagcctgtcttagaggaactgactcgtagcctttcaccggtgcacgaagcactacttgctgcagagtgcaatccatggggaggtgagacctccctgaaacgcgtggccctgtcggaagtgatggacaaatccgctgtttggcaagcggcaatggagcaggctgcgctcctcgtcaacgcgacggaaatcacgattgagcaggctctcgctgtgattgaggagattcagctatcgcaagccgctactgtcgcttacgaaactttggctgacgacggagcctcggcctttgggccattgtggttagcgcttgatagcggacccagtgagcttcgtcaggtcgtggcctggattgagcgcagcccagagcttcgcctcttggcagccggcattgaggatccccagtcagtgctcgaccaggctcagcgaagattatcgtctgccggcgtcttgataggggaggtcacagatctcttggttggcttgcgatttgacggcaatgcagaaattacccgcgatccgagccatgcttctttggatgcactcaaagctcaactgcgaaggtggcaagctgacccagaagggcttcgggcctgggtggcatatttggccattgccaatgatgccgagcgcaaggggcttggcagcttggtcggtgcgattgccaagggcgacttagcagcttctgatgcatggggcgtttttgaactttcttactatgaagccgtacttcaggcgctagtgcagcgagaccctgcgatcgcaagctttgacggacagcgccaatctcaggtggtggcaagctttgcgagccttgatcaggagcgcatgctactggctcggtatgaggtgatcaaagcacatcacagtaaaatcccgcgtcaaggtggcgccaccggaccgactgccatcttgattggagaaatggctagaaagaagggtcatctaccaatccggcagctgatgcaacgctgcgccccagcgatccaagcgcttaaacccgtcttcatgatgagtccgctatcggtggcacaatttttgccggcaggcgccttggactttgacatgctcgtcatcgacgaagccagccaagtccagccgatcgatgctctaggtgcgattgcgcgcgcgaagcaattggtgatcgtcggtgacgaacgccaattgccgcccacacgctttttctccaaggcgcttggcgatgaaggagatcgagacgacgacgagggtggagcgcaggcatcagatgttgagagcatcttgggcctttgccgcgcgcgaggtttgcctgagcgtatgctcaggtggcactaccgaagtcgtcatcagtcactaatcgccgtttccaatcagcagttttacgatggcaagcttttcatcgttccaagcccctacaccagtgaggcaggtgttggcttgcggatgcaccatctgccagaagccatctatgaccggggcaatacgcgcgcgaacccaaaggaggctaaggccgtagctctcgcggtgctggcgcatgcgcagaacacgcctcaactcacgctcggcgtggcaaccttctccacggcgcagcgccgcgccattttcgacgagctcgagctgttgcgccgccagcacccggaaactgaggggttctttgctgatcatccagccgaacccttcttcgtgaagagcttggagaacattcaaggggacgagcgtgacgtcatcctcatctcagtcggctatgggcgcgatacccaaggccacatgacgatgaattttgggcccgtaagcaatgatggtggcgagcgacgtttgaatgtacttatcagtcgcgccaagtcgcgctgcgaagtctttacatcaattaccgatgaggatattgatacagacagggcgaagggtaagggtacctatgccttaaagctcttcttgaactacgcaaggacaggccgcctcacgttgaccaatgtgacgcgcgacgccaagcaaagcgtgtttgagcaggaggttgctcaagcacttcgtgcacgaggctacagcttgcacacggatgttggcttggccggattcttcgtcgatatcgcggttgccaacccgaacgaaccggggcgatacgttcttggcattgagtgcgacggacagtcttaccgagatgccaagagcgctcgggatcgggatcgcctgcgagagagcgtgctgcgtgacaaggggtggcaggtctaccgcatctggagttcggattggttccatcgacccgacgctgagctcgagaaactcgtcacggccattgaacgcgcgatggccgattcgctcaacttggagctagatcccaagtgttcccaccgtgcggtgcccgttgatgttctgaccgttgaacgcggtgaattagccgaaattgggctcgttcaggcacagaatccgtcaggcatcgagaactacgtagaagccaacttcgccgtgccgagcagtcagtgggaactgcacctggttccaatcggacaactggcgaatattgtttgccagattgttgaggtggaaggcccaattcatcggagcgagattgtcacgcgcgctcgagggctttggggcttgcagcgcgctggttctcgcatacagcaagcgatagagagttcgatcgctgcagcgctgtcgctaggcgcgattcagatcgttgatcaggacttcttggtcattccgggtaacgctgtccaagtgcgagatcgctcgatggtcgagtcgttaactctgcgtcggcctgaattcctacccccttccgagatagattcggctttgatcaaggttgcgaatgataatctcggcgcgacgcctgaggagctggtgacgactgtctcgcgccgacttggctacaagagcacaagccctcagcttcgtcggatcattcttgatcgctgcgaggcattagtaggggcagggcgattgaaggagaaagccgatctactggtgactgcatga

SEQ ID NO: 527765 - DNA, 255 bp, Stenotrophomonas maltophilia
atgggctactacctgggagccggcgcactgcgtgagctgcgcgccggtatcggggaagcgctccgcgatgacgggttgctggtggcctgccactggctgcccccgttcccggggcgcgcgagccgcaccgaggtcgtgcatcgatgcctaggtgaaggcctgcaggaggccttccactatcgcgacgcggacttcgtactgcaggggtggacgcgcggcgcgatgtcgttggcccgtctggagggcctgcggtga

SEQ ID NO: 527766 - DNA, 906 bp, Stenotrophomonas maltophilia
atgatcactctaagtttcgatagaagtctaattcgtcttagttcttgggatgagctctatgagacacctggctatgtcaaagtgcttgacgctaagtcagtccagcttagggagatcattggcgtctactcatttcaaacgagagaagcgtgtggtctcaagaactgcaaacagccccacggcaatggatacgtagtaactactactagcggaagcgtcacaaacattggaagcatttgcggtaagcgggcgttctcaattacgtttacaaacttgcgaagagcgttcgacagagaccttaaggctaaggagagaagggaaaggctggaggcacttcaaaataggctgccggcggtcctggagcagtttcgctccatgcgggaccacgcgaaaccactttacagagctactatgggcctgaggggatcaggtgttccgcggcagatagccgatgcggtacggaatatgatgcgtatcggagacggtgcgataaccaagaatagaaaggcgaccccgcaagagcgagaatttgccattgagtcggggctggctaggcgggacatgccgtactatgtcagtgagattgttggacgcatcagtagcgtgagtgcactaaacgaggcggaggcgcttagggaactgctcaacgagctcgacccgacgctcaatagactggcagagtgcgatctaagcacaatttcagacaaagaagctcgccatcttgataaagcgaccagcggcatcgattctaggcttgatcaaatcggccgcacgattacgtcgctgcgtgcatttgctacccaggacaacattggccaacttgctatgatcttggaatcaccgactgataggaggctcttcgatggattcttgcattcattgcctgcgcccggattggttcggtaa

SEQ ID NO: 527767 - DNA, 1101 bp, Stenotrophomonas maltophilia
gtgccaactaatgcgaaagtcctcgaagcggtcacgaaaactgggtttgttcttgaacacgaggtggtgacagcgctacagaaggcaggctggaagactatcaatggaagctattacatcgatgacgtaagcaatcaggctcgagagctcgatgttatcgcctacaagataacaaaaatggacgatatacacgtactcacttgcgctctgatcagctgcaaaaaaatcgcaaaggatgctgcagcctttctttcgcgcaagcgcccagccaaggacccaaatgctgactgggagcctgcgccacaggccacgagactgcagccgatgaaggcccatctctccagctcgaactggaaagatcgctatttttcgtcgatgagccccgcagttagggcgatgctagtggcggctcgggacgtttttgcatttcagatggtgggcaatgaggggcaggctaacaatgacaagccttactacgactcttttactagcctaatcaaggctctcgatcacgaactcgggaagcgggctgggggcgatatggcgcgaaggaagaggatctacagctactcactgcatgctgtctttgatgctcaaatggtggaagttcaattcaatgaagacaggaagcaagtgcgcgaggtcgatcgcatcacttgcttcgttcgatatatggtgagaaggaaagacacggctgcgtccgtgcacttcgtgcaatcttccgcactgaagcaatggattggcgatatcgacttgcttcattcgcataatgttaagttcttctcaaatgaggtcggcaagagctttgaggccattgcgacttcatctgaagtgcgcagttacttcaaggaagaaatgggctatatgctcaggcactatctgagcaaggcggcttcgagactgagaatttccatgccaagtggggaagtcatccttagcactaacaagcggggaatcgaggtgtcgatggatttttctgagagtgatgctgataagctgaacagtgacgctgagcttcgaagggagtttgcaagcatctttgaaaaaagagctcggtacaagggtgggatagaggtcggaacgttcgacataccattctag

SEQ ID NO: 527768 - DNA, 1200 bp, Stenotrophomonas maltophilia
atgatctactggtacacgggtcagcctggacacggcaagacgctgcacgctattgatcacgcaatgaccttccgtgatgaaggtcgcttggtgtacgtgtgcaatgtgcgcggctttaagcatgatgaggcgcgcatgcttccgatgactccggagcagttctgcgactggaccaatttcttgcctgacggctcggtgtgcttggttgatgaggcttacgagcatggcatgcttcctaagcggcggccgggctcttctgtccctaaccacgttgagcaactggcgaagcaccgccatcgtggcttggacttcatcttcgtcagtcagtcgcctaagaaacaggtagatgagttcgttcacgatctgattgagcgtcatgtgcatgtgcgtaggcgattcatgcttccgtttgctcaccttcgcatttttgatcgcttcgaggacaagcctgagaaaggtcatcccctgatcttgaagcgggtcaaactgcctaagcgccccatggggctgtacgagtccacggtgatggacaccagcgagaaggccattccctggtactacccagcagcggcagcgttgttgttggcggtgatcggtggcgcatggtggtccgtgaatcgcgtgcatgcccagctatccggagagcttgagacaggacaagcagaggtcaaggcgccgcaagcggcggagaacggagcgggagcgacggtcgcagccgcgccgcaagccgcaccccctgccattacccgcagcaacgactatctggcttgggtgacgccgcgcgtcgcgggccagccgtggacggcaccggcttatgacagcctctcgattccgacgaatcagcctccccgggtgtactgcatggcgtcgggcgatggcctggacgcgaatggcgaacatcagatcggccggtgcagctgcaagacggagcagggcaccacgtacgtgatggatcaagagcagtgccgcatggtcgcggtcaacggccagtacgaaccgttccttgacaccaatcaggcagaggcgcggcgcatgaacgatttccagcagtcagcccactatcaggaagagtcgcggcggattcgtagtgaggccgggggcgcaacgatcaacaaggaggcgagggcgcttggaaccttccctgagtcgccgcaataccccagcggctcagtactgccgcctacaacgagggatatttga

SEQ ID NO: 527769 - DNA, 324 bp, Stenotrophomonas maltophilia
atgagttcgatatgggaatggatcacgcgcggcgtgaaccttgtttggaccgtgctgtttggcggcatcggtcgcatcgtgaccaaggcgctatcgactgcgggcatcacgcttgtgtcgatcaaccagctactgccagtgctaaagaccacgattgcgacgtatgtcggctcgttgcctcaggacgccagcaattttctcggcgccatcggctttgatcagttcatgactatgatcctgtcggcactgtctgtgcgattcatgttcaaggtcattcccatgtccaccacgcgtgctcaacagttgggagtgaccaaggaatga

SEQ ID NO: 527770 - DNA, 1362 bp, Stenotrophomonas maltophilia
atgctcgctacgtccgcagcctccgcgcagacctaccccgatcagggcgccgcctacaaggcgtgcatggagtacatcaccaactatgtgaacagtcgcagcggcgtgcgcaacccgtcctgcccttcgaaggtgcagggcacgaatacggtatatgaaggtcgaaatgagtacgtcgatggcgttggcaactggggcaactacatcaagcacggcaccttcatctacatcacggccaacagctgcaagaaccgcgttgacggccaggccgggatgatcaacggcaccatgtattcgggcggcgtctgcgacaacggctgcaaggtgcagccaaaccttgatccgggggtcgatttcagcttgcgcgaaagcggcaacccgaacgccatcgcaatccggtcaggcacgtggaaggccagcggcgaaacctgctttgcggatgctccgcctaagccggaaaagaaagatgagtattgccatcaatccggcgcctacaacgtgtgcaagtcgaaggacaggacgtgcattagcacggcgagcggtttccggacttgtgcgagcgacacggccaatcagaaagggcacaccgcgaccaacaatccgcgtacggagggcgccagcatcagcgcgccaaacaccccggcgaacccgcctagcaaccgccccggcgagaactggcagcccagcggcaacaccacgaacatcacgaacaacaacaccggcaacaccaccaacaccaacacctacaacaatcagggccagccaaacggcaatcagcctacgccaggggatggctctggtcccggcgtgggcggtagtaacggcaacggcgagcagggcgagggtaacggcaacagtgcgagcggcggcggcgattgcaagtccccgcccattgttactggtgatgctgccttgggcatgatcgcaacacaggcctgggcgacgcggtgcgctactgaggcaggtaattcagccaaggtgaccggcgacgtgggcgattgccaatctgccttcagcgttgagggcgataccgttgaagcccatcagcttcgcgcaatgcgtgcgcagcgctgtggcagtggtcccggcgcaggggagggcaacggcggcaacccccatgagggcgctgaggacgtggatggccccggcaagtggtcatggaagttcgacaaagacttgatcgacacgagcggctttggcggtggttcctgccctcagttcgggtccattgatcttgggcggtttggctccgtttctctcgatggcactacgtggtggtgccagttggtcgcagccatcaagaccgtgatgctcctgatgggcatgttcatttccttccgcatcgtctttggggattcgtga

SEQ ID NO: 527771 - DNA, 192 bp, Stenotrophomonas maltophilia
atggcgcacctccagcagatgcttcaggaagacgccctgctggccgcgaaaggcttggaacgaagcttcgtcttcagcggtccagcccgtggcggccaattcggcgcgcgcctgagcaatggaacaggccgcgtagacctgctgaagaagaacgcgggtctgctcttgctcgtgccgggcgatcacccatga

SEQ ID NO: 527772 - DNA, 627 bp, Stenotrophomonas maltophilia
atgtggagtctcatcacttatcgcgagtacgttaccagcagagtagggcgccggtacaggagacatcgcatggccggcggcattaccgaatctggtgttcacgccgccggcgatcagttgctggccaagtgcgagtacccgaccgtcgagcagatccgggctcacttggggggactcgccgacccttatgaccctctggctggtgacctggtgaaaccgaccatcaagagcttgctgagtgagcagttggtggctgcccagcgtgatgcactgaagatcagatccgtttgcagatctcatagctcgccgagcaacgggacaccgggcttcggagagccgatcgagccgaggcagcgagacagcaatttggcgtgcggctccccgcggccctggagacagcaaaatctgagcgggaaggctggaccaagtacgtcagatctgtcgagaatcggacgtgaagcggtgttggtagcgcgcggccagagatggaggtactcctggcgcagccaagcaggacatccgaacgacacaggggccttgagaaacagctgcgccaagagatcgaagctgcccaatcagcggacaccacggccaggtggcggccgggccaagatgtttggaacataa

SEQ ID NO: 527773 - DNA, 816 bp, Stenotrophomonas maltophilia
atgggggctgagatatggattattgagtcgctgagaccgggtgaccggaccacaggcagcctcttgtccagcaagataaaaaatagcgacgcagccctcacgaggcagcttaaggtcaagcttctcaccccgaaaagcctgaaggagttcagtgactgcttgaatgatgtactccagtcagcagctgctggaaatcacccaatacttcatatcgaagcccacggcaacgagaacgggctccaacttacgaatgacgacttgatcgattggcccgatctctcggtaccgttggccaagatcaatgacatgatgacggggtggctggtggtgactgtcgccgcctgctcaggtggtcacatggcacgaactgttctcaataccgcccgtgctcctttcttcgctttggttggtccgccagaggagattgaagaagacgttcttctgaatgactatacggaattctatatcgagttctgcaagacccgctccctcaccaaggcaatgtgggctcttaattcgttcggggcttccaagcggaactattttcttacaacgcacagaagctgttttgtccaactttttgaggagaggatcacggagaagatttcctcaatggagcgatcacagcggatagccagactcgcatccacgttggtagcggcgtcagcaactccggaggaaataagtgctgcgcaccatgccgctacaaaagtcgtggacaaccctacagagtccgcattccgcgcgtggcgtcagttcgtgttcgctgacaagtacccagagaatttggacctcttcccttttccgtttccttga

SEQ ID NO: 527774 - DNA, 480 bp, Stenotrophomonas maltophilia
atggaaatccgggctgccaccgcaggtgacttcgacgccatgtgggccatcttcagggccgccatcgcgaccgaggatgcgctgccgttcgccggcaccttcgaggccagcaccttccagagccactggtttggattgcagccggcttatgtggcacttctgcaagaccgcgtagtcgggatgtacaggatgggcgccaacttccccgatctgggggcgcacgtggccagcgccacctacgtggtcgatcccacactgcaggggcgcggaattgggcgggcgctggtggaacacagcctggaccgggcgagggcggaaggcttcctggccatgcagttcaactacgtggtcagtaccaacacgccggccgtcgcgctgtaccggaagctggggtttgcggtggtcggaacgctaccggaggcattccggcatcgaacgctggggttggtggacgtgtttgtgatgcaccggtttctgtag

SEQ ID NO: 527775 - DNA, 486 bp, Stenotrophomonas maltophilia
atgaagcggagttcacaggcactgggtcttctgggatgggtcgcggttacctttgcggcggctgcaatgggcgcgtgggcctccacgtccgctgccagcttctacgccagcctcaccctgccggcctgggcaccgcctgccggtgtatttgggccggtctggaccctgctctacgcgatgatggcggttgccgcctggctggtctggcgggagcgcagttggcgcggtgcgcgtccggcgctgacactctatctagtgcagctcgcggtcaacgccttgtggagctggctgttcttcggctggaagctgggcgcacttgccttcgctgacatccttgtactgatcgtgctggtgtgcgcgacgatccttggcttcctgcgcatccagcgggccgccgcagtactgttgctgccctaccttgcctggatctcgttcgcctcggcgctcaatttcgccgtgtggcgcgccaaccccggggtattgtga

SEQ ID NO: 527776 - DNA, 693 bp, Stenotrophomonas maltophilia
atggcggctgccggtgcattgcgggttctgttgaccggcgctaccgggttggtggggcagggcgtggccctggcctgtcagcgctcgcaccaggtgtctcagctgactgcactggtccggcatccgggcagcctccgcggagccggcagcgaactgatcgtgccggagttcctgcacgtcgaagcgcggcaggatgaactggcaggattcgatgcctgcttctactgtgccggtgcgccgccggtaggcaccgccgaggccgagtaccgccgggttacgctggacaccacgcttgccgttgcccgggcgtgggcagcggccaatccgcaggggtgcttcctgtatgtgtccggtgcaggcgcagatgcgggcagccggctgatgccgctgcgcatcaagggcgaaaccgagcaggcactgcaggcattgccggttcgcacggtgatgttgcgcccgggtggcgtgcgcccggtggaaggcaccggcacccgccatggcctgctgaagccgttgtactggggtggcgcgccgctgatgaaactggccggcgcgatcgcgccctcgctggtgaccagcaatctggcactgggccaggcaatgatcgcgctggccggccgggagcatccgccggccacggtggagtgcgcggacatcaaccggatcgcagcgggagtgcacgatccggcgccttga

SEQ ID NO: 527777 - DNA, 681 bp, Stenotrophomonas maltophilia
gtgaacccgcaccaccatctgcacgagtccacgttgatgagctatgcggccggtgcgctgcccgcgccgttgagcatcgtggccggcgcccacctggagcaatgctcgcagtgccgccagcgcctgcgcgacgctgaggcgatcgggtcggtgctgctggaacagacgcaacctgcctcagccgaaggtgacgcacgccggagcgcgctgcgcgaggcgatgctggcgcagcttgccagcgagtcgcccatcagcctgcccatggcggcgagcgtgccgcggcgggagcgcccagaggccgatcctgatcacctgccggcgtcgctgcacccgtacttcggtgcgtcgctggcagccctgcgctggcgctggatggcgccgggcgtgcactgcatccgcgccgaacagatgccatcgctgatcatgctgaagatcgcgccgggcaagtgcctgccgatgcacagccacggacgcagtgaactgacccagatcctgcgcggttcgtacaacgacgcgctgggcctgttcgcgccgggcgatgtggcggacctggatgaggaggtggagcaccagcccgtcaccgcaccgggcgtgccgtgcatctgcgtgtccgcgctggatgcgccgctggtgttcagtggctggctggcgcggaagatccagcgtttcgtgaagctttag

SEQ ID NO: 527778 - DNA, 768 bp, Stenotrophomonas maltophilia
atgcggaccgcctggctgctgttgtgcctcccccacgccgcgctggcagccccctggctgcggaccgaaggccttgccagcaccgggcaaggcgccactgcctatcgggaagtgcactggcagcgcgacgcgaccgaaggcgccgaacgctgggtgctgtaccagtgcccggatgggcgccccttcgcccgcaagcacctgcccgcgacctcccgcccgcaggcgcgcggctactcgctggacgatctgcgcagcggccagaaggtgcagatcgaggtggccggcggcagtgtcctgatcgactggaaggaggatgccgatgcgccatcgcgccagcgccgcctggagttgcctgctgatgccgtgatcgatgccggctttgacgccgccgtgcgccagcattggccggcgctgatgcgcggcgagcgcatctcgctgcctttcctggttccggggcggcagcgctatttccctgtacaggttcgccgcactgccccgctgcgctggcagggggtggccgcgcagcagatcgaggccagcctcgacacctggtatggcggcatcgcaccgcgcctgcagctggtctatgccgataccgatcgacgactgctggagttccagggcaccagcaacctgcgcgatgcacgcggccactatccgcaggtggtggttcgattcgccgctgctgcgcgcgcaagcagcgccagcgaatggcagcaggcctgggcgcaaccgctcgtcgccggttgcggcgtgacgtccgggtga

SEQ ID NO: 527779 - DNA, 561 bp, Stenotrophomonas maltophilia
gtgggcactgagatgcgccgcttctgggccaacctgctcggcaaccaactggtctggctgagcgccgtggccggcgccggtcgcggctggcaatggcccgcactgctggctgcgtcgctgtacatcggcagccaactgctcacttcgccgcagccgaggctggacctgcggctgctggcgtgggcgctggcctgcgcctggctggtcgacgccagcgcagcggccagcggcacggtgcgttatgccgccgccgcgttcggttgggcgccgccgccgtggatcatggcgctgtgggcggcgttcgcgatgacgctgactacctcgatgcgcttcctgcagcggcatgccgcgctgccgatgctgttcggcctgctgctggccccgctggcctacctctctgctgcgcgcggcttcgacgcggtgcggtttgcagcgccggcatggcacggcttgctcgtgctcggcgttggctggagcatcgcgctttccctgctgtgcagccgtgcccggcgcggatcgcgaggcacgccgcagccacccctcgctggagcgccgtcatga

SEQ ID NO: 527780 - DNA, 627 bp, Stenotrophomonas maltophilia
atgaatggatatcctgcaccgcgcctgttgcacctggcactattggacgatcacgaagtggtccgtcgcggtaccgcactgcacctgtcccaggacgcccgcttcagcattgttgccagccacggccacagcgacgcgttcatccaggacctgcatgcaacgccggtggatgtggccatcatcgacctcactctggcgcgcggggaccgcgactgcatggcgctggtggagctgctgcgcgcgacgttccccgccattcccctgctggccttcgccaccctgtcacccagcatacatatcggccccctgatcgacgccggcgtcagcggcgtggtcagcaaggctgagccgctgccactgctgtccgaggcaatcgtacgcgtgtcgctggggctggaccggctgcctcccgactgccggcatccggcagacggcgaagatctcagccgcaacgaacgtgaagtgcttcacctgctgctggccggccttaccgtctcggagatcgcccagttgcgccatcgcagcatcaagacggtcagcacccagaagaagtccgcgctacgcaagctgggcctgcgcaacgatgcagagatctatgccatgcgacatcagctggaggcactgtga

SEQ ID NO: 527781 - DNA, 2322 bp, Stenotrophomonas maltophilia
gtgagccggcgccatcgcccgcacttcgcccctgtcctgctgctggccctgctcctgttgccgacagtctcggccggggatgcaccgtcgcaacgatgggcggcgggccgcgaggtccgcgtggccaccgcgccctcgctgcgccccttgccaccggcgctggctgatacggctccgctgcccacccttgcccatggctacgccacgcttgtggcacgccactcgcagctgcgcttcaccgaacacccctaccccagcacgggctcctcggtagtcgcggtatgccggggcgatgccgacctggtactggtcatcggcgcggtcaggccactgcaccagccctgcgccaaccttgttgcctccactcccttccgcggcggcaggaccgtcctggccggccggaacggagggcgcctcccgcacgatgttgcacaactggaaggacgcacactggccgtcgtcaatggcgggccctacgccgagtggctgcaggcgcatcatccacacctccgcctgctgcacctgcccgatcggcacgcaacactggtggccgttgaaacaggtgccgccgatgtcgcaattggcctggaatcgacgctgcaaccgatgatccggcgacacttcggcggcacgctgcaactgcagcccttcgaaagcgcgttctccaccgacctgtacctgctggtgcgcagcattgaccgccaactgctggcgcgcatcgaccaggcactgcaggacatcacgctggaagagcatgccgggcttctgcagctctgggcccggcaggcactgcccgcctcgatccagcgcatgttcgatcagatgcgcatgccaccgccgcactggcttctggccttgatcgcagtgctggccggcctgccgatcctgtggcacgtcgcggcccgtcgcaccaggcgcgaacgccgtcgccatgcccgcgcggcaggcatggtcagccatgagatgcgcaattcggcgcaggcgatgctgatgtcgatcgacctgctgggccggtcacccctggccagcggtcagcgcgaactgctggcggccgccacggccgccgggcgctcgctgcgcagcctgttgaaccgctcaatggatttctcgcgcctggctggcggcggcttcaagccgcatgtgggcgcctgcgatgtggcgtctctctgccagcaatcgctcgacgcgatccggccacaggcccggctgaagggattgcagcttcgattcgactgcagccccgaccctgcgccgacgatcgcactcgatgcagaagcactgcggcagattgtcgacaacctgcttggcaacgcggtgaagttcaccgatgtgggcggcatcgatctgcgcgtgcaactgatgccgccggtccagccgcgggcactggtgctggacgtgatcgacagcggcatcggcattgatgcccggcacgccgggcggctgttccgcgccttccagcagggcgaggacggccagatgcgcggcggcagcggcctgggcctttccatcgcccgcgaactggcccgcgccatgcgtggcgacctcaccgtgcacagcgtcgtgggacgcggcagccgcttcaccctgtgcctgccgatacaggccgccgacgacgatgttgcgcccgcagaggaccctgccgccggccgtccacttgccggcctcgaccttctgctggttgaagaccatgcattgaaccggcagatcatcgccgagcagttgcgtcggttcggtgcgagcgtgcgtgccgttgccgacgcggcaggcgcgctggacgagcagagccgcagcccgcgccggatcgtgctgctggatatcggcctgcagggcatggatggctacgcactggcgcagcaactgcgcagccaggccagtgggccgctgcggctggtggcgctgtccgcccgtaccgggcgcaggcacctggcgcgctcgcgcaaggccggattcgacgccgttctgaccaaacccctgcaggttgcgcacctgctgcaggcgctgcagctgacgcccatcaccggtattgcagcccgcacgcccctggcagcgctggaccacgtccatctggccgatatccgcggcgaactggaaggcatcgagcgggcgctggccgatcacgatgcaagggccatgcgccatcatgcgcaccgcctgcaagggacacttcagatctgtggcgccgctgcccaggccgacatcgcggccgatctgtgggaactgggtcatgatgccgcgacggactggatcgacgcgcggcgactgctgcaggtgctgtggcactggcatggctcccgcactgcggaagccatgcctgccaactga

SEQ ID NO: 527782 - DNA, 750 bp, Stenotrophomonas maltophilia
atgttccgtaccgctccgcgcggcgtgctgcttgccgccctgcttgcttccgtgtgcgccgccaacgcggctgccacctctccggtatcactcaccgatgcagccgagaacgcctcgttgaccgaaacgcggcattcagagggtaagggtggcgccgttacgtcgttgaagacgcagtacttcgccaacgaggaaatgtcggtgagctgggatgaccagcaggtcctggtgttgtgcaaggaggcggcctatctgaagttgtctgcgggcaaggcggatgccggttcgctgacgaccgagcagcggcagatgattgtctaccaggcactgatgtcgggattgggtgcggtggcaggagtgatcgggccggcaggcgaggtggtggcggtcgcggatgacggcagcgaaacccgtggcgttggcgagaacacgtgggcctacggcgtcgaacgccatgaggttatgacccagcgcatgccggatggcgcgctgcgggtccgggtgcgcaagaccgagaccgtgaacaacgccaagcccgcgtcgccggacgacatgttcagcaccgaagacgaccaagcggcgagattgtccgagctggtgccggtcggcagctggaccgaggtgttgatccatggcggcccgcgccaggcgcaggtggatccggcgatgtcgctgaaaggatgggtctcgatgggggatgaccgtgcagcgaccgtggcggaggcccgctcgctgcatgggtgcaagtaa

SEQ ID NO: 527783 - DNA, 537 bp, Stenotrophomonas maltophilia
atggtgatggacaggttctggggtaagcggctggctgcgttctgtgtggctgtcggcctctcattctcagcccaggcgcaacaggacacgtcatcgattctttcccgcttgttgcagtgtcagctgactcaccaggagctggacgctttcactggccggatcgcagcgggcgacctcaccgatttcacccagagcgatgcgggcgttggcgcggcactgatgctctggaaaacccggacgtccacgacggcgtggggagagtcgtcgtcgctagtgcatgtgtcgggtcgccaggagatgcttcttgccataccggttccgatcggcgaggagatggcacgggggatgtccattgccaagcgcattggaggcatgtcgtcgcgctggaatgccgaggccatggaaagagagcatggctggaaaggcctcaatctctacagaacgcttccggacaatcgacacatacggttgattgtcgatctgtcctattcgccggggtgggtgacggtaggctgtacctatggcgagatgagctga

SEQ ID NO: 527784 - DNA, 267 bp, Stenotrophomonas maltophilia
atgagcaaaccgacagaaaagttccccaatgacccatcacggcttgcatgggcgtcacttctgctgggcaactggctgactgcaatcgttgccatcgtgtacgcaaacaaagccgcgtcacttcatctcgcgggccgggcagaactcagcctggccgccgcacgcagatcccgggcctgggcttatgcatcatttgccctgctgtggattccgttcgccataatagttgccgccggcatgtacctgcgtctcacgggatcgcggtag

SEQ ID NO: 527785 - DNA, 288 bp, Stenotrophomonas maltophilia
gtgcagtaccgcatccatgacagcgttggcgccgtccacgacatcaagggcaatggcgagtcgttcgtgatcgcgatcgagtccagctactacaggaagtggagccaccaggagtcgtactcgaacaccatttcgatggacgtcgagtaccgctacatcgcactggccgaccatctgccgacggtggttgcgctggaagatcagccgctgttcgtgtactcgactgatggcggcccggcgggcgagggcgtgctcaccgcaaaggtggagtacctggcggccgagtaa

SEQ ID NO: 527786 - DNA, 351 bp, Stenotrophomonas maltophilia
atgatccgaacgttcgccccgttgtcgtgcgcgctggccgctgtcgtcgcgttttccgcactcactgccgcagcgccggcctctgccgcccaggcgggtaccacgccgcagctctgcgaggccggtggcaacaccgcgctgtggagcctcagccaggggtaccagttcaagggcgtcggccagccgatgaccgattggcagaagccgggcaactcgctggccgccttccgtgactgcaagccgatggtcgtctccctgcgtggcgatctgctggcccaggagcacccggtcggccagatcgacggctacaccaccttcaccgggcatcggcgtgcagtaccgcatccatga

SEQ ID NO: 527787 - DNA, 1269 bp, Stenotrophomonas maltophilia
atgagcgacccgatcagcgccgttctcgatgtgcacgacagcccgcgcgcacgcaacgacagcctgggcatgctgctgtcgctggctgctgagcagccgcgccagctgggcgagctgatgctgcaggccctggcgcggcgctcgccgggctcggccttcctcgacatggcactggacctgatgccggatgaggtggtgcccgcggttgccaccgatgcctggcggcgctatcgcgacggcgagcgcggcgaactgctggccagcgtgatcgagtttgccagctaccaggcaccgaaggtgctgcaggacgattgggatgcgctgctggccgtggccatcgaagatgagcttcaactggcctcgcagctgtggcgggcgctgccgcctgcggtggctgcgggctgggcgcaggtcctggccgaggccgatgatgatcgcgaaatgccgcgggcgcgggcgctgttgttggccgcgcagcccgcgacctatgccgccgcgcgcggctatctggccggctgggggcagctggacgccgaggcctgggcacattgggccggcgttgccgacgggccgcatccgcggcgcctgcatggagagcggccgctgcacatccgtttcggcggtgcgcagcatcgcgcccagctggccgacgagccgggctggcgcaagcgcatctggcgcctgcaccccacctggagcggcggtcaggttcatcacgccggccatatgggtgggcggctggaggcgctgtgcgggagctgccatgcaccactgcagcgcctgctgcagaccgacgccgccgtgctgcagccgggcgcggcaggggagatcacacttgcggtctgcctggactgctgtggctgggaggagccgccggtgcgcttctatcgccatgatggcgcaggccggcccagctgccatccccgccagtaccgcgacgtgccgagcacgcctaccgacagcggcgatctgatgccggccgatgtcggcctggcgtccctggacagcgcgcgctggcggcagcaggactggggccagtccaatcatcggcagaatctctcgcgcgtgggtggcccgcccagctgggtgcagagcgcctggtacccggcgtgcatcgattgtggccaggacatgccgttcgtgatgcagctggattcgacattgcccaccacgggtgagagcacgctgctgtggggcagcggtggcatgctctacacgttctggtgcgcgaagtgccgggtgagcgggcacttctggcagtgcacctga

SEQ ID NO: 527788 - DNA, 381 bp, Stenotrophomonas maltophilia
atgaagatgccctccctgctcaccgcccttgccctggccgcgaccggcctgctggcgccgaccgcccaggccgccgacacggcccccgcccaatgcgtaccgctggccggcgagcagcagatcgtacgcgccggcgcagacaagaacgtgttgctgcgcaccggcgacgaccactacatcgtgcacttccgcagcagctgcccttcggccgtgctggccacccgcctcggcttcaggaccgacggcaggaaggaggcggatcagttgtgcggtgaaggccgcagccagctcgacaccggcaatgccacctgcgacgtgtcgcgcatcgaaccgatcgatgccgggcagttcaagcgcgaagtgcgccgtcgcagccgctga

SEQ ID NO: 527789 - DNA, 219 bp, Stenotrophomonas maltophilia
atgggcaatcacgggtattccgccgcagcgggcatggcgccgggcacggaaacgaaaaaggccgcgatgcagggcatcgcggcctttcagggggtgacgcgagggaagcgtcagcggatcttgttgaacaacgacatcgactgcatctgcgagaagatcgtctgtgccgcctgcagcgcggtgctctgcagctggtactggctcaatgcatcggcatag

SEQ ID NO: 527790 - DNA, 174 bp, Stenotrophomonas maltophilia
atgactttcatgaagctcaagcaggcggtcaaagtcgtccagaacgaaatccagcaaagcgaagctacggtctcgcgaaaggtcgaattgctgccctccttgggcggctggagagtcgttcaactggtgaatcctgtagatgccaccgcctatttcatagaagacgtttgctga

SEQ ID NO: 527791 - DNA, 1158 bp, Stenotrophomonas maltophilia
atgcccgctccactcagcggcagcgccagcgcccagccgcagggctccggcaatggtgccgcgcgtaccccgcgcagcgacagcaacaaggaattcagccagctgctgcacggaggcgcgccggctgccgatgcgcccgcccgggcgtcgagcacgccgacacccaccaccccgcagggtccagcgtcggacagcagggatcaggccggcagcgagcgcaacccggacaccgccgccgcacccgaggacaccgcggccgtggtgcctgcagtaccggccaagccccttgccgagaaggacgcaccggctgcaaccgaggaggcgccctggccgccgctgggcctggccgggctggtgctggcggtaccgcttcccgccgatcctgccgctgccctgcccgccgctgcggttgtgccggccaccgacactgacggcgttgccctgcctgccacagctgcacaatcggccgctgcggttgtgccggccgctaccacgccggctgccgccgccaccgagggcaaggccaacgccgcgtccggcaccgagcaggcgaccacgctgccactgcctgagatgctgctgcccgggaaacgcagcgagcgtagcgaagacggcgacgcgcccctgatcggcgagcgcaccgcggcgcccctgctgcacgccccggccaacgccgcggtgcaggacctgaaggccgcgctcgctgctggcaacgcgatcttcaacggcgagccgacgccgaagccggtgctcggtgatgatggcttcgaccaggccatcggggcgcggctgggctggctggctgaccagaagatcggccacgcccacatccggctgagcccggatgacatgggcccggtcgatgtgcgcctgcagttgaatggcgacaaggtgcatgccagcttcagcagcccgcatgtggacgtgcgccaggccctggaaaacagcctgccgcgcctgcgcgagctgctcggcgagcagggcttccagctggcccacgccgatgtcggccaccaggcccccggtggtgacggcaatgcgtcgggaccatccagtggcggcgggctggccggtgacggagaaccgacgccgggcgacgccagcgtctcccccgcccagttgatccgccagcgcgggttgctggacgcctacgcctga

SEQ ID NO: 527792 - DNA, 1488 bp, Stenotrophomonas maltophilia
atgcgcgggggcggcctgtactgggtcgtcgcggccggcagtgcgccgaccgacctgctcggcgccggcgtgctgtccaccgccgccgcactgcaggacgccgttctggtgacgctgggccgtggcgccgagccgatgctgtcgctgctggcggacgatcaggggccgctgcgcctgcgcctgttccagcgttcccaccacggcatgcagcaggcgttgcgcggcttgccgcaggacctgccgcgggtggcgtccgccgccaccgggctcagcctggtgcagtttccggttgccgcgctggatggctgggatgacacgcgcctggcgcgctggtgcgagcggctgcaacgctgggccgggcagaccggccagatcgtgctgctgctctgccatggcgaagtcgccaccctggcaccgcgcctgctgcccttgaaccgcgcctgcgccggcgtggcccagctgcacccgcatcgcggcgccctgcagctgctgctgcactactggtcgaacagccatggcgtggtcgcgcagcgttcttttgccgtgctgcaggaagggacgggcctgcgccacgtggccgaggccgatactgctgacgaggctgccagccttgccagcggaagtgatcgcgacgtcttcctcgcccaggccaacgtgctggagggcgcgccgccgctgtccgccgcatggcgcctctacgagggctgggccggtctgctcccggccgcactgcaggcgcgcgaggccacggtggtgctggccatcaacgagaacgcccaggtggacgcgctggcgcggctgctgcaccgcctgcgccgcgagcgcggcaccgccctgaaactggtcgtgcgcgagcttcagccctgcctgcgttacgccgacgaacgcctgctgatgcagtgcgggtgcagcctggtggtgccggccgacacgccgctgccacgcctgctgacgctgctggaaacggtgcagcggcagcgctggcagggccagctggccgatgacccggagccgctgatccgcgcccatcggccgccgtcgttgagcggcctggtcaatgccgcacgtttccgccagatcgccgcagaacgcatcgaccaggacggcagcgcggtggaaagcgcagtgctggccctgcagccggttgccggcctgcgcgccgaacagaccctgcaacagctgcgcatccgccgccagggtgatcttgcctgtgtctatcgcgggcaggtccgcctgttcctgttcggctgtcgccgcgatgcggtcgagcaggcgctgggcaacctgttccgcctgccttggcgcgaactgtttgacggctatcagcgccttgccgagtacgacatcgccgccatgaacccgagcggcagtgatccggacgccgagctgctgcccgaggcgccggttgccttgcccgcagtggctccggtgcgggaagcgcctgccgtcgttgccccgaagccgctgcggctgggagataccgcatga

SEQ ID NO: 527793 - DNA, 756 bp, Stenotrophomonas maltophilia
atgagcaacctgttgtccctgcagggcgtccacggcggtaccggcgtgaccacggtgctggccgcgctggggcaaggcctgcatgcccagggccagcgcgtgctgctggtggaatgcagtcccgaccagatgctcggcctgcatctgggcctgcccgccgatgtcgaaggtggctgggcgcgtgcacagctggacggcagcgactggcgcgatgccgcctatgccatcgcgcccggcttggccgtgctgccctatggccgggtggatgccgggggcgcgatgcagatcgagcagcagctgcgccaggcgccttcgacctgggccgatcgcctgccgctgctgcaggcccagttcgactgggtgctgttcgatctgccgcagcgcctgccggcacatgcggcagccatcaaccagcacgcgcgctgcaccctgccgctgcgcctggcctgcgtcgatccggtcagtcatgtgttcctgcaacggcagccggatgacgagcgcctggtgctggccaaccgctacgacccggccgttccggtgcagcgcgatctgatgcagctgtggctgcacacccatgccaggcggctggtgccgcagccgttgcatgaggatgcgcgggtgccggccgcactcgccagcaagcaaccgctggggcgttacgcggcgaactcgctggccgcggccgacgtcgatggcctggtgctgtggtgcctggctgaagcggcgcggcggcagcaccgcgaaggcggcccctga

SEQ ID NO: 527794 - DNA, 2625 bp, Stenotrophomonas maltophilia
atgggcgcccgggtctactacctgggctgggggcgcctgcgcgagcgggtgcatgcgtcctggccgacgcgggcgctgctgtggttgctgcaatggaccgggtgggccttcctgcgcctggagggaccggcctggcagtcgatcgcgccgcgcctgcgcaacgccttcccgcagatccagggtgaccgtcgctggcgtccgggtgatccgctgcgcctgctgatccaggccgcctggctgtcactggtgcggctggtgccgaaggcgtcgaagcggcggcagcgcctggccgaagccaaccgccagcggattgccgagcttcgcggcgccgcaggccgaggccgcctgcgctatctgcgggcgatgagcgatgcgcccagcgaattctggaacagccgtttcgcaggctggttcgggcagcgcgtccgcgccctgtcgccgcgctcgcggcatctgctgacgctgctgatcggcttgatcacgctcgggctggcggcgctgtgcatcacccaaccgttcacctacgtcgcgcagttcgtgttcgtgttgctgctgtgggtcatcgccctgctggtgcggcgcatgcagggccgctacgccacgctggtgctggtggtgctgtcgatcaccgtctcctgccgctacctgtggtggcgctacaccgccaccctgaactggaacagcaccttcgacctgatctgcggcgtgatcctgctggctgcggaaacctactcctggctggtgctgatgctgggctacgtgcaggtcgcctggccgttgcgcaggcgacctgcgccgctgccggccgacgtacggcaatggccgacggtggacgtgctgattcccacctacaacgaagacctgacgctggtacggcataccgtatacgccgcgatgggcctggactggcctgcggacaaactgcgcatccacatcctggatgacggcaagcgcgaggagttccgtgccttcgccgagcgcgccggggtgaactacatcacccgtaccgacaaccgccacgccaaggccggcaatctcaaccatgcgcttaccctgatcgatggcgagctggtggcgatcttcgacagtgaccatctgccggtgcgctcgttcctgcagatcacctgtggctggttcctgcgtgacccgaagctggcgctggtgcagaccccgcatcacttcttctccgccgacccgttcgagcgcaacctgcaggtgttccgcagcgatcccaacgagggcgagctgttctacgggctggtgcaggacggcaacgatctgtggaacgcggccttcttctgtggctcctgcgcggtgctgcggcgcgaggccatcgatgcgatcggcggctttgccaccgagaccgtcaccgaagatgcgcataccgccctgcgcctgcaccgcaagggctggaattcggcttacctgcgcatcccgcaggcggccgggctggccaccgacagcctcggcgcgcacgtcaaccagcgcatccgctgggcgcgcggcatggtgcagatcttccgcatcgacaacccattgctgggcaaggggctgagcctgttccagcgcttctgctatgccaacgccatgctgcatttccttgccggcatcccgcggctggtgttcctgaccgcgccgctggcgttcctgctgctgcacgtctacatcatctacgcgccggcgctggccatcctgctgttcgtggtgccgcacatggcccatgccagcctcaccaatgcccgcatccagggcaagtaccgccgcccgttctggggtgaggtgtatgagaccgtgctggcctggtacatcgcgcgtcccaccacggtggcactgttcagcccggggcgcggcaagttcaacgtcaccgacaagggcggcacccaggccggtgaccgcttcgactggcgggtggcgcggccctatctggtgctggcactgctgaacgtgctgggcctgtgctttgcggtgtggcggttcatgcacgggccggccgatgaacgcggcacggtggtcgtcagctcgctgtgggtgctgtacaacctgctgatcatcggcggagcgctggccgtggccgccgaagtgcagcaggtgcggcgcacccatcgcgtcaccacccgcctgccgatggcgctggagattcccgatggccggcgcctgcgtggcgtgctgcaggactactccaacgatggcgttggcgtcgagctgggcgaagatgcccagctcgccgaaggccagcaggtacaggtgctgctggggcgtggccggcgtgaattcgctttcccggcgcgcgtgcagcgcaccgtcggccaccgcttgggcctgctgctgctgttcgaggacgagcgccagcgcgtggagttcgcccagtgcacgttcgcacgcgcggacgcgtggctggactggcatgccggctatcaacccaagagcctgccgcgcagcctgtggagcgtgctggtcctgggctggcgcggttaccgccggatgggcgatttcactccgttcgacctcgaccgcccggcacactggaatcgtcgcctgctgcgatggctcgccagctttgccccgcaacgtccgcttccttcccacccggctgacccagccgctgatccagggcttcgtccatga

SEQ ID NO: 527795 - DNA, 1143 bp, Stenotrophomonas maltophilia
atggcgaattccgctgacctgcaccgccggcgcctgctgcaggcggccgtggccctgccgttgctcggctggggtgccgcgcaggcgcaaccggcgccaccggcatcgcgctggccggcgtggcaggtgctgctcgacagcagcctgagccgcgacgggcgcatgatcgatcgcagccaggacgatcagcgcagcacctccgaagggcagtcctatgcactgttctttgcgctggtggccaacgaccaggccctgttcgatcgcatcctggcctggacgcaggacaacctggccggcggtgacatgcgccagcacctgccggcctggttgtggggacgggatgccaaggggggctggcaggtactggacagcaaccctgcctctgactcggatctgtggctggcctatgcgctgctggaaggtgcgcgcctgtggcggcgtccggcgttgcaggctatcgccgaaggcatgctgcagcaggtgcgcgcgcgcgagatcgtgcagttgccggaactggggccgatgctgctgcccggcccgcagggcttcgtcgaaggcgatgcgacccggatcaatcccagctatctgccgttgccactgctgcgacggtttgcatcggttgaccgcaagggaccgtggccggcattggcggcaaacacggtgcggatgctgcagcagagcagcccgcacggtttcgcgccggactggacggcctggcaggccggcggtttcgtggccgacccggtgaagggggcggtcggcagctacgatgcgatccgctgctacgcgtgggccggcatgaccgcgccgcgcgatccgctgttccggccgcagctggctgcgttgtccggcccgctgcagcgcctgcgcagcggcgctgccatgtgggaaaagatcgacacccgcagcgggcaggggcagggcgaaggcaactacggcttccgcgcggcgttgctgccgtatctgctggcccagggagaaaacgagcgcgcccgtgcactgcaggccagcctgcccagcgccgagcagcagcgcgccgatgccccggcctactactcgcagatgctcagcctgttcgggctgggctgggccgaagggcgctggcgcttcaacgccgacggcaggctgcagccgcgctggtga

SEQ ID NO: 527796 - DNA, 420 bp, Stenotrophomonas maltophilia
atggacgagcgccgcctcaagtacctgtatgccgctcttgcggcggtgttcggcctgcccagcctgttgatgggcggcgcggcggcgacgatgctgctgctgatggggctgggccagttcggccatggcaccttggcctcggtgaccgtgatgccgctgtggggcctggccggcattgccggctgcctggcctggctgtggctcagcgcgggctatctgctgcaggggcgggccggactgcaggtgcgcgcggtgtggtggtggctgctgctggccggtggcctggccgcactaccggtcatctggctggccgcgtggatcggatggcaggaggtcggctcggcgttggaagtgctgatgctgggcccgtcgctgctggtgccggccgcgatgctggtgtggctcaaacgccgcgcatga

SEQ ID NO: 527797 - DNA, 438 bp, Stenotrophomonas maltophilia
atgaatccgctgggtcgccttgcgcacgtcaggttgcggtggcatctgttgctgttttccattccgtgcgcgttggttggcgtgctggccacatgcgcgctctttatggtgtggctcgccaggccgcagccatccgaagcgttcctgatggctgccgccaactgggtggtgatgtcggtctggagtgcctatgcagctgtagtgctgggcgacagctggcggactgcgggtgtggaagggctacattcgcatgcaggcttgctggaggcgctgcccatcgtttctgccttccaggccgcggcggccgtggcgatgctgttcacggccattgggtgggagccagcagctctgctgtatacccccttcctgatgactatttgcgccccatgggccagtttgagctggcatatgcggtggctttcaaggcaggaggagtaa

SEQ ID NO: 527798 - DNA, 684 bp, Stenotrophomonas maltophilia
atgcgaacactgtgcgttcccctcgctctgtgcatcgcagttgccgggcatgctgcggcagagccctcgatcagccccgaacaggcgttcgagctttttaccaaggcggtactggaaagtgacgccgatgcgagtgcaaagctgcatcgctcaatggtggacatcaatcactacgaggcggaatcggtagcggacctgcatcagtatgctccggcacttgtccagtcaatggtagacgggctggtccagttcaaactcttctctgccaagtccgcccatgagtacggcacgttgatgaccgatgcgtatgcaggcacccaatgcagggcaacggggacacgagcggcttcgcagtatttgcgggaaaaagagaaagtcacggagatcatggtgcagttcagctgccaggtgccggctttcaacactgagagcggtgaggtgacggatgcggccattctgagaaagatgcgcaaaagcacgaaatatgccttccgcacatgggcggcaatgctcaaaagcggcgagaagcgcacgatgacgggtgaggcgatgctgactggagatcctgataccggttatttccccgacgcctacaacctgagatccctgacatcagtgctgtactcggcactaccagcagaacgggtggatccctttgctgagatggagcgggatgcggagtaa

SEQ ID NO: 527799 - DNA, 663 bp, Stenotrophomonas maltophilia
atgcggattccgtgcctcctgctcctgctcttcatcccctttgcttcacatgcaacgccgaccggaaagctcagccctgagcaggcgttcgacctgtttgccagggcactgcttgaaagtgatgctgaggcgggcgacaccctccaccgtgccatgcacgctgcccagcatggcgacgccctgctcgcagtcaaggctgcgcgcctcgttccagaaatggttgaggcgcttgcgaagggcgagattgacgacgacgtcccgcccgagttcgccgcggcgctcggcaaagtgatcaggtcgacgtacctgcgcagccactgccgcgcgacgtcggcagtgcctgtcaatgaaagcgcgcagggcctccagcaggtgacgttgtcattccgctgccaggttccggactgggacgcggcggcacctccgttgaccgacgaagtcatcagcagaatgagggccgacgcatcattcgcctatgggctgattacaaccacggtgccaacgctgccccgacgctcgattaccgataccgtcactctcacggctgatgcaaacggcaactactttttcgtcgatgggcaagcgctgcttactccgctgatccagtccacgatgccgatgctgttgctggccggtcacacccgatcgcagggtcagccatga

SEQ ID NO: 527800 - DNA, 567 bp, Stenotrophomonas maltophilia
atgccacctaacgcgcgatggactggacttctaccagcgctgtttgcgttaaccgcctgcctgcagcaagcggacagcgacgtcgcgcgcgagcctgcacgcagcaggctgcagaccgatgccccgcgttgcacggaggatgacgacatcgtggcctgcctgcgacggtacgcctctcccccgcgcaaggtattcacagcacgagctgactgcagtgtgttcacccagcggggtgactcggtggcgatcgaacccacgacccaggctgcccacccggcgcgttttcccgacagggtgcgcagcagcggcaaggtacacctgcagatgcgggtggaggccactggccgactggccggaatccgtgtactggagtccagcggccatccccagcttgccgaggcggcgatggccgctgccagggactggtgctatctgcccgcacaccgcgacggccgcgacaccggcggcgatgtggaggcatggttccacttcaacgtcgtgacttggccgcagagcggcaaagcgccacaggcagaggcgtctgcgcctcggtctccacctcgttga

SEQ ID NO: 527801 - DNA, 1098 bp, Stenotrophomonas maltophilia
atgctgcacccaaaccgcaatctgctgctttcggcgctgcttctgctcggcgtgtcagcttcgcctgtcgtgtccgcagatgaggaagcgccggctcccgcgcgtgccttcacacaggcacaggccctgcaggacctgaccgccatcatcgaatgccgtgcgcctgcttcggtgccgaagcagttgtcgccccacttgtgggcggtcgcgttgggcaacgaggtcacacgcccattcgatacatgggctgttgtcgagcagcccaacgcgtcactgcacgaggtggccctgcccgaaccgatcacggtgttcggtcactcaaccacgcgcattgctgttctttccgaggcagtgatggcaatcatcgagggcgtcacgctggaggagatgtcgcgtcagctggagatgcggccactgagtgcaacggtggcgccgcacatccacgtgcgggagctgtcacttcgcaacaggggcgacatcggattccaggtacgctcgctgaccgcatcgcgcatttccagccaccccaatgcggtgctgctcggttgtgaggatcgctacgacacacgcatggagcagttgcgcaggcgcggcaaggaacctgacgtggtgtttgcttcgggggtggatgttgccaccgagctcgatgacgtgctgacctgcagggccgatgcgctgcgcaactacacggcgggctgggcggtaggcatgtcagcgcacaccactgacgcgcgcttcaagggctggaaggatggggaggacaaagagggctatcgctggtggacgccgccggcgccggtgatgatcgccggcaggcccgtctcacgcttcgtgaaggtgggcttgaccctgtacgcggaactcgacggagacatcgccccggcgctggcagaagagtgggctcttccctcttacgatggctgggacgaagccgcctttgtcggcttccacgataccgacaccgctgccgacgggtggctggaagaccgcgcgcgcatcgtacgtgcctggggacagggcaaaaccctgcacggctgcgagtaccagcagaatcgtccggagttcggcgaacatccggacgacgatgacgaagcatga

SEQ ID NO: 527802 - DNA, 762 bp, Stenotrophomonas maltophilia
atgaacagcatgtacagatgcgagatctactgctcaatacctgatgaaacactagacgccccaacagtctacgaacgactcagcgaagtgctccatgcgctttccgaggtcagtcctgcattgaatggttgggtggaacattcacgcgggaatggcccagttccattctccgaaaaatcgcggttcatcgagatgcttgcaatcaacgcgcggcaggacggtgatgagtacccgacagacccctctgcagcgggcgcaggcgccaacctgaccaccgcgagaacgcacaaggaatggaaggctccggggtgtgccacgatcaactattggccctggtttggccagttgacgatggagatcgatgctccgatcaaagcattcggtgagtccgaagcacccatcatcgtacgtaggtgcgttgcggcgatagcgcaggcaatcgaagtcgagttcatctcaacggatgtcgtgggaccgaagcctgaaggcaagggatatgaaacctactacctcaaccacaggctgttcccccaccgccgttggctgggctggatgggcttcgtccctgagctggtgccacgcaggttcattccggaagccgccgtcatcgaagtggtgaaaggcaggggcacgatcatcgtggctgtagatgcacccttcgacctgcacaacccggaccacctcaagcgcgtgcaccaggtggaactgcgcatggccaacgcggggctgctggatgtcatcgatccgtcgctgcttgagtga

SEQ ID NO: 527803 - DNA, 753 bp, Stenotrophomonas maltophilia
atgggcgccctcccattaccactgcccttgcccccggtaacaaccccgggtggctgggaccccactcaggatgttcccgggcacgcgcctggcgggccgcctgggaatatcgcagacagccctaccctcggccaggtctggcacagcatcaaggaagcagcaggtaccagcgtcgattccaggaccgagccacgggtggagtccagcgacaccgactgctcgcagacccgcaaccagaacgactgcaatgcctgcaagctggcgcagggctttctggtacctgccaactatacgatcccgttgaagcagtaccgcgacttcgactaccagctgcgcatcgccaatcacctggcaggtccggaagtgttcacctatacctacggcggcactggactggaccgcgctcgtctgagactgacgggtcgcaagggcaagaacgaaattaccgttaccgagtggaaccacggcggtatccgctttgatgggttctggcggagccgatgcaccgttgtggaggcgaaggggcactacaagcagttctttgatgaggaaggaaagctgcaccgttgggcatcgtcgagcaggcccacagtcttggaaagttgggcgcgacagctcaactctcaaaggcgacatatccagtctcttggcaaacccgccaagcttgaatggcattttcttgaagccgagtgcttctccgcggcacaaaaatccttcagggccttctcaagccatctcaggcacacaccatga

SEQ ID NO: 527804 - DNA, 834 bp, Stenotrophomonas maltophilia
gtgagcggccaatacgcttatgcactgctggactgtgcgccggacgagggccgcgaagcgcagctgcatcaccatgccgcgcagaacgcattgatgcatcgctcactgttcacaggacaacccgaagaagacctcccattcgcttcaccgtatctgctcgaactaccgataggcgccatcgaacggcccatccatcactggttgcggcagctcggccggcagcgtgcagggtcgacctgcctgttctcggacgcaccgttcgaggagctcttccaccatctgcacgcacagctcgacatcgcccttcccgatggatcgctggcgctgatgcgctactacgacccgcgcgcgtggctgcgttaccgcgacgtactgacgacgcagcaacaacggcaactattcggaccgatcaactcgtggcagatcaccatgggcggcctgacatggacgctggcccgcagcgaactggagctgcaggcgccaatgatgctgacactgagcgttgaacagtacgcgatgctctgtctgccggacgcggccacattctgcagaccactctcggacgagacacgtagcgaatttcccgatgaaactgcacatctgaacgatgcagcgctcatgcaggcggtgtacgcaagctaccgccatgcggtgacgtcactgcatatcacccatctgcccacggtagtgcgatgggtgaaggccgacgtggcctgggcaccaggacttcgcaaccacgcggtgaccgccgtatggttcaagcggaccctccatgccaatgcaacggcagccgatctgctggcgctgcttgcctcccgctttctggccgactga

SEQ ID NO: 527805 - DNA, 393 bp, Stenotrophomonas maltophilia
atgaaaagacactggatcgtcgtaggcgacagcacccgcagcaacgggcgcgtcatcaccggatcgccgcataccgatatcgaaggcaaggcggtagcacgcgaaggtgaccgcgcgacctgcccgctgcatcaaggcatctttccgatcgtgcagggtgaccctaccctgctcatcgacggacatcccgtcgcgctgcacgggcaccacctcgcctgcggctgtccgctgatttcgacccagcagcgattggtgtatgtcaccgatgccaccttccgcgatgaaccctccaccccggcaccgatacagctgtctgcgttgaaacctgcggtctgtctggaatgtctgcgggctgcggccagcagtgccgccccattgctggtgcgtgcgtga

SEQ ID NO: 527806 - DNA, 621 bp, Stenotrophomonas maltophilia
atgcgcaagatcctgatcgtggccgctctgctggccgccgcccccttctcggcttcggctgacgccctgagctacacctatgtggaaggcggctggacgcaggtcaaggttgacgacaacgcactggacgaccccaaggtcgacggcgcctatctgcgcggttcgttcgcactctccgagcaggtgcacgtgttcggcggctggtcgcgtacccgcaagacctaccactacaacgacggttcgctgaagctggaactggaccagccggagctgggcatcggctaccacatgccgtggaccgaccgcgtcgacttcaccgccgacgccgcctgggtgcgccagaacgttgagctgaccgatcgttactacggctactccgagcgcttcaaggaccacaccaacctgggccgcgtcaccgtgggcctgcgcggcaagccctcgcccaagaccgaagcctgggtcaagaccggctacatggatggcggcaacaacttcaagggcacctgggtgggcaccctgggcggccagatcaacttcaccaggacctggggcctggtgggcgagatctccggctaccgtgacgtcacccagtactcggccggcgtgcgcgccagcttctga

SEQ ID NO: 527807 - DNA, 513 bp, Stenotrophomonas maltophilia
atgctcggcttttttctttgcgccaagcagccgagcgtgggctcggctctacagaaattcgcgttgcgattgcaacaagttgcatggagtaccgtcccgccagcagcgatagtgcgcgcttccttttctgagagagtgccgatgcacaagatgatgactccgctgacccgctatgcgcagttcagcggtcgtgccagccgcagtgagttctggtggttccagttgttcacttggatcctgatgactccagcctacgtgctgaccgtcgcggccgcgatcactgagtcatctacactttcgttactgggcgcgagcctgatgctgatgtttgggctatttctgctcgtgccgatgctcgcggtaacggtgcgccgtctgcatgacaccgaacgcacgggctggtggtacctgttggtgctcgtgccgttcggaagcattgccttattggtgttcctggttctgccaggcaccgcgagcgataaccgtttcggcgcgccggttccgcacgtgtaa

SEQ ID NO: 527808 - DNA, 507 bp, Stenotrophomonas maltophilia
atgaaaacctcgcacgcgctgtttgccgcactcttgttcggcgccgccccactggcccatgctgattcggccaacatcaccgttaccggcaaggtgttgccgggcacctgcaccatggccaatgtgcccgtggcgctggctgatatcgacgccaccgatctgaaggccgggcatgacaacgggctgaaaccggccgtgctgaacttcaccggctgcgtgggcgtgggcagcatcgagctgagcttcgacggtacggatgatgccgcacaggatgggcactggaagaacggcgcatccaccggcgcggcgaccggtgtggccgtagcgctgctggatggcactaccggcactgcgttcctgaagaaggccgccaagaaaaccatccccgtcaatggtgcggccacggccaagctggatatgcgcagcggctattaccgaaaggcaggcacgccgctggtcgcaggcgcagtcagcacccagatcaccgttaccgctgattacaagtag

SEQ ID NO: 527809 - DNA, 993 bp, Stenotrophomonas maltophilia
gtgaaacagcccgaacttcttcgttccagtgcccgcacccgcctgcgcgtcgtcgttgcggtgctgctgtcactggcaagcgcccatgtcatggcctgtacatcgtcgggcaccaacacggtttatctgaccgccaatcttaattcgaccgatgcgccgggcagcatcaccatgctctccggcccggccacctggatgaatggctgtggcacgccgcgagcgcatcagttggaagtgtcgctggaaggaatcggcctgaaggccgtatcgaccatcgactatcaaggcaagacctatgtcacgtatgagctgagcgcgacttcgcctctgttcttcttcccgatgaacattaaaacctccaatcccggcgttgatggtggtttcgagcgcattcccgccaaggaaggggtgggaacgccggtgacctcctattcggccaccgggaatcaactgttttcctacccgcacctgggtgtggtggcgcgtgcaggcatgcagccagtaccgctgacccagctcggcaccgaagtggcgcagcacacccagttcacctactccaaccggcacgtggtgtatgtgacagtgaacatccagcaacccacctgcaccctcagcgatgcggcgttcacgctcaccgaaatcagtgctgacgtagtgcgtgcggtgggtgacagcagccgtgagcagaccttcccggtgaagatgcagtgcgaagcggccggcattccggtgaagctgacgctgaccgatgcgaatgatcccaccgccaccggcagtctgctgaagccgactgcgcatgcgacagcggagggcgtgcaagtagaactgctgcgcaacggcgtaccggtgaacctcggccagcaatgggaccacggcacatcgggcaacggtgaacagaacatcgatctgcaggcgcgctacacccgtgtgccgggtgcactgaagattggcgatgtggaagggcaggcggtgatcaccgccacctaccgatag

SEQ ID NO: 527810 - DNA, 501 bp, Stenotrophomonas maltophilia
atgcagcccgttccttccacgctactcggcccgatcagccgtgtttcaccgttgtacccgcagtgggttaaaagcgatacgttcaccgtgaccgccaacctgaaagtgccgacctgcacattgtctgacacgccggtcacgctggtggatgtgggggtggccgatcttccggccagcggtcgcttcgcaggtgaacgcaccttcgacgtggtgatggactgcaacggcgccttcccggtggaaatggtgcttaccgatgccaacttgccgggcaacaccggcagccgtcttgcgcccaccgcgaacagcaccgccggtgctgttcgtgtggagctgctgcttgggggcgcaccggtagtgctgggccggccctggacgattccgctcacccagaacggaaagcagaacatcaccctggctgcgcgctactaccgcgagacgggcacgttgcacggcggtgtggtggaagggcaggcggtgatcaccgctacataccgctga

SEQ ID NO: 527811 - DNA, 402 bp, Stenotrophomonas maltophilia
atgagcgccaatcgctacccgttcctgttcgccaccctgggcgatcttgccaaccagctgcccgccgagattgccgagccgctggaaaccacgcttgctgccaaccctgcggccaatggcatcaccttgctgaattgcctgcaacgcattcgcgatgtggaagcagccgatggccagcccttgcagcggaaaggtcgttcgtctggccagtgcatggcgctggcacgcatcaaccgcgccaacgccgggctgacggtactgctggaactgctgcacgccagcgagcgcgtgcgcgtggatggcgaagaggcgcaacaggtgggcaacgacgtgcgcgagggcctgctgctggcctgccgggggttgtcggagtacgtggatacgcaggtctacgtggcctga

SEQ ID NO: 527812 - DNA, 1296 bp, Stenotrophomonas maltophilia
atgacacggcgcagccctgggccgcttcggctctacgcgcgctactgcgcggtgttcctgctggcacaggtggcattgctgtatgcaggcaccgaactgtggatgcgctgggcgcagaccacccatgaaagggccgaacatgccgaagccaggcgggtacacgccatgctgggtgagcgtctgttggcccagccgcagggtgatcggcgtgcgctgcttcgcgccatcgagcacgagaccggctacccactgcagttgctggccttgaatgagctgcccgatacgctggcgccggacgatcgccgtcgtctgcagcgggtgccgggtgcggtggtgctggaagaaggcagaagctaccgtcggctgggcacaggagattgcgtgctggcggtgggcgattggaccgacgccccggtggaggtggaagggcaggtgacatggatcgggttgtggttggcgctggccactgccgtggccgtaccgctctacttcctcatccaccggctgtggcatgacatccgcacgctgcagcgggcggtggggcacctgcgtgcgaactgcttcgagcatccggtgccacccatgcgcacagcgctgttgaagccgctggcgctggcgttgcaggacatggccgagcagatgcgcctgctgctggatggccagcggttgatgggccaggcgatggcgcatgaactgcgcacgccgctggcacgcatccgattcaccgccagcctgctgcaggccgcgcgcaaggatgtggtggagcatgacgcgctgctgcgcgaggtcgagaccgatatccagcacctggatggattgagcaccgcgggtatcgagtacatccggttcggccgtatgccgttggtcgaccgcagcgaggtggcattgcccgcgttgatggacgcggtggtggcgcatgtgcaggctcgcacagcggtggtgattcgctgccgctgtgcatcagggttggtggtgaatgcgcatgccctggcaatggaactggcactgcgcaacgtactggccaatgcgacgcggcatgcgcgtgatcgggtgagttttcacgcgcaggtggaaggcgagcgcatgtgcatccgcgtggaggatgatggccccggcattcctgttgcattccgcgagcgcgttctcatgccgtatgtgcggttgggcgaaggcagcggagggttcgggttgggcctggcgatggtcaagaccatcgtggagcgccacaacggcacggtggatattgctgattcgggcatgggtggggccatggtggtgttgaggttgccgttgtag

SEQ ID NO: 527813 - DNA, 1137 bp, Stenotrophomonas maltophilia
atgcagttgccattcaagcgcgcgcctctgctcgcgctgatcaccttcctcaccgcatgcacgccctctggcccggagaaagaggatgcacctgttaccgtggaggttcagactctgaccgctgaagacgctgaactgcacgtcgtgcttcccggcagagtggccgctgcccacgaggcggaagtccgcccccaggccgatggcatcgtcgcccggcgcctgttcgaagagggcagccaggtcgtctcggggcagccgctctaccagcttgacgacgccaccctgcgtgcaacccgtgacgatgcaatggcgcgcctggagcatgcccatgccacctgcgctgctgcacgcaaggaggccgtgcggctgaagcagctggcgggcatccaaatggtcagccagcagcaggcggaacgctcgactgccgcttatgagcgcgcagaggcagacatcaagcgggccatggcatcgctgcagacggcgaaggttgccttggggcacgcacgcatcgttgcccccatcagtggctggatcggacggtcccatgtgaaggaaggcgcgttggtcacctctcaccagcccactgccatggcgacggtgcgcgggctggatccgatgtatgtggacctgtcccaatccgcagcggaatggttgcagctccgtcgtgatctcgccgatggccacctgcaggacaatcgagcgctgcccgtggctatccgcctggaggacggcagtgccctccatcgtgccggcacgctgcagttctctgatgtgagcgtggaccctgcaacgggcacctatggcctgcgggtgcgggtcgccaaccccgacggcatgttgctgcccggcatgtatgtttcggccacgctcggtgccggggtgcgccgcgaggccgtgctggtgcccatgaaggccgtgacgcgggaggccaacggcgaaacccatgtcatggtggtcgacagcagcggacaggtgtcgcgccggaccgtgcagctggggcgggcactgggtgagcgctggttggtggaagatggcctgagcgcgggtgagcgcattgccgtgcagggtctgcacaagctgcagccgggcatccgcgttgcgccgttggaagccgctgctgaagttggggagggctga

SEQ ID NO: 527814 - DNA, 3129 bp, Stenotrophomonas maltophilia
atgtcgcggttcttcatcgaccgccccgtgcttgcgtgggtcatctcactgttgatcatgctggccggcggcctggcgctggcccgcatgccggtggccatgtacccggacgttgcaccaccgaccatcaccatcaccggaatctacccgggtgcatcggccagtgtcatccaggagacggtggtacaggtggtggaacagcagctgggtggccttgaaggcatgctgcacttctcctcgcaaagctactcctacggtggctacgcgatgatcacccttgtgttccgcaacggcatcgatctggaccaggcgcagacccaggtacagagccgcgtccagctggcgatgccatcgctgcccgaggccctgcagcgccgcgggctggcggtgaccaagtcgagtggcgactatctgcagatgctcgcattcgtctctgaagacgggcggttgagcgaggccgacgttgccgactatgtcggtacgacggtggtggatgccatcaggcgggtgcctggcgtgggccaggtacgggagtttggtggcaagtacgcgatgcgtatctggctcgatccggtcaggatggatcgctacaacctgtcggtggatgagctggtcagcgcaatcggtgcgcagaacctgcaggtaccgctgggggagttgggcggcgcacccgccgtcgagggccagcagctgggcgccttcatcgagggggcgtcgcccatgcgcaccgctgccgagttcgcccaggtggtcatccgcagcaaagcgcatggtggcgtactgcgcctgggcgaggtagcccgggtcgaactgggggcggagagctatgactttggcaaccgtctgaacggaaagccggcggccggtatcggcgtctcactggcgcccggggccaatgcactcgagacccgcgcggccgttgatgacgccgtggcggcgctcggtcccggtatgcccgcaggtgtccgggccgtcgttccctacgacacgacacctttcgtccggctgtccatccagggcgtgatcaagaccctgctggaggccatcgtcctggtcttcgtggtgatgtacctgttcctgcagaacctgcgggcaactctgattccgaccattgcagtgccggtcgtgctgctgggcacgtttggcatcctggcggtcatgggcttctcggtgaacatgctgacgatgtttgccatggtgctggccatcggcctgctcgtggacgatgcgatcgtggttgtcgagaatgtcgagcggatcatggtggaggaggggctttcggcgcgtgatgccacgcggaagtcgatggggcagattaccggcgcactggttggcattggcgtggtgctctccgccgtgttcgtgccgatggccttcatggacggggcaaccggcgtcatctaccgccagttcactgccaccttggtttcggccatggcgctctcggtcatcgtggcgatcatattgacgccggcgctgtgcgccacgctgctgaagccggtagcgcacggccatccaggcaccggcaaggggcgatggatcgggcgatggtttggcaggttcaacgagtgctttgatcgcaccagcgccctctaccagcgtggggtgaatggcgtactgcatcgcccatggcgtttcctgctgctgtttgccgcgctgacggcactgatggcagtgctcttcgtgcgcctgccgagctcgttcctgcccaatgaggaccagggaaccctggtggtgatggtgcagacgccgcccggggccacgcttgcgcgaacgcagaaggcactcaggttcgtcgaaacctacttcctcgagcaggatccggttgtcgaatcgatgttcaccgttgccggctacaactacgcaggcatgggccagaacgccggcctggccttcctgcgattgaaagactggtctgtgcggtccggcgcggattcggcagacgccatcgtggcgcgcgcatcgagcgcgctcgccctgcacggggatgccagcatgcatgtgctctcgcccccgcccgtgcccggcctgggtacggtttccgggttcagcttcttcctgaaggacgacgcggggcagggacatgctgccctggctgcggcgcgcgaccagttgctcgccctcgctggaaagaatcccagactggctcgaatgcgggccaacggcatggtcgacatgcccgtcctcaagatggacgtggatgctgcccgcgcacgttcgcatggcctggacccggcggttgcccttggcaccctgagtgctgcctggggcgggcgctacgtggccgatttcgtggatcgcgggcgcaccaagcgcgtgtacgtacaggcagacgctcccttccggatgaaaaaggacgacctgaaccgctggtccgtgaagaatgaagacggcagcatggtgccctttgcctccttcgccagtgcggactggtcacatgcgtccccacggctggagcggcagaacggagtgtctgcgatggagatccagggcgagccggcgatgggtgtggcgtcgggccaggcgatcgcggaaatcgagcggttggccaagcagttgcctgcgggcttcagcgtggaatggacgggcagtgctgtgcaggagcgggcgtcacaggcacaggcgctgctgctgtttgttctgtcactgctggtggtgttcctgtgtctggccgccctgtatgagagctggacgatccccacagcggtgctgctggcggccccgctgggcatcctcggcgcggtactggccaacacgcttgtcgggctggaacgggacatctatttccaggtggccatgctgaccaccgtgggcctgaccagcaagaatgcgatcctgattgtcgcgttcgcgagggagcacatgcacaacggtgccgaactggttgatgccacgctgcatgccgtgcgggaccgcctgcggccgatcatcatgacctcgttggcgtttggccttggcgtgctgcccctcgccttggcgagcggcgcaggttcgggcgcgcagcgggcgatcggcaccggcgtgctgggtgggatgtttgtgggcacgctgctgggcctggtgttcgtgccgctgttctttgtcatcgtgcagcggacgtttggcggtcgggcgccccggcggcaatga

SEQ ID NO: 527815 - DNA, 402 bp, Stenotrophomonas maltophilia
atgagcgccaatcgctacccgttcctgttcgccaccctgggcgatcttgccaaccagctacccgccgagattgccgaaccgctggaaaccacgctcgccgccaaccctgccgccaatggcatcaacttgctggactgcctgcaacgcatccgcgatgtggaagcggccgatggccagcctttgctgcggaaaggccgcgcgcctggccagtgcgtggcgctggcgcgcatcaaccgcgccaatgccgggcttacggtgttgctggaactgctgcacgccagcgagcgggtgcgcgtggatggcgaagaagcgcagcaggtgggcaacgacgtgcgcgagggcctgctgctggcctgccgtgggttgtctgaatatgtggatgagcaggtgcaggccgcctga

SEQ ID NO: 527816 - DNA, 549 bp, Stenotrophomonas maltophilia
atgaaacgcgctacccgtcttcttctgctcctgtccattggccttcttgcggcatgtgatgccatcccggatacgcgcggctatatctatccaaatgaccgctatctggcggaaaacgtagcaaagtggaacagcatggtcgacgcggttaacacctggaacgacggcccatgggcagaggagttccatgaggcagttgatagcggggatgacttatccaagtttcgctttcgactgcagaatgcacacaaggacgccgtcgagcggcgagtatctgcagcacgcatgacacatcgctctgaggcagatgatctgcaccagcatctgcttgcatcgctgcagagcactgaagacatgttctccatcatggtgtccctcgcagagctgccggccggctacaccacagagcaatctgcatcgattctggcgcgtttggaacctgccattgagcgtatggatgcagatctccaaaggctgagtgatgctcaggacgcctttgccaagtcggagaaaatccggctcacgaccagtgaccccacccgtcactag

SEQ ID NO: 527817 - DNA, 561 bp, Stenotrophomonas maltophilia
atgactacggctcgaacctggcgcggacgggtattcatcggtacaagtctcgacggcaagattgcccgcgacgacggcacgcttgattggctgaccgacttgccagcacgtcaccacaacgtcaacgcggcgatcgagcatccagcgctgatctgggacacgttcattgagaacatcgacgccatcgtcatggggcgggccacctacgagacggtcatcgggtttgaccagtggccgtttgagggcatgcaggtggtcgtgctgacgacgcgtggccagatcgatgacccgcgtgtgcgagtgacaggatctgtcgaggacgcgagccggcttcttgagacactgggcgtccaggacgtgtacatcgatggcggccgcaccatacaagcgtttctgcgcgcggatctggtcgacgagctgacgatctcggtcgcacccgtcgtgcttggggcggggcgttccttgttcggtgagttggaaaccgagctgcaactcgtggtgcgggggagtcacgtgacagacgatgggctggttcgcacgacatacggggtcgttcgttga

SEQ ID NO: 527818 - DNA, 2439 bp, Stenotrophomonas maltophilia
atgatccgccgtatgccctgccgtaccccctccccttcactgcgaccgcttgcacgcagcctgctgctggccctggccacgcttccggctggcgctgccttggccggtgacctggatgggaccaagcacaccgtcgttgccggtgacccgtctgaagactggcgggtacgtaacggcggcgagctgacgctggctacgggtgcgcaggccggttacatccaggccgaagaggattcgcgtctggtgatggacggcgcaacccttacacgcccgctcagcggcccgaacgccggcttgaaccacgccgtgcgggtattggacgacgcccagctcgaagcccgcaacaccaccttcctgggcggcggggtcttcgtcggcggtgccagcgcgtcggcccatctggtggacagccgcatcttcgtatctaccgccagtggtagtgcggggtccaccaccggtatcgacatcaccagcgtgggcggcacgttgtctacggacccatcaatcacaatcgagggcacgcaggtacaggtggaagatgccagcgccccccttcgaccactgaacagcggtatcggcgcgcgaatgtcgtatggccgagtgaacattctcaacggctcctacgtcgagggcgccaacgtaggcgccttgatcgtggggctgaatactggtgaaggcgcaggcgccacgcccccgcagctgcggatagatggttccaccgtgaaatccggccggggcgcggccattcgcgtggcacccttcagggatgattcgaatatgcagatcaccgttgccaacggatccaacctgatcagcggcgatggcaatctgctgctggtggagtcctacgatggaagccaggccaccggcgcggccaacattaacttcaccgtggacgattcgcgcctggctggcaacatcaccctcgatcaagccaccgccgccaacagcagcctcgacgtgttcctgcgcaacaaggcgcagatcgatggccgcttcaccaatgtcaccacggccgacatcgacagcgatagcacctggctgatgaccggcgacagcaatgtcggcgcactcacgctgggcgctaccggcaccgtcgcactcggcaacggcagtaccttcaataccctcaacgtcgataccttcaccggcaacggcggcaccctgctgttcaacacccagctgggcgatgacacctcggccaccgacaagctgatcgtcagcggcgacaccagcggccaggccaacgtgcgcgtggtcaatgccggcggtgccggcgccaagaccgataagggcatcgagctgatccgcgtgggcggtgcgtccaacggccagttcgatctgcaggggcgcgccgtgggtggccagtacgagtacttcctgttcaaggacgccaccaacggcggctggtacctgcgttcggagctggccaccgtgccggacccgtgcgtggtggacccgaccctgccgcagtgcaagccgattgtggacccggtggacccggttgatccggtcgaccccacccccgtgctgcgcccggaaaccggcgcctacctggccaaccagttcgcggtggaccagctgctgcgccatggctggcgtgaccgccagggtggcagcttcagcgacgacggtgtgcgtggttgggcgcgcgtggatgccaaccagagcaagttgggcgcggtgaatgaccagctggacctgcgcgtggaccgctcacgcgtgcagctgggtgcggacatgggcgtgttcgacaacggccgtggccgcctgggtgtgatgggtacgctggcgcagtccagcgcgacctcgcgttccgagctgaccggctacagcgccaagggcaaggtggaaggcggcgcgctgggcgtgtacggcagctggaacaacgatgccctgtacgtggatgccagcgtgcagcgtggccagttccgcaaccgcgtgcagggcgaaggcctggccgaggagcgttacgactcggatatctggcagagcgcgctggaagccggttaccgcatcggcatcggccagatcggcactaccgccgtgagcctgcagccggaactgcagctgatctacaccaacaccagcaccgaccgccacgaagaaaccaacggcaccgtggtgcgcgcgctggacaacaacggcctgtccggccgcctgggcctgcgcctgcagggcgaaggccacagcaccgctggtgcctcggtcagcccgtatgtggtggccaactggtaccgcgatggcgccaacaacggcatcgccttcgatgatgaagtgctgaaggccggcatcccgcgcaatcgctatgaactgagtgctggtgcgcgcgtgcagttccgcagcggactgagtgcgtggggtggtttcggtgtgatgcgcggtgatcatggctaccgcgaagccacgggcaacctgagcgtggcctacaagtggtaa

SEQ ID NO: 527819 - DNA, 3264 bp, Stenotrophomonas maltophilia
atgacccacccaatgcacccccgccgctgcgcgctggccttcgccctggcagtcgcgctggccgcacccgcccacgcacagcaggtcgtggccgatggtgacgagcagacacccgccgcaggcgactaccgcaccaccgatccggttgaaccgggcaacccggctggccacgcgttccatgtgctcaacggcggctcgatcattccgctgggtgaggtgaacctgcataccgagggcatgagggccaccgctgcgcgcgttgaaggcaggggcagtgtcctgaggttgagcggaggcagcatcaccacccaaggctacggtgctgccggcgtttcagtgggcacggggggcaaggcgcagctggaaggcacacgcatcaacattcatgccggcgaaggcgcaggcctgctgaccgacggtggcctgatcgacgcatccaacgtccacatcactatgcatggcgcactgggaaagggtgtcagcgcacaggcaggccgcattgaactgcgcgacagcgtggtggagatgcagggcacgtccagcaaggcgctggatgcctcgggtggtgagatcgtggcagagcgcgtgcgcattgaaatggccgccgccggtgagggcatttcggccagcaacggcggcaaggtcagcgtggtcgattcgcagatcaacggtacgggtgcgggatcgagcggcgtgggcgttgcggcgggcagcagtgtcagcctggacaatgtcgatatccagctgaaccatgcgcgctccggccctggcatgaccgtagccggtgaggtggacatgcggggcggcagcatccacaccgcgggcagcaacagcacggccatcacctttgcctcgcgcggcggcaaggtcaccctggagggcacgcaggtgagcgggcaccatggcattttcattcgggagaattcccagctcttcctgtatggaagcaccgtcagcgccaccgccgtggggcttgatctgaatagtcgcggctccaccgccgtggtggagggctcgcgtatcgaggcctctgcgggcgatggcatccgcatgatggaggacggaatgctcacgcttcgcggcggctcctccgtggtgagtggcggtacgcagaagaacgcgttgtacacccgtggcggccgcgtgctattgcagtcaagccagctgaccgctcgcggctacaacagccatggtctgttcgctgagggatcgctcctgctgcgcccggtggtggacgcgcaggatgcggtcatcacgacccacggtgagggcagtatcggtgtcatctcgcgggaaggcgctaccgtcaatctggctgacagctgggtaacgacgcacggtgccagttcctatggtgttctggccggtggtacgggcgagatgagcctgaccaacacccacgtgcgcaccgaaggcgaggatgcgtgggcggcggtggtgaacaacgatggcaagctctccatcgatggcggctcgctggtcagcgcccagcacggtggcatctggatgcgcagcagccgcgaccccggcctgaccctggccaatggcgcagtggtatccggcggcaatggcattgcactggcgctggatgcggccgtggccgggcgcttcgatgtgaagctggacagtggcgcggtgatgatcggcgacattgtgatcacccccgaggacgaagacgccggcctggtgccgcagtctgaagtgcatgtgcagttgaccaacaacgcgggctggcatggtgcgtcccatcttgtgcagggcatggcactggatgacggcagccagtggatactcaatggcaatgccaccgtgcaggatctggcagtgcgtaacagccaggtcgcgctgtctgatggcagcggtcgattcaacgtgttgacggtggacggcgacctgcacagcgaaggcgccaccttcctgttcaatggtgcgctggccggtgacacctcggacatcgatcgcctgcacgtgcgcggtgatgccagtggcaatgcgtccatcgtggtgaacaatatcggtggcgtgggtgcccctaccttcgacggtatccagttgatccgcatcgacggtgcgtcgctggcggattacgcattggcaggccgtgccgtgggcggtgcctacgagtacttcctgttcaaaggcggcctgctggacccgaatgatggcaactggtacctgcgttcgcagtggttcgatatctgcgaggaggacccgaacgcgccgggctgtgtggtggaccccggcccggacccggatccggtggatccgatcgacccgatcgacccgatcgacccgatcgacccggtagatccggtagatccggtagatccggtagatccgccgccggtgctgcgcccggaagcgggcgcctatctggccaaccagtcggcggcagtgaacatgttcgcgcaccgcttgagcgaccgcatgggcgcggtggcgatgggcgaggaacgcgccgcatgggcgcgcgtgggccgcagcaatgccgatttcacagctgtgggtgggcagttggcggtggatggaaatacgtcggtgctgcaggtcggcacggatgtgtggcggcgcggcaatgccgcactgggtgtgatgctgggcagcggccgtgcggacaacacggtggtctctgacctgaccggatacagcgccaagggccgcgtacgcggcacggcggtgggcgtgtacggcacctggcttcagcaggccgatggcagcgaaggcgcgtatgtggacgcacagctgcagtacgggcgtttcagtaaccgcgtacacggcattgcgctggaccaggaaagctacgattcgcgcatgcgcagcggctcgctggaggcgggttacaccatcaacgtttggcagggcgggtccagcaacgtgtatgtgcagccgcagatgcagctgacttataccgactacagcgccgatcgacacgtggaaagcaacggcacggtggttgatggcgcagcggcaggcgggctggccggacgcgtgggtgtgcgcgcgttcggccagcacgcaggcatgggtacgctggtgcagccgtacctgggggtgaactggctgcgcagcagtggccgcaatgccatcgacttccggggtgaaacgctgcgggccgacctgccgcgcaaccgctatgaggtgcaggccggtgccgagttgaagatcagccagcgcctgggggcatggggtggcctgagtgtgcagcgcggtgaccacggctaccgcgatgtgggcgggcaggtgggtgtgcgcctggcctggtaa

SEQ ID NO: 527820 - DNA, 876 bp, Stenotrophomonas maltophilia
gtgaccccctcttccctgcttcctcttccccaccgcgtggcctcgatccggcagcgactgctcgatcacgcgcgcactcgcggcgacgacttccagttcgtgctggacaggttcgccgttgaacgcctgctctaccggctttccacctccacgttccgcgaccagttcctgctgaaaggcgccatgctgttcgcggcatggttcgatgcgccgcaccggcctacacgggatgccgatttcctgggattcggaagcactgagccacgccacctgctgcacatcacgcactcgctctgcgcaatgccgggtaatgacgggctccgcttcgatccagagaccatcaccctcgacgccacccgcgaagaggcggcatacgagggcctgcgcatgcgtctggtggcctatctgggccgtgcacgctgccatgtgcaatgggacgtagggttcggcgacgcggtgatccctccgccgccggagatcatctatccggtcatgctggatgaacttcccgccccctgcctgcgcgtctatccgcgcgaaacggtgttcgccgagaagctggaggccattgccgcgctgggtattgccaacagcaggatgaaagacttcttcgacctgctggcactggtacgtgaggacgccatggatcgcaccagcctcgcagccgccatagaggcgacgtttgatcgacgcggcacccctgcgccgccacctctgccctatgggctgacccaggcatttgccgcagatacccagaagcaggctcagtggcgcgcgttcctgcgcaggaaccgcctgcccgcaccagacctttccacggtgctgaccgagattgccgactatctggacacccacgacacaaccgtacagccctga

SEQ ID NO: 527821 - DNA, 603 bp, Stenotrophomonas maltophilia
atgaccgctgccgaggccaaggcccgaaaactgctgcggcgtgcaggcagcctgcgcgcccgcgaactggtggccgcaggcatcgcccgcgtccaactgtcccgtctggtcgaggccggcgcgctgatccggttgtcgcgcggcgtctacgcgctgccgggcagcaacaacggcgaggccgatgaagggctgcggatcattgcagagcgcatgccgaaggtccgcctctgcctgttgagcgccctgcgtgtgcatggcctgaccacccaggcaccgtttgaactgtgggtggccatcggcaacagcgaccgaccgccccggatcgactggccgccgctacgcgtggtgcgcatgtcggcaacgaccctccaggcggggctggaagagcgccgcgtaggcgcacgccgcgtatacgtcagcaacgttgcgaaaaccgtcgccgactgcttcaaattccgcaatctcgtgggtctcgatgtcgcaatcgaggccctgcgtgacgcgcttggcaaccgcgccaccaccccggatgcgttgatgaaatatgcacggctctcccgcgttgccagactgatgagaccgtatatcgatgccctggcgtga

SEQ ID NO: 527822 - DNA, 585 bp, Stenotrophomonas maltophilia
atgatccggctctccttcctgctgttgctgctgccgctgtggtctgccaccagcgtcgcccacgcgcaatccacgcgcctgaaccgctgcaccgatgcacagggccagagcgtgtataccgaccgcccctgcgacagcctgggtgcacagtcacggctgccgccgcctgcgcccaccggcagcaccctgcagcgcgacaccctgggtgcacgctgcccacggcggctgagcgagctggtggaagcactgcgtaccggcatcctcagcaacgacgtgaaccggctgtcctcgctgtacctgtggggcgcggtctccgacgccggcgcgcagcgcatcctcggccagctggaatcattggcgcggcggccgctggtggacgtggtgccggtgtatccacggcgggaacaggacgcttcgcaagcgctggagcagggtgatccggtgccaggctccgagcccgaaccggctgccgcgcggcatccggtcggcctgcgcttggagcagacgttgccgggcagcgttgcacgtgcctccaccgtgctgggattgcggcggcagtacgggtgtttctggatcacgttgtga

SEQ ID NO: 527823 - DNA, 636 bp, Stenotrophomonas maltophilia
atggctgtctggacaaggatgatcccggtgttgctggcaggcatcttgcccgccgccacggtgttggcggcgaagccctctgctgacactgcgtgtgcgccattggccacggtttccggacttcgcgatgcgagcgtgactgcattgtcgatgcagccccgggacggacgctgcgtggtcgaggtgacggcgagcgacggcaaggggctgcttcggcagcagcagatgctggaggtactggcgcagcatgcctgcgcagcgcctgcggaggtgacggccgacaacctgcgtccatcactgctgctgcgcacaccgaagcgatgtgctgcgcgccgcagccaggacctgttcgccggcgaaggtgttccctggttgcagccgcgcggaaagctgccgcgttatccgcgcgaagcgatggatcaggggctttccgggcgcagcctgctcaaggctctggtcgatgcgaacggcgcagtggctgcggtgatcgtggagacctccagtggccatgcggtactggacgaggcggcggtggaagagctgcgtggttggcatttcgtgcgcggcgatgcccaaagcacggtgccggcgctgaccattgtgcgcgtgccgatgcggtatgagcttgtggagtga

SEQ ID NO: 527824 - DNA, 486 bp, Stenotrophomonas maltophilia
atgcgctggccgtggtccgccgcaccatcaccccggcttgaagatccacaggccgatgtactgctgcaggacctgctgtcacgcgacggtgcacgcatcaccgacgcggcacgcacggtcgcacggctgttcagcgcgtcgtcgctggaggcgctggcggtgcacacggacctgattgaaaaatgctgccagggcatcgcactgggcggcatgctgatcagcaaccaggcgcacctgaaggcggccctgcagcggctgcgctactggcaggcacgccagggctgcctgtgcgcgctcaatcccggctatccgttcttcgatccccgtcgcctgcttgaacaggggcagatgcagctgctctcggtgcaggacgccgaggatggatggggcgactgccacaccgttgcctgcatgcagtgcggccagcactggcaggcgatcgaccgcgaataccattacccctggtgggagtggaaagccatctga

SEQ ID NO: 527825 - DNA, 657 bp, Stenotrophomonas maltophilia
atgcatggcgtggcagactcgggtcaacagaacgcagcacaggggagtggagtggcctatcagcggatgattgcggcgggtctgcttgccggaatgatggtggtcgctggtccggccctggccagtgaggaccgctgtacacgcgggcaggccgtgcgggacttgatcgatgcgggcatggtgtcgatggcatcgcatcgaaagggcgaccaatgccgtttcaccggggtcgggtcggatatccgcgcaacgtggcggcaggcgctgttcctcgccgcgctggcgggcaactgtcgcggcattgccttggaagtggatccgaagcaggacacccgcatgggcatccgcatacccgagcgctgcctggtcgataccgacccgccggatgcgccgccggtgggatggtggccgctgtcatcgcctgccccaaggtatccgcaggaggcgtacaagcagggtctgaaaggcacgaccgtggtgctggtggtgatcaaccgcgaaggccgggtcaccggcaggatcatcgccgagtccagtggccatcccacgctggatgcggcagccgtcgacgcggcatcggcctggacgtttaccagcaagcgaggcgacccgcccgacatcagcctggccaggattccggtcaacttcgacttctga

SEQ ID NO: 527826 - DNA, 255 bp, Stenotrophomonas maltophilia
atgaaaccgcaggacatcctccccgatcaccaggacgacgtgcacgtgaacggcctgaccgtgcgcaagggcagcgtcggcgctttcctcgccagcgtgcgcgactggcaggatcctgcgggcagtgctgccacccgtgccgcggcagaggtcgatcttcgcgatctgctgccggcattgcacgcgctaggccttttcagagtaatgacggcgcgcgatccggtcctgcaacggctgatcgacgcggcagcctga

SEQ ID NO: 527827 - DNA, 789 bp, Stenotrophomonas maltophilia
atggcagatcagccaacccaagtgcctttgatcgatcccgcactggccgatgcggccacagggccgtggctgctgggcgtacagctgaccatgccggggacgcgacgcacgccgcgtcaccagcacgcacgcgggcagctgctgggtgcgcgccgcggccttatgagcatcgaagccggcgaccagcactggctgcttccggcgggacacgtcgcgtgggtcccgcctcgcctgccgcatgcattggccagcctcggtgacttcgacggctggagcctgtacttcagtacttcggcctgcgcgccattgcccactgtaccgcgcgtgttccagcccagcatgctgctgcaggcggcggtgccacgcgctctgcagtggaggcacggcgcattgggggatgcgcagctgaggctggccggagtaattggcgatgagatcgcagctggtcttccgttgccgctggcactgccgcagccacgcgatcgccgcctgcgacggatcgccaccgcgctggcccgcgccccacatgatccgcgcagcgtgcaggactgggccgctgccaacggcctgtctggccgcagcctggctcgccattggttggccgaaacgggcatgccgctcagccactggcggcagcggttgcgcgtactgttggcattaccgcgcctgctgtcaggcgaaacggtcatcgaagtcgcgctgtcgatgggctatgaaacacccagtgcattcatcgccgtgttcaagcgcgagatgggggtgacaccggcacgctatggtgcggggtga

SEQ ID NO: 527828 - DNA, 780 bp, Stenotrophomonas maltophilia
atgttccttgcatttgcacagtctgcttcggagaccgaagagggtgtcatcggcagcggcggttatctcgccatcgtggcggtaatgtcacttggcatcatccttcctacgtggcttatatatctgagacatgacctcttccagtacacccactacccggtccgcttcaatcgcatcacccgcaagatctacttcttcaggcacaacggccctggaggcgtgacggtcgtgccctggggttcgccttacgctttcttccacatcggccggggcgcacagaaccgtgagctgcgtgatctcaggtgtcaccttcttgaccgcaatcagcagatacagcagaccttcaccgtcggacacttctggcatcacgacgatcacattctcgaggaatgggcactgatctgccgctacatgcaggacggcccggaaaactgttacgacgacccacgtgacagggtcatcacgctctcgccggacccaacgatccgcaactgctggctgatggtcatcctgatgatgggcacggcactgatgccgttgcgtaccaacctgatgttcccgatctatggcgcgctgacgctctgccgatggctgactttcaagacctgccgcaagccggtcttcccacctgagatcgaggcggaatgccagattgatcctgaggatccctatcgacttccagagccaaggttcatggctgaattcgccagcgatccggacatctatgcgcgggcgttggagcgtcacaaggaacggatgatgtggcgtccagaggagtag

SEQ ID NO: 527829 - DNA, 2448 bp, Stenotrophomonas maltophilia
ttgaatgaatacggcgacctcagtgcgttcgacatccgcgaccagaccccgccgccgcagaacgatacacggccggcgaggtgctcgcgccacggcgaaacgctgctgtccaaatgcatcatcgtgcccgatgccgcccaagcaaccctgttgtggctggcctacagcagcgcaccgtggacgcgcagggtgtgggggatgcaccaggaccccgcctatcgccagcggcacatgcgatgcattgacgttgccgcgtggcgggccggtgggcagccgcagccacaccttgccgaactcgggcaagctcccgcgctggtggctgaactccatctcgccaaaccatccacgacattgacagtctcccgcaatgatcggggagtgcagggcataccggcgatcaacgcagttcccggtgtgcatgcgttcgaatacagcctggatcaatgggcaaactactccaccgcgcaggtcgaccagttgatcgcgcaggcaggcattgctgctggccacccgcaggtatcgccgcctgcgctggtggcgctggacgatccgatcggcatcatttccgatctcaaccagctcgccatcgaacgcattcttgaatgggaggccgagcctgagcggcgggagagggtccagtctgcctcgtccatctcgctgatggagggcgccgtgcgacagggggccttcgaagacgtcgggtaccgccgcagggaagcggccctgttcggtcgtggcgtggtcagcatactgggcggaaagaccaacgcggagcagctggccaggccactgcaagcgtggaatcacgacatatttgctgtcgaggatgaggaggcggtgctggcccaggcagagaagtcctggcgcaagtacagccgtcacctgcgcaaggccgatgcgcatacccactggttgaagaagatctacgcgcctgcgcaggagcggttctatgagcacaccgtggccgatcttgatcgggcaatgatcgcatggtggcaggcgcctgccttcaagcagcacatgcagagcaacttcgacagcaaggacagcaccagcggggtgctctaccaggaagtcgtgaccaacctgctgcgtgactcagcctcgcgcggcctcatcatgggctatctgctcgagcagctgcagctggaagatctgcaggaccccggagccatcctcctgcgagcacagatgtggaaccaggatgcgttgctgaagacctggaagcagaccatggagaaggccagtgtcgcgccgggcacgcgggactggctgacagcggccaacggcctgtccaacgcgctcaaggcactgctggatgcagaatccgccggaaagctgagtgcgatgttccaggggacggcacggctggtggagcagctttcagggccactgacgcgaatgatcggagccggcgtcaggaaggcgttcgagggcagcgccatgctgttgcccacccggatgcaagtggggatgctgaccgcactcgcccagtcggcatcgccggatgccgagctggtggacctgagcggatacacgacgcccaagcgcgcgcgcaatgctctggcgatggccgtcagcgaacgcgcaggcttgaacgcggccagccaagcacgcgcggtggcagcgcacgccgttgctgcggctgatgccgatatggacggaaagcgtttcaggatcggactcgttgccctggtggacagcgaccagttgcggttgttcaaggcgctgaacgcgaaagcggtgatcaccggaacgtcgcgccatgcagagctgtcacgaacgctgaccaccgtcgatatgtatgacgcgatacggggcagcttcgccaaagtcggtaacccctcgttcgcctatggcacggccagcctggtatttgcctccgccagtctgttcgaactgagtcggcagtacagcaaggcactgccgcgtgaccgcccgctgctgggcgccaactttgccgctggggtgggtgcgctggtgggagactcggcgatgctgttgggtgagatcggatcgaagttgccctggttctcgcagaagctggcggagccgttggggcgatgggcggcctatgctcagactcgtgcagcagccgtctacgcgtcggggcggtggttgagtgggattgctggcatggtgttgggcggattgacgatctacgaaggggcgcgtgagtccaagctcaataaagcatacggttttgggctcggtctcagcggtacattgtcagtagtgtcctccttgctggttctgttcggcatggctataccgttagcgatcattctgatgatcatcgcggctgccataactgtggttgtcgcgtggttcaagccggacgacaccgaacgctggatggatcgggcgcttcacttcggaaagaatgccgctggggagttccaaggggtagatgagcagatgcatgaattgaaaagaatcaggttgtaa

SEQ ID NO: 527830 - DNA, 258 bp, Stenotrophomonas maltophilia
atgactggactcgaaagcgatcccgactactgcccgaactgcatcacgtccggattgccgctgctgcttgcgcgctacgcggtggcgcgggcagatgcggaggtccgtgaggcggcgccggtgctgcaagcgccattcgatggcgttgcgggcgagcagccgttgccggaagtgtctgcacgttatgcacttcgcctcctgcgcggcggctatgtctacagctaccaccaggcgcgcgatgagtggagggcatggtag

SEQ ID NO: 527831 - DNA, 849 bp, Stenotrophomonas maltophilia
atggacctggactcaccagacgcggcccctgtcgacatggggcaccgcaccttcctcgcgcagacgcatggcatcgtcgatccgacgcaggtcgctgccgcacagttcgccgatcttcccgtcgaaccgctgaacccaccgctgctgggcaggcgactgcacaatccccccttgctggtgccactgcatgcactgccttggcagacgcggcttgaactgcttgagcgggccgatgcccagctgcgtgatcgcggccggccgctgttctgcaccctgcttgagagtgacgtaccggaccgggtccgaaaccatctgatgaaccggatggcccttctgcgaccgcatgccggaagggtgttgttccgcatccacgacgcacgggtgttccgacaccttcggtggctgctgggtccttcgcagatggcacagttgatgggaccgatctcggcatggacctggcatgagccgctgggcaacacgtggcgtactcacccgcggccggttgccgagggtccgcccggccctttgatccatccggaccagtggagtgttctggcccaggtcgcctgcatcaatggttgcctgagagatctttccgaagagaggggcggccatgcaagcacgctgctgcctgcggtgctgcaggcgatcggcgaagcccagagcatggggctgcaggatctggacgatcagcaggtgtatgcgtgccagcgactgcgcggcaccggggatccggccgagcaggcggcactgaacctgcggctccagcgtgtccatcagcaggggatgtcctatcgcatggcctgcgaactggaacgccaacacggtctgcagacggaggcggcatga

SEQ ID NO: 527832 - DNA, 486 bp, Stenotrophomonas maltophilia
atgcacgcgtggtacctcggtggcctcgaccaccgccctttccagcacctgttcgagaagaacgacactgcgcttgccacgctgggcatccagcgccgctgggccggtgatggcggcggccatccctgccggatcagcctgagcgacccgcccagtggcagcgaactgctcctgctgtcgcatgtccatctgcccctgcactcgccctatcacgcgtccggcccgatcttcgtacagcgcggcgtgacccggtgcgtgctgccacccggcgtggtgcctccctatgtgcagcggcggatgatctcggtgcgtgcctacgaccggtctgcgctgatgctgggtgcccaggtctgtgcgggcagcgacgtcgccgcgcagctggatgcgctgttcgccaacgcggcggtggcgttcgtgcagttgcacaacgccgcgcatggctgcttctcgtgccaggcggacagggtcgatgcacaggccgcgtag

SEQ ID NO: 527833 - DNA, 885 bp, Stenotrophomonas maltophilia
gtgagcctcgcctcgcctgcgggtgccttgcccaccagggtgctgatcctcgggctgggctggagcgggcgcgtgctggccgcgcagctgcaggcgcggggcgtgcacgtggccggcacggtgcgcgatccggcgtcggcgccgcacgacggcgtgcggcgccatcaactgcgcacagacgcgacactgtcaccggctctgctcgacgatgtagcgcaggccgacgccgtgctgtgcagcgtgccacccgacactgaaggcgatcctgcactgcgcctgttgctgcctgcactgcaggccagccctgcgctgcgctgggtcggctatctgtcgtcgacctcggtgtatgccgaccgggccggcggctggatcgacgaaaccagcgtggcggacgccaccgaagtcgccggcctgcaacgcaggcaggccgaagcgcaatggcgtgcacttgcggaggaacgcggcatcgcctcggcggtgatgcgcctgcccggcctgtatgggcccggtcgcaatgcgctgctgcagctggcgcaagggcgtgcccgccatgtggtgcggcctggcctggtgttcaaccggctgcacgtgcaggacctggcggcggtggtcatcgctgcgatgcggtggcccacacctcatgcggtgtacctgccggccgatgatgagccggcaccgccgcaggacgtgctggccttcgccgcgcagctgggcgggtttgcgatgccgcctgccgtggcgtgggacgacccagcgctgagcccgaccttgcggcgcttctatgaaagcaacaagcgcatcgacagccgtggcacgcgtgaagcgctgggctgggagccgcgcttccccagctaccgtgagggcctgcgcgacctgctccggtag

SEQ ID NO: 527834 - DNA, 315 bp, Stenotrophomonas maltophilia
atgcccggctcaccgcgcgcgccggggttcaatcgtattcaaggacatggactgttgaagaagatcctttacatcgccgtcgcggtactggtgctgacgcggctgatcgatttcgtgttctacggcggccacgcccacgacctggtcggggccgctggtttcggagtgctgttcgccggcgtcctgctggaggatcgtgcacgcagcgcccgcccgccctccgcacgcctgcggcgccgcgccaatatcatcgcggcgtgcggcatcgcgctggtgctgggatcgttcctgctggaatggaaggtgttcggctga

SEQ ID NO: 527835 - DNA, 132 bp, Stenotrophomonas maltophilia
atgggtggcgacgggccagggcccggcgtgtggtccgttgccttcctggccgcgcccgaaggcggtggcagggaaggcggcgatggccgctggggcttgcgcccccgggtgttgcttcaagtcatgacgtga

SEQ ID NO: 527836 - DNA, 1164 bp, Stenotrophomonas maltophilia
atgcccgcgtctgcttcccttcgtccccgcgctgcgggttggcgctccctgctgctgctcgtgctggcctcggccagcctgccggccgccgcgcaatcgatggcttgcggcacctacaaggacagcagcggcaacaccacgctgaccctcgaaagcgagggccacggcttcctgtccggcccctaccaggccaccgaggaactgcgcatcgcccgccaggacgacgtgctcggcaccggcaacctgtccacgggccgcctggagaactggtacttctccgacaacgaccgcacccttagcaccccgtaccgcgagttcacccgtgagcgctccgccgcatgcaaggtgatgccggagcccatcgaagacggctgcgtgatgaacacctccgagtgcctggaggccttgccggaagccgagccgcagaagctgcatgcctggtgcgccgagggcgtgggcgccgcctgcatgcgcctgctggaaacctaccagcagcaggccaaggacgcttcgccgagcacggcggagccgccgatgcccgagatctgcaaggaggagtcaccctcgttcgacgccgagggctgcacggcggtggccaggcaggtcgcctcggaaatgatgggcaaggccctgctcggcctgcagcattcggtggatgcgccgctgccgccggcacagctggatgaactgatcgccctgtgccgcgtgcagcagggcgaaacgttctgcgccgacaccgccgagaccttgtggagcagtggccgcctgcagcaggcccgcgaggcgctgcagctgtcgtgtgcacagcgcgcggacgccccggcctgcgggccggccaaggacctcggcgtgttggccagcgctcctggcacggcactggcaccggtcacggccagcgcgctgccctgcggcagctttgaagccgaacgcagcgtgctgtcgcagctgcgcttcctgcagggcggcgtggtcgaagccggtggccgcgagcagccactacgcgccagcctgcgcgacggccgcatcctcatccatcgcgaactcggcagcgacttcgtgctgcagctgctgcagaacggcaacctggccggtatcgacggtggcaaccgattcgcctactacgagcgcaagcctgcggcgggcaacgaccgctgcacgccttga

SEQ ID NO: 527837 - DNA, 642 bp, Stenotrophomonas maltophilia
atggccgtcatgagcaatgaaaatcatggactgcaaatactcgatgaaggcggaaatttgctcattgaggttgggccatatgttgttgatgacgtgcagggctttgctgctgccgtaggggctgtcgcgtcgacctgggctcaaacagagatcaatctctattgcctgtttgcagtactgttgaacacgacgccggaggtggcagaggcgaggctcaagaagtacggcactgccaagaaggtgaccgatgaagcacggaggatcgccgtcgggaacttgactggtgtggagctgcagattgtcaacgaagccttggattcactggacgcagttcggctccttcgcaatagggttcaacatgacacttgggcacgaaaggcagcggacagaaaacgtctctaccgtgttcaccgtgatcaataccttgcctttgcactaaagctactgaatgtccagcaactgactggaacacctgctgagagcgaagcaatcagggacgccatgaggttcccaggggagatatcggaggggtactccgttccagaggtcgagaaaatcgctagggatatcgatggagtcagcaagctcttgctaaaggcgatgttcaccatccggatcagtcaggtgagagcatcttcctga

SEQ ID NO: 527838 - DNA, 822 bp, Stenotrophomonas maltophilia
atggagtacacacaggtacgcaggctgctgcttgacgcagggtgggtcccgctggacgcagagtacctgcggcctcggccggcttatacggattatccggaggtcaattgtggcaccgggtggcaagcaacctgctccgcattcttctttcgcggtgactattacttcggggtgggactgaaccccctggagtcacgacgccatctgcccgtagagtggacgtggaggtggcgcgatccagccgggctggcaagcgaccgccgagttgtgaaagcggtcatcaactcgacgcgtcagggcaacgtgcagatcgaggaaagatcacccctgataaaagcagcgtgcgaaacgaacaaggtctggctgtcctggaacaacgaagcaccaaacgcagcattggtgacctgcgactacggtggtacagcgcacgacaattggggctggttgatcgagacggggttggatgacgatgagacgcgggtgcgccgtttctctctgggcaaggtgaccagcgtcgcggagttcaatcggattggcgcgcaggtaccggatgctttcacctcgcatccctggtgctcgggcgccaagccgaagacgccatcgagtgcggtattcgtaacattggtcaagacgcccagcgagaggggagatgcgccgtactgcttcatgccccacttcttcacaggaagcacgggtcgtcctttgcggatgcttccggcggcggacgaagtatggccggacgttccgtgggcagaggtcgggctgctcgcgagagaggtcgagatcctgcgtgattggcggctggaatatgagggcgagtaa

SEQ ID NO: 527839 - DNA, 678 bp, Stenotrophomonas maltophilia
atggccgcagtactgtctctgactacagcgtcgacggctccccggccggcccagtcctccatcgcactgactacagagcgagagtatgtcccgatggtgggcgacagcttggcgtcgcttgtaggcgaattggacggcgagcccgcccctggcgccgctatcgaccgggtgctgaccgcgttgcaggaacgactgaaacgcacctcatgcaagccagcagaccctggcaatgcacagtcggagccacgtgccatcatctgtagcgcacccgatgcaggacgcctctttccctactacgcagcactgcgacgggcggcgacaccggcggagcatgaccggcacggccgtcgcttcctggaagcctatgagacgttgctcagggatgcaccggatgtcgccctcacgcgaccaagcgaggataaggcggcagatgggttgttacatgtgctctttccgttcgaggcctgggataagaagctgaacattccacgccatgacgtccacttcccgttcgttcctgtatgcaacctcgttgtcgctcgcgctgcgcgttgcccgagagccgaccagttgcgcaggcagatccgccaggcaggcgatgagagcgcgcagcgtcggttctgcatcgaagcgttttcaaggcggcagtttgagcccagcgatggatgctcggagtag

SEQ ID NO: 527840 - DNA, 183 bp, Stenotrophomonas maltophilia
atgggcgcagccgcgaggctgcgtccttttttattgggcgatggccaggcctcatccacgcatggcgtggatctacgggtgcgtgccgatgttttcgtagcgccgtgccttgcgtggatggatcacagcgttgcccgcgtgcagtaccgccgcgtatggcgcggctttgccccgcgcggctga

SEQ ID NO: 527841 - DNA, 891 bp, Stenotrophomonas maltophilia
atgatgcgttcccccctgtttctcgccctcgcgctggccgtaggctgcggcgcccccttgctggccggcgatgccagtgcacagaccgcacgcgccgtgcgcgccacggcggaaatgagcatggtgctttccggccatatcgagatcactgccgatggttcggtcagcacgctggtactggaccagaagtcgatgctgtctccgagcatcgcatccttcgtcgagggcaccattgcaggttggcgcttcgagccgacgctgcgtgatggcaaggcggtggcgacgcgtgctccgctgcacgtgcgcctgcgcggcaagtcgatggcagatggcggttacgaagtcagcatgaccagcgtcaacttcagcgaatacgatccgaaggcgaccgactcggtgactgaccggcgcatgacgccgccgcgttacccggaagaggtctatcggaacggtggccagggcgaggtggtgctgatggtcaaggtggcccgcgacggtacggtggccgatgtcgttgccgagcaggtcaacatggccgtgatcgggcccgagcgaaccctggccaagatgcgcgacagcctggccaaggccagcgtcagcagcgcccgcaaatggaccttcaccccgccgaccactggcgaggacagcacccgggacagctggacggtacgcgtgccggtgaacttcgccctgaacaatgatcgcaatgccgggccggagcgtctggggcgctggcgcgtcttcattccggggccgcggcaggccgtgccgtggcgcagggcggacccgatcgagcaggccggtagtgacctgctgcaggagggcggcgtctacatggtggatggcgcccggcgcggcgtgcgcctgctgaccccgctggaacagggctga

SEQ ID NO: 527842 - DNA, 1017 bp, Stenotrophomonas maltophilia
atgctgcagcctctccgccccatcgatgaaatacatggcctggacccggcacagctgcaccagcagctgccgggatggaccacgccgaaggtgatccgcgggctggtctcgcattggccgctggtggccgccgcacgcacctccgatgccgctgcagtcgctcatctggccaccttcgatcccggccggatgccggtgaccgccaccaccgcagcgcccgaagcacaggggcggttgttctacaacgaggacatgagcggcttcaacttccgccgcgaacaggtgccgctgaaggtcgtgctggccacgctgctgaagtacgcacgcgacccgtcgccgccgtcgatctacgtcgcctcgaccacgctggacagcttcctgcccggcctggccgaagcgaatccgctgcagctgggcgtggccgacccgctgaccagcatctggatcggcaatcgctcgcgcatcgccgcccaccaggatgtaccggacaaccttgcctgcgtggctgcggggcgtcgccgggtcaccctgttcgcccccgaccaggtgcgcaatctttatgtcggcccgctggatctgaccccggccggccaggcgatcagcctggttgacttccacgcaccggatttcgagcgcttcccacgcttccgcgaggcgctggcgcaggcgcaggtggcagaactggcgccgggcgatgccgtcttcattccttcgctctggtggcaccacatggaaggactggacgcgttcaacgtgctgatcaacagctggtggcgcccggtgccggcctggatggattcgccgatgaacgcactgatgctggcgatcctggcggtgcgcgaccttcccgaaccccagcgcgcgcactggcgcgcgatgttcgatcactacgtgttcgacgccgatacggcgaccagcgcacaaattcctgcgcatgcgcgtggcgtgctggccccgctgcacgccgacggcgccgcgcagatacggcagatcctgcgccagcgactgcaacggtga

SEQ ID NO: 527843 - DNA, 1245 bp, Stenotrophomonas maltophilia
gtgcagggcaatacccgcgcgttggccgtggtgaccgcgatcttcttcatgtggggctttctcacctgcctcaacgacatcctcattccccacctgaaggccgccttcgcgctcacctgggtgcaggcgatgctgatccagttcaccttcttcggtgcgtacttcctgatgtcactgccggccggacggctggtcgcggcgctcggctacaagcgcggcatcgtcgccggcctggccatcgcctgcgtgggcgcgctgatgttctggccggccgctgccgcgcatgtgtacggcctgttcctggcggcgctgttcgtgctggccaccggcatcaccgtgctgcaggtggcggccaatccctatgtcgcgctgctcggtgacgagcgcaccagctccagccggctgaccctggcgcaggcgatgaactcgctgggcaccacgctggcgccgctgttcggcggcctgctgatcctctcggcgaagccacgcagcgaggatgagctggccctgctgccgcaggccgaagcactggcctatcgcgcggccgaagcgcagtcggtgcagctgccgtacttcggcctggcagtggcgctgttgctgctggccgtcgcgatctggatgttccgcctgcccaccattccgggcgtggaggggcgcgccagcagcgaaggccgcgtatgggacgtgctgcgccatcgccacgtgcgcctgggcgtgctggccatcttctgctacgtcggggccgaggtgtccatcggcagcgtgctggtcaatttcctgtcctcgccgggcatcggccagggcctgaccgagcaggaggccaccggctatgtttcgctgtactggggcggcgcgctggccggccgcctggtgggggcggcgctgctggcacggctggacgcacgccatctgctgggcctgttcgcggtagcggtgatgatcctgctgggcatcacggtcaccgccagcggcggcctggccaagtgggccgtggtcagcatcggcctgttcaactccatcatgttcccgaccatcttcgccctggccatcgcccgccttggtgcactcaccggaaaggcgtcgagcctgctggtgatggccatcgtcggtggcgcggtgattccgctggcaatgggctggctggccgaccgccatggcctgcagctgtccttcctgctgccggtgctgtgctacgtctacatcgccttctatgcgtggaagggctcacggctgccggcggcatga

SEQ ID NO: 527844 - DNA, 438 bp, Stenotrophomonas maltophilia
atgagcaacgctgccgatctgccgatgatgcacctgctgctgcgccagggccgcctgccagccgtgctgtcactgggcctgctgctggtggcgctgctgttgctgggtagtgagccggggctggcgatgatggccgccggcctgctgttgctgagcgtggcgatgggcgtggtgcaggcgtactacgcggtgcgcgtgcagcttgatgccagcctgctgcagctgctgctgcgcgaacacctgcagggggatgcggccgccgcacgggtggatgccgccctccacaccgccggcctgcgtcgccgcgatgcgcaggcgccgatgcgtggctgggacgcgcgctggatcggcatgcggcgcctgctggtgtgccagtacgtggccaccctgctgcagttctcggtgctgctgctggcggtgctgtggccgcagacgtga

SEQ ID NO: 527845 - DNA, 774 bp, Stenotrophomonas maltophilia
atgtccgagccgaacccgccgcgccgccccctggctaccttcctgcgcactgcgccggcgggtgaagccgcacccgcgaccgatgcgcgcatgcaggacgacgccacgcccgcagcgcccagggtggaacctgcggccgatcccatcgagccaatgcaaccgccggcggcagaaagacgacacgatgatgacactttcatcgtggaggacgtcgcgtccctcgaaccggcgccggtcgcggtgccggcagcggtggctgctgccagtgatgctcccagtttcctcggcagcgcgcgagcgcgcacgctgccggcaccgcgctggcactggctgctggtggcaggtctggcgctgctgctggtactgcagagcgtgctggccgaccgcgcgcgcctggccgccgacgccggcaaccgtgcatggctggcccccctgtgcggcgttttccactgcagcctgccgccctggcatgaacccaccgcgttcaccatgaccagccgcgagatccgcccgctgcccggacaggccggcgtactgcaggtacaggccagcatccgcaacgatgcgcgttgggcgcaggcctggccggaccttcgcctgtcgctgtccgatgccgatggccgggtgatcggcagcggtgtgttcacccccgcgcaatacctgggcgaggcccccggcacggcaccgctggagccgggtcagagcgcacgcattgcgttccgtgtacaggagcccgccgcatccactgtcgcattcaccttcgacttcctctga

SEQ ID NO: 527846 - DNA, 963 bp, Stenotrophomonas maltophilia
atggccttcgctccgaccctgaaaacctggttgctcgtgctgccggcggtggccgtgctgggcgtggtcgggtatcgggccagcggccacgtttccgcggtgccgatgccgtcggagctgacgtcggcgctgtcggcggacaccacgagcacgccgatgccggtggtgcccgaagcactggcacgccgcctgtcggctgtcgagcgaggcaacgcgctgccgtcggggctgccgctggatctgcgcgccgacttcgaggaggccaccgatctgtacgcctacgcgcagcgtctgcgcgtgcaggccgatgacggcaatcatgaagcgcgttggatgctgagccgggtctatgactactgcgcgcagtacgcgcttgatccgggtggctatcgcctggacaacaacgtgctggccggactggggctgaccgctgcgccggcgatggtgcaggcacgcgaacgcgtggcgcagcgctgtggtggtttcgtgccgggcgacaagctgggcgccgcgcgggtgctggccgagcggcgcaaggcggccgcacagggcaacctggctgcggaggcctcgttgttcgccgaaggggagccgctgctagacagccccgagtaccgccgtgatctggtcgagcgggtgcgtgcgtcgcgcgacccggaagccttcatggccattgcgccgggaatgggcgcacgggcagcgggcgatcgtgcgctgaccgggcaggtggccggtgagccgctcagcgaacttgcatggcgggttgcggcctgtgaactcggtctaccttgtggtgcggacagcgtactggtgaacggtttttgtgcgaacggagggatttgttcgcaggatggagcacaggatttccgggatttcgtgtatgacgctgcggtttcgcggcaaggttcggggaagatgaagcagtggatcaagcgattggttggcaagagaggcgggcaatga

SEQ ID NO: 527847 - DNA, 423 bp, Stenotrophomonas maltophilia
atgatgctgccgcgcgtgcttgccagcctcgcgctgtgcgccagcctgtgcggcgttgcccatgcgggcgaccgcagcgccgaaggcatcgactgcgcgcatcccgccaccacgatggagagcgacctgtgcgcttcggacgtggccgctgctgccgacgccgaactcaattccgcctatgccctggcgcgccaacagctgcgcacaccggccaaaggcggtagttgcagctactgcggcgatgccgagcagcagctggtgctggcccaacgcgcctggatgcagctgcgcgaccatgactgcaacgcggtctatgccctcaattccgatggcacggcacgcaacggcgcacagatgcgctgcctgatcaccctcgcgcgcgaccgtacgcggcagctgcgcgagttctacgaattgctttga

SEQ ID NO: 527848 - DNA, 534 bp, Stenotrophomonas maltophilia
atgcaccgacacctgcttgccccgctgctggccctgctgatgacgatggccgttccatccgccgtggccggtgaactcggtccggaagattccgccgccctgcgcagggaggtgcaggcgatgatggacgccttcgcccgcggcgataccgacctgatcatcgcgcgcacccatcccagcctgaagctggctgccggtggcgatgaggcctatgcgcggatgacgcgcgacaccgtgaagcaactgcacaaggcgggcgtcaccatcgtcagcgacgaggcgggcgtgcctgggcgcacctacgccgccggcgacgaggaagtctgcttcgtgccacgccagtcactgctgcgcgtgcgcgacgcgccgatgcgcagcacctcgttcatggtcgccgtacgccgggtaggcacgacgcagtggagctatctggacggtgccgcgctgctggacaaccccgcgctgctgcggcagctgctgccggcgctggaaccgggggtggcagtgccgaagggcgggatggaagcgctgtag

SEQ ID NO: 527849 - DNA, 597 bp, Stenotrophomonas maltophilia
atgcacagtctcatcgtcatcgcccatcctgatccttactcgttgacccacgccatcgccgggcgcatcggcgaggccatcggcgcagccggtgccggcaacagcgtggcccacgccgatctgatggccgagggcttcgatccgcgcttcagcctgcaggaccaggccctgttccgcggcaccggcgctgcgccggccgatgtcgccgccgagcaggcgcggctggatgcggccgacacgctggtgctggtctacccgctgtactggtggtcgttcccggcgctgctgaagggctggatcgaccgcgtgttcacccagggctgggcctaccaggaaggcgccgacggcaaggtgcagaagaagctgcaacggctgcgcgtgcacctggtcggggtgggcggcgccggcgcggagatgatccagcggcgcggctatggggcggcgatgaaaacccagatcgacatgggtatcttcgactactgcggtgcgcgcgtgctgtcatccgaactgctgctggatgccgattccggcgccgccggggcacatctgcagtcggcagcggagatcggccgtaaaatcggtactccgatgcgctga

SEQ ID NO: 527850 - DNA, 717 bp, Stenotrophomonas maltophilia
atgtccctggcagaccatcgaaacgcgctggcaccgcagggattcctgcgcgtggcgatcaacctgggaaatccggtgctggcacagggagacgcgcgttcgccgcgtggccccacgctggaactggccaccgcattggcgcaacggatggcggtgcaggcccgcttcacctgtcacgacgcagcagcctcggtggttgctgcggccaatcaggacgaatgggacctggccttcctggcgattgatccggcgcgggcggaccgcatcgccttcagcgcgccgtatgtggagatcgaaggcacctacctggtgcgtgcggacagcccggcgcagcgggtggccgacctggaccacgatggcctgcgcatcgcggtcggccgcggcgcggcctacgacctgttcctcagccgcgagctgcgccacgccaggatcgaacgcgccgacacctccgcggccgccattgacctgttcgaccagcagcacctggatgctgccgccggcgtgcgccagccactggaagcctgggcgcggtcgcatcctggccaccgcgtgctggccgatcgcttcaccgtgatccagcaggcggtcgcggcgccggcatcgcgcccggccgatgcgttgcgggcgctgttcaaggaggtgcaggcgatcaaggcaggcccgctgctgggcgaagccttcgcccgggccggacaggcggtcacgctggtgcggtga

SEQ ID NO: 527851 - DNA, 372 bp, Stenotrophomonas maltophilia
gtgaacccgatcctgcatgtcgagatccccgccagtgacctggcccgtgccatcgccttctaccagcaatggctgcaggtggtggtggacgagccgatcctgctgcatgactgccacatggcctacctgccgttctcggatgacgcgacgggtgccagcctgtcgctggtgcagggggcggactacctgccctccgaacagggcgcgcgcctctatatcggtgtcgatgatcttgaggccagcctcgaccgtgcgctgcaggccggcgccgaactgcgcttcggcccggccgacgccggcgactggcgcgtggccgagatccgcgacagcgaaggcaaccgcatcgcactgcaggcccgggccgttctgtag

SEQ ID NO: 527852 - DNA, 717 bp, Stenotrophomonas maltophilia
atgccggtgccgttgccgaccagcaccatcggcgcagcaggcacccgatggaaaccgggattgcgatgcacgcgggccacgacgctggcgccgatcggcgcatgcagcgacaaccagcccgagcccagcccggcacgaccggcggcgtcatggaccagcctgaccaccagctccacctcgccgtcgttcgcggcggaggcgatcgagtactcgcggccgggcagcatcggcagcccggacaaccacaggcaggcatcctgcacgggcaatgcggcatcggcgtccggcagctcgcgttcgctggccaacgccagcagcgtgcgcggcgcgccgtcaaccagcagcggctgcaggggatccagtccatgcgccttcagcactgcacccgcatgccgcgcattgtggcggggcgcgatatgcaggatgtcaccggcctgccattgcacatcggccggggcggcaagacggatacgccagatcgcgccgccgatgctgcccgggttgaggcggtcgcggccgagcaggcgccagtcgtgcatccgcgttgcgggcggcagcacactgtcatcggtggcgatgccggtcagtgcgcccagttgcagctgccactggcgcagggccggcaccgaggcggcatcgacatcgatgcgcgcgaacagtgcgcgtgccccgttgccggtcagccagccatcgacctggcggccgaagccgcagtag

SEQ ID NO: 527853 - DNA, 435 bp, Stenotrophomonas maltophilia
atgcaggtcttcgacgaaatcgaagaacgcctggccgcgcagggcactgaagcgctcgccgctgtacgggtcgaaatacacccaatgctctttgccgccggcaaagcgcgcgaccgacggccgctgcccggtggcgtcgacgcgcaggcgttgcagcgggcgttcgctgccggcctgcagccgcggcaccagctcgctgagcgtgagcggaagctggctgtcggcgtggtgttcggcgatggccgcaaagccggggttggccgcacgcagcagttcgtcctcgaaggacagcacggcaccactgaggcccatcacggccaggatggtaccggcggtgatgcccagcagccagtgcacttggaacaggatgttcttgaacatcgaaggaggagggcctggaaggctgccgcccgcatcctgcgcaacagcaaatga

SEQ ID NO: 527854 - DNA, 738 bp, Stenotrophomonas maltophilia
atgagcgcgatgaccacgcaacgcctgcacgcgctcagcagcggccgcgttgcgacgacccatctggccgaatgcctggcagtggatttcgttgtgctgctgcaggtggtggcgcctgtgcttgcaccggaagtgctgcaacggatgcgggacgcctcaggcaagggcatcacgctgcgcatggccctggccgcgcaactgctgcgtgaagcggggcagggcgcgcctgcgctctggcagcatcacaactccgataccgtgcgcggctgggcctgctacctgatcggcagtgattcccgcgcaaccctggcagagaagctgcagcagatgcgcacgctggccgatgacccgcacttcggtgtgcgcgaatgggcgtggctggcgctgcgcgcggacattgttaccgcgccgctgcaggcgcttgagcacctgcaacggtggacacaggaaacatcaccctacctgcgccggttcgcctgcgaagcactgcgtccgcgcggcgtgtgggccacgcacatcgcgccgttcaagcagcatccgcaacaggcattgccgttgctggaagcactggccgacgaccctgaacgctatgtgcaggactcggtcggcaattggctcaacgatgccggcaagacgcagccgcagtggctgcgtgacctgtgcgtgcgctggcagcacgagcaccccggtgccgccaacgcctacatccgcaagcgcgcactgcgttcgctgcggtag

SEQ ID NO: 527855 - DNA, 753 bp, Stenotrophomonas maltophilia
gtgagcgagtggttccacgcagaaggcaaccggcagcaaggcccgctgccggcggaacagttggttgagttgttccgcaacaaccagatctccctggacaccctggtgtggcgcgacggcctgccgcaatggcagccgttgcgtagcgtcgtcgacgaactcggcctgatcgttccggcactggacgcttctgcgccgatcgtcgacgccgagccggaaccggtggcaccgccgccgccgcagccaccggtgctgccgccctccaccccgtacgccaccagcgcaccggccggcgtcgtgccggcgccgaagaagcagctgtccggctgcgccctcactgcgatcatcgcaggcgctctgctgctggtgctggtgccgatcgtggccatccttgccgccatcgccctgccggcctacaacgactacaccgtgcgcgccaaggtcgccgctgcggccgatgccctgcacccgctgcaggaccaggtgcagcatttcgccgatgaggaagggcgctgcccgggcgccaacgatgccggcttccccgccgctggcgatttcacccggtccggcctgtcggcggtgaacatcggccgcttcaacaacggccactgcggtatcgaggcaacgctgtcgatgccgggcaagagcatcgacggcgatctgctgtggctggaatacgaccgcgacagcggccgctgggactgcagcggcgcaagcgacgacaagtacctgccgccggcgtgccgcggctga

SEQ ID NO: 527856 - DNA, 1722 bp, Stenotrophomonas maltophilia
atgctgaaaacccacgcctcgcgacagacgtggctgttggtggtgatggccctgctggtgctgggggctggcctcggcctccgcgatccatggccgtcggacgagccacgcttcgcgctggtggccaggcagatggtcgacagcggctactggttgttcccgcatcgtgggccggagctttactcggacaagccgccgatgctgatgtggtggcaggccacgctgtacggcctggtcggccactggcgcgtggccttcctgctgccgtcgctgctggcagcgctcggcacgctgtggtgcgtggtggatcttggccggcgcctgtggacgcgccgcgtggggttgtacgcgggctgggcgctgctgttcgcgctgcacttcaccttccaggcgaagaaggcacagatcgacccgctgctggtgctgttcatcacgctggccaactacggcctgctgcgccacctgttgctgggccctgcctggcgctggtggtggctgggctggttctttgccggcatcggggtgatcaccaagggtgtgggcatgctggccctgctgatgatcgtaccggccgccctggcagcggccctgcactggccacgcgtacgcctgcatgcaggtgatgtccgcttctggctggcgccgctgtggtttctgctggcggtgtcgctgtggctggcaccgatgatcatggccgcgctggccaccggcctggacccctaccgggcctatatggacgacatcctgttccggcagaccgcgcggcgctacatgcagtcctgggaccatcaccagccgtggtggtacttcctggcgatcatgccatcgatgtggattcccgccttcctgctgctgccctgggcgttgcctgcgtggtgccgccggctgcgccgccgcgacccgcgttacctgctgccgctggcctggtggctgctggtcgtgctgttcttttccattccccacggcaagcgcgatgtctacatcctgccggccctgccgatgttctgcctggcgctggcaccgttgttgccgggcctgctgaagcggcgcgacgtgcagggcgtgctgggcgccttcgccgcgttgctggccgcaggattgacgctgatcggggcattggcgctgctgggcgaccccggtttcgaaatacgcctcacccatggtcgcggcctggcgcctggcgctaccgacgcgctggcatggacggcgctggcgatggggatctggggcggcctgagcctgtgggcaagcgggcgcggtcgccgccatctggccgtgatctcgacacttgcgggaatctgggtgctgtatggcgtgctcgcctatccgctgctgaacgattccagttcggcccgtggcctgatgcgtgaggtcggcgcgcgcatcggcccgcaggccgagctggggctggtggcatggaaggagcagaacctgctgatggccgatcggcctgcggcaaccttcggtttcgaagaccgctggcacgagcagctgcaggcggccgtacgctggcagcggctgtttccgcaacgacgctggctgctggtgaacgaggacgccctgcaggcctgcatcgatcgatcacgcgcggaaatggccggtgtttccaatcgccgccgctggtggctggtgcccgctgatgcggtggccggcacctgcaggccgacggcagcggagcttgagcacgaacgccggctgcaggggcccggcgtagcggattga

SEQ ID NO: 527857 - DNA, 4746 bp, Stenotrophomonas maltophilia
atgcggatcgaaacaaggaacgtcgcggtcggcccgcgtgcgagtggatgcgcggtgctcgcacttctatttgggctctgcttcgccgcgcgggcgcagcaggtagttcagcagccctatcaagagtacgacaagaagctcaactcggctgagcaggtcggtccactgacatcagagctcttcggtgactcgatcaatgtgtacgaccagagcggatacttcaagcagaccgatatcgacttggcaggtaacaacttgctaccggtacggctagaacgccgattgaatgtgaggcccattcccgacaacggttcgccgccattgatctatggtggtgcgggtgactggagcatcgatgtacctttcatctccggcgtattcgattcccagtatggatggacctatcgaggttctcggaaagatccgcgctgtagcaccaacttcattccctatacgccgccgacagtccgcattgaagacatctggtctggctataccgtcaatcttcccggggagggcgcgcggtcgctgatgggtgacccacctgccggcctcaagccagtcagtcgtcagagcgaaaactggagctggaccaccagtgcgatggacaccgtcagttgcacgccgatgatcgccggtctggagggcgagggcttcattctgcagaccacatcgggcatcaagtacacctttaatattggcacgcagcgcgctgtgggtctgatgggatccatcggcgccaactctgcccaagcgcgcgtagagatctatctgctggcaagtcgaatcgaagatcgctttggtaacagtgtcagcatcagctataacgggaacggctatccgaccaacatcacgtccagcgatgggcgctcgatcttgttgaattatgtaggaaatcgcctgcagagcgcctcggcaaatggccgcacctggacttacggatatgcaggaaactcgctgcagcgggttacccagccggacggtgcctggtgggagatcaaccatctctccgacatgcgtatcgcctatgagaactggccggaggacccgtcgcaggggtgtggcagtccgccttttcgggacaagatctacacccttcagatgaagcatccatctggtgcgatcggtacgttctccttccggaatgggcgacgctatcgtgcaggagttccggcgagctactgcatcaaagaggcgcgcgatggtcagatgattcagtatctcgcgattgccaactactttgagaactttggtctgacggagaagaccattgaaggtccgggtattgctcccatgcgctggacgtatacggacaagggggattatcaggactactgggcggggaactatccctactgcagcacctgcacccagtccaaggcggtgagaatcacgcagcctgacggaagctgggtcgaagagatctacggaattgttttccggttcaatgatgggaagcttcttggccggcgtgccggcaatgcggcaggaacggtgctcgagaccgaagaactgacgtatgtttcagatgcgcagatgccttcgatgccctttcccgatcgctacggctggacgtggggaggtaacgacggcagctcggcactgctaaggccgctgcaacgacgtcaggtcacgcgggatggtgtgacgatgacctggcaggccaactcctttgatagctatgggcgcccggcgagcgtgacccgcagcagctcgcacgggggaagtcggactgatgtcaccacttactacaacgacaccagtggctggatccttggcctgcctgccagccggaccaacagcgacacaggtctggtcgaagcccagaacacctacactgcgaaggcgcagttggttgagcagcgaagttttggaaggcttatccaccggctgggctatcacgccgatggcaatgtcgcgtcggtcaaggatggcaatggcaacacgaccacgttggagcgatggaagctgggaattccacaatggataagccatgccgacggcacggtgacccgggccgccgtcaacgattctggctggattaccgccgtcgccgacgagaatgactacctcacccagtacgaatatgacgcgatggggcggctgacacgcgtcgagtatcccagcgatgacagcgtcgcctggaatgcaaagaggcaggcactcgagtgggtgccgcttaatgagtacggtattcctccgggtcattggcggcagacaacggccacgggcaacgcacgcaagatcacctacttcgatgcgttgctgcggccgatgctgacccaggagttcgatgcgggcaatcaagccgccacgcagcgcctgcagttgtttgcctacgatgcccaggggcggcagacattctcgtcgtatccggtttcagacttcccggttccctggaaggggacctggaaggagtacgacgccctggggcggctgacctcaagttcgcaggacagcgaacatggtctgctgtccaccctcaccgagtatctgccaggtgggcagatgcgcgtgaccaaccccagggggcaggtgacgcagacccggttccagatgttcgatgcgccgtcctatgagcacccggtgtcgatccagatgccggagggggcggtgatgaatatcgcccgggatgtcttcaacaagccattgatcatcgcccgcggcaatgccaatggcagccagacggtggctcgccgctatgtctattcgcccagccagcagctgtgcaagacgatcgagccggaaaccggcagcaccctgatggattacgacggcgccggcaatctgatctggtcggcatccggggtcgattctccatcgccactgacctgcaataccgaggccatcagcagcagcggtcgcgccgtctatcgcgagtatgacgcgcggaatcggccaacctatctgcggttccccgacggaaacggcaatacgagttggacgtatacgccggatgggctcccgtcgcgattgttggtccggaacgattctggcgccacgacggcgtccaatcactatttctacaacaagcgccgcctgttgacagtggaaagggtgtctcagcctgattggaacgattggcccatcatctacagctacaacgccaatggccacccttccgggcagacctggccgagcgggctgacggtcgactacgcgccggatgcgctgggccaggctacacgggtcgggaacttcgctaccgacgttcgctactacgcgaatggcggcatcaagcaattcacctatggcaacggcatcgtgcacacgatgcagcagaacgagcgtcaattgccttcgcggaccaccgattcgggtgttctcgactttgatacgcgatttgatcggaacggcaatgtcagcgacatctatgacctggcactgggagcgttctacaaccggcacatgctctatgacggtctggatcgactgatcgcggcaggctccaacaactttggcggtgattcctggcaccggttcagctatgacacgctggacaacctgaccagctggatgctgccgggtgtcaaagaccatcgctactggtacgacgcgcacaaccgccttaccaatgtgcgggatggtgtgggcaacacgcttatcggcctgagctatgacgtgcagggcaacctgaagctgaagaatggcctcaaccacagcttcgacttcggcaatcgactgcgcgaggtgactggtaaagagacctatcgctacgacgcgctggggcgccgcatccttgcctccgccccaggactgggagtggtgctttcgcagtacgcacaggacggtcggctggtattccagagtgatggccgcaaggggctggggcgcgagtacgttcatctggccggcagcctgatcgctcgccgggactacgcaggcgccgacgccaagatcacctacctgcacaccgatgcgctgggaagcccggttgccagtacggatgcttccggcaacgtgatcgagcgtactcattacgagccgtacggcgcgccgatcggcaaggtggtggatggccctgggtacaccgggcatgtgatggatggtgagaccgggctggtgcagatgcagcagcggtacatggatccgcagttgggggtgttcttgtcggtggacccggtgacggcgtatgagcagccggttgggcagttcaatcggtatcggtatgccaatgggaatccctacaagttcacggatccggatgggcgggagagtggtgcagcctactcggcaatgtaccgggccgagctgaagtatgggatgaataccagtggcacaactcttactaaggagcaagtgggagtaatggttgactttatgccgatatttggcgatgcgaagggttttgttgatgcctataacaatccctcgcttgtcagtatcggggccgctatgttgggtgtggccggtccacttggtgatggtgccgcaaagctgataaaaggagttgaccgagctgcaagtggcgtgaagctgagtaaacagcttggtagtgagcagcagcttggcgagctgatgtcaggaaagggagaggtcatcgctggcgggcagagtggagttcttttgcgggattcgccgcgcctcagtgctgttcatggaggaagtgcctctgattgggtcaaggtatcaagctcgtcgcacaaggcgccagatgggcagcaattctctactcatgcatatcagaatcaggcgaccggacaagtcgttgagccaaaaacaaagttgattgaagaagggagatag

SEQ ID NO: 527858 - DNA, 396 bp, Stenotrophomonas maltophilia
atgcgagtaaaagtcgtcagcaattgggttgatattcttgccgggcttggcgcggaagggagagtaaagtcgacgctgttcctgggtgctgggaatgagtacacggtattcggacttagtctccatagggagtcgagcatttacaggggcgggacgctcgtctgcaaggtaatcgatgactatgggaatctgacttctgcgccaatcggcatatttgatgttattgatgggtccatgccgaaagaatggcgcattgagaagcggtttgatggggtgttcatgtggccagatttatttcatagggaattcttctttgacgatctgtcggaaggtgttccggagtgtgtggccgaatttaggaatcttaggtatataatggagggcgagggtgggtga

SEQ ID NO: 527859 - DNA, 360 bp, Stenotrophomonas maltophilia
atgaagatcgaattgcttgtggaatggtacgacggtgagttgcagcaagtgatggaagatggtggtcgatacctatacgcaatctgcgtggaggcagacttcagtaagcccttgcaggatagggtctacttcgtgatcaatattcttgcgaaggagaagcgaatgattgagcgctttctcgctgacgcagacatggatggccttgatcgtctgctgcgcgatgaattgtacggtcgccgaggtgcgattttcttaggggatccaaacaattggagggtggagtcggctgatttcagtattgagccagccccctatctcaaattcttcgcgtttccagtcgtcgatgtattggtggcttga

SEQ ID NO: 527860 - DNA, 252 bp, Stenotrophomonas maltophilia
atgagtcataccggactgtttcagatcaccaacctgacgtacaaagccggagagcatggcactctggcgcgggcactgcagatcgtagcgacgtgcacggcctgcggcgctacgagcgtgtggggcgaagatgagatggaacatgtcgccgggggaaccgtgctggcctgccgcaactgtggcgtccgccaggccatcagcaacgcgcgtctttcaagcagcccatccgacatccgtcatccgcgccgctga

SEQ ID NO: 527861 - DNA, 408 bp, Stenotrophomonas maltophilia
atggcatacagcggcagcatgacgatcacgccgaagtggctgtaccttgccgcaggcctgtcggtgctggtcagcctgctggcctggtcggtggaatggagcggcctggcctatgtctgcccctactgccgcgtgcagcgcacggtgatcggcgtgctcgggctgttgatgctgttcgcgcggccaggcggcctcatcgtgccttggcttgcgtacacctcaggcggcttcgcgtttgtggtggccgccatgcagcacttcaacggctggaagcgcatctctgccggagagttcagcttcaacgcgcagtggtacatcgatccgtggctgttgtccgggtgcgcgatgctgatcctggtggcgcagctgatgctggtgcaggccgcctcccggcccaggccgcgctga

SEQ ID NO: 527862 - DNA, 642 bp, Stenotrophomonas maltophilia
atgtgtcccatcctcactgccttcgccacctcacccgatcgcggccagggcctggcccgcgacatgcgcgtgcgctgggcgctggaagaactgggcgtggcctacgacgtgcagctgctgacctttgccgagatgaagcagcccgcccacctcgaaaggaatccatttgggcagattcccacctggcaggacggcggccaggtcctgttcgaatccggcgccatcgtcctgcacctggccgaacagtacccgggcctgttgccgcgcgatccggatgcgcgcatgcgcgcgatcatgtggatgttcgccgcgctgaacacggtggagccgccggttgttgagcgctcgatggcctgggtactggagcgcgagcagccctggtacgcgcagcggctaccgatgctcgatgagcgggtgcggacgcggctggcgcagttgtccgcagcgctgggcgattccgcctggctggacggcggattcagcgcgggcgacctgatgatggctgcggtactgctgcggctgaagagcagcggcctgctcgatgaattcccgcaggtgagcggctacgtggaccggacaaagcagcgcccggcctaccagcgcgcgttcgccgcgcagcgggcggtgttccagaacggatag

SEQ ID NO: 527863 - DNA, 618 bp, Stenotrophomonas maltophilia
atgcagccccccgccgtcgccaggcctcgcaccaagcccgccgaaacccgccaggaagaactgatggacgccgcgcaggcgctgttcctgtcacagggcgtggaggccaccaccgtcagtgacatcgtggccgcagccgacgtggccaagggcaccttctatacctacttcgcctcgcgcagcgagatcctgcaggcattggcgcagcgctatacccggcacttcatcgaggacgtcgaccaggccgtgcagcagcacccggccgcggatggcgtggcacgcctgcgcgcctggatccgcgccaacatcgaaatctacgtgcgcacgcacgccgtccacgatgtggtcttcgtccatcaccatcatcaccagcgcggcaatgccgaacgcaacgcgatccagcagcagctgctgtcgattcttgaaacgggaatgaccgccggcctatggcagttgccgtcgccgcaggtcaccgcctcgctgatctatgccggcgtgcacggcgccaccgatgacctgatcgccgcacccgcgcaggacgccgacgccttcattgccgccgtggtggacgactgcctgcgcatggtcggcacagcgccggccgcgacgcatccctga

SEQ ID NO: 527864 - DNA, 945 bp, Stenotrophomonas maltophilia
atgagcagcgcgctcgccagcccggcgctggaacaggccgcggagtggttcgcgctgcgccagcagggctggagtgacggcgaccagcagcgctggcgcgcatggctgcacgccgatgccggccacgccgatgcctggcagcgggtcgagtcggtctggcagtcgttcgcgccgttgtcggctcccgcggcagcgagggcgctggatgctgctggccgtcgccgccggcaggcactgcgcggcctcggcggcgccctcggccttggcgccttctcgttgctcggcctgcacgccgtgcagctgcagcgcggcctgcagacgcagcgcaccgccgccggacacacaggccactggaccctggccgatggcagccggctgtggctcaacgccgacagtgaagtgtcgatcgacatcggcaacggccgccgcaacctgcatctgctgcgcggcgaactgctgctgcagaccgggcatctgcccgcatttgcccatctgccgctgtcggtgcatgtaccgggcgcgcgcctgcagccgatcggcacccgcttcgcggtcggccgtgagccgcagggcagtcgcctggatgtgttcgagggcgcggtgcgctgcctgccgctgttcggcgcggcgcaggacgtacccgcaggcggggcggtacggatcggtccactaggcggactgtcggcggtcgatgccgatccgctgcgtggcgactggcaggagggccgactgcaggtgcaggacgtgcccctgatccgcgtcatcgacgagctcgcccgccaccatcgcggttacctcgggtgtgatccggcgctcgccgcattgaacgtcaccgctgtactgccacgcctggacagcctgcaggccctgcaactgttggtccgggccctgccgatccgcatcgagcagcgctggccgtggtggaccgtcatgcgtccgcgttga

SEQ ID NO: 527865 - DNA, 828 bp, Stenotrophomonas maltophilia
atggccagcacatccccggttgatcaaagcgcgctctggaatggctctggcgggcaggtatgggtcgcgcaacaggccatgctcgatggcctgttccagccgctggccgatctgctggtcagcgagctgccggataccgtcacccagctgctggacattggctgcggtaccggcgccagcctgctggccgcggcggcagcgcgccctgaagcacactgcaccggcctggacatctccgcgccgatgctggcgctggcccggcaacgtgccaccgacgcaggacgggcggcggatttcatcgtggccgacgcgcagcagcatccgctgccgccggcacactacgactggatccagtcgcggctgggcgtgatgttctttgaggacaccggcgcggccttcgccaacctgcaccgcgcggcgctgcccggcgccggccttcgtttcattgcctggcgcggcgcagacgaaaatccgttcatgaccaccgccgagcgcgccattggtgatgcgctggatctgccgccgcgcgtgcccggcgctccgggacagttcgccttcgccgatggccaacgcgtgcggcacgcgctgctggccgccggctggaaggatgtggatgtggtcgcggtagacctgccctgctcgatcgcccgtgatgacctgccgacgtacgtaggccagttgggcccgctgggtcttgccctgcgctcgatgccggaagcccgcgccgccgcacttcgcgacaaggcactggcggcgttcgcccccttcatcgaaggcgaccgcgtgcgcgtggaggccgcctgctggcacgtaagcgcccgcgcctag

SEQ ID NO: 527866 - DNA, 189 bp, Stenotrophomonas maltophilia
atgaacgcttcgatccgcacgttcctgaaggaagaagatggcgtcaccgcgcttgaatatggattgctggcagcggtcattgccggtgtcctgatcgcggtcggccgcacccagatcacctcgtttttcacaacgctgttcacgcacctgacggatatcgccaaggacgccaccacggcggcgaagtaa

SEQ ID NO: 527867 - DNA, 546 bp, Stenotrophomonas maltophilia
atgacactgctgggattgttggccatcggcgtgtgcctgcggatcgcgatcagcgatctgtatgcccgccgggtgcccaacgcctggctgcttgccgcgtgcgcgctggctgtaccgctgttgatcgctggccagttcagtacgccgcgcctgccgtggggatcccacgttgccggcgcggcgctggggctggtcgcattgcttccgttctacgccgtgcgctggatgggcgcgggcgacgtgaagttctttgcggtgctgggcctgctgctgggattggaagcgctgctgccgatctgggtggtcgccagcctcgccgccgggcttcatgcgctggtggtgctggcctcgcgccgcctcggccccatgctgccggccggcctgcagctgcagatgacccgggccagctcgcagtggcagacacatcctgcgctgcgcgaactgcagagcgcacggcagggacgccacggtattccctacgcggcctatctggcgctgtcggccatcggctggatcatcatccaggtctacggaggtgtttcatga

SEQ ID NO: 527868 - DNA, 1032 bp, Stenotrophomonas maltophilia
atgctcaagttgacccgcatcgccgccgtcgccctgatcggcctggccgtgctgctggccgtgattgcactgatgatcggccgcaagcccgacgcgccggtacatgtggcgccggtcaccagcgcggacccgcaggccatcaccgtggtcgaagccgtcgcccggctgcccgccggcgagccgatcactgccaatggcctgcggctggcccagcgcaccacgccggtcgccggcgccgcgaccagcatttccaccgtggtcggcaaggttccggtccaggacattgctgaaggcagcgcgatcagcacctcggccctcgcgcagggcttctcgctgcagctgcggcccggtgagcgcgcactggcggtaccggtcgatgaactggtcggcgcgggcaatcgcatcctccccggcgatttcgtcgatgtgttcctcaacctgcgcaccgcccagcccagcgcagggggcccgggtgaggccgcgcaggcgcgcctgctgctgtcgcgcctgcgcgtgctgagctatggccagcaggatatcgcgccgaacccgggcgataccgccgccagctccgatggcagcgaacgcaacgacgcacgcgccgcggacatcaccggcagcagccatgccgccagcgacgagacccgccagccggcgcgcagcgcggtactggcagtaccggtggcggacgccaaccggctgctgctgggcgcccagcagggcaagctgttcctggcgctgcgcaatccggccgataccggcctgcccgaccttgccctgttcccgcaggcgcggggcgtgatcgatccgctgcgcggactggatgcagagcagcaggtggccctgcagcgacccgagaaccacgccttcgcaggcattgacggcgatgcgctggccgggcgtggcgccgccccgacccgcgtcaacccgcaggcgccgccgcgcgtaccggccgtccgccacggtgcgccacgcgcctccggcattgaaatcatccggggtgacagctccgctccccgtggttccctctga

SEQ ID NO: 527869 - DNA, 957 bp, Stenotrophomonas maltophilia
atgggcaccggtctgctgctgggcgtgctgagcatcatctccgtgctgctggcgctggcggcatggctgtggggcacggccagcacccgcgagcagcgccaggcttcgctgcagcatgccgagcagcagctggcgcgtggcaatacagccacttcgccatcggccggcatcgccagtgccgccgccaacgagcccgcgcggcctgccagcaacgggcgcaggccgctgccctggaatggactgctgcaacgtgcaggcctgcaagcgggctggaaacttccggtgatgctgctggtgccggggctggtgctgtcactgacggccgcgctgcggctgggcactgcgtggatgttcccgctgaccctgctgctgtacgcgctcggttgctggctgtggatcatgcgccggaccacccggctgcgcgcgcagctgctgcaccagctgcccgatttcctcgacaacctggtgcgcctgaccgcgctgggcaacagcctgcaggcggccttccaggtcgcgtcgatgcagaccagcgcgccgctgcgtggcctgctcgacaccacggtgcgctatgcccgcagtggcatggacctggatcgcgcgttgtcactcgccgcgcagccctatcgcatggatgtactgaaggtgctgtcggtggtgatcggcgtcagcgttcgcatcggcggccgctccgaccagatcctgcagcgcatgggcgacttcatgcgcgacctggaacaggcgcagcaggagctggcggcgaccacctcggaaacgcggatgtcggcctgggtgctgggcctgctgccgccggccagcgccgtgctgatggccatcgccagccccgacttcttccagcccgtgctgcacgagccgctcggccacaaggtcctgctgatcgcgttgggcctggagctggtgggcgctttcctgctgtatcgactggccaaatcgctatga

SEQ ID NO: 527870 - DNA, 882 bp, Stenotrophomonas maltophilia
atgcccgcccttcgcaccgcctgcctgctgttcgcccttgccgccgtcgccagtggctgcgcgtcgaccacgccgaagtacctgcgcgcgcccagcctggccgcgcccgaaccggcaccacaggacagccgcaacgcctacctggaactgatcgcgcgcatgcagcagcagggcgcctggtatgcctcgctggcccacgtcgatgcattccgccagcgctacggtgatcgcccggcgctgcggctgctgcaggccgacgccctgcgcgaaaccgggcaggccgacgcggccatcgcgctctaccgtgaactgtccacggggccgcaggcggccgccgccgcacatggcctgggcctgatcgccgcgcatcgcgatgacgacgccggcagcgagcagtctctggcccgggccacccagctggaaccgctgaacaccgactacctcggcgatctgggctacgcgcggctgcgtgccggacagttcgaccaggcccgtgagccgctggcaaaggcgctcgagctgtcacccggcaatgccaaggcgacggccaaccttgcgctgtgggcggtgctgcgtggggacaccgccacggccgagcgcctggcccagcaggccaacctcaacgaagacagccgccgcggcatccagcagcaggccgagcagatccgcgcacgcctgcagcagcgccaggcggcagcagcggcacgcgaggtggcagccccccgcgcggttgccggcccgccggcccgcccgcaggccgcagcccggctggccgccgaagcgcgacgcgacgctcgcgatgagcggaatccgcagcgcctgccaccttcgatgctcgaacgcttcagcaccccagaccagcccaccgggaacacgccatga

SEQ ID NO: 527871 - DNA, 471 bp, Stenotrophomonas maltophilia
atgatcaagccacacctgacccgtcgcctgttgcccgcgctgagcggcctgctgctggcgacagctgcccacgcacagcaacagccgctgaccgggcagatgctcggcggcgcccgtcccgcggcaaccgcagcacaaccgctgcagtccgaaacgctggcaacggtcgacgtgtccgcgcccgaggcacgtgtacccgtaccggcacccgcccctccccctgcctaccacgtcgccagcacagcggccgcacctgcgccagcagtacgccgcagcgagatcggcgacgccacgcgcagcctgttccagctgcaggcctcgggacagcaggccggcccgcgcctgccgatcctcggcgaccaggccaccctgagctacgcacgctacctgaagagcttccagcacgagattcccgatttctttgaaaccgatgtcggcaagtccaagggaacatcctcatccggacgttga

SEQ ID NO: 527872 - DNA, 387 bp, Stenotrophomonas maltophilia
atgcccagacttccatgctgcctgttggtgtgcctgctgctgtcggccgcagtaggcgcgcagacccacgtctacaagtgcgtggacggcgcttacccggtctaccagcagacgccgtgccaggggcgcgcggaatggcgctgggacgttccggcggaacagtccttgtcgcgtggcccggtgcctgccacgtccactgcagcgccggcccggcggcgggcgtcacgccccgggcgcgcgcgggctgcgctgatcccgatcagcgccgatcccgccgcctgtgagcgtgcgcggcagcaacgcgggaaggcgttggccagggccaggcgcctggacttcgtacagcgccgacagctggatgacgcggtgcacgacgcgtgtcgctga

SEQ ID NO: 527873 - DNA, 333 bp, Stenotrophomonas maltophilia
atgcagcgcctgtttgtgatgtttcccgaccgtgcaccgggccttggcctgctctggctgcggctgtgcgtggccgctgcgttgtgcatgcaggcgccgcacgccggtgagtggtcgatacccggcctggtggtggccgcgatgctggtgctgggcgtgctgaccccgctggcggcggtgttggcaacgctgggtctgtacctgctggctcagccgtgggcactggtgccactgccgctggcgctgctgctgcttgggccgggtgcctattcgctggatgcccggctgttcggccgtcgcctgctggggcggcggcctcccccattcgggtag

SEQ ID NO: 527874 - DNA, 600 bp, Stenotrophomonas maltophilia
atgatcagcccatatccgacccccgccctccccccgctacgcccggtgctgcgccgccatctgctgcagctgcaggtggcgccgatcaccctgcgcccgttccagcgcaccgatctgccgcgctggcgcctgttcgacgaccgtcggcagcgcggccgccaccccccgtccggcatcgacgaggaggcacgcttcctcgcccacatgcatcgctcacgcctggagcaggacaacgaccagctgctgctgggcgtgttcgatgacgaacacggcacggtgctggaccagctgcacatccgcctgcaatcgcaggaggcgcgctgcgtcgagctgctgtcgctgcagcacgggcatccgcatgtcgacgccatgctgcaggcactgtgcccgttcctgttcgacggcgtcggcctgcatcgcgtgttcgtgatgctgcccccggacggcaacacgccgttcgccaacgcgctgcacgccttcggtttcaacctggaaggcctgctgcgcgaccatcatctggacatggacggctggcaggatcgccagctgtgggcactgaccgcgccgacgtggcgcagcggcctgcaggtggcagactag

SEQ ID NO: 527875 - DNA, 618 bp, Stenotrophomonas maltophilia
atgcacaactggatcgcacccgcggccggcgcactgatggtggcgctttgcctggccgtcccggtggcacaggcggccgagccgaccttcggtggctggcgcaacctgggctcacgcgatggcgccgagccggcgttgcgggatgtgccgttcgcgctgctgccggcgccggcgagccgtgacgcccgtttcgcgatctacgaccgcgaaagcaagcggctggtgtgctgcctgcaggtggccagcgccgaactggacgatacggcgctgcgcaaggtctaccagctgccggaacagtgggtgaccgatctgcgcaacggccgcagtacggcgcggccgtggccgacccgggtctacgagatgcggcgtaccgatgaactggtcgactacggcttcagtgatgcgcccgaagcctacagcgatctgggtgggctgctcgttccggccaacgcacggctgctgcccgatggcagcgtgcaggcggggtcgacctaccgcctgcagttccgcagcacgccgctgggcgatgacagcagcgcgctggaccgcttcaccctgcagccggcccaggacgcgggcaagccggtcgtggtggaagtgtcgtacggcacctactga

SEQ ID NO: 527876 - DNA, 390 bp, Stenotrophomonas maltophilia
gtgtgttgcctgtcggtgcaaggcgccgaggtgagtgaaagcgagctccaggaccgcttgcacatcccggggccgtgggtgaccgatctgaccaatggctggaatctggatgccgcaccctatcgtccgcatgtccagctgctgaaggtccaggatgcgatgggcagccataccttcagggaagagggcgacgcagcgggtggcctgttgctgccgccagatgcgcgggtggtggggccagatgcgctggagattgccggggagcgctatacggtgcagcgggatgaaacctcgctggccgatggcgatggtggcgtacacacctacaccttgaaaccggccaggggcggtgcagccctgagggtcgaggtgcctttcggaacctattag

SEQ ID NO: 527877 - DNA, 504 bp, Stenotrophomonas maltophilia
atgatcccacgattcgtgcgtacacatcacattatgcgtgttccgctgctgtccgccttggttgtgctgcttctgctgccggtactggccgcctgcaagggccagcccgcgtctacacctgtgggagtgcggggttacaaccacaccgacaaccatgttgcgcagttccttgtgaacggcgggagtggtggatcggcgtggccacactccgcaggtggaaccgtctgctgcgtagtgttgccggatcactgggcacccgatcagaaggtggagatcgagtggacgactgaccttgaaacctaccagaaggcgacggtatcaattcccaggtataacgaagttggcagtctcgctgttcacttcctgcgcaatggccaggtcaaggtgttcgtgaccaatctgatactggggcacccggactatccgttgacgggacccgaggcgccgttgcgtgagggggaaaatcccgtgtgggagcacctccggcgcccgcccgctggctga

SEQ ID NO: 527878 - DNA, 480 bp, Stenotrophomonas maltophilia
atgcgtttgatgcgcactcaattgctggcggccttggttctactgcttctgctgccggtactggccgcgtgcaaggggcggacagcctccacaccggtggctgtgctgggctacaaccataccgatgcctacatcgcgcagttccttgtgaacggcggcagtggcgggtcggcagattcccactcggaaggcggaacggtgtgctgcgcgatgctgcctgatcgatggacaccggatatgaaggtggagatcgaatggacgacggatctcgaaacgttccagaagaagactgttgcagttccaaagtacgaccagctcggaaacctggcggtccatttcctgcgtaacggacaggtcaaggtctttgtcaccggtctcgtgctgggtcatcccgattatccgttgaccggccctgaagcgcccttgcgcgaaggcgagaatccggtgtgggagcaccttcggcgccccctcgaaagctga

SEQ ID NO: 527879 - DNA, 879 bp, Stenotrophomonas maltophilia
atgaatcgttatgcggtgatcgacagcgcgcagcggccgcatttccatgagcggctggagcgcctgggcgcgcactatcgctcgctgttcgagggcacggccgaggcgagcctgctggatatcgctcccttgctggtggcctggccggacacggccgtgcacgccaggctggaagcggagatccggcagatgggcacgcagcggccaggagtgaccctgctgtggagtgcgctggaactggacgagctcgccaagcggctgcggaccttccatctggtcaaggtgcccgagaagggcggtcgcgaaatgctgttgcgctggtacgacacgcgcatcctgcctgcgctgctggaactgctgctgcccgcgcagcgtgccgcgttgctggagggcgtgcagcgcctgcagtacttcgatcgctatggcgatctgcaggaatggccgctggccgaggtggacgatgccggcctgcctgcacttccgccattgcgcctggaccagcagcagtacacgtgcctgctggatgcgtgcgaaccggatgtggccatcgcccagctccgccgggtcattcccgatgagatgaagcgggtgccttatcgcgcgctgtacccgttcgtcgtcaagcatatgcaggacacgatcgcgcacggcgtggaccaggtggacgatcacgtgcagtacctgttgctggcgctgtacacctcaggcgcctgccgggatcattccgccgtgcggacccggttttctcaggcagccagtgcctttgaggctccgttcccggattgggcgtcggccttgcctgacgatatctggttgatgggcgttccattgtgggatgcccccacggccttgccggtagaggaacaaccatgcgtttga

SEQ ID NO: 527880 - DNA, 2784 bp, Stenotrophomonas maltophilia
atggatcagctgaattacctgatgacgcaggttgcaggtcttggcgatgcgcagcgcctgtatcgtctgcagtcggaagcattcacgggatgcaccgtggagcgctggcgtggacgtgacgcgctgggcgaacacgcatggaccgaggtcgaggtgctctgcactgatgctggcctcgaactgggggcattgcctgccacgcgcgcaacgttgatcacgcagctcgccgacggcgggcagtggcagcgcagcgggctggtggccgacgccgcgcgggtcgggggcgacggtgggctggtgcgttaccggttgcacctggtgtcgtggacctggtggctgcagcatgcgcgccacagccgcgtgttccaggagcaaggcatccgcgccattgtcgatgcggtgctttccgcacacgccgacatcgcacgctggcgctgggccgaaggcgtcgacgccttcctgggtgagcgtgtgcgcagctactgcgtgcagtaccgcgagagcgatctggacttcctgcagcgcttgctggccgaggaaggactgggctggcgcttgtatccggacgaggaagcgccctgcggcaatggcctggagatctttgccgacagcgttgcgctgcccgaggatgccaccagcgccggggccggcgtgcgcttccatcgcagcgatgccactgaaaccagcgacagcgtgcaggccatcggcctgcaccgcagcctggccagcacgacggtcagcctgcagagcgatgattatcgccaggtgcgtgcactgtcgggccagtcgccgatggaaggcggcggcagcgggtccacccgcgaggatttcgatgcggtgggcgcctatgccttcagcgatggcgcggccgcatcgcgccaggcccgcctgcaggcgcaggcgcgcgaagcacacagtcgacgctggcaagggcacggtaccgtgcgcggcctgcagtcgggaagctggctgcggttgcaacaggccccgggcggtacaccgccggagctgctgctggtcgcggtcgaccatgccggcatcaacaacctgcccaccgacctgcgtcgcagccttgacgacgcactcggcgtcgcccccggcgacagcgcagacgccgcactgtggcagcaggctgaggcgattggctatggcaatcgatttgaggcggtgccgcgcgccaccccgtggcgaccccagctgctggatggcaccggggctcgcctgaatcctcgcccgacggtgcccgggtaccagacggcagttgtggtggccggccagggaagtgacagcaaggacctgcacgccgacagccacggccgcgtgcgcgtgcgcttccatttccagcaggggcagggcgagggtgcccatgacagtgcctggttgcgcgtggcacagcgctacgccggaccgggcgtcggcagccagttcctgccgcggatcggccaggaagtgctggtcggcttcctggatggtgatatcgatcggccgctggtgctgggggcgctgtacaacgggcgaggcgaggccggcgtgacgccgacgcccgctggtgccagcagcgagggcgatgtctctgcctacggccaggccggtgatgcgcgccacagcgcacaggccaacctcagtggcggccaggcgccggcatggcacgcagcaggcgcgggcgaccaggcgcatcggcagggcggagcactatggggtatccgctcgcgcgaatgggacggcggtgaaggcagcaaccacctgttgttcgacgattccaaccagcagctgcgtgcgcagttggcgagcagccagcaggcgtcgcagctgtcgctgggtcacctgcggcaccaggctgacaactatgtcggcagcgtccgcggcaccggcttcgagctgcgcagcgatgcctggggggcggtgcgggcgacggcgggcgtgtggttcaccgcctatggtcatcgatcaaccgcacctgcaggcgaggcggtgcagcccgccgcgctgctgacccagctgcaggccctgggcgagcgcttcacccaggccgcgcgcacgcatgtaaccagtccgttggcgatgcaggagggggccaaggccgcggcgcgctccaggatggtggccgacaagtcaccggtccccggcttgctggcgagcgtgcgtaccaccaccggtggcgacgatttcggcgcaggaaagggcagtgcggccgagcgcgcgtccgaggcgggccagggcagggtgccgcattcgggcgacccgctcctggggatggctgctccgcagggcgttgtgcaggtggcgggtcaagccatgcactggagcagcggcgaaggcctgctgctggccagtggcagtcacagtgaggcgatcacgatggggcaggcgcggcttcatgccgggcaagcgatcggagtgctggcatccgtcgttgaaggggccgccgccgctccgacggcacttgacgtggtggccggcagcgaaacgctggacatccaggcgcatgcagacctggtccgcatccagtcgcgtggtgcgctgcgtggcgccagcgcgcaggcaccggtggagctcgccgcggccaacacgatccacgtcgcgacgtccggaggggccagcctgaccattgccggcggcagcattaccattgcttgccccggcacgatcaccgtgcatgccggcagcaagtcatttgttgggccggcccaacagggctatccgcttccccagttcccgcgcagcagctgcaagagctgcattctcgacgcgatgcgccagggcacgccgggagtgctggtgtga

SEQ ID NO: 527881 - DNA, 1437 bp, Stenotrophomonas maltophilia
atggcgggatggctgggcaaggcagcgtcggtggtgatggtcttcatcgccacctggggcgcgacgattctttactggcgcaacagcggcacggtaccgaccggcatgcagatgctggcctatctggggctgctgccggtggggctgagtggtgccggcttcatgctgcgcaacgccgcgcggcgcggcgccgatgtggcgttgcagaaagccggtgaggatcgttccggcccggccccggccgaacgcgagagtgtcgctggcgccccgtcgggcgtgcctgccgttgcgttgctggccggccacctgcgcctgggcatggacctcgatgcgcaggccctgctggcggctgcggcggcgccaccgcgcccggtgctcgacgggcgtttccgcgacaactacaacctgccggtgcggatgagcgcagcaccggatctggacgaattcgaagtcctgcaggtgcgccaggacggtatcgataccgccgcgcacgaacggcgtgcactggcgctgctgcggccggtgctggaacgcctgctggaggccgtcttcacggccctgccggagatcgaagcctccgaagaggtggtggtggccggcctgcgccgccgcgatgagcagcgcgttgagaatatcctcacccttgaattgctggtgccgggcagctggtccgatggtttgcgcccgtgggtacaggagtggctgcagcaacaggcgcgtaatgccggcctcgatgcgcgccgcttcgacgtgcgcattgccgtgctggatggcgcgcgcgaggtgtggccgcatgtgcaacgggtcatcgatgcgctggcgtcgtcgccgacgccacgctggcacctgctgttggcggccgcgtccagcattgatgccggcatcgtctcggcctggcagtcggccggggtgctggcgacggcgcagcgcaccgatggccacgtacccggtgaaggcgcagcgggcgtgttgctggccagccaggctgctgcacgtgaaggcgacgcccggctgtggcgaccccagctggtcagtgccgagcaggtcgaggggcagcgcccggcagaacagcgtcggcagctggcggcgctcgccacccagtggcatgcatcactggcgaccgatggcgcccaggcccagttcgtgctgcacgacgctgaccaccggggcgacctgatggtggatgccgctgccatcgctgccaccctggcacccgatctcgatttcagtccgcagagcctggcgctggccatcagcgccggcgaactgggcccggcgctgccgctggcccagctggcgctggcccacgcgcagcttcagcgccagagcgaacctgtgctgctgctcggtgtcgccgacaaccagcagcgcctgttcgggctggtcgatcctcttccttccccgacgctgacggccgaggcgccgtccgctccctga

SEQ ID NO: 527882 - DNA, 861 bp, Stenotrophomonas maltophilia
atgcacttgaataatggcggaatcaatcggccaagtctgctctcagggggagcgcaggcgaagggccaggccccgaattcgggccgtattctggcagacatggagggccggcaggcaaccgcgtcccctcgtgctgcgcgcgcgtcggccggtggcaatcggcgcctggggctatggttgggcatcggtgccgttgtcgtcgccattgccgggctggccgcctggggcttctccggcagcagtgattatccggaaccgagcgagtattcgctcacaccggatccggcccatgccaccgggcacccggacattccggcgggcgccccgcgtgacggcgctgccatgatcgtcgatgcgccggccaccgccggtgagccggccctgcctgcacctgccgcagacacagcgcctgcatccgctgatgccgcttcggtcgctgcggccccatcggcggcgactgcggcgagcggggcggccgcacgcagtcctgcgcctgccgcacgcgcttcgcgtgccgcaacgcagagcgacgcaaagagcaagggcgatgaaaacctgctcggcaccctgctcggcatcatcaaggaagaggacaaggccaaggccaaaacgaaggccaatgcccaaccgcaaagcatggacgacctgatcgcacagatcgaggccgaccaacggaaacgcactgaagacgagcgcgccgccttcgagcgcgtggccagcaagaagtccgcatcgaccgagtcgaacatccaggctcagctgcgtgcctgccccagccccgcgtcgctgaagggcgtggattgccgccgccggatctgcgcagcggtgagcggcaaggacccggcctgcccggcgatgtga

SEQ ID NO: 527883 - DNA, 1050 bp, Stenotrophomonas maltophilia
atgagtcagttcgccggctggcttgcccagcgctatcgcaacaaccgcttcttgaccggctatgaagtcgctgccgacgttcgaaactttgatgcgtcagcgttgatgccgctggataaaggagttgtctacctcggcgataactgcatcgagtacattgatcggcacttcctctatcgcggatgggcagtgatgtggggctttgtggttatcagtctcgtactactgtttgtgtccgcaatcgcgcacgcgacggttacgatgcaggcggaagggaaaagcgtcagtccggagatggccgtcactgtcgcagtgctgggcgttctgctgctgggcctggtcgcattcgtctactggatgctgcttggaagagacatcttcaggcatcagtactaccccatccgctttgatcgaaccacgcaccaggtgcatgtcttcacaggcggacgcaacagggtgatttcagcggcctggtcggatatccgcttcatcattggcagggacaagcccgctgggcccggtgaagactacacctacgatctcaggggcttggtgatgcgcggcgaccaggtcgtgcacacctttgcggtaggctcggattgcggttcgaaccccgccgtcgtgctcgcgcactgggaaatgatccggcgcttcatggagcagggtcgttccgcgcttccgttcccgccgttgcaactctacacctcagtggtgccgagcttccgcaatgcgttcatcattcatgtctcttctgcgggcgcagggctgatgtggattgcactgccgctcaccttgccctgggcgctgttccgcttccttgcgatgaagctgtgccgcaagccggtctggccggcggccgtgacccgacgcggaacatccgagccttccggtacgccgccgctgcgtgcgccggccgtatacgggcgggtggatcatgcgggtggccgggcggatcagatggagcgattctggaaggactcgatagccgctgcgaaggcccgcaacgatgaagtgcggcagcagctcctgcaggcaacgagccgggtctga

SEQ ID NO: 527884 - DNA, 951 bp, Stenotrophomonas maltophilia
atgtacaccggatggatgcgcgattttcccgtgggacgtccactttctccacaggagagggcatcgcgtttcaatgtacatgccgctcaatccgtggctcccgccgaacacgcctgcctggtccgcttcaattcgacctgcatcgagctgatcgatcgccgctttcgtctgcggggaatggtgtcgaccacggtagtcctgcttggcacgctggggctgttcctgctcggcttcttcctgctcttcactctggtcatccccaatctggagggggacatatgggactgggtgatgtacggcatggtgggggcgtgcgtggtcggcgcccccgcactgttctggcatatcactctccgatacgagttcttcacctacgtctggtacccgacgagattcaaccggcgcaaccggaaggtctacttcttcatgggcgggaaggagggcgcggtatccgtcccatgggatgaggccgtcttctacatcgggcgaggaaccagcgaggagttcctgcgtgacctgcggtgcagtgtcgttgaggatcatgtcgtcaagcggaccttcgctgtcggtcactacttcgatgacgagttgaaaatacgtggcatctgggagtttgtccgtcgctacatggaagcagggcctgccgaggtggtcgacaccatcgacggtcggcagatgaacctgtcggtcaagccttccctgcgcaactgctatctgttcgtggtcgccagccttggaccggccatgctgagtgcccggttcatgcttatgccactgctgctgcccttggtgctctgccggtggctggtcctgaagtcctgccgtgtgccagtgtggccgcaatgggtgcaggatgagtgcgagatcgacgcgaatgaccctctgaggctggccgagcctgaggtcatggcgcagtcggagtgggatcgtcgttcaactcgatcaggataa

SEQ ID NO: 527885 - DNA, 741 bp, Stenotrophomonas maltophilia
atgggtgattttggccccgtgcacaacgaggacaggctgccctacagcggagccatgaacgatgacgtgcttcgaaagatcacgctggacggcttttcgatcatggcccacaaagtgtcgattgaggattttgatgctttcacggacgctactggtcgcccgagggtaggcacttcgaagattgactcgacgctttatcgtgccgatcccaaggccgctgccggagtgaagtggcaggacgccctggacttctgcacgtgggccggaaaggggtcaggtcggaagctcacgctcccaaccgaggcgcagtgggaattcgcggcgcgatcgggcggcaaaatggtggtatttgcgaccgacacagggagtatcgatgatggtcgcaatgtagcgagctactcccagtacgatgacggtagcggaactgccttgggcaagttccctcccaatcctgctggactttacgacatgacggaccatggcttcgaatgggtacaggactggtatgaggagaattactccgggggtgacgcccgcaatcctacaggcccccaaaatggcatcgagaaggtcctgcgcggaagcagcaaacgcggcggcgattctctcgtacacacctcaatgacttttgcgcgtgatcaccgcccgccgaatcctccgaagtttaaggacaccgatgggagtgagattgattccaaccagaacgggagccacggattccgctgcgccgttcggtactga

SEQ ID NO: 527886 - DNA, 921 bp, Stenotrophomonas maltophilia
gtgcgtagttatcgactgtggcccattacgattctcgccctccttccccttgcccctagcgcatgcgctggcaaatccgccaatagcgctccccaagtccaagggagcgctgacgcaagcgcaagccttcagcagcagatcacccaggatctgattcggatgaagggtggaacctttctgatgggtgactttggcccagtgcacaatgtcgacaagcttccttacagcggcgagaccaacgacgatgttcttcgcaaggtcacgctgagtgacttcgcgataactgctcacaagatatcggttgaacagtacgatgcattctccgatagcaccggacgcccccgaatcggcacctccgatatcgatgcaggcctctatcgaaaggatgtaaaggcgtcagcgggggtgagctggactcaggcgcaagagttctgcgcttggttgggaagcacgactggtaagcgagccacacttccgaccgaggcagaatgggagtatgccgcacgctcaggcgggaagatggtgatttacgcgactgacaatggtcagatcgacgatggtcgaaatgtagccagcttcgatcagaatatggacggaagtggcgttgctctgggcagatatccacccaatcccgccgggctctacgacatgatcgatcacggccatgaatgggttcaggactggtatgaggccagctataccggcgaggacctacgcgatccgcaagggccaaagaaggggagtgaaaaggtcattcgcagcagcacaaatcaaggaggggactcgctcgcacttgtgtcgatgacgttcgcacgtacatcccgtgcgcctgatgcggcgaagcggaaggatccaaaaggaagggacattcaggccaatcagaactatggatacgggttccgatgtgtcgttcgcgattga

SEQ ID NO: 527887 - DNA, 1080 bp, Stenotrophomonas maltophilia
atgagcgttttcatcgacggtcgccccgttccccatcccggccagttcagttcgcgaaccaagcgcgtgctgccgttcgtcgatggcggccactattggctgcagtgggccatcgattcacacgagcatcgatacgcctttgcagacgaaggcgcgatgctcgaaggcgtgcagcagggcctgcatggttcacgcatggcctggcttccccatgccggcctgcaggtgagcccggtcaagctgctcagccttcacaccgacgaacttgaagcgttgcgccagctggaatcgagcccgcccagcaacctgctgtcgaatgaagtgcagagtgtgctggtccggcacggcctgctgagcaacaaggaactgggcgcataccggcccttcctcgcggccgttggcgccggcgacgcgccgctgctgcagcagctcgacttccgtgaatcgctggcgctgtaccagctggcccaggaacagggcggccataacccgcccagcgaggtccaggccgaagcggcccgtttcgccttgcagcacgcacgcaggccgatcgagttcgccgactatttccgcttctacctgcgtgcttatcggccgggaggcaacagcgacctgcgcctggaacgtgccacgcacgcattgcagaccctgctgccgatgctgttcggctacctggacgggccccagctttcgcatcttccatcccccgagcaggtgcgcgccgccattgccgaaacactggcggcaaaccgccacatcggctacgcccgcatttcgctggccgcgcagcaggtcgcgatgttcctgggcgatggcgatgggctgcagctggatggcgaacgatggcgcgaggccgcgcgtcggcaactgcgtagcgcacaggcgttcctcgacaaccatccggtctcgcgcggccagctcggccaggacggtgccagcgtgctgttcgccatcgatggctccaaggaacaggcgcgcatccaggtggaggacaacgtcatcaccctgcaggactaccgccgaacgcgccgtttcgccgaggatgaggccgagatcggctaccaggcagacgcggtgtga

SEQ ID NO: 527888 - DNA, 453 bp, Stenotrophomonas maltophilia
gtgagcccgccctcacccccgcccgggcctgatgacggcgtgcaggcagccacggccgcgctggcctcggccgccggcgtggccgtgaacgccggccgtcaggccgcgcggcagcaagcgcagaagatcctggccgatgcccaggcggcattgcgccacatcctgggggagcgcaacgacggctcctcctccccagccccagaaggagttcctgcgatgaccttcccgatcccaccctctccgttccccacgccggaccgtcccggcggcaaaacccccatgcagattgcgcaggaacttgccgacgccgcgatggcggcaagcgacgaaggcatccgccaggcgatgacggtctcgcagcaggccgtcgaagccgccgccgaagccgcccgccgcgccgatgaggctgccgaggaagcggtacgcagggccgccgaagcgaacgccaggtag

SEQ ID NO: 527889 - DNA, 1476 bp, Stenotrophomonas maltophilia
atgcacaggcaagtcagtcagatgttgcagcgcgcctatcgaccgtaccggtccttgcccgacctgctgggcgcgttcatcaaggagttttcgcaacaccatgcgctgcgtggcggccgtgtccatctgcgtggaccgggcacggcccctggccaggacgcgtcgctggaggccggccagcgcctaccgatccgctacggcggcgaggtgctcggcgagctgcagctggaaggcgaggcgggtggactggacagcagtgcgctggcgctgggtgaagcgttcgcgcatcgatgcgcacatctgatcaagcgctacgaagcgcaagcctgggccgaacaggccctgagccgcccgttgctgctggtcggcgcctgcgatgcgttgaagcggatggaggagttcgtcgagcgcgctgccgccagccagttgccggtgctgctgcgcggcgaattcggcaccgagaagatggaactggccgcggccctgcacagctgcggtccgcggcggcgggggccgttcgtcgaggtcaactgcgcccatccacaggaaacgcctgcggactggttcgcgcgcgcccgcggcggcagcctgtatttccacgaggtggatgagcttccggttcccttgcaggcgcagctctcgcattgcatccgcgacctggagaccgccaccgtccagtctggccaggcccgcgcgatccgggtgatcgcctccaccagtgccgaccttgaacagcgtgtgcgcgagcggcagttctcgcgggcgctgctggccgggctggagttccttaccgtggacattcccccgttgcgcgagcgcagcgacgacatcgatgcgctggtggcgcgctcgctgcagatgcatgggttcaacccgcaggtcatcagcgaggacgtgctggatgcgctgcgtggccatgactggcccggcaacctgctggagatggagcgggtggtggtgcgcctggcggtgatgaccggcgggcgcagcatccgtcgtgaggacctgctgcggcatgcgcctggcctgatgctgggcgaaacagtggcggatgccgatcctccggtgcccgacggggaggcgctgcaggcggccggggcagtaccgcaagctgtcgcttcgacgacacctgcgccgtcgcacgacggcctgcacgatggcctcaagcgtgcgcttgcctatctgaaggatcacgccgccgagccggtcacgctgggcgatttggcgcgccaggcgcatgtgagccagtcgcacctgggcttcctgttccgcagcgaactgggcaccaccttcaagctgctgctgcagcagcagcgcatcgaacacgccaagcagctgctgcggggttggcagcgcctgcgcatcaccgatgtcgcgctgcaggtcggcttcggtgacctcagccacttcgagaagagcttccggcgcctggtcggggtcagcccgcgcagctatcggcgcataccggagcaatga

SEQ ID NO: 527890 - DNA, 261 bp, Stenotrophomonas maltophilia
atggaacacactagcccggcagcccccaaaaactatctgatgtgggcgatcctgagtatcttcggtggcttctggcccttcggcatcgtcgccaccgtctacgccaaccgcacgtcatcgctgctcgccgccggccagatcggcccggccacggtggcatcgcgcaaagcgctgcgctggatgatcgcttcattcgtcacgctgccgctgtgtgtcctgctgctggtggggtatgcactgatcctgcgcgcagcgggctga

SEQ ID NO: 527891 - DNA, 885 bp, Stenotrophomonas maltophilia
atgcctttgggattcatcggcctgggcgtcatgggaacgcccatggccggccacctggcgcgggcgggccgtgccgtgctgggctggtcccgctccggccgcaaccacgccgccgcgcgtgccgcaggcgtcgaggtccgtgagcagctgcacgacgtattcgcagcctgcgaaaccctcatcctgatgctggccaacgacgacgccatcgacagcgtgcttgatcgacagggcagcgcgttcggcgaacgcgtgcgcggccgcctgctgatcaacatgggcaccagttcggcggcgtattcacaggcgctgggcgagcagatccgcgccgcgggtggccgttacgtggaggcgccggtctccggctcccgtgtgcaggccgaagcggcgcaactggtcatcatgctggccggcaccgatgccgatctcgccgtagcggcaccgctgctggcaccgatgggccggcagacggtgtgctgcggcagcgtgccgtccgcgttgcgcatgaagctggcggtgaacctgtacctgatcacgctggtcaccggcctggccgaagccgtgcacttcgccgaagcccacggcatcgagctggaacgcttcgcgcaggtgctcaatgccgggccgatggccagtgaggtgtcacggatcaagctggacaagatggcccgtggcgattttgccgtgcaggcatcgatcaccgatgtacacaagaacagcgcgctggtggccgccgctgcacgcgaggcaggcatgcatgcaccgctgatcgaggccagcgatgccttgttcgcacaggcagagcacgcaggtctgggcgcgttggacatggccgccgtgctggaggtggtccgcgccaggccgggcgctgccggccggcgctga

SEQ ID NO: 527892 - DNA, 402 bp, Stenotrophomonas maltophilia
atgagcgccgaccgctacccgtacctgttcgccaccctcggtgatgtcgccagccagttgcccgacaccctcgccgagccgctggaaaccaccctcgccgccaatcccgccgccaacggcatcaccctgctggactgcctgcaacgcatccgcgacgtggaagcggccgacggccagcccttgcagcgcaaggggcgcgcaccggggcaatgcgtggcgctggcgcgcatcaaccgcgccaacgccgggctcaccgtgctgctggagctgctgcacgccagcgagcgcgtgcgcgtggatggcgaagaggcgcagcaggtgggcaacgacgtgcgcgagggcctgctgctggcgtgcaggggcctgtcggaatatgtggacacgcaggtctacgtggcctga

SEQ ID NO: 527893 - DNA, 1341 bp, Stenotrophomonas maltophilia
atggacacgcgcggcgacgttcagctgcgggccgcctgcctgaacggcggcgccctctccacgcaatctccatgctggctgcagaagacgtccacacgcggccagcagactgggggctcagcggtcgcaccgggcgactgcgtgcaactgggcctttcgatgagcaagcgcaggacctggatcattgttgtcgccgtggccacgttggctgccggcgccgtcgcgtgggcactcgccaatggcgacgaggccgcgctgatcaccgcgccggcccgggtggccgacctggaaaagaccgtgcaggcggtgggccgggtcaatcccaaggaactggtggcggtgggcgcgcaggtgtcggggcaggtcaagcgcctgcatgtggtgctgggccagcgcgtgcaggccggcgacctgattgccgaggtcgattcacaaccacagcgcatcgcgctgcgcagcgccgaggccgccaccagtacgctgcgcgcccagcacaccgccagccaggcccgctacgtgcaggccagccgtgtgttcgagcggcagtcgcagctggtggcgtcgcggctggtctcgcaggaaggttttgaaaccgcacgggtggcccgtgatgccgcccgcgccgacgtggctgcgctgcaggcgcagatcgaccaggcgctgacccaggtggaaaccgcacggatcaacctgggctacacccgcattgtttcgcccactgacggctacatcgttgcgattgtcaccaaggctgggcagacgctgaattcgatgcagaccacgccgaccatcgtgatgctggcacagatggacacgatgacggtgcgtgccgagatcgccgaggctgatgtggaactggtggcgccggggcagccgttgtggttctcgacactggggccgagcggacgccgctatgaatcccaccttcagcagcttgagccggcgccgtcctcgattgccgaggcggccaccggcgctgcgggcggctctgcacagacgccgaaggcggtgtactacgccggcctgttcgatgtggccaacccgggcctggcgctgaagccgtcgatgacggtgaaggtgaccctgcagctggcgcgggcggccaacgcgttgcaggtaccgctgacggcgctgaccgagtcggccgacacacagggccagcgcgctaccgtgcaggtggttgatgccaaggggcgcgcccgcgaacgtgcggtgaccaccggcctgcgcaccgccactgccgtgcagatcctgaccggcctgcgcgagggcgagaatgtggtggtcggccaggcgcccagtggcgccgacaccgaaccgaccagcctgctggggatgtga

SEQ ID NO: 527894 - DNA, 3411 bp, Stenotrophomonas maltophilia
atggcgggctcagacgtagtgcaaggccccgccaggcaggcggtggctgcgcgcctggacgacctgcgccagctgcgccgccgattgctgtacggaggcggcgcgctgatctccgcactggtagtgctgaccgccctggtcagtgccatcgccgatgtcgaggagttccacgcgcgggagcggcattccttcaacgaggcgcgtgccgccgccgaatactacctgctgcagcgtgatcgcgcctatgccacctccatcaacggtaatgatgtgctgtggcgtgaccagcgggccggactggccgcttccggtgccggactggccgcccgcttccacgcgcagggcgaagaagtgctggttcgcgccgaagggcgtactgcggtgccctggctggtgctggggctgaaggacaagccgctgccggaacaggaactggccgcgtacctgggcatggtggacatctattcggcctacaccgccgattcgatcacttcacagaatgcttccgggccattgctggtctatgcctacgagccgcggggacggctgctggcggtgtccaacatcagcgatgaatcccagttgctgcgcgcactgggtgtaacgacccgccagcaggcctttgcgcggctgctgggtgaggaagcgcggttccgccaggcaaccgtgcgtcccgggcccatccgtgaagccgcgcgcgaggggcgcctgatgtcgcgctatggcatcaatccgttcactggtcagccgtcgctgatcggcatggtcaccctggccgaaggcaccactccgtacttccggcgcgtggtgtttgaatctgtcggcaacatcaaggctcagctggaagcgcgcgagcagggtcgctacctggtcagcacggcagagcggcaggtggtgctcagtaccggtggcctgtccaaacgggagcaggatctgttgatgaggcccgcgccaagcgacacggcgcgcgcagggggacagccgccgcgacggtacagccaggggtcgttcgtactggccagcgggctgccaggcgtcgagtggaccctgagccatgtgtacggctggtccgatatctggcgcagccagggtgcctacctgctggcccgcgcgctcagtgcgctgctgatcatcagtctgctgtggtggctgctgcggcgcatcgaccagcgtgtgttcacgccggcgctgaacgatgcgtcacgggtgtacgaaaatgaggcgctgagccgggtcatcatcgggactgcaccggtcggactggtcctgctggccagggacagcggtgagccgctgttgcagaacgacgctgcgcgtcaattggttgagaccgtacgcacggccagcgaagtcgcgtcgccgccactgtacttgcgcctcgccgaagtgggtcgcaatgcgcgcatcgatgaagtactggaactgcagtggtctcccgccgaatcgggcaccgccacccagttgcagatcagcatggcgcaggccacctattacgaacagccggtgtgggtctgcgcactgcgcgacgtcaccgcccaggtggagctggaagaaaacctgcgccgcgctcgcgaggattccgaggcggcacgccaatccgccgaagcggccaaccgggccaagtccgccttcgtagccaccatgagccacgagatccgcacgccgctcaacggcgtgctgggccatctggagctgctggcccgctcgccgttgcagccgggccagcgcgagcggctggaccgcatccggttctcggccgacgccctgatgcgcatcatcagtgacgtgctggatttctccaagatcgaggccggccagctggatgtggagccggtgcccttcgcgttgcgcccgctgatcgaaggcgtggcgctgctgttcgcacccgatgcgctgcgcaagggcgtgcgcctgtacttcaccgtggacgcggcggccggccagctgtgcgtgggcgatgcacaccgcatccgccagatcctcaccaacctggtgggcaacgcggtcaagttcaccgaatccgggcgcatcctgctgcgggcagaactgcaccactcggcggggcagggtgctcagctgcgcgtgcaggtcatcgactccggcatcggcatgaacccggaacagaccgcgcagctgttccagccgttccagcaggcggacgccagcgtttcgcgtcgctacggtggcagtgggcttggcctggcgctgtgccagcagatcgcccaggcgatgggcgggcaggtgtcggtggaaagcaccgaaggggttggcagcagcttcaccctgctgctgccgatgcaggtacaggcgttgcagccgccgcccacgcaaccgctgctcggccggcgggtgaccgtgttgtcgagcacgccggaatggcgggccgagatggagcgcctgctggtggcgtggggggcgaccgccgccgtgctcgaccgcccgcagaacgacgacgagggcggcgatgcgctgctgatcgtgggcgaccaccgcgcatggagcatcgacgaagagcagcagctgatgcagggctacgcgcgcaccgtgcatgcccatgcacagggcccgctcagcgcggaaacccgcggcgaccgcatcgaagtcagcagctacgtcagcgaggccgtgcttgaggcactggcacccggcgaaagcgcggggggccacgtggcggtggtgaagcctgtacgagcaacggccgcccgcgggcgcgtactgctggtggaggacaacgcggtgaaccgcgagctgatccagcagcagctggaggagatcggcttcgccgtggacgctgccggcaatggtgcggaggcgttggaactgtggaaggacggtcactaccgtgcggtgctgaccgacatcaacatgccggtgatggatggctatgccctggcccgtgacctgcgtcagcgcggccagtcgctgccgatcctggcgatcaccgccacggcgctggccagtgaacgcgagcgctgccttgctgccggcatcgatgatctgttgctgaagcctttcaacctggaccggcttgaggttgccctggcccgcaccaacgctccagcggaccacgtacgcggccagcagcggggggcggggcccgctgcggtgccggtgcctcgcgacattcccgcaggcatccgccggatttttgttgacaccggcgaccaggatcttcaggccatcctcgatgcacgcgccaacgcggacactgcagcgcttctggagcgtgtgcacggattcaagggggcattgcagatgatgggcgagcaggcgctggccgagcagtgcggcgagatcgagagtgcgttgcgccaaggtgcgggcgccagcgatggggcgttggatgcactgcagctggctctcagctcccgcctggaggactatcgccgcgatctggacgcatccttgtaa

SEQ ID NO: 527895 - DNA, 306 bp, Stenotrophomonas maltophilia
atgaccggtttccgcttcgtccctgctgccctcgtgattgccaccgccctgctgctgggcgcctgctccaagccgcaggaggccagcaaggccactgcggccgaagacgtcaccgaagtgaagctgctccctgcctatgaatccctcgacaaggacaaggacggcatcgtcaccctggccgaagtggatgcagtcgcaccggactgggccgagcgcctgcacacctgcgataccgaccgcgaccagaaactgagccgcggcgagtacgacgtctgcaagcagaccgcgcctgcggccgcgcattga

SEQ ID NO: 527896 - DNA, 852 bp, Stenotrophomonas maltophilia
atgaggcgtacacccgggcctcccacgcggccgcagccgtcgcaggctgccaccaccgatgaactgctcgaccagcatcgcgatgcgctgaaggaacggtttccgctgccggatccgaaaacgctgcagcgtcgtcgcggcggccgtgccgccaaggtcgtgctgcccgcactggcgctgatggccggcgcgctgttgctggtcgatccggcctggcaggtgcaggaccatcgcacggcggcaggcgaacgccgcgcactcgatctggccgacggcagccacctgctgctcgatgccggcacccacttgcaggtgcgtcgccacctgcgttcacggcaggtggtgttgatccaggggcgcgcccgcttccaggtacagcattcggcatggcgacgcttcgaggtcgatgccggaccggtgcgcgtgcgcaactacggcacggtgttcgatgtggatcgccagggcgatctgagcgaagtgaccctgtggcgcggcgaggtgggggtacgcgccgagggcagcgatgccgagcagcgcctgaagcccggccagcgcctgctggcgcagccggggtcgatctctccgcccgaggcgatcgacaccgacccggccgactggaccaccgggcggctgcagttcgatcggctgcccctggtggaggtgttgcggatcctgcaacgctatcacgaccgtccgatcgtgctggatgaccccaccctgggcgcgctgcaggtgtccggcgtgttcgacgccgaccgcgccgacaccgccgtggcactgctgccggagatcctgccggtacaggtacacgccgccgccgatggcagcctgcacctgcgaaggcgcgattga

SEQ ID NO: 527897 - DNA, 627 bp, Stenotrophomonas maltophilia
atgaaccgtgagcacgtcgccatgctggtgggctgcctgtgcctggctggctgtacgcagccggtgccgaacgccgcacctgtcagcaccgcgcagaccgcgcattccgcgcagccaacggtggccgatgctcccatcaaccgctgggatgcgctgcggcccgatgaagtgacctatcagcggccgccgccgcagatcggcctgtcacgcaatggcatggacggcgtgggcggtttgatcgacgacaccggttccggcacgccgccggggcaggagatcgaccattccagccccgaccgcgccaggcagttcggctcgtcgcaggtggtcgatgccgccgatggccgcgctgtggatctggacggctacgtggtgccgctgggcaccaacgacgccggtctggtcgacgaactgctgttcgtgccgttctacggcgcctgcatccatgtgccgccaccaccgccgaaccagatcatccatgtgaccctggccacgccgatcgcgctgggcgacctgtgggacccgtaccggcttgccggccgcctgcaggtgaagcgcttcgatgcggatatcgccagcgcatcctacgacgccgcagcggcaacgctgacggcgatccacaactga

SEQ ID NO: 527898 - DNA, 534 bp, Stenotrophomonas maltophilia
atgaagcttcccgctgcttttttcctgctgctggctgccagcgccgcgcaggcccatgacgtccgccagctcggtgcgcacgtgcacggccaggccactgttgatctcgcgctcgatcagggcgtgctggaactggccctgcaggcgccgggtatcggcatcctcgatttcgagcgaccgccggccaacgccgctgagcgggcatcgctggcacgcgccaccgcggtgctgaagagtggcagctgggtaacgctgccgacggcggcgcattgccggctggcccgcagcgatgccagcgccgagggcttcgatgcgaccgccgcggcaccggctgccgggcagcaccgtcacgccggcttcagcgccaacctgcagtaccgctgtgccaatcccgcggcgttgcgcgccctggtgatgcgcctgccagccgtgttcccaggcctgcacgaggtcatcgtcaacaccgcaaccgatcgtggccagggccgcagcgtgctgaccgccacccagctgcgcgtggtactggcgccgtga

SEQ ID NO: 527899 - DNA, 855 bp, Stenotrophomonas maltophilia
atgcccgccctcgccgaccagctgctgcgcgaaaccggcccccagcctgcggccgcccacgtcagcccggacggggcggtggtcctgctgcgccaccgcttcgaggccagcgaaggcgagatggggcatccgcagcaactgcgactgggcatggccatggccggcgggggttggctgcagcagcgcacgctcatcggcgtgctgcaggccccgtggcgaccgggccagttcaacgtggtcctgcctggcgacagcggcacctacgccagccccgctgtcgacgtgctcggcattgccatcgacacccacgcgtacccgcaccacgcgctggcgctgcagcagctgcagccgctggcggcgcggcttcaccaggatccggtggtgggctcggtgctgcaggcgctgtggtgcagcgcgcaggccggtgcgtgcctgcccggttttctcgaacacggcgcgcaggtgctgctgcatcgcctgggccagcttgccggccaacggcgcgaggtgggcggcacggccacgccgctgtcggcgcaacggctgctgcagttgaaggactacatcgatgcacagcagggccagccgctgggcgtcacccagttggctgccgccgtgcagatgcagccgtccagcttcagccgcgccctgcgcgccgccaccgggctgccaccgtacgcgttcctgacccggcaccgcatgcaatgggcccgtgccgcactggcacagggccgcaccgtcaccgacgtggccctggccagcggatacgccaaccccagcaagttcagcgcggccttccgccgtgtgcttggctgttcgccctcggcctggatcgcgcaggcgcgcagccggtga

SEQ ID NO: 527900 - DNA, 378 bp, Stenotrophomonas maltophilia
atgatccgctccctgctgcgtcccgccccgctcatgctgatgctggccggcctcgccatcgcgccactggcgttggcccatcccagcctggtgcgggccaccccggccgccgatgccaccgtggccccggccagccagatcgagctgcagttcagtgagaaggtgatgccgcgtgccacccgcatcgagctgagcatggaccacggccgcatgaagatggccatgccgaccaccgcgcaggaggtctccgaagacggccacaccctgcgcgcgcgcttcggcaaaccgctgcccgcaggccgttacgcagtgcaatggcgtgcagtcggccaggacagccatccggtcaccggcacctaccgctttaccgtgaagtaa

SEQ ID NO: 527901 - DNA, 885 bp, Stenotrophomonas maltophilia
gtggtcgagctcccgccgtacgggctgaggctggcactgtatgtggcgctgatgctgctgttcgggcgcacgctgttcgtgcgtccggtgctgccgcgcggccccttgctagcaatgaccttcatcgcgctgctgctggtggccgtcgacgcgctgacccggctttccggcgtgctcggcatcgcgccaaccgacatcgacggcgcgaccgcacactggttcctcaccggaacgccggtgggccaggcaggcctgctgcggggtgcgaccctgctggcgatgctgccgctgctggcgatcaaccgcccattgcagggccgatggcgtgccgcgctgatgctgctgtcggcggtcgcgttggccagcctggcctggaacggccatgccgccgccggtgacggccccggcggcacgctgcggctgatcgccggcatcgcgcatctgctggccgcgggcgcctgggcgggcgcgatcgccgccctgctgcaactggcgctgcgcccgcagggcgtgggcctgcgcgagcgtacccatgcactgtggcgggcggcgcacggcttcgccctgcccggcacgctcatcgtcgcgacgctggcgatgaccggcacctatacctatgtcgatcttgggggatcggtgcagaccctggccggcaccacacatggacgctggctgctgctcaagctggcgctggtgggcggcatgctggcgctggccgcattgcatcgctggcggctggtacccgcgctggcggtgtccatccgcggcggctggcagccgcgcccactgcgcgccctgcgccacagcctggcctgcgagtcggtgctggtgctgctggtgctggcctgcgtggcggtgctgggcacattggatccgctggcatga

SEQ ID NO: 527902 - DNA, 1407 bp, Stenotrophomonas maltophilia
atgagcctgcgccggtcaatggcggtgcggttgacggtgctgttcgccatcgtggccacggcggtgctggcggcgctgggcatggcgatctatgtcagcgcccgtcacgatctggtcgcgcaggatttcagcgaactggagaacaaggtggcgctgatcaatgatctggccagccgtgggccggccgatgcacgcgcgcagcggctggccgaagcactgggccaccatcccgacatcgccttccatattgccgatgatcgcggcggcgtgttgttttccacggcaccggcactgctgcgcgaacatgcccgccgccaacccgtcgatacggtaccgcgccggcatgactggacgcttgccgatggccgctgcatgcacgccctgcacctccgtcagaccctggccgacggcagccagctggtcaccctgctggccatcgacgatgcccgccatgctgcgttcctgcagcgcttccgccatctgcttgccattgcgatcgtcgccgccgcggtggccagcagcctgctcggcggctacgtggtgcagcgcacgctgcgccccctgcgcacgctggccgatgacgcccgcgagatcaccgccgggcgcctgcagcggcgcttgagtgcgcagcgggcaccggccgagctggaacagctggcgcagaccctcaacgccatgctggcgcggctgcagcaggatttcgcgcgcctgaccgagttcagcggcgaccttgcccacgaactgcgcacgccgatcaccaacatgctgacccaggtgcaggtcgtactggctcatccgcgcagcaacgaggcctatcgggagacgctggcctcctgtgcggaagagcttcagcagctggcgcagaccgtgggtgacctgctgtacctggcgcagaccgagacacccggtgtactgccttcgcgcgagccggtggcgctggatgcggtggtggattcgctgctggacttctacggcctgctggccgaggaccggcagttgacgctgcgccgcgagggtatcgcgcgcgtcgatggcaacccgttgatgctgcaccgtgcgattgccaacctgttgtccaatgcgttgaagcacgcccgcgcgggaagcgaggtgcgggtacggctggaacagggggccggcctgtgcaggatcagcgtgcacaacctcggcacgccgattgccgccgaagcgctgccgcgcctgttcgaccgcttctatcgtggcgagcgcagccgccatgaaggcgccgggctgggcctggcgatcacccgcgccatcgcccaggcgcacggcggcagcgtcggcgtcgcctcggatgaaaccggcaccgtgttcgaactgctgctgccgggcgcagcggccggcactaccccgcccggtcgaacagcgccgccacccagtcgatga

SEQ ID NO: 527903 - DNA, 816 bp, Stenotrophomonas maltophilia
atgggtgatttcggccccatcgatccgcgcgcgaagatgccttacagcggtgagcgcgacgacgacgcgctgcgcgaggtgacattgagcagctacgcaatcggtgcgaagaagatcacctacgccgacttcgatgtgtacaccgatgcgacggggcagccacgaacggcgcagtacccgttcgacctagagtacagaaacataccggacgacctaccggtaggtgtgaactgggaggcagcgcagcagtactgcggatgggtaggaaaactgatcgggcggaagatggagctgccgacagaggcgcagtgggaatacgcggcgcgtaaccggggccagttcgtgatctggcccaccgatgatggcagcgtcgacgacggaaggaatgttggcgactacaagacgctccgagcgtatgcctccaagcatggctacacggtcggtccaactcctcttggtcagtacccgcccaccccactgggtctgtatgacatgatcgaccatgggtatgagtgggtctttgactggtatcgggatccttatgacatctccgacacacaagaccctcgcggaccagtgcatggcgatgaaaaagtccagcgaagcagcggcaatcagggtggaggctctcttttcatcgtatcgatgacattcactcgattcaaacgccatccaaatccgggtccagatccacttctggacgacgatgcgaagtatctcttcgaccctaacagcctgaacaggttccgatgcgccgccactgcatctctgcgtcctatggaaagtgccgcctcacactccttgaccccgtcataa

SEQ ID NO: 527904 - DNA, 972 bp, Stenotrophomonas maltophilia
atgccgcctattccacccgtccttctgaaatcccttgtgccaacagcacttctgctgacggcgtgccaaggctcgaccgtcaaagcgccccagaagcactctcctgagctcacagcgcgcatcgaagcgctgtcgcaaaagaccaaaaaagacctggtggaggtggaaggcggcaccttcatcatgggtgatttcggccccatcgatccgcgcgcgaagatgccttacagcggtgagcgcgacgacgacgtactgcgtgaggtaacgctgagcagctacgcactcggcgccaaaaagatcacctacgccgacttcgacgtatataccgatgcaacgggccagccccggacagcgcagtacccgaaggatctgaagtacaggaacctgccagacgacctcccggtcggcgtgagctgggagtcggcgcatcagtactgtggatgggttggcgggcttatcgggcgcaagatggagctgccgacggaggcgcaatgggagtacgcggcgcgcaaccgagggcagttcgtgatctggcccaccgatgatgggagcgtcgacgatggaaggaatgtcggggattacagaaccatcacgcactatgcttcccagcgtggctatatgtctggccctactccgcttggacaatatccgcccaccccgttgggcctgtacgacatgattgatcatggatttgagtggatgcttgattggtatagcaatacttacgacatttcagacacgcaagatccacgcggacctgcacatggcaaggagaaggtccaacgaagccacagcaatcgaggaggggactcgctcttcatcgtgtcgatgacgtttacccggttcaaggacattccagacccttctccagacccgcttctctcggaagaaggaaggcgactgttcaatccgaacagctcaaacaggttccgttgcgcagccgccggccctgccagttcaaaggacagctga

SEQ ID NO: 527905 - DNA, 3090 bp, Stenotrophomonas maltophilia
atgagttctggaaagttcaccctgttccgccatgacgggcatggcaacgtcgtgccctgcgcggacgtcacctatcgtatccgcgatgtactgcatggcttcgccgtcgtggcatccggcacgaccgacacgctcggcgaaaccgatctggtgacgctggcggagcgcgcgcaaactccggcaccaccggccctacccaactggcgcagaggctggccgaacctcggcccggggccggccggcctgaagctgccctggccgcggcgcaacgtgccggacgcagccgccggggccgggcagggcgcccgcctgccgcagagtgagcatcgataccagctgcaggtccgcgatgacgccagcggcgagtggaccgatccgctgttgcatccggactgccatgagcccgcgcagctgggcccctggagcgaagatccacgggccgacgcgtcgctgcggcctgcgttggaggtgcggcggctgcggttgcggccgtttcaccagctgcagttgcagcggcagagcccgccaacaccggtggcggaggccggctttgtgggctaccgccgcgaccgcgatggaactgaggtggtcgccctcgacgtgcacgggcggccggtccgtggcgtaacggatatgcaggggatgaccccgcgtctgttctgcgaacaggatctgcggctggtgttcaccctgccgggcagccgcagcgaactgcgcagtgcgctgtccgagccacgggtggtcgggcaaccgcgcctggtgccgatggtgccggtgaagatgcatgcggtggtgagcggccccggcgaaggcgccacgctggagctggccgggaagatcagtgcaccggcgctgctgaatgtggccgacgaagaactcctgctgctgacacccgaggtctgggaggagttccgcgaggttgcgcgatccattgaaggcagcctctcagccgtgccgcgcgcccgctggcaactggaggaggcgctggccggccgcagcctggaggcggtggcccaggccgaggagaacctgggcatggccgaggaccgtgcagcggccatgctcaaccgcaacttcgcccgaaaggccgatctggtcgaagtgatcaccttcgagagttacagtcgcaaaggggacggcggggcgcagcaggaggtgggccttcgccggaactacctgccgcggttcaagtacgacgagttcaaggggcgccgggtgatgggcgtgcccacccgcgtggatctgggcatgtcgacacgggcaggcgacagcgggatgtccgtgggcagcgcggcccggcagaaggggccggccttccagaactttgattcacgcaagttcatggaatcgctgatgacgatcaaggcccagattggccggagcgtcaaggcgccgaacatccagttcgaccttatcgagctgggtgggaaccagttctccgagctggtgcgcgcgtcggagacctactcggtggagacctccgcgcagtggctgcggtttgtggcgggtgccggggccagtgcccaggtcgagtgggacccactgcaccgcaaggccagcgccaaggtcgatgcgggtgcacattacaaactggcgctgcttgaagcaaaagccgtgcatacgtggtcgattccctcgcgtaccgggtggatgcagcgctacggcgatatcgacctgggcgcgatcgtattccaaatgtcgttggagctgcacggctttgctggcgcgaaacgggcgttgatgggcgctgccggcgtgagcattgatcgtggtgctgccaaggttgacgcgcagccacgtgatcgtgatgacagcttcgtgcccagcttcgacatcgtgcgcggcatgccgcgggctgatatgggcgatccgccgggcgaagacggtcggccgtcgagacgcgtggtgatggctgcggtgggcgagaagccgccggagaccttgaatggcatgcaggtgaatgcggaagccttcgtaggtgttgaggcgggcttgacgcctgcgggtgaattgcaatggctgccgccccagcagggaacaccggtgacgcttgcgaagctgagcttggatacggcgggttctgcgggcgtgggcgccaaggcgcagctgtatgtgtactacgcgaagggacgtttcaggatcaaggtcagtgcgcggttgtgcctgggcattggctgcaagggggcgctggatttcgtggtgggagtggagggaatgctggagttcgccaagtgggtgtattaccagttggcgcatgcggggttcagggagctgatgttctttgcgcgagatgcgctgaagtacttctcccagatcgccttcctcgaggtgtccgccggaggatctgtagaaaggttcctcgcccagaacatcgaccgcgcgctcaaggctgtagaagatcagattggcaaagcgcagattgcgcggaatcgaattgaactggttcgaagaatcaactccgctacgggaaattcagatctcaatagtgcatggctcttgtacgcaacacctgtgactcgtggaatgatcctctacaccatcactcgccacaactggataacgcatatgaatagtccagctgaattcgaggggatttttgatcctcagctgcactaccttcctgatcacaagaaggctgtaatccgcgtgataaggggcgtcagccttgtcagtgaatggctggcgatgtttcagtacatgactgccgacggcgagattagcggtgagtcactgggcaagcttgaaggcgatgtaattaaatttcttgactatgggaactcgctgtcaggtgaccttagaggaaaagtaattgatccaatcaatgtggaaggtgatgtgccatcagatcggctggggagcagctacgtcgagcagttcattgcccatcgcagaagactgctgggtagctttccaaaggggtatgaggtagtgcagttgcagcggatggacctcgatgcgctcctggcgcttgacggcagggacgcgcctacatttgcaagcattgatggcgactacctgcgctcgcgtgggcaggaacaacgggctgttgcgatacttggtcacagtggttcgcctgcaaacgcatcctag

SEQ ID NO: 527906 - DNA, 2814 bp, Stenotrophomonas maltophilia
atgcacacgttgcatgcgcatgaggatgcagcgctgctgcaccggtttgaactgcccggcgcagggtctctgctggtggagcgctggcacggacgcgaggcactgtcggaaggtctggattaccacatcgatgtacttgcggcgcgcgcggatgctgcctgcgaacactggttgggccggcctgcgacgctgcacacgcgtgatgcgcaggggcgcgacattccaagggcagggctggtgcgcgaggtacgtcggctggacggcgatcgggaattcacccgctaccgtatacgcctggcggcatggacctggtggctgggccagcagcgcaacagccgcgtcttccgtgacgcagccgtcaggcagatcgtggatgccgtgttcgccgagcatcaggcacgtgcctgctggcactggagcgatgatgcacgggcccgcctggacgccctcccgccgcgtcactactgcgctcagtaccgccagtcggatatggatttcgtggcctgcctgttggccgaggaaggcatcggctggcgtgtcgaggcggacgcggaggcgcccgcgctgcatcggatcgtcctgttcttcgacagcgcagccttgccgcaggacccgctgtcggcacgcgatggcgcgctgcgcttccaccgcggccacgcggccgagcaggaagacagcgtagtacagctggcccggcatgcgcggcttggcccgcgccggttgagcatggtcagcgatgactatcggcaggaccgtaccttggccgtccagttgccggtggacggcggcggtcattcgcctgtcgagcaatatctggcgtgcggtgcccaggcctttgagtcgcatgccgaggccgagcggcgtgccgcgcttctggctcaacgccatgaagcggagcggcagggatggcagggcattgccacggtgcgttgcctaggcgccggcacgtggtccagcatcagccaatggtcgccgcagcaggtgcccgagctgctgctcacctcggtggagcatgccggggtcaacaccttgcccgcgcggctgcgccagcatcgtccggagcacgccctgcagcgggatgggttcctgcccgacgcgctgcagcgccatgcccagcagttgggctatgcggctgcattccatgccgttgaccgccagcgcccctggcggccgcgcgcaccggagcaggagggcgaagcccaggtggtaggtcggcagacggccatcgtgatcggtcctgacgatcgcaccggggtagccgaaggcgatcaggtgcacgctgacgcgctcgggcggatccgcgtgcgctttcctctgatggatgcaaccggcaggccggcgcacagcgcatggttgcgcgtggcgcagcggtttgcgggcccgggggtgggcagccagttcctgccgcgcgtgggccaggaagtgctggtgggctttctggaaggggacgtgcaacgcccgatcgtactgggtgccctgtacaacggacgcggtgagaacgatccatcgctgcacgcgcaggcctgcgatacgcacgttggcggcatcggcaaccttgccggtggcaatgcgccggcctggcatgcagcaggcgagggcgagcaggcgcatcgccatccgggtgcgctctggggtatccgctcccgggagtggggtggtgaaggcggctccacgctccagttcgacgacaccgaccaccagctccgcctgcagttggccacgacacaggccagcacccaattgaacctgggccacgtcatccatcagcgcggcaattatcgtggcagcctgcgtgggcagggtttcgagctgcgcagcgatgcggcgggcgtggtgcgcagcgagcgcggcctgtggcttggtgcgtatccggcaggggctgcccagccagcaggtacggcggtgcaggccggcgcgttgctggcccagtgtaggacgctggccgctgcgttcggccaaagcgcgcgcctgcacggtactgccgggctgcatgcctcgactgcgttgacacccctgcgcgacgcggcaatgggcgtggttgcggccgatgacttcggccgcgcgcgtgatgctgccggtgacacggttgcagcgggtggtgtcccgcattgcacggcacccctgttgggcatggtggcgccacgcaaggcgctggtggcggggcaggctgtgttctggcaggccgggcaaagcctgctcctgggagcaggcgctgccgggcaggccgtggtgaaaggccacgcgcggcttcatgcgtcgcagtctgtcggcgtgctggcttcggcctctgcttctgcatcgggatgtccgtccggcatgaccatcgctgccggcgagcagccggtcgacatccaggcgcagggcgacgcggtaaagctgcagtctcggcaatcacagcgcctggccagtacgcatgcagcggttgaactggcggcaggacgtgcgctggtggtgcaggtggaaggcggcgccagcctgacgatcgaaggcggcaacatccagttcaactgcccgggaaccctgacggtgcacgcgggccaacacagcttcatcggtccggcgtcgctggcctatccgctgcacacgctgggcgccgcaccctgccgtgcccgcttccttgtacgcgatcacgccggtgcaccgctggtgggggcggcctactcgatgcaattgccggatggccgctggctgagtggaaacaccgacggcgacggactcaccgaggaggtcgtcaccgatggcccggagaaggtgggcctgttcgtggatgacgaacggcacgaaggctacctgcgcgacgcaggcaacagctga

SEQ ID NO: 527907 - DNA, 681 bp, Stenotrophomonas maltophilia
atgagttcccccgccaacttcaacggcgcacgcccggtgatcgatccggacaatgccacgttgctgctgatcgaccaccagagcggcctgttccagaccatcgcagacatgccgttcagcacggtgcgcgcccacgccactgcactggcgaagatggccatgctggcccggatgccggtgatcaccaccgcctcggtgccgcagggcccgaatggcccgctgatcccggagatccacgaagctgccccgcatgcgcagtacgtggcgcgcaagggtgagatcaacgcctgggacaatcccgagttcgttgccgcagtgaaggccactggccgcaaacagctgatcatcgccggcaccatcaccagcgtgtgcatggcgttcccgtcgatcgccgccgtcgccgacggctaccaggtgtttgcggtaatcgatgcctcgggcacctattcgaagatggccgaggagatcaccctggcgcgcgtggtgcaggccggcgtggtgccgatggacaccgccgcggtggcctcggagatccagcgcagctggaaccgcgacgatgcacagcagtgggcggaggtctacaccaggatattcccgaactaccagctgctgatcgagagttacctgaaggcgcaggacgtgcagaaaagccacgagccgctggattcgcagcgcagctga

SEQ ID NO: 527908 - DNA, 447 bp, Stenotrophomonas maltophilia
atgctgcacattccgcgtggtttcaccctgctggaactgatggtggtgctggtgatcatcggcatctgcacggccggcatcggcctgggcctgggcagcctgctcgaccccgcgcggcagttgcggcaggaggccgagcggctggcacaacgcctgcaggtcgcgcgcgacgaggcccgcatcgatggcaacaccgtgcgctggcaggccgacgccgacggttaccatttcagccgccgcgaaggcagccgttgggtggatgtacagcgcgacgacctgctgcggccccagaagtggcaggccgccggcattttggtacagccggccaccgccatcgaactgagcccggaatggatcggcgttgcctgggaagtacggctgtcgctggacggtcgcctgctgcgtcttcgtgatgatggcagcggacagttgcaggtcgtgcagtga

SEQ ID NO: 527909 - DNA, 615 bp, Stenotrophomonas maltophilia
gtgaagcgcccggtgcatggcttcaccctgatcgaggtgatgatcgcgatcaccatcatgggcgtactggcactgatctgctggcgggccatcgacagcgtggccagcagcgaccagcgcctgcgccaggccgatacggaaaccacgcgtgcattgcgcgcggttcagcagttccagcgcgatgtcgagatgcgcgccgatgatgcgctgatgaacggcgcggtgcgtccggccgatcagccgcagcggttgctgccgccctctctggtcagtgagcgccacccggacgggagtttcgcgctggagatcacccgcagcgtgggcagcgacgggctgcgctggcagcgcgtgcgctggtggcggcagggggacacgttgtggcgggccagcggcgctgccaccgaccgctacccgctgcccgcacccgagccgtcgaagggcattgtggtcgcacgagccgtgcagcgcttcgagctgcgtgcgtggcagcccggggcgggctgggcgtcgctgccgggcgaaggcgaggtgttgccggccaccggcctggaactgcggctggaactgcgcgacgggcgcggtgcgttgagctatcggcgggtggtggggctttag

SEQ ID NO: 527910 - DNA, 12396 bp, Stenotrophomonas maltophilia
atgtcgcatccgctcacgaccgcttcgcgcccgtccacgctgcgccgcagccacccgatggcctgggccgtcgccgtcgcgcttggcacggtggtggcgccggccagccaggcccagcaggccttcagcccggcctggtttgccgaccgcggtgccgcccagggcgcggccgcgcagagtggacgcatgcccagcggggtgccgatccagttccagctgcccgcgcagcagcaggatgcggcccgccagcagctgcagcagtcgatcgacaacctggggaccgccgcacaggccatcgcgctgcagcagcggctgcagcaggaagccaggcaggcccggcgtgatgcgggattcgtggtggccgacgggctgggcaaggacggcctgaaggtggatgagaacccgctgacgcggggctggaccaacgcgcgcgaggccatccaggcgcagggcgccgatggccgcgtgcaggtcagcatcgaacagaccgcagacaaggcgatcctgaactgggagaccttcaacattggtgccaacaccacgttgaacttcctgcagaacgcggactgggcggtgttgaaccgggtcaacgaccccaacgcacggcccagccagatcctcggccagctgaaggccgacggcagcgtgttcgtggtcaaccgcaacggcgtgatcttcggcaacaacggccaggtgaacgtgcgcaacctggtggcggcggccgcgcggatcagcgacacgcagttccgtgatgaaggcctgtacagcgtcaacgccagttcggatgcgctgaccgaggcgttcggcaaggtgatggtggagcgaggtgcccgcatcgccacccatgagcccaccacggccacgcgcgggggcggctatgtcctgctggcggggcgcagcgtggagaatgccggccagatcgacacccgcaagggccagacccagctcgccgcgggcgacagcttcgtgatccggcgcggcgtgggcacggcacagaacacgtcgtccaccaccggtggcaacgagatcgcgccgcgcttcgtggcgggcagcacggcaggcgatgtgcgcaacagcggcctgatccaggcacgcgaaggcgacatcacgctggccggacgccatgtcgagcaggccggcgttgcggtcgccactagcaccctgaaccagcgcggcaccgtgcacctgctcagctccgccagcgatggcaaggccagcgtgaccctcggccgcgatgccaccacggccatcctgcttgaggacgatggcaagaccaccgcgctcgacagccagcggcaggcgctgctgaacgagtcggcggcccaggacaaggtgcgcagtaccgccgcacagggggcattcgacaacctgtcgcggctgcaggatcggcgcgaccagtcgcgcgtggaaatcgtctccgggggcacggtcgaggcccaggccgggtcgctgaccctggcgaccggcggccagatcgtggtcgatgcacgccagcgcacgctgctgggcgaaggcgcacgcgtggatgtatccggtgccaccggggtgaaggtggcgatggagagcaaccagctggaaatcaacgtgcagggcaacgaactgcgcgatgccccggacgtgcgcgatgccggcacgctcaacagcagccgggtctgggtcgaccggcgcggcctgatctacgtgccggccggtaccggcggccatgaaggcgaacgctggtatgccggcggagggctgctggaagtgagcggctacctgggcaaccagcgccactccatcggcgaatgggccgcgcagggcggcaccgtgcagcttgccggcagcgaagtggtcagcgccgcgggttcgcggatcaacctgtccggcggcagcctcgatgtggccagcggcatgctcaaggagagctggctgcgcggcaacgatggacagctgtatcgcctggacgacgcgccggtggatcgtggattcgccggcctgtatcgcggctttgaagtggaacaggcgcgctggggcatcaccgaagcctggcgcaatccgttgatcggcaatgaatcgcgttacgagaatggctacacggtgggacgcgatgccgggcggctgctggtttcggcgcccaccgcggtgctggaggggcagatcgatacggccgtgttcaatggcgtgcggcagacgcgggcaccgggcagcagcaccgatggctacgtgcaatcgcagacggcggtggcacgcggcgcacagctgtggctggggcgctacgacggtaccggccgcaatgcggtgttcgactcgcaggtgcgcatcggcacggccgcggcggcgaccgcccgctggagcctgcagagcgcgctggatgaaagccgtcgcaacaccgtctggctcgatggcgcacagttgagcgcccagcagtggggccggctggacctggcgacggcaggcggcatccgcatcgacggtgagctggcccttgccgatggcgggcagctgaacctggtcggtggccgcgtcgacatcaacggccaggtccggattggcggtggcagcctgactgccagcaacctcctggccgacgccaccggccgcatgcaggtggtgcaggccaacggccgtggtgtggtcgcattgggcgaagcggcggtgatcgacctggacgggcgctgggcaaaccagcgcctggacggcggcgccggcagcgcgcaggcatggatcaacggcggtcgcgtgcagctggaaagcagccatgatgtgtcgttggccgcaggcagccgcatcagtgtcgatgcaggtggacgcgtcgacctgcagggcaaggccagtacaggcaagggcggtgacatcgccctgctggccgacagcagccaggtgaccaccgacggcagtgggcgcttgcagctggacgggcggctcagcggcctgggcggcacgggggccggcaccctgcagctggcgaccgggggcaaggtgacgttggctgaccgggcccgcgacgatggcagcctgtggttgtcaccgacgctgctgcgcagcggattcggtcagtacgacatcaacggccatgccgggcttgaggtggccgatggcacccagctggacgtgcgcgcaccgacgttgcgcgtgcgccaggccgctgccgatgcagcgatcgcaggcgagggcctggaggcctggacggcaccgctgtatgccttcgacccgggcagcgggtcggtcacccagcggcagggcgcaagcgtgctgctgcgctcgcagcgcaatacgctgggcggagatgtaaggatcggcagcaacgcggtcgtgcaggtcgatgccgggcagtcgatcgagctgcgcggcggtggcaacatcgacgtggccggtgcgctgatcgcaaaggcaggcagcatccgcctcgacgatgtgcgcgacaaccagcagcgctaccagatcggcggcaccccgttgcgctatcgcatcggcagcaacgcgctgctggatgtgtccggcgacagcttcgccgcggaggacgccgcgggtcgccaccagggcgtgctgcactcgggcggcagcatcgggatcggcggtacgctggactgggagtcgcgtgacgcgctggagaaccgcccactggatgccttcgtggtggtcgagcgcggcgcggttctggatgcgtccggtacccgtgagacgctgacggtggatggcagtggcacccgctccgtggccagcgacggcggcacgatcgtgctgcgctcggccaatggcctgtacctggatggcacgctgcgggcggcggccggtggcgttggcgcgcagggcggcacgctgggcgtggccttcggcggtggggtgtacgagcgccgggcgggcgctgcggagcttggcccgcgtgcaatcaccctggtgcagcagtccagcgatgcagcccctggcgcgtccacgccattgcagcacgggcacgccgagctgtcggcggcacaggtgcaggccggtggcttcgaccatctttcggtgttcggcgatcttcgcgcgcagggggatgtcgacctgcgcgtggggcagagcctgcgcctgtacgggctgagcgatgccgcgatgggcatggccaccggcagcgcggcgggatcggcattgcacgtgcaggcgccctatgtgcgccttgcgcaggcacgctggttccgtgacacctcggacaatccctttgtggcgccggtggcggcccgtgccgacgccggcaaccacagtttcagcgcctcggcacaggtgctggacgtacgcgatacggtcgatctggccggcttcggcagcgcccaccttgccagcagcggcgacctgcggctgctggcgaaagtcagtggcaacagcaacttcttcgatacccagctgctggcgccgtcgagcctggacatcacggccgcgcagatctatccggttgccggaaccaagggccgtatcgcggtatcgatctacgacgtgctgggtggacagaacaactggaccgatgccaagggcgtgcttcgcatccatggcaccggcgccacgcctcctgcggccgattcggtgttcggttcgctggcgttggttgccgccacggtcgagcagggaggcgtcgtgcgcgcgccgctgggacagctggtgatcggcggcctgggcccaggcaatgtcgcgtcgcgtatcacgctgttgcccggcagtgtgacctcaagcagcgcagccggcctcagcgttcccttcggtggcaccgtggatggccagcgctggcgcctgaacggcaaggatgtcagccccagcctggtgggcatgatcagcgccgtggacacggtgggtgtcgacctgcatgccaacagtgtcgacatccaggccggtgcgctgctggacctgtccggtggcggcacgctgaccggcgcagggttcgtcagtggccgcagcggctcggtggacgtgcgcagccacgcactgcgtgacgccaatccggcttacaccttcagcgccagcagcaacgcggtgtatgccattgtcccgtcctaccgcaacggcatcgcgccgctgggcctggccgacggcagcgccgacccgggcatcggccagcgcatcaccgtgcctgaaggggtgccgggcctggcggcgggcacctatacgttgctgccggcgtcctacgcgctgcagccgggcgcgttccgggtggaagtaggggcgcagggcacgcagcaggcgttggccaccgccaccggaaccggctcgtggaaagtgagcggccagcaggcgcaggggcttgcgcctgccgcatcgccgttgtggacggacctggtgctgaccccggccgacgtggtgcgccgccactccggctacaacgaaaccggctacaacgcgttcgtgcaggaagatgcggcgcgccgtggcatcgcgcgtggcatgcagtcggtggacgccggcacgctgcggctgacgctgggcgccggtgcaggcctgggcaccacagacgcactgcgcatgcagggcatgacacgtttcgcggccgaggctggcagcaagggcttcggcggtacggtgtcggtggtcggcaatggtggcccgagcacgctggaagtgctgggtgcaggccagcgcgccagcgcgggcagcatggcggccattttcgccgacgcgctcacggcgttgcagccctcgcgcctgatggtcggtgtgaccctgcgtccggacgccactctgcccggcacgctgaatgtgaaatcggaaggcggcggcgtgctggttcgttccggtgcaacgctgagcgcccctgaggtgatcctgggcgcagcagccggtggcgcgggcgtggtgatcgagcagggcgccgtgatcagtacggtcgggcgtggaaagcccggctacgacgccaccgatggctatctgatgaagctcgacgcgaccacgggcgtgctggccgtgtccaacggccagaccaacctgctgtcggggggcgcggccgcccgggtggcgatcgatgtgggcgcctgccgcagcgacagctgcaccgggcagacccggttgctgtccgagggcagcatcaatgtcagtaccgagggcgggttccagctgcgcgacaatgtcagctatggcacgcgccggttgggcctgtcgatgaccgccatcaacctcggtgatgctgcatcgttgcaggcgatggctgcacagggtgccctgccgcaggggctggcgctgaaccagcagaccctgcagcagctgctgcggggcaataccgcgcttggcacgcccgcgctggagacactgagcctgtccgcacgcgacgcgatcaacgtattcggcagcgtggacctggacacccgcaatccggccaccggcaacagcagcctgcgcgagctggtgctgggggcgccggccatccatggctacggcaaggccggtgaccaggcccgcatctatgccgacacgctggtatgggatggcacacaggcggtatcgacggtgctgaccgacggtaccccgcaggcgccgggcgcagcgatggtcgatcggctcggccatggacagctcgagctcaacacccgctcgctgatcctcggccgcgcgccctatacacgccccagttcggaagtgccggccaaccgccaggtgctcgggttcgacggcgtctcgctgcgggccacgcagcaggtgcagttcgccggcaagggcacgctggatgtctaccaggcccagggcgcctaccaggccggcacgggttggcagtacagcggcggcgcactggacatccaggcaccgctgctgaccggcgcggcgggaagcaccctgcaggtacgcagcgggggtgatctgcgcatcagcggcgccggccagacccaggggcacgacgcgctgggcgccgaactggggctgcaggcacgcaatatcctgatcgactctgccgtggcgctggcctcgggccgcctgcaggccagggcggacggcgacgtggtgctgggcagcaacgcccgcatcgacctggccgggcgccgcatccgcatggacgatctggacaagtacagctggggcggcgacgttgaactcaccgcccgccagggcaacgtgctggccgccgctggctcgagcatcgacgtctcggcatcgaacaaccgcgcagggcggatcaccgccaatgcgctgggcgagaacgcgggccgcatcgacctggccgggaccctgcgtggtagcgcgagtggtcgccaggccaccggtggcagcaccgtgccctatgacagcggcgaactgctgttgcgcgcgcagcagctttccgacttcgccggcttgaatcgccagctggatgcgggcggcttcttcggtacccgcagcttccagctcaagcagggcgacctgaccgtgaccgacacgctgaaggcgcgcaacgttgcgctcagcatcgatggcggcagcctgcatgtgctcggcaccatcgacgccagcggagagcaggtgggaagcatccgcctggccgcgcgtgaccgcctgcaggtggatggacggctggatgcacacggcagcgggctgcgggtggacagctacggcaagatcatcgacagcagcaaccgtgcgctggtggagctgggcagccgcgacggcgaggtggtgctgggcagtgccgcgcgcgttgacctgcgcagcggcaccgcggttgcacagggcgacgcgcccggccagaacgatggcgtggcacgaggcaccttcaccctcaatgtgccgcgacggggcactgacgatgcagcagtgcgcgccgagtccggtgcgtcggtcaccggcgcgcgggatgtgctggtcaatgccttccggcgctataccgacgccccgctggcagcgacgccggatgtcaatggccatcggccgcagctggtcacccagcaatggctggacacggtggtcgatccgcacaaccaggcatggatgaacgccgccctcggcaacgccgatctggcggcgcgcactgcggcactgggcaaggtgcgcctgcggcctggcgtggagatcgtgggccaggtatcggccgacaatcccaccggcaacctgaccgtgcgcggcgacctggacctgtccggctaccgctatggtccgcaggccaatcgcaatgaccccctgcgccgtggattcggcgagtcggctgcgctggtgctgcgcgcagcgggcgatctcagcatctacggcagcatcaatgatggcttcgcgccgcctccggccaaccccgatgagtcgggctggatgctcggagagacggccgatgccaatacgctgcgcatcacgccgcttggcggcgacatcgtggtgcccatcgatggcgtgacgctgcaggccgcgacacgtttcccgaagggcgcggtgctgaactacgcgatcccggtcacgcagaccgatgtgcccgccggcaccgtgctgccggcggagatgcggctgcgcgcccgcctgctgctggcggcgggcacggtgctgccggcagccgtcaccctcgccgacggcaccgtgctggccgcgggcagcctgctgcagcagccgttgcagctggcagccggtgaccggctgggcgccggcttccggctcgcttcgaaagcaacgctggcggcgcagctctggccggcaggcgcggcgttgccggaggccatggaactgtccggcgcggttgcactggcaccgggctcgctgattccgtcgatgaccgcggtgaagctgcccggcggcaagccggtcaacctgcggccggccgatgccaacggcaggcagggccgcaactgggcgttggcggcaatgttgccggaaggcaccacgtcgtgggatgtcactgccgtggccggtgccgatacctcggcagccgatccgcgcctgcgccggctggatgccaagggcgacctgatcctggccgacagccactatggaacgataggcaccgtgcagaagaccagcgagtggatcggcgagcgggtcctcaccctggatggcgcgcttgcgctgatcggcgatccctcctacgccaatcgaccgttgaaggaagtggccgaagaactgggcgtcgacgagcagacgctgtgcgacgcaggcgaaggcttctgcggcctggccccgcgcctggtggccaagcaggcctcgctggacctggtgggcgacgagtcggcggtgggcatgtcggcgaaggaattcgccgagatcttcggcatgaccgaagagagcttctgcgcgatcaccgactactgctatggcggcggtgaactgatcgagaagacgatctatggctcgaagctcggcactccgctgtggagtgtgctgcgcaccggcaagggcgacctgcagctgctggccggccgcgacgtgcggatgatgtcgggcttcggtgtgtacaccgctggcgccccgacatcgctcggcaacgggcgcgatgcagtgttcaatccgggccgggcgccggcaccggggctgtccaccgtgcttgggccgaccgatgcggacgggcgctatgcagcggccttgggggcatggcaggcctggtatccggaccagggcggaaacctgaccgtttccgcgggccgcgacatccgtggggacctgtgggacagcgccggccaggtaggattcgatgtcacgccgcgcagccagagcgaaggcgcgggctttgcccccagtgcggtgggcaactggctgtggcgccagggcagccccggcgtggccggggcaccgtccacggcgacgagctggtgggtgaacttcggcagctacaccagcctgccgacgctgaccggtgcgcgcatggtgggcttcatgggcttcggcacgctgggtggcggcaacctcaccctcgaggccggccgtgacgcgggcgtggccagcggaaccgtggtcaattcactggcacgccattcgtccggcgtggtggcagcggtgggctcgaccgggcgcgtcgaggccgacggtacgctgcacctgaccggtggcggcgacctggcggtgcgcctgggtggcgcgctgaatccgaaccttgcactggcaaccagcgatccatcgttgaaccagcccaacctgccgctcagtggtgcgctggtcaacctgcgcgggcgcatgcagctggacgcggcacgcatcggtggcatggtcaccaatgtggcgcactacgtggcgccgtacagcggcctgaggcaggaagatccgttccgcgcgcagctgggcgatgccatgggcgggccggtgctggtgctgggcgacgcggtggcgaccctgcagtcgcgcggcgacctggtgctggccggtgtggccgatgccggccgggtgccggtgcccagctacaacgcactggcgctgggcgatggccgtaccgccgcttccagcagctggttctcgctgtggaccgccaataccgcggtggacctgatctcggccggtggcgacctcgcacccggccagcagaggggaaccgtgatggccaccgccgagtccggcgaactgttcgccgaggcggtgaagcaacgtggcggtgccgatcttcgctactggctgtatccctcgcagctgcggatgctggccgccagcggcagcatccgccttgcggaaacttcgaccacgggcggtgatgcgcgcgatgtgctgctgaccgcaccctcggcacgcggttcgctggaagtgctggcgatggactcgatcctggtgccgatgcgcggtgccgacatcagcagctccggcgccgatgtgcgcttgccgtcgccgttcgcaccggccttcaccgccgaggtgggcgccacggtgatcggcaacgcttcggtggatggcgtggcaggcaatccgcgcgcctcgctgccgctgttcgcgttcggcccgaatgcgccgctggcgcgggaactgcgcgaaggcaccaacgcgccgaatcgattctatgcagtgcagggtgacatcgtcggcctgaggaccggtgggcagtggacgctggacaatgccatgggcacgcgcagcctgctcaactggagcgatctttccgccccggtgcaggtgcgcgccggcggcgacatcctggtgtccagcatcggcgcgatgaacaccactgccaccgacatcaccgtggtgcaggccgggcgcgatgtggtgcgcagcacggtgcgcgtggccggaccgggcaacgttgatgtcagcgcgggccgccagctccgcttcgaggacgcgggcagcgtgaccaccactggcggcctgatccagggcgatacccggccgggtgccagcgtttcattgaccgccggcaaccagcacatcgccttcgatgcggtgcgcgcgcgctacctgggggctgccaatcttgccgaccctgcgcagccgctggcatcgcagccggggaaggtggccaagatctacgacgcggaactgaagcagtggctgtcgcagcgattcggcatgagcgtcgacgacggctccgcgctggccgccttcgatgcgctgccgaaggagcagcagcacatcttcctgcgccaggtcttctatgccgaactgcgcgagggtggccgcgagtacaacgatgccgaggggccgcgcttcggctcctacctgcgcgggcgcgaaaccatcgccaccctgatgccggacaaggatgcgaacggtgcgactctcgaccggaccggcgacatcgtgatgttcggtggctccggcgtgcgtaccgaagccggtggcaacatcgagctgctggcgccgggcggccagatcgtactgggcgtggcgggcgaggttccgccagccagttcgggcctaatcacccagggccgcggggatatccggctgttcagccaggacagcgtgctgctggggctgtcgcgggtgatgaccaccttcggcggtgacatcctgggctggtcggagcagggcaacatcagcgccgggcgcggctcgcgcaccacgctgctgcataccccgccgcgccgtgtctacgaccgctggggcaacgtcgtgctgtcaccgctggcgcctgcgaccggcgcgggcttcgccacgctgaatccgattccggaagtgccggccggcgacgtcgacctgatcgcgcccctcggcaccatcgacgcgggcgaagcgggcatccgcgtctcgggcaacatcaacctggctgcgctgcaggtgctcaacgccgccaacatccaggtgcagggagagagcaagggcctgccggtactggcaacggtgaacgtcaacgcgctggcagcagccagtgcggcggcaaacagtgccagccaggccgcacaggatgtgatgcgcaagagccaggacgacgcgcggcgcaaccagccgtcggtgatcagcgtgcagatcctcggcttcggcagtggcaccagcagcatccagccgccggcgcgtggcaacaccgccagcagtggctacgatgacaacagcgccttccagttcccgcaggccaggcgcgacgaaggcaagcagcgccgctga

SEQ ID NO: 527911 - DNA, 1137 bp, Stenotrophomonas maltophilia
atgaacaagtacaagaccctggccgcgctggttgccaccgcgctgctggctaccgcaggtgccgcctcggcgcagtcgctcgtgcagggcggtggcgcttcgctgccggccaagctgtacaagggttcggccgacagcatcctgccggccaacttcagctatgaagtgaccggttcgggcaccggcaagcaggccttcctggaaaaccgtgccgacctgttcaagaccaccggcaccgtgcatttcgccggcagcgactcggtgctgaccgacgctgagatcgccgcctatgccgccaacttcgccccgacctacggcccgctgatccagattccgtcggtcggcacctcggtcaccgttccgttcaacagcgccggtggcaatctcgacctgagcgtcacccagctgtgcggcgtgttctccggcaagatcaccaactggagcaccctggatgcgaatcgttcgggcccgatcaccgtcgtgtaccgcaacgagaagagcggcaccaccgaactgctgacccgcttcctggccagcgcctgctcggccagcgacaccgccggcagcaccctgatcggcggcaagttcagcaccacccaggagttctggaagcagttctcgtcgctgccggcgaacttcaccaccgcttcggcgctgggcagccagccgctgtatgacaaggtctacgccaccaccggtgcgattggttacatcggcccggacgtggtgccgaacctgagcgacgccaccaagatcgccaaggtgcgtggcttctcgccgaacgacccgagcgtgcaggccaccctggacacggtgctgccgccgaccggcgctgctgccaatgacgtgcgcaactgggccccggtgttcaccaacccgccgtccgtcggttacccgatcgtgggctacaccaccttcgagctgggccagtgctacaaggccggcaacgttgcgctcgccctgcgcggcttcctgctgggccactacaacggcaacaacgatgccgcgtcgcgcgcccacggtttcgttccgctcaccccggcctggcgtgatgccatccgcaaccgcttcgtgctcgccagcagcgtcaacggcgtgaacaacgccagcgcctgcgccggcctcggccgcccgtaa

SEQ ID NO: 527912 - DNA, 528 bp, Stenotrophomonas maltophilia
gtgaccacaccgaccctgcgccggggtgcgggcctggcaggcctgcagcagcgctggcagcgcctgccgcctcgcgaccggttgatgctcggcgtgatgatgggtgcgctgctgatggcaggcctgtggtcgttctggctggagccgctgctgaagcagcgtacgcactggcaggcggaactgccgcgactgcaggcacaggccagcgcactggcgccgctgctgcgcgcccgcgagcgccagcagcaggcccgggatcaacgcccgacgctggccgggctgcgcgaacggatccggtccgccgggctcgccgaaggactgcatatcgaagcacgcgacgggcgctggcacctgcaggtgcagggcgtgcccgccgacgcgctgtggaactggctgctgccggtgctggctgatccggccatcgaactgcagcagctgcaactgacacgtacaggggatgcgaacatgccggcggcacggattaccggaaacatcgtgatggcacccgttgcgggtggacattcatga

SEQ ID NO: 527913 - DNA, 1164 bp, Stenotrophomonas maltophilia
atgagcatgcagttgaggatctgcctgccaccgctggagcgcctgcgcaccgacaatgaggtcgattgggcgctgctgcacaagggcgccgtgcaggcgcatggtcgcgggacgctgatgacactgggccagcgccatccacaggccgaggtgctggcctgcctcgatccgcacgatctgatcctgctggagctgcagctgccgccactgaccgggcgcaggctgcaggctgcattgcagggcgaagtggaggcgatgctgctggacgacctgcaggaggtggccctggcgcacggcgcgcaggccgatgacggcagcgtgccggtcgcctggctgggccagcaggcgatggtgcaggcacagcagctgctggaagcgttcggcctgcggctgcgcgcactgtacccgacgccgctgctgctgccgtggaacggcggggaagcgacgctgtgggcctgcggtgagcacctgctggtgcgcagcgggcgtgaccggggcggcgtgcagtggtgtggcgggcgtgacgcaggcgcggtcatgcaggcgctggcggcgcggctgcagcagtccggcgtacaggccgtgcagtggatcggcagcgttccggcaggatggccggaaagcctgcctgcaacggcggtcgcgcaccaactgcaggcctgcggaccgctgccggggtggtctctgcctctgcccagtgcggcccggaagcggccgcggctggcgatcgggctggcattggccgcggtgctgctggcggcactgggcctgcagctgcaggtttcgcgttggcgcagcgagggcgaggcgctgcagcaggacatggcgcggcagttcagcgcgcgcttccccgagatcaccgatgtggtggacccggtgctgcaggcgcggcgtgcgctggccgcaccagcgccgatgccgtcgttgccggcggtgcagcggcaggtggccagaacgctgcaggcgattccggaactgggcggccaggttcgcggcctgcattaccagccggggcagctggaccttgaactggaccccgatgtgcaggcgctggccgacgacgcgcaacggctgcagcagtggcagcaggcagcccaggcgcagggcctggagctggcacgcgcgaacgatgggcgcctgcgcgtgagcgggggcgaccggtga

SEQ ID NO: 527914 - DNA, 591 bp, Stenotrophomonas maltophilia
atgccgatggcagacagtcgcagtgtcaccatgctggaactggaccggcacctgagccagtcgctggagcaggcacggcatgcgccggtgaacgtgcaacgctatggacgctcgtgggtatgggtgctgtccagcgacgcgtgggcggatgctgcgcgttgggcagcgctggacagcagcgcgcatccgttgttggccctgcgcagggtgcttgatgtgcagttgcggccctggcccgagactgtcatgaacctgctgccgtttgatgcgggcgctacgcgcgcgctgcaacgcgccgcgttgctggtggtgctgcgcgatctgaacagcgcgcagcgggtgttcgatgatctgcgctaccaccaggcctatcggctgtttgtcggcctcggtcacggcacggcatggtcgtcgatgcagtgcgtgcggctgctgcaggcatgcgcgcagtcgctgctgcgtgcatgcattgaagacacgctgggcgaaattcctgcgccgctgctggaggccgcgcgcgtgcctgcagggcgcacagtgccgctgcaggtgcaggcgcagcgaatagcaggcggatgtttatcgtactga

SEQ ID NO: 527915 - DNA, 681 bp, Stenotrophomonas maltophilia
gtgttctacgtcagggggctgaatggacaccatgcggtcagaacttggagggtggccatcgccgcatggctgctgttgtccttcgcggccgccgcacaggacggtgttcatgcctacgacatcccggcgcagccgctggagctggccgtcgagcgcttcagtgtcatcagcgggtggtcggtgatgtatccgggtgaccttgccgcagggcgcagcagccatgcgctgcgtgccagcctgccgccgttgcctgcgctgcaggcgctgctgcaggacaccggcatcgaggcagaggtgatcggcgagcagcgcgtggtgctgcgccggggcgcgcaatccgcgaatgaaatgacgagcggcagcgaacctgccgacgccgagcggcgccgtcgctatggcgatgtgcagcagcgcctgcgcgaggcgttctgtgacgacccgggcatcgcgccgggccgctatgcagcaacgctgcgcttccgcattgacagcgacggccaggtgcacgcgcccgagatggtatccggcagtggcaatgcaggccgcgacgcacgcctgctgcaggcgctggcgcagctggtgctggcgctcgatgccgccgcgctgccgcagccggtgacgctgcagatccgaccttccggcatcgaccacgactgtggccggcgctcgccccttccatga

SEQ ID NO: 527916 - DNA, 1161 bp, Stenotrophomonas maltophilia
atgaagcagcagagcatacttactcagccgtactccatttcactcccttgcatccgcgtcacccagcccatcggcgacttctacgtcgcatcgatcgattctgcgctgcttcgcgagatcacgtattccgacgtaaggcaactccgtggcggtcgcgagatggatgaatatctcggaattcaacgagaagtcaatccaaagagagttcgggaaatcggaaagtatgtgaacacagtcgacgcctgctttccgacagccgtcatcttagccataccgggcatttgcgcctcatatgatgagaacaacaagaccctaactcttaccaacgtaatagacgacaatggcgagaccattatcgatagaactcagatcgcaagagttctagatggacagcaccgaatcgaggggcttcagcatttaaatctggcgaaccgtccgtttgaagtaaacgtttctatattcatagaaatggacatcgaaagccaagcctacatattctcagtcgttaacctggcacagacaaaagtcagcaaaagcctagtctacgacctcttcgaatattcaaaatcgcgcagcccccagaaaacttcacatacgattgcggttgcactggacagagcagagagcagtccgttccacaagagaattaagcgactcggggttgccacagaaggtcgatttaccgaaacactcacacaggcaacattcgtcgaagcccttcttcgttacattagtgcagatccaactacagatagagatctttatctccgcaacagcaagccctaccgtgctgatgcagacgaacagcgaaaactgatcttcagaaacatgttcattgatgaaagggacatggatattgccgacatccttttcaattatttttcggccgtaagtcaacaatggccgaaggcatggagcgggctcggcgatggagcagtgctcaataagacgaatggattcagggcactcatgcgactactaaggccagcctacctgagcattacagcccctggcgagatggtttcgattgaagagttttcagcacttttcaagaaagccacaattaaagacgacgaaattacaactgacactttcaagcctggcaccagcggagagacgctcctctatcacacgttactaagccagcttcggctgtcgtag

SEQ ID NO: 527917 - DNA, 723 bp, Stenotrophomonas maltophilia
atgatgtcgcagttggatcagccagatcagaaagagggctcgcgcgcgcccacgcccccgagcggcagagcgcgcaaatttctaagcagcttacctatcttgggcccgctcgcgcactgcactgcgaagaaccataaagattcgctgaaagaattttttataacgataattttcggaacggcaacattttgggttaccgcatttttccttaaggcatttatctccaaccgcaacaagaattatttcgaactgctagtcagcaccattagcaatggtcagctttttatttttgcagttggcatgttaggtccaatcctattagcctcagccgaagactctgaatccaccaagcaattcccagggcgagcctatcatttcgccgcgatgctattcttaggcgccctttcttctgggttctatgcctttgtgctagccggaagagagccggtgatcaaagagctcttagattcggattttttgttaatcgcctcgatctgtatcgccggcattgttgtcaccctcagatacctcaccacagtttacagaaagagtacacttgcgttcgacgcagaacgaggactgaaacaaccagtcaacgagttcgcagataaatttgcagcccgacacccgaatgaagatttcccagatcctgctccgcatgaaaatccagtcgctgatcaaatgacggaacactttaacaggcgaaatggaggccaagcatga

SEQ ID NO: 527918 - DNA, 879 bp, Stenotrophomonas maltophilia
atggaactgaaacgtcgagtagagcagattctggagcgccctgagaaagacggcgatcgaggtcgtatgtcagtgggctctttgggtgttctacccttcctaaaatgggcaggtggcaagagatggttaatgcctctcgctatggagctccaaggacactgcaaaggccagtacattgaaccattcttgggtagtggcgccatgtattttggcttgagaccagaacgagcactcctgtcggacagaaacaaagaattaatcgaaacttatcgcgcaattgcggacgactggcgcaaggttcgactccgacttgccgagcacgatagagcgcactgcgccgagcattactataaggttaggagtagctcgccaacatccgctgcgggcagagccgccaagttcatttatttgaatcgcacgtgctggaatggtctctaccgagtaaataagaagggtgttttcaacactccaatcggaacaaagtctcgcgcgaccctagagaccgatgacttcgagagtgtatccgaattattgcgcaccgcatgtctgagcgacggcgacttcgaaagtcagatcgaccgagcggatcaaggagactttgtttttgcagatcctccatacactgtgcgacaccagtacaatggcttcataaaatacaacgaacagctcttctcatgggccgaccaggagcgactccgggcggcgttgtttcgagcaaagagcagaggcgcagttgtaatgtgcactaatgcggaccatgccagcgtcagagagctttaccaaggggattttcgcgtcttctcgctaagccgatacagcgcaattgctggggctggaggaactcgtggaaagtatgcagagatcgtagcagtagcctga

SEQ ID NO: 527919 - DNA, 420 bp, Stenotrophomonas maltophilia
atggccggttcgattccatcgtttgcgttggcagtgggcctgctggtgttgtccgcgtcggcaggcaatgccagcgcgcaaccgcgcgacgccacgtattccagcgtctgcaggcacgccgagtcgggcgatcttcttggcctggaggtgtcgtttgtcagcgaggccgatggcggctacgcattggtccagcgttacgagggcgcagccatcgcgccggtgctgatgcaggtcaagcaacgcgggcgtgatcttgtgctggtgagtggcgctacggattccattgcgctgcgccaggacgggaagatcctgcggctgacctaccttgatggccagctgagcgctgcgggcagctcgtcggaaaccctgatcccatcgttgccagtgtggcagggaaagagcgtcgctgcttgccgttag

SEQ ID NO: 527920 - DNA, 549 bp, Stenotrophomonas maltophilia
atggggggccgcttctacgatgcccagcaagcccatctgcgaggcatgtctgcgggctgcggcagaccgcggtacggctttcctgcggagatgaacatgaactatgccatcgtcgatgcagcacgctgtgccaacagcgccgctgttctgcacgggtacgcagcggagggaagggctcgagcgctgttcgcagggcagccggaaagccctcatgcggacgccggaccttggctggttattctgagcgaggacccggtcctgcatcagtggttgttcaatctcgagccgatcccgggtgcagtctgccgcttctccagtacggtgaacgtcgacgctgtcgtagtgcaccttcaggcccgcatggcgctgcagctgacggatggaggcatggcgctattccgcctctgggacggccgcgcgctctaccggatgtggggagtaatgacgcaggcgcagaaggccgcgttcatagcgccgttctcacgctggtcggtacaactgcagggtaggcgttgggagctggatcacatggcggtggagaaaccttga

SEQ ID NO: 527921 - DNA, 360 bp, Stenotrophomonas maltophilia
atgctcaagctggttgctcgacaggaagctttgctgcgcctgcctgatcccttctcgttcctgcctcgacttgcggcggagatccggcgtgatctaccagagcgggtcatggggctggatgatgctgcgctgctggcggagacggaccgctgctacacctatgccgcctatgaacttggcgtcactcatctggaaacacttgttgcatggaccaaggtggatgttggcagcggtggagagcttcatcgcaatgccgaagtggacatcgctgtgcgccatgcggacaaccccaacatccaggcagcagacctgttgggcgccctggtcgctctgcatcgctggccgaaggacgacgtgtaa

SEQ ID NO: 527922 - DNA, 708 bp, Stenotrophomonas maltophilia
atggctgccattccgattcgatgggggttgggaaaactggctgaacgggccgcggcagcggcggcggcggccgcagcggcggcagatgcggccaaggacgtggtgaagggcaagcccgacgtaagggcacgcgacgtggagtgtgcagacgctcaggatgccagtgattgcaacgagtgccggctcggtgatggcagggtaggacagccgcctacacctcggtacatcacgcggcgcacgcgtatcaactacgactatcagctccagatagcgaacatgtatgccggcccggagagattcggctatgtgaagcggggggacaacgcggacgaaatcgtgaacttggatcttgaatcgttcaagagcctgtttggacgaggaggagagttcacaacgttggaatggttgttcgcaggcatttcgttcgacggcttctggaggagccgatgcaccgtgctagaggccaagggcaacttcggctcattcttcaatgctgacgggtcgttatcgaagcccttcgcacgggccatgacggaccaatggctacagagcttcaccaagcaggctatggcggttcgtgcaacaggaccacagggaaagcttgaatggcatttcatggatgtggccgcctccaaggcaggcctaatggtcggaatccctcctgcgtctgtgcgcgtcacccctttggtcattggaagaatgccttga

SEQ ID NO: 527923 - DNA, 516 bp, Stenotrophomonas maltophilia
atgtgcatcagcaagatcgagtacctccgtggcgaggatgagggtgccaccaccgcgacgctcaagccttgcggcggcaggaacctggttttgggtcaacgaggcgtctacgtagcccatccagccgagaaattcccgatgtggaaagggcgcacgatcaacgctgtagagcagcaactccccttccacaagctgctgaacatttgtctttgcaaacgtgatgggaaggctgttcagcagcaccgaaagcgtggactcaagaacactgacaggggaatcgaacaccttctcaatgcggtccacatgaagtcgaagcatcccgagcgcgggcatataactcagcccaacaccgcctcgtctcagccagtccttgtcattccctgcgtttgtgaggagcgcgccattgcttccaatcgagggctgaccgggatactccttggcgagcttgatgtcatcctcctgcacacgggcaacaagatcgtcaccttcaccaacaggtacgtaagcgtcacttga

SEQ ID NO: 527924 - DNA, 501 bp, Stenotrophomonas maltophilia
atgtcacacgccctttccgccctcggggtgatccacaccgctgtcagtctggttccggtgcttgccggtctgtatggcttcatccgtcaccgcgccatcgacccggccacgcgttcgggcaaggcctatctggtcggcctggtgctgtcggtggcgacctcgttcaccgtgtccagcaccggcgggctgaatccgggccacgccttcggtgtgatcgtgctgctggccgcattcggcggtgtactggccgggcggctgcagttcctcggccgcgcgcggccgtacctgtcgaccttcgggctgtctttcagcttcctgctgtcgctggtgccgggcgtgaatgaaacgctgacgcgggtaccgctgtcgcacccgatcgcggcggcaccgttggccccggtgatcctgcagacgctgctgggttgtgccgtggtgtttgtgctcggtttcctggcgcagtgctggaggatccatgcacgcgctgtacgtacgcgtggctga

SEQ ID NO: 527925 - DNA, 1245 bp, Stenotrophomonas maltophilia
atgaacgacagcccctacaggacctaccgcgtcggaatcggcgtttcgctggtgttggccacgctcctcgccacgctctcgctcatcgcggtggccactcccaacctgggctggggtgtcgtggcgctggccaccatcgcactctgggtcggcttgccattgctgttggtgctcgtgctggcctggctgcgttacatggtgcggcagcgcgggcgcgttcccggccgcgtccatgcgttgatgttcgtgccgaccgtcgcggccatgctcatcattcccctgtggcagtccctgcagcacacgtggtccaccgtggcaggcgggtcgcgtgacccgattgccgagcggcacatcaatctcagcgggcagcccctgtggctggacaccgcgccgtacgcgtccaccggctccggcacaggcccggacctgcccatgcaaggcgacacacccgggcatttcgtggccttccaccgctaccccaacgcgcagtccgatgcagacagggccttcccgtatgaagagggtcgcctgaagcgttccgttgaccactatcgctacgccacgccgtccggggatcgcgccgtcaccgacgtgccactggtccgccagccttatccggacaccacacgcttcaacaccggatggggccgcacaggcacaccggagctcgtacatctctactaccactacagcgatcatgtggaggtcgcgcccacgctcgcacgcctcagcggctccactgccgacgatctgcagcgcagccgcttcgagggcctggtgctgttcaccatccacaactatggcagcgcgcccatcgtgcggatggaagccaatggcatcgcactggacatcggtgacagggccatcgagaacatcccggaggcgcctgcggattgcacagcctatggctacccggccggcgtcgcgctgctgccactcgacctgccgctgcaggtgcgctggcaaaccgtcgatgcgccgacacagtggcacagcgcgcgcgtgcaggtgcctgcgttccggcaggcgcagccgttgccgggccaatccacgttgcagcgcgttctgctgtacgtactgcccgacggcatgctggccgccgagcgctatgccgaggtgttcgacggcgacacatggcgtggcatcaaggccaccggcctgccggccagcgctgccgccttcgcgcggtgtggcagcgcccgggctggctacggcgatgatgccaacgccgtgctgtccgactga

SEQ ID NO: 527926 - DNA, 501 bp, Stenotrophomonas maltophilia
atgatggaattcaatttcaccctgaagtaccgcttgcccgaacgttgcgatgacgtcggagagcttgagcggcggctggtagaggcggggtgtgacgacgcgcttctgggcagtggcttgccgggaaggatggcgctggccttctgccgtgacgccgacagcgcggtggtcgcgctgtgctcggccgtggatgacgtgcagcgggccgtgccgggtgccgaactggtggaggtgagcccggatctggtggggcttacggatgtggcagatctgctcgggatgtcgcgacagaacatgcggaagctgatgctggccaacccgcagtcgtttccgtccccggtgcatgacggctcaacctccatctggcacctggccgacattctgggttggttgcgcgcgcgtggcagcgagaaggtcaccacggaaatggccgaactggccgcggccgcattgcagttgaatctggcccgggaaaggcgcaggttgcagccgaaggcttag

SEQ ID NO: 527927 - DNA, 894 bp, Stenotrophomonas maltophilia
atgtcacacactatcctcatcaccggcgcatcctccggcttcggcctgatgaccgccaaggcactggcccttgccggccacgtcgtctacgcctcgatgcgcgaaacacgcgggcgcaatgcaacccgcgtggccgacatcgcacagtgggcagacgcgcatcacgccgaccttcgtagcgtcgaactggacgtacagtcggacgcgtccagccaggcggcggtcgaacaggtgctggccgacgcaggcgcgctcgacgtcatcgtgcataacgccgggcacatggtgttcggaccggctgaagcattcaccccggaacagctgatgcagcagtacgacgtcaatgtgctgggcacacagcgggtgaaccgcgccgcgcttccgcacctgcgccgccgtggcaacggcctgctcgtctggatcggctcgtcctccacacgcggtggcactcctccgttccttgcgccctacttcgccgccaaggccgcaatggatgcactggccgtgtcctattcaaccgaactgtcgcggtggggcatcgagaccaccatcatggtgccgggtgcattcaccaagggcaccaaccatttcctgcattcgggcacacccgccgataccgccatcgcggccgactatgagaacggtccctacgccggtgtcgccgaccaggcactgaagggcctggcagggttggagcctgcagatgccgatcccgaggaggtcgcgcggcagatcgtgcgggtggtgggcctgccacacggacatcggccgttccgggtacatgtagacccctcacaggacggcgccgaagtggtcaatgccgttgccgatcgcatgcgacgcgaaatgtacgcctccatcggtcttgcagacctgctctcgccacgaggctga

SEQ ID NO: 527928 - DNA, 498 bp, Stenotrophomonas maltophilia
atgaatccgatccccgtttcccgcagtgcctacgcccttgtcacggtgactgcggcgctcaccgcggccttcgccgcagccggggcgctgcatgccggctggccggtgtggacgatgttcatcggttggattgcctttttcacgcgactgcagggcacgcgctccacgatcgaaaacctggcctgcgtctggttcgggctgggcatcggcgcattggcaacacttgcagtgggcctgctctctccttcactgggtccctcgctggccgtgcccgtcgttgtactggtcgtagcgctgtgcgtggtcgccctgcgtggcctgccggtattgaacaacctgctggggtacttcctcggactggtcagctggttcgcggcccaccttgagccctcgctggcccatctctccgaactggccgcggccagcgccctcggttcactggccgcctggaccgcgcacaccgtgccgcagcgcctgttggcccgcgcccggccatga

SEQ ID NO: 527929 - DNA, 744 bp, Stenotrophomonas maltophilia
atgaacatcgcttcctcaacccccgttgcccttgtcaccggcggctcgcgcggcattggcgccgccatctcccgccgcctggccgccgatggctttgcggtggccatcaactacgccggtcgccaccaagaagccgaagcactggccaccgagttgatggccaaggggggccaggccatcgcgcttcaggccgatgtcgccaacccgcagtccgtgcagtccctgttcgatgcgatcgaggcacgcttcggcggtgtcgatgtggtcgtgaacagtgccggggtactggaactcgcttcgctggccgagagcgaagacaccctgttcgaccgcctcatcgccatcaacctgaagggcgcattcaatgtgctgcgcgagagcgcacgacgggttcgcgatggcggccgcatcgtcaccctgtccaccagcgtggtcggattcaagctcgagcgctacggcgtctatgccgcaagcaaggcggcggtggaaaccatgagcgccatcctcagcaaggaactgcgcggccgcggcatcaccgtgaacgccgtcgcaccggggccgacggcaacgagcctgttcctggaaggcaagtcagccgaactgatcgaccggcttgcaaagatgagcccgcttgaacgcctcggcaccccggatgacatcgccgcggctgtggcctttctggccggtgccgacggcgggtggataaacggtcaggttctgcgtgccaacggcggcgcggtctga

SEQ ID NO: 527930 - DNA, 471 bp, Stenotrophomonas maltophilia
atgagtaccctcgctttcaccgaagagaagctcaagcaatgtgagggcatcccaggcgatgcactaaaggaaacgtcccgatggctgaaggaggctgcgcaagggggcgactcctacgcgcggctggtctactacaactacatggatatcatcgttggagatcagcaggaacaagcagcatcggccgaaaaagttaagcagttcaatgacgactcatatcgctatatcaaaagtgtagccgacaccggcaacccggatgggctcttcactctgggaactgcgtatcagcgcggcatcattacgccgaaggacccgatccttgcctacgcctacaaaaaggctgctggagagctgactcccatcggtggaaacgagcagatgctggacctcatggcacagtccatgactccgactgatctaaggaaggccaatcaactggccgctacgctggcacagaggagcaagagatga

SEQ ID NO: 527931 - DNA, 366 bp, Stenotrophomonas maltophilia
atggaacggtggtatctggcaacactcgtggcattgatcctgcaccagattgacgccgcgttctggcacgaatgggacatgttccgcgtccccggtggcatccaaggtttccttgtcttcaacctagtcgctgtcggcgccctgctgcacgggtatcgccaagtcgcgctggccaagccgtccgcgcgagcttatgcccgcctgtgcgggatagtaggtgccggcacagcagcaatccacttcgcatttgccgctgctggccgtgaggaattccatctccctctgtccatcgcagctctagccgcatgcctcattgccggcgtcggcctgctgctaagcagccagaaaccggccactggtcagtag

SEQ ID NO: 527932 - DNA, 516 bp, Stenotrophomonas maltophilia
atgagccccaagggcaagggtggtggttcggccagccagcacagcacagtggcaacgctatacgatgaaacgttcacgcataagaatactgtgtctggtgctgatgaactgatagatgcggccgctcttttcaaagggctgaatctcaattatggaaatgccaaaggcgcagaagtttccagccagtgcaagagtcacgcggaaatgaagctgcttgcgtgctggtggacggggctgaagagctcgaagaattttggtagctcagttggaatcgaattgaatgaattcccatgctcctgctgccatacggtgctcaaggttctgacgataaaagccgaaaaggagagcggtccaaggttcaacttgatctgcgtccgcatgcccgctggaacctcgacggcctacatgggggatcatgcaggtgatgctggtgccatgaacatcaatccaccggtcaccattcgctatcaaaacggagcagcgacctaccaccgtcatgcggcgccgccagcttag

SEQ ID NO: 527933 - DNA, 633 bp, Stenotrophomonas maltophilia
atgcaaagtggtgtccccgctcacgcggggacgatcctgcctgtagtagtcaggtgcggatcacttggtcggcgtcgaagcatccagctcacgttgaacggcatccctgcggatgtcgtctatggcgtgctgctgcgctccaagcattgctcggcagcgctcaccttctgcacgggcaaagtcgatatcgccgtgttcggccatggctgcagctcttgtcgcggcggcagaacgtcgaggggcaaccatgggcaaccacgcgctgtacctggccggtttggttgcggtcaatgcgtatgcctgtgcatgcagccacagcgccgcggcctgcgctccgttgcccatgttcctgaactgctctgcggatgcggagcgcccggccttcatttcccaggtcgacatgaaatcccaccatcctgcgcagtccgcgaaggtgtcagccgcttctgttgcctccgcaatcgccgcagtgacctcctcacttgccggagctttcggtgcagccgggttccccggctcggcggccatgccgaggatcagcagaaatccactcagttccatacagccctccgtagcgtgagccaggaatgcccggcttcggcagaattattggtctcagggtatgtcctgtaa

SEQ ID NO: 527934 - DNA, 1029 bp, Stenotrophomonas maltophilia
atgcgatacaaccctgcgctggacggcctgcgggctgtcgctgtaatgctggtgctggccttccatgcgcggttgttcggtggatttggcggcttcttcggcgtggacgtcttcttcgtcctgtccggctacttgatcacgcgcatcctcgccgagcagcacgcagcaacaggatcgctgcgcattggcgccttctacgcgcgtcgcctgcgccggctctacccagcccttctactactgctggccgtttacctggccgcggcgccatgggtgttcccggaacatgccaaccacctgcgtgacgcagctgttgccgggctctatctctccgactatggcttcgccctctggcgggtgccgtggtacctgcagcacacctggagcctgtccgttgaggaacacttctacctggtgtggccgatggtgctgatggtggtgttccggctgccaaggcactggtgggcacccgccgttttcctcctggcaatcgcagccacactctggcgttggcacgtggcgctgaacgacgacgcctggtatcagccctactaccggttcgacacccggctgtcagggatcctgctcggcgccgcagctggcctgtggaacccgtccctacccaaggcagccgctccaatgggtgcgctgctgcttgggatcgccgtgacccaggctcacgtgaaggaaatggcggccctcacatcatggatggccatggcagagatcggcgcggcattgcttgtcctgggggcccaccacgtgcgtgccctttgctggaccccactggtatgggtcggaaagctgtcctatggcatctacctctggcacttcccaatcatgtattggctgcgcgggcaggatatttcgggctggagcagcatgctcatcggatccggggcggcagtcctctgcgcggcggcgtcctactacacggtcgaacgtatcagccgatcaggccgggctcacaccgcagaaactgcgcgggttgaccaggctggcacgctcggccgcgatgcaggcatccgatag

SEQ ID NO: 527935 - DNA, 891 bp, Stenotrophomonas maltophilia
atgttcagaggcctcagcgcgtttccgcttactccgctcagtggagatgacatcgacacacgcgcttttgccgcactggtcgagcgcctggccgcgtccggggtggactcgatgggcattcttggctccaccggcagctatgcctatctggagaaagccgagcgcaagcgcgtgctgcgccaggccctcgcccgtgccggcggcgtaccggtgatcgtcggcgtcggcgccctgcgcacccgcgacgtgctggaactggccagggatgccgaagatgccggcgctgccggcctgctgctggcaccggtgtcctaccagccgttgaaggaacatgaggtctacacactcttcgaatcggtgagcatggcagtgcgcaccccgatctgcgtctacgacaatcccggcaccacccgcttccagttctccgatgaactgcatgggcggatcgccgcgctgcccaacatcggctcggtcaagatcccccgcctctccgacaatccggtcgaagccgcggcaagggtcgcagcgttgcgcgcccacatccctgcacacgtcacgctggggatcagtggtgacgccgccgccgtgcgcggactggccgcgggctgtgatggctggtactcggtgatcgctggcctgttccccgaggcagcgctgcggatcacccacgctgcgcgcagcggtgacatgcccgccgctgaggcggcatccgcgcggttggcaccgctctgggcgctgtacgatcgcttcggcggcatccgcgtgatggcatgcgctgccgcgctgatgggcctgtgtagtgacgactgcctgccgcggccgctgcttgggctgcagggcaatgaccgggcgcaggtggccgaagtactggaaggcctggggctgcgctag

SEQ ID NO: 527936 - DNA, 459 bp, Stenotrophomonas maltophilia
atgcagctgcagccggtccagccttcgcactacgcgcgcatcgcccgttggctcgattcggccgcagccacgcagcgctgggccggcccgggtgtcgcattccctgtgccggccggagcgttcgcgcaggtgcttgggctgggcactcgcccggggcgggtgctgctggacgggcagggcgactgcgtaggcttcggccagtactggttgagcgaacccggcaccgcccatctgggccggatcatcgtttcgccccaggcacgggggcgcgggctggggcgcgtgctgatgcagctgatgatcgccgaggccctgcaatctccgggcgtacagcgcctgaccctgcgggtctatcgggacaatcccgcggcggtggcgctgtatcgcgacctcggattccggcccgtggacgatgcctcgacgcccgacttgctgttcatgcagcgcggtggcggatga

SEQ ID NO: 527937 - DNA, 6174 bp, Stenotrophomonas maltophilia
atgtggcagtcgacgacgtcgcgcgaaagcgcgggcggtggatgcgttcatcccaaaaaacgtgcccgggcagggcgatccagcggatggctgagggccggcctgctggccctgttgtcgctgacgatgccgtcgctggcctgggccgccgcctacgccaccggcggtagcagcccgtaccgcaacaccgtgctgtggctgacctggggcggcggtgccaatggcgtgaacaacgtcgcactcaatgatggcgcgatgtcgtccatcgacatgccggtcgcggccggggtgaacctgcgcgttgattgccgtttgaacacggccgagaccaatgtgctgcgcagctatcgccccggcaacttcggtggtgacagccttgacgacctgtacaacatcggcggtaccggcacggccaaccagctgatcgccggtatcgcacgtgccagcggcacctccagcttcagcatcacctgcacctcgaccttgggcggcgccccgtaccgcctgcgcggcgtggtgatggccgacgccgagtcgatcaacaacagcggcgagttcgtcgaggccagcgcgcagggcacctggaacgtggtcgaggtccgcaagaacctggccaacgccacgccgtacctggtcaacaaatcgaccagcggtgccaaccaggtcatccgtttcggccccggcaacgacgacaacacggcagcggtcaccttcctcagtttcgacaacgccgcacacgcgccgggcaacctggcggtgaacatgggcttctcgatgcgcggcggcggcaccaccgcgatcgcgatcggcctgctggtgccctacgccgacttcggcgacgcgccgcagagctatggcgacgccatgcacgtggtggacgatctgcagttccgttccgacggcatcccgcagggcgccagcaacttcaacatcaacaccgcaggctacacgcccggtggcctggcggcgccgttgaccgacttcctcggcagcctcggcccggataccgagcagcgcagcagctacagcctggatgcgctgggcgatgacaacttcccgcaggtgggaagccgcgaagaggatgcctggccgaccagctaccgcctgacggtgatgcaggccggtacccagatcaatcaaccggtcgcctgcgtgggcaatggcagcgtggccggctggatcgacttcaaccgcaatggcgtgttcgatgccaacgagcgcagcggtattgcggcctgtagtggtggccaggcgaacctgacctggaccgtgcccgcccaggtactggcgggtaccagttacgtgcgcctgcgctactccaccaacgcggtccagatccagaacccgaccggcgtggccgacgacggcgaggttgaggaccaccggatcaccatcaccgcgccgtcgctgaaggtggtgaagagcaacaatgccaccggcggcatctggaattatggccaggccggcactgagtacacgctgacggtgagcaacaccagcgatgtgccgaccggcaatccgccgaatgtggcggcgggcacgatcaccgtgcgtgaccagctgccggccggcatcgcgccgaactggagcggcacgcatgtcagtggcaactggagctgcaccgccagcggccaggacgtcacctgcaccagcacgcaggtccttgcagcggcaggcagcgctgggtccagttcggtgttcaccctgccggtgaccgtcactgcagcggcgaccggcgtgttgaccaatcacgccagtgtcggcggtggctacgaccccttcaacagcggcaatgcgcccgcaccgggcgccagctgcaccgatgccgaccactgcacgcgcagcgacgtgaccgtgccggtgacccgcgtgggctatgccaagcgctccaacacggccggcccggtcgcggtgggcacgacggtgagctacaccgtcgatgtcaccgtggccgatggcaacacccgcgacctgttgacgctgaccgataccctgggcaccggcctggatttcgccagtgtcagcaacgccggtgcatttacctgcaacgcagccaatcctctggtgtgcacgctgccggccggcaccgtgcccggcacctacagcctgagctacacggccaccgtcaatgcgcaggccagcggccaggtggtcaacaccgtggtcggcactggcaccgataaccccacctgcagcagcaactgcaccaccactacgcccgtggccgcgccgaggatctcggtgtccaaggccagtagcaccgccggcccggtcgcgatcggtgatgcggtggcctataccgtgacggtcgtggtggccgacgcgcgcacccgcgcggtgaccacgctgaccgacacgctgggtaccggtttggatttcggtggcatcaccaacgcaggcgctttcagctgcgcaccgggcaatcccctggtctgcacgctgccggcgggcaccgttccgggcagctatgcgttctcctataccggcatcgtcaatgcacaggccagcggccaggtgcgcaacgcggtggtgcccagcggcaccgacaatccgtcctgcgtgggcagctgcgataccaccacgccgatggccagcgcgctggtggtgtatgccaagcaggcgtccaccggtggtccggtgcggatcggcgacgtcatcgactacacgctgagtgcgaccgtcacgcgtgcgcgcaccaccggcgtggtcaccctgaccgataccctgggcagtggcctggacttcggcggcgtcagcagcgccggcatcttcacctgcaatggcacccagccactggtgtgcacgttgccggccggcaccgtgccgggcacttacagcctgacctaccgcgccaccgtcaacgcgcaggccagcgtcagtgtccgcaatgccgtgcttggcagcggcaccgacaatccgtcgtgcagtgccaactgtgacaccaccaccccggtggcggcacccggcgtgagctatgccaagtcggtgagcggcaccggcccggtctcggtgggcgatcgcctgacctatacgctgaccacggtggtgaccaactcgcgcaccaccgatgtggtgaccctgaccgacaccctgggtacgggcctggactttggcgctgtgaccagtgcgggcgcctacagctgcaacgcggccaatccgctggtctgcaccctgcctgcggggaccgtgccgggcagctacagcctgtcctacaccgcggtggtgaacgcgcaggccagcggccaggtcaccaatgccgtgctgggtagcggcggcgacaatccgtcctgtaccgccaactgcgataccaccacgccggtcaccggcagtgagatcgactatcgcaagacttcggcagcggcgggtccggtcaaggtcggtgacagcatcgcctacacgttgaccgccgtcgtcagccactcgcgcaccacggcggtgttcaccctgaccgatacgatgggccccggcctggacttcggcgcggtgaccgccagccagggcttcagctgcaatgccgccaatccgctggtgtgcacgctgccggccgggaccgcgccgggcacgtatacggtggactacaccgcgaaggtgaacgcgcaggccaagggcagcgtgagcaacgcggtgctgggggggggtaccggtaccactacgtgtaccagcaactgcagcaccaccaccccggtgctggcagcggtggtgacctaccgcaagcagtcctccaccgtcgcgccggttggcgtcggcgatgcggtcgactacagcgttgaagtgaccgtcgcgaactcgcagaccaccgatacgctggtgctgaccgacacgctgggcgtgggcctggacctgcagtcggtcacccagccgggaccgttcacctgcaacgccagcaatccgctggtctgctcgctgccggccggcaccgcgccgggcacctacacgctgggttatcgcgcgctggtcaatgcacaggccaatggcagtgtgcgcaatgcagtactgggcaccggcggtgacacgcccacctgcagcggcgactgcagcaccgagcacgcgcttgcagaaccgcgcgtcgtgctggagaagcaggccggcccggccagtggcaccgaggtgcgtcctggcgacaggctgcgctataccctggtcgccacggtcgagcgcgcgtccctgcgcaagccgctgcagctggtggacacgcccgatgccggactgagcatcgagagcctgccggccggatgcgtgcagcagggaacggacatcgtgtgcacgctgccggcgggaacctcggttggccgccacgaatgggtctaccaggcgatcgtcaatcaggaagcgcgtaccgaagtgctgaaccgcctgcgcgggcagtacccggatggctcgccgccgcccgagtgcacgacctgcgagacgcgccacaaggtggtgtccgatttcgcgctgcgcatcaccaagaccgcgagcccgcgccgggtgaaggtgggcgatctggtgcgctaccagctggtggtcgagaacgtcggcagcagccactggcgcgatggcgtggtggtcgatacgccgccgccgggtttcagctacgtggacggttcgatgcgcgtggccgacgatgacggtgcgttctcgctggccagcagccagtcgccgctgcgcatcggcgcggtggatatcgcggtcggccgcagcgccaccatcacctacctgctgcgcgtcggcgctggcgtacgcagtggcaatcacgtgaaccaggccgtggcgacggccgatgatggcagcccgctgtcgaacatcgccaccgccgaagtggcgatggatgccgacccgctgctggaagacagcctggtgttcggtaccgtgttcgatgaccgcgatggtgacggctggcaggacagtgccgaactgaccggtgtgcgcgtgcagggtggcttcgcgccctcggcctatgtggccggctcgaccacgctggatcgcggcgatggcccgcaaccgctggccgatgccagcgcaccgctgctgcacggcgtgcagatcggcacggtgcacggccgcgcgtcgacgtccgacagcgccgaggcacatcaggtggtggtgcggcagcgcttgcgcgaactggctttcaccgatgacttcgtgctggaaagcgcgcagggtcaccgcctgcgaatggacgcacagggcggcacggacgtgcagcgcggtggggaggccggcaagggcctgaccgccgccgagccgaccgtgcgccgcgagatcgcgcgcgtttccgagggctatgaagtggcctacgtgatcggcaacgagggcatccaggagcagggcatcccgggtgtgcgcctggccacggtggagggcctgctggtggagaccgatccgttcggccgctatcacctggccgacgtccacggcggtgatgcgcgcctgggccgcaacttcatcatcaagctggacccggccacggtgccggccggtgcggagctgacgaccgaaaatccgctgctgcgacgggtgacccagggcgtgccgacgcgcttcagcttcggcgtgcgcctgccgccgtcgccacaggcgccggccgagcgcatggagctggctctgggcgaagtgctgtttgccccgggcagcagtgaactgcgtgccgactaccgcccggtgctggtgaagatggccgaggtggtgaaccgctaccagggcggtgatgtggtgatcgcggccaatggcgaaagccaggcgctggccttcgcccgtgccgcggtggtgcgcgatgcgctgcaggccgaagtggccgaaggcgcgcgcgctggcctgaccgtgcagctgcgcaccgatgtgcaggacccgcattcgctgctggccggtgtcgatgcgaatggcgcgttgctgggcaacgtcctgttcgacactgacaaggccaccgtgcgtgaggagttcaagccgttgctggcggcgatcgccgcgcgcctggagaagatgggcggtggccaggtcagcctggtcgggcacaccgatgtgcgcggcagccatgcctacaaccaggcactgggcctgcgccgtgccagcgccgtgttcgaggcgctgcgcagccagctcagccccgccgtgcagcagcgcctgcgcgtccgcaacgaggagagcgccgctacccgtgcggccgcccgccaacaggaggcccgccgatga

SEQ ID NO: 527938 - DNA, 321 bp, Stenotrophomonas maltophilia
atgacccacccgccgctcgacactgccacgatggccgagcacgccacgcaggcggccgcgctgctcaagagcctggcccatcctgcccggctgcaggtgctgtgccggctggtcgagggtgaggcgccggtgccggaactgcaggcactgaccggcctcagcgcttcggcgctgtcccagcacctggcggtgctgcgcggaatgcagatcgtggcaacccggcgcgaggcgcaggcaatccactaccgcatgcaggaaggcccggcgctgggggtgctgcaggcgctgtacaccgcctattgcggaggcggcgtgcgctga

SEQ ID NO: 527939 - DNA, 438 bp, Stenotrophomonas maltophilia
atgaacctgccatggagcgcgcttgcgggcggtgtgttgatcggtatggctgccgtgtggttgctggctgccaccgggcgcgttgccggcatcagcgggatcgctgcgggcagcctgcgcgccggtagaggtgagcgtggctggcgttgggccttcctcgtcgggctgctggcagcggcagggctggtgctgtggtggcagtcggtgcccggcagcgctccgcgcgcactgctgcgcgatgccttgcccgcctggcagctgatcggcgccggcctgctggtcggtttcggtacccgcctgggcagcggctgcaccagtggccacggcgtatgcggcatggcccgcggttcgaagcgatcgctgctggcggtgctggtgttcatggcctgcgcgatgctgaccacgttcgtggttcgtcacggcggagccccgttgtga

SEQ ID NO: 527940 - DNA, 783 bp, Stenotrophomonas maltophilia
atgacccatcagcacgcgtctttgctgctcgccgccagcctcggcctggccctcgccgctaccgcgtccgcccaggagcgcatgccgccggccccgcactgcatggacgcggtcggcgtacaggaggtcgagcaggcctcaccgcgctcgatcgcgctgcgctccgcctccggccaggcctatcggatcgacttcaacgaagactgccccggcgttcgcggtgccaccacgctgaaactggaggcacctgccggctgggcctgcggtcgtcccagcgagcgggtggtggtggacggccacagctgcgccgtcagtgcggttacgccagtgcagaaccgtgattacgccagcgttgcgcgcgacagtgatcgcctgcgcaccgccacgctgccagccctgaccatccgcgagcgaaaggaagtccgccgcggtttcggcggctcgccctcgtactgcttcgccacccgcaatgtgcgtggctggtcgtccgacacgcagggcatgctggtggaaaccaatccacggcgcagcggcggccatcgcttctaccgggtcgaactgggcagccactgcctccagctcgaccggtcgccggaattgagcttccagtcgggcatgcagaatggtctgatctgcggcaacccgggcgatcgggtggtcaccgccgatttcgccagctacgacgagcgcagcgacgaactggcgccgctgccccgcttcagccgccgcggtgcctgcaccatccaggcggtgtacccggcctccagccaggcgtcgaactaa

SEQ ID NO: 527941 - DNA, 1047 bp, Stenotrophomonas maltophilia
atggcccgcggcgggttgtacaagagcgaggtacagaaggcccgcgacaccctgcgggcgcaaggcaagcacccgtcggtcgacgcggtgcgggtggcactgggtaacaccggctccaagaccaccatccaccgctacctcaaggaactggacgaagaagagggccagggactcggcgccaaggtggcgatcagcgatgccctgcaggatctggtcggtcggctcgcggcgcggctgcacgaagaagccgaggcggtgatcaccgaagctcagcagcgcttggcggcgcagttgcaggagcgcagcgacgcgttggaacgggcccggcaggaagcgaccgcgctgcgcgaccagttgcagcggaccgaaacggccttgcacgacgcgcggagcgcccatgcttcggaccggcaggcgttggccgagcggattaccgaagtcgcccagctcggcgagcgcatcaccggactgaccgcccgccttgccgagcacgaggcccacgtgcagtcgctggaagagaagcacacccacgcccgcgaggggctggagcactaccggacctcagtcaaagaacaacgcgagcaggaacagcgccgccacgagcaccaggtgcaagagctgcaggtggcgctgcgccaggccaacgaggcgctgaccgccaagaaccacgaactcctgcagctcaaccgcgacaacggccagtggctggagcgccacgggcgcttggagcgagaactggccgatgcccgccgcggcatcgaggtccagcagaaggaattggatgccttgcggctgacggccgcagagcatcaggcgctgaagggacggtgggccgaagacgtacaggccttagaggctgcgcgggtcgaactgaccagcgctcgtgccgaagcgaccaaagaacgggaacgtcgcgagcaagccgaagctgacgccttgcgcgccggtgtgcgtctggaaacactggagcagctactggcgcagctgaaacccgaacaggctgttgccgacacggcattcgccgggaaagggcgtgatcgtgggtaa

SEQ ID NO: 527942 - DNA, 393 bp, Stenotrophomonas maltophilia
atgaagctgcgtgcattccggacccgttcgctccgcctgcgctttgcctggctggcattgctggcgctgttgttccagcaggtcgcgctggccgcttatgcgtgccccgtcagcgaaacgcccccggcgcctcagatggtcatggctggctgcgaaggcatggagatgcccgatccgcaggcgccggcgctgtgcgatcagcactgccagcgcgaccacgtcaccagcccggacgcaaaggcgccacaagtgcctccgctggccctgccaccgttgcacttcgctttgagctcggccttgctgccgccggtggaagcccagtactacgaagacgtgcccacctgccggtccgacccaccgccggcgcagcgcttctgtagcctgcagatctag

SEQ ID NO: 527943 - DNA, 1311 bp, Stenotrophomonas maltophilia
atgtctcttttctttccattgcgccgctggtgcggcaaccgtcgtcggcctaccgcgtggtggctcgccctcggcttggttcttgttcccggttggtccgcggcgaccgatctgtcctttgacgatgcactgcgcatcgcggccgagcgcgccccgatgcttcaggcgcgccagtcgcaagtgacggcgggtcgcgaagaagcggcccgcgcagccgccttgcccgatccccagctgaaactgggccttgccaattggccagtcaccggcgcggacgcgttcgacttccgcaccgacgacatgaccatgaagcaggtcggcgtgatgcaggaattcccagcccgtgccaagcgccaggcgcgtcaggcggtggccgaccgcaccgtcgaacaggcgcaggcgctgtcggtagccgaacgactcgccgtgcgtcaggccgtggcgcaagcctggatcgccctgtgggcggcacaacgggaagtcgcggcgttgcaagcgctgcgggagccggccgacgtcgccgtccgcgccgtcaaggcacggctcgccggcggcaccggttcggctgtcgatgcgatggcgacgcgaaatgccgcgcttgaactggagaaccgcatcgacgccgccgaggcgtcgctggaagccgcgcgtgccggcttggcgcgctggctgggcgaagacccggcagcgctgcgcatcgagggcgcaccaccggaactgacgggactgccggtcgccccggccgcgctgctggcctcgatcgatcggcaggggccgctgctgccgtggcactcgcgcgaagcgatggccgaggccgaagtgtccgccgccatcgccgagaagcggccggactggagcctcggcgtgacctacgggcagcgcgagcgcacgcccgaaggcgtgccacgcagcgacatgctgatggtcgagttcgcgatcgacctgccgctgttcacgcgtgatcggcaggatcgcggcgtggccgcgcggcgggccgagttggacgcggtggccgccgagcgcgaggacgcccgtcgtgcgcaggccgaacgcgtgcgcaaggccctggctgaatgggaaggactcaagcggcaagtcgcccgcaaggaaaccgaatccctcccgctggcccatgaccgcgcgcagacggcgctggccgcctatgccgccggcgccggcctgcaaccgtggctggaagcgcgccgcgacgaaatcgaactgcacctcgaacacgcccgccatctgggcgacctcggccgcgcctgggcagcgctggcctacctgctgcccgaagaggaaccctcaccatga

SEQ ID NO: 527944 - DNA, 1485 bp, Stenotrophomonas maltophilia
atgacctacacgatgaaccgagtggcgatgatcgccgctgcggccgcgctattggtggtcggtttggccggcggctactggtgggcccgacgtggcagcggccacgacatggcgatggccgatgcgccggcggccgaagctggcgagcgcgaggtcctgtactggtacgacccgatggtgccggaccagcacttcgacaagccgggcaagtcgcccttcatggacatgcaactggtgcccaagtacgccgacgaagtcgccggtggtggcatcagcatcgacccgggcctgcggcagagcgtgggcatccgcaccgaggcggtcgaggtcggccggctgacggccaccgtgcgcgtgccgggcacgctggcctgggatctgcgtcgggaggccgtggtcagcgcggtgaccgaaggcctggtgagccgggtgcgggtcaaggcgccgtacacgaaggtcgcgcggggtcagccgctggcggcgctgttggcaccgggctggagcagtgccttggccgaagcgcaggcgctgcggcaggcgcaatcgacagcggcgcgggaactgcgatcggccgcgcagcaacggctgcgcgtgctcggcgttcccagcggcctgggccgcgatggcagcgtgaccttgagcgcgccgcacgatggtgtcgtcaccgaagtgctggcccgcgacggccaggcggtaatgccgggcacacccctgttccgcgtcaacggcacggccacgttgtggttggaggcggcgattcctcaggccgacgtggcgcggttgcgaccgggcacaccggttgaggcggtcgtcagcgcggtgccggggcagaccttcagcggcgaagtcgagacgctattgccgcaagtcgatatggccagccgcacgcagcaggcccgcatcgtgctgcgcaatcccgacggcgtattggcgccgggcatgtttgccgaggtgacggtgcagcccgaagggggcgcaccggtgccgttggtgccgaccgaggcgctgatcgccaccggcacggacagccgcgtgatcgtgcaggaggcggacggcgggttccgtccggtacgcgtgcgcaccgggcgcagtgccggcggccgcaccgagatcctcgccggactcacgggcggcgagcgcgtgatcgtatccggccagttcctgatcgactccgaggccagcctgtcggggttgctcggacgtctcgaaacggccaagacgtccagggccgcgggccaagcggttctgcatgaagccgaggccaccgtcgaggccatcgcggacggaaagatcaccctcgagcacgacccgttcccgacattgaacatgcagggcatgacgatggcgtttccgctggcgaatccggacgtggccaagggcctcaaggctggcgaccgcgtacgcgttttcgtccgctccgacgccaagggactgacggtggaacggcttgagccgatcgaagaacgcgcgggagagcagccatga

SEQ ID NO: 527945 - DNA, 768 bp, Stenotrophomonas maltophilia
atgaccatgctgtcccgcctgcccaatccggtgcgcctgttgctggcgctgctgggcgttggccttggcctgaacctgcgcgatatcgccgcggccatcggtgcaccgattcctgcgctgcccatcccctatggcggtagcctgctcgacaatgcactggccgtactgctggcgctgttgctggccgcgctgctgcgcccccgcggcgtgggcctgttcgccagtctcgggctgcacggcaacggctggagcggaccgctgtgcgtgctgctggccagcctgccctgctggctcggcctggccctgctgggcacacctaacaccgcactgaccgtcctggacgcagcgatgctcgcggtactgttccccgtggccgaagagatgctgttccgcggcctgggtttcatcctgctggtgaagatcgtgcgcggcccgtggcccctgctcgcactgccgcaggcgctgctgttcggctgggtgcactggctcggcttcggcggtttcgagggcggtggcatcgcgctgttcatcggtgcggtgatcgccttcggtggcttcatcttcgcctggctcgaccacctcgacggcgacaccctgtggtgcggcctggtactgcacgtttcgatgaacctggcctggaatgtgttcagcctcgatgacgccatcgcattgggctggcaggccaccagcctgcgcatcggcacggccctgctggcggtggccgcgctggcctggcacaggcgtcgtcgccgcccgacacgcctgtaa

SEQ ID NO: 527946 - DNA, 615 bp, Stenotrophomonas maltophilia
atgatctgcgtcattcccaaggcaccggcttccggtgctttttgcattgggtgcctgcatggcacctgcaatatcagcaggcgttggcccttccaatcacgtgcgcgtggttaccctgatggtggcgccggacgaacccccttgcccgcggtgagggaggcagcgtggttcgtcggtgtggctggactcgatcgccgtcatcatctcgacaagccgtgtggtcggttgccgggagtggctcaacggcaggccctgacagcacaagtccagagcatgggccaacccgtccggtcttcgcagccaatgccatcgacgatgccggcgcgcttccgatggtctgtccctgtagcagcggaatctgtggctgttcggcatcatggaggccgaaccgggtcagcgctccaacgcccctcatccagttggacttcttcggccgtcgacccgcaccggtcccgacaccaccttggtgtaggtgaagtccagacgctcgttcggagtggacgcgaacgccgcgccatggaggaacgccacactgaagctgttcctcaccgcagggcgggcagcaggcacatagggcaccaccgtgccgtcgcgggcccacgcgcaggtggctga

SEQ ID NO: 527947 - DNA, 801 bp, Stenotrophomonas maltophilia
atgtcccagcgtcaccgtaccccgtccctgctctgcctggccctgctgccgctgtttgccgcgccgatcgcccatgccaaggatgaccactggaccttcgaagtcgccgccggtgccggcgtgaccccgcgctacagcggcagcaaggacttccaggcgtcaccgatggtgtccttcgacgccctgtcacccggtggctggtttctcggcaccagtggcatcggctggggcacggcgatcggcgagcatgcccacgtgcgcgcctacatcggcgccagcggcagccgccgcgacaaggactccgccctcggcggttccgacttcctgcgcagcatgggtgatatccgtagccgtcccctggtcggcctttcggctggttatacgctgggagaggccgtgctgagcggcacctggcaattcacccgcaaggacgaagaccgcggcgacaacggcctggccacccagcagatgcacctgagcctggacctgccgctgttcgacctggccggtggcgtggtcagcggcagcgtctccaccgagtatggcaatcgcggctacatgcagacctggtacggcgtcagcccggagcaggccgcgcgtaccggctttgcccagcacaagccgaaggccggcctggtgagcgccggcctcggcctgaagtggagccatcgcgtgggccgtaatggcaactggtacatctcggccgaaggcacgcgcctgctcggcgacgccgcggacagcccgatcgtgcagaagccgaaccagttcggcctgatgagcggctacacgcaccgcttctaa

SEQ ID NO: 527948 - DNA, 1353 bp, Stenotrophomonas maltophilia
atgcatcgaatgtggttgggcgtgagtgcgttgttcgccacgacggtggcctcggcggcggccgttgagacgcgcgatggcgaactgggcgatccctacggctacacccgcagcgtgcgccttgccgaactgtcccggctgcagacgctgggcaagtcacctggcgtgaagggcaagctgggccaggcgggtttctaccgcgtgcgcggcgagctggaccgctccagccaggcggcccaggagtgcctgaaggccgtggccagcgaggcggcggacagtgtgaagggggtcgagtacctgtgttcggccaccctggccggcaatctgctcctgcggggcgatatcgcgggttgggcgacgcagatgctccaggtccgcacgctgatggagcgcgatatccgccccatgctgagccccaagctgcgcgacatccatcttgccggcatcagcgagccgcatttcgagcggtttaccgcatggccgcgcaacgcgatggcggcgcaggcacctgcccgcgacgtcagtgtcccactgcagttggacaacgaactgccgacgctcagcctgaagctgcgcaccgcagccggtgaacgcgagctgcgcgtgcatctggacagcggcgccgcacactcgcgcatcggccgagcgctggcgaccgagctgggcttgacgctgaccgagggcttcatggcggtcgatggcagtcctggcaagttgtatgcgctggcggcaccggtcgagttggacatcggtggtgtcgccgtgcgcgatgtgtcctttgcggtactgggccaggacgacctgccacgcatcggcctggacgtactgcgcgcgctgggccgggtgcgggtcaacaaggatgcgctggtgatccaggccacggccagtccggtgccgtgcacgtggcggatggccacgctgtcctcgttatgggcggatgcgtacgacgtccgctatccgatccgcgctggcaagcagaacgtgctggtcaaggtggataccggcttcaacggcgccttccaggcccgcggaacgttgccggccacgccacccgcgtcggcgatccggcgcaagaacgtgatcaccaccgaaggcagcgaagacatccagttcgtggaggcgaccacgccggtcatgatcggggaggaagtgctgaacctgccgatggacctggggctgtcgcccgggcccaacccgctgttcaacccggactggcgcgtgggctttgccgcgacccagcgctacagcctgtacatggatgttgaaggcacctatggctgcccggtggccgttgcggcggcgccaccgctgttgccgccgaagccggctcccacgccgcctgcgggcggctga

SEQ ID NO: 527949 - DNA, 1299 bp, Stenotrophomonas maltophilia
atgtctgcgtacgaccgtttcatcgaagatgccgcaacacgcctcgagctgggccatcgcgcccgctgggtggtggaggtcatcagcgtctggataacctcccatcaccggggcctggacggtctgcagcagcggtttgaacaggcaggtctggcctcccgttttcattcctggcggcaaccggcagcgttgcggctgcccatcgtcgccagtgagctcgaacgcgcgctgggcgcacacacgctggccatgatcgcgcaccgctgtggcatgtcacccggtgctttcagggtggtcgcctgccatcttctgcccggggtggtcacgctgatggatgcgccgggcggcctggtgccctctccgcatgtccatcgcagcatcgcgggcccatcgccccggcgcatgaccggcacggtgccaacgcgcgcgatgtatgggagggccgtgcgcagcctgttgtggctgctggccattgtcgttgtcctcggcctcaccacctggttgcagctgaaggcccgcacgcccctgtggacggtgccggacattccactcgaacacgacgcctacctgtccctgcagcaacatggcacacagatgcaggtgcacggcagcctgcccaccgagggggatcgtcgccgtatctggagcacgctgctggcggtacacggccggcagaacgtgcagggcgggataacgctggacccacgcgcacgcgcgccgcgctggctggatcgcctgattgccgatcttccgcagctgcagggcgatgggctgcggctggaattcgccggatcgcagctgcgcatcgacacctcgctgatggaggacgcgcagcggctggccatctcgcacaggttgcgccaggacttcccggcactggacatgagcggcctgtggggcccgggactagcggcgctgtcgcagctgccgacgcacgccgatgccgcgcagcggattgaagcgctgaaccagaccacgctgaagttccacgccggttcgtccgagttgaccggcgactcgcggcagaccctggaggccgtcgcggatgcgctgcgcagagcgcccgacggcaagcgtgttgagatcggcgcgcacaccgatggtcgcggccacgcccaagccaacctgcagctcagccagcagcgcgccgaggcggtatcacacgcgctgcaggcgctgggcgtccccgccacctcgctggtcgcggtgggctacggccaggactggccggtcgccgacaatcgcagcgacatcggacgcgcgcagaaccgtcgcatcgcctatcagctgctcgactga

SEQ ID NO: 527950 - DNA, 438 bp, Stenotrophomonas maltophilia
atgaaggctggctcgaaccgcagtgaagccgccgccgccgccgacggcgcggtgatcgtgttcgacggtgtctgcgcgctgtgcaaccggtgggtgcgcttcctgctgcgtttcgaccgcaagggccgctatcgcttcgcggcgatgcagggcacccggggcagtgcgctgctgcgcgcgtatggactggatccgcaggacccacggtcattcctgctgctggatgcgcagggcgcatggacagacaccgatgcgatcctgcgcgtgctggccgggttgggcggcgcctggcgcctgagcggtgtgctgcgtgcgctaccgcgaagcttgcgtgatgcggcgtatggggtgctggcgcgcaatcgttaccgctggttcgggcggcatgacgcctgccttttgccgccgccagaacaggccgcgcgcttcctggattga

SEQ ID NO: 527951 - DNA, 2115 bp, Stenotrophomonas maltophilia
atgaaggggatcgccgtccgccagtacgtggcggccgctttcatggggttgatcctgctggggcagcaggtccatcagatcgcggatcgtttcggcaacgagggcttgcacgcccgtaccgatctcatgcagcagttcgcgactgaattgctggaggagcgcgggttcgctgccaaaatcaccttgttcgtgcttttcgcgataggcagccatcttctgctgaccgttggcggtatgtgggtctatcgtcgggcctgcagccagctcctgcccaaacggcgggacgcattctggcgcagtctgctgtttgtgagcgtggtcgttctgctggcgatgttcgccaatcgatggctgtatccacagtcggcttccttcgtggatgcagagttgctgatgatccagtggctgtcgccattgcttgtaggtgcctgcatcgccgtggtggcgatcgctgtactgtccgcgctgtattccctgttgcgcagccgccgcaacctgttcgccgccggatccctggttgccctggctgtctgcctcggggcatggggttggaatggcggcgttcgggagggcatggatgagaacaggccggatgtgatcattctgggggtggactcgcttcgtccggactatctggcttcctacggtgagtttcccggcggactggctcctgccatcgagcagacgctggccggttcggtcgtcatggatgatgtacgcacgccactggcccggacgtttgtctcctacagcagtaccttgaccggaatgaatccgctcaagcacggcgcgcgcttcaatctctatcctcgctcggaattctcgcgcgaccagaatcttgcctgggatctgaagcggcacggctacttcaccatgctggccatggatgaatcgcgctttgccaatttcgaccagagttttggcttcgatagaaccgtcgtccccacggtgggagggcttgatttcgtcgttggcggcagctttgacttcttcgcaaccaatctcctgctggctgcgctgcccgcttcagagccgctgagcgtggtccaaggcaatcgcgctgcctaccgcagctatcgcaccgcggaccaccccgcccgcctgatcggtgaattgcgggatgcgccggctgacgcgccactgtttcttgtcagccacctctgcctgccgcattggccctatctgccaggcgggatccgtgaggacaggtctcttgactgggtaggcaaggtcaagggatatgaggattcacagtcccagtatctgaacgcgatcagggcagttgatggtcagtttgaggcgctcatcgatgagctgcgccgcttgcggcgtctggacaacgcgatcctagttgtcatgtcggaccacggcgaagactttgcaatgcgccgtgaccagttcaatgacaacgacgccaaccaagccgtgggcgcatatggccatggcagcttcgcgctgtcggacgtgcagaaccatgtggtgatggcgatacagcaattccgcaatggccaaccggtctggacgcatcggcgggttgcgggacctggctcagtgatcgacgttgcgcccacgatcgccgaactggtcggcctgaggcgcgaccgctacgaagggctctcgtggttgcctgcgatacgccagaacgaggatcttccaggcaatcgtgttcgtttcatggagaacggcctgcgctccacgggcgttgagcgagcgcacatcaatgaaggccaggtggcacaggaaatgtcctacctgtatcgcctgacggaagatggtcgtttcgaggttcgcccggacctgttgccggagaagctccgcgagaagcagcgcggagcgattcttgggcgatggggcgtgatgaccgatccggcgtctggcaacgctccgggggcccggcactgctggcgggtggtggactatgagcggcgaaccatcgcctgcacgccataccccgcgcctgagcctgccattgccgatctgcagcgtgaagtgtgcgaatactatcgtgaagacggggacttccatgcggcctggtgtgcctcggcggcccgtgcagatggccgccggcctgcgggtccgtcagcaagcgtggaacgacaaaccggtaacatgtaa

SEQ ID NO: 527952 - DNA, 417 bp, Stenotrophomonas maltophilia
atgaagaaccagaagggcttcacccttatcgaactgatgatcgtcgtcgcgatcatcgccatcctggccgccatcgctctgccggcttaccaggactacaccgtccgttcgcgcgtctcggaaggtgccgtgctggcttcgggtgccaaggccaccgtcggtgagaacatcgccaacgccggcggcacgatcgatgacaccgcctgcaatggcgttgccaccttcaccaccgcgaccaagaacaccgcgaagctggaatgtgccagtggcgtcatcacggtgaccggcaccgcagccgccaagaatgtcgcgctgcagttcgagccgaagtcggccagcgccggcatcacctggacctgcacctcgaccgctgacaacaagtacctgccggccgagtgccgcaaggctgctccgtaa

SEQ ID NO: 527953 - DNA, 459 bp, Stenotrophomonas maltophilia
atgaaagagataaaggacctcagcggaaacgtcattcttacagtcccgcccacgtctggaattcttgacctggactcggccatgttggcgaacgccaatctggacggcgctgaacttgaaggtgcgatcctcatgcagacatgcctttcaggcgcaagcatggtaggtgccgacctgtactgggcgatacttttcatggcggacctgtcagatgccaaccttcagaacgccgacctgcgtggcgcagacctgaaagacgcaatcctgcggggcgccaacctgtcgggggccaacctgggccgtgacaatctgggcggcagcacgcaactggaaggtgcagacctgagcacaagcgtgctggatggcgcgattctcaccggggcactttatgacgacaagaccttgttccccccaggattccttccggaagaacgagggctgttgaaatcatcggattga

SEQ ID NO: 527954 - DNA, 627 bp, Stenotrophomonas maltophilia
atgaaaggtgtcgagcgaatggctctggtgaagaaggttcttgtcaggggcgctctgatcgggctggcgctgtttgccttgactggcttggtgctgaagttcatggacttcagggttggtccaccaacgccgggccctccgaagccgcgcattattgactatacctctggtcacgacattaccgatgcgccgccagaaatgcatctcacgatcggtattgctaactattctgacgaagggctgggcatagtcgtcatcaacgaagcatggggagggggaatggagccccgtaccagcagcaatgggcgtacatgctgcgtgacactcccccgcatttggcatccggggctgaaagtaacagttgcttaccgtacgagtagcatgttccttaaggatccgcatagctatattgagaaggagatcgttgtgccgcgctataagccattcttggatggtttcatcttctttatgtatttccctgatgatgaggtaagggtcatagctacgccatattttccgggggtccctaaatttgcttacgatcttgattttgctgacagcgagcgtgattcagaaaagatcaatggatttcttgaggcgacggcagggggcggggtgccagaatga

SEQ ID NO: 527955 - DNA, 624 bp, Stenotrophomonas maltophilia
atgaaacagcctgatcgattgaaggttgtgacgaagctgctgacacgatttgctctgcttggtcttgcgatgctggccgtagcaggtgtcgtgctcaagttcatggatttcagggttgggccgctgcctccaagtcccccgaaaccacgcatcattgagcctgataccggtcacgacattaccgacgctccgccggaaatgcatttgacaattggtatcgccaattactcggatgaggggctggggactgtcttcattaatgatgcttgggggggggtgatgcgggctcgagccagtagcaacgggcgtacatgctgcgtgacgcttcctcgtctctggcatccaggtctgaaggtcaccgtggcttaccgcaccagcagcatgtttctcaaagatccccaaagctatgttgagaaggacgttcttgttgcgccctatgagccgtttcttgatgggttcatctatttcttctactttcctggtgatcaggtgcagatcgtggccactccctactccccaggatatccgggcttcgcttacgacactgacttcggtgatgggcgcggtgatccagcaaagattaagagatttctggaagcaacagcgggcaaggaggcggaatag

SEQ ID NO: 527956 - DNA, 627 bp, Stenotrophomonas maltophilia
atgagcaaccctgagggaatagctgttgtaacgaaggtgcttgtcagggttgctctgatcgggctagcgctgtttgccttgactggcctagtgctgaagctcatggatttcaggattggtccaccaccgcccagtcctccgaagccgcgcattattgagcctgacactggccacgacatcaccgacgcgccaccggaaatgcatctcacgatcggtattgccaactactctgatgacgggctgggcatagtcgtcatcaacgaagcatggggaggaggcatggagcctcgtaccagcagtaatgggcgtgcatgctgcgtgacgctgcctcgcctctggtatccaggtttgaaggtcacggtagcctaccgcacaagctccatgttcttgaaggatccgaacagctacgtagagaaggacgttctcgtgccgcgctatcaacctttccttgatggatttgtattcttcatgtatttcccgaacgatcaggtaaggctggttgccacgccgtattttccaggttatccaaagtttgcttacgaccttggggctgctggttacgagcgtgatgaacttcggatctcgcgattcctcgcggagaccgccttggatgaggtggcgaaatga

SEQ ID NO: 527957 - DNA, 150 bp, Stenotrophomonas maltophilia
atgagagtgagttctttggcgccgttggacaaggaatcaataagtcttagcacgcgtaagaaggttcgatgtgcggggtcatttccggtggatctggtggatggcgcgaactgcgagcagatcatctacgacggcgtgtgccgtggctaa

SEQ ID NO: 527958 - DNA, 591 bp, Stenotrophomonas maltophilia
atgaagaggtttgtgacgagggtgattctgatcgggctggcgctgcttgctgtggcaggcctggtgctgaagttcatggacttcaggattggaccactaccgcccggtcctccgaagccacgcatcatcgactctgcttctggtcacgacattactgatgcaccgccagaaatgtcattgacaatcggcgtggccaactactcggatgatggattggggacggtcttcatcaatgaggcctgggcgggtgggatggagccacgagccagtgggaacgctgcgacctgctgcgtgacgttgcctcgtctttggcatccggggttgaaggtgacggtggtctaccgcaccagcagcatgtttctcaaggatcccagtagctatgttgagagggacatctttgtcgcgccatacaggccgtttcttgatggtttcatctatttcatgtacttcccgggcgatcaagttagggtcgtggcaacgccgtatttcccgggatatccaaagtttgcctacgacattagtcatgctgagcttgagcgtgaccctgaacgaatttctagatttctcattgagtcggatggagaggaatag

SEQ ID NO: 527959 - DNA, 816 bp, Stenotrophomonas maltophilia
atggctgacgccccgtggatcgatccgtggcggcattcccggttgccgtggcagacccccggcgaccagtgtgtggacgcgcggcccgcctgtgcgctgctggacatggcattcgcgccggacgcctggacgcagctgcgcgcgctggccgctgacgtggtgccgctgtttacgcatcgctataccggcaaagggttagaccggttgtcgccatgcctggttgtcctgccggacgacgccagagtgcgcgaacgctgctggcaggcgctgctggacctgagcaacggcgcgccgatgctgtcggtgctacgcagcaccgccgacccgcatgcattggccgaacatctacggcggatttgggagggccgttccagcaccgaccagccgtggttgctgcgctgggccgatgggcgtgccgccgcccgcctgctggatgcgctggacgatgcacagcggacgcgcgtactgggcggtctacacgactggcacctgcccacccgcatcggagattggatgtgcgtaaccggcaaggggggagtgccgctcgatgccgacgccaggccgctcacgttcaccgcggcgcaggaggccacactacggagcggaagccaggccgatgccatcacgcgcttcattctgcagcggcccgtgctgcgcccggacggcatgctgccctcgcaggtgcatcgctgcgcggaacacgtgctgggacgtctggcacgccgaggcatcgaccatcccgcgctggcgcatcggatgacgatcaaggtcgttgccgcgaggaatgcgccccatggcgatgatgagacgccatga

SEQ ID NO: 527960 - DNA, 2610 bp, Stenotrophomonas maltophilia
atggatcaccgatcatcgttcgttgctgcccacgaggcgtcgtcgcgcgtccatcgcttctgcggccctaccgcattgcgattgatcgtagagcgctggcacggcagcgaatcgttgtccgaaggtctgcgctgccagatcgatctgctgggcgagccgtgcgagcacagcctggatgattgggtggcccggccggcaagcatcaccacacgcctgccggacggtgcagacgttgtccgggtcgggctgatccgcagtgtcgagcgcctggcctgcgcaggccgtcttgtgcggtaccgcgtgcacctggccgactggaccgcctggctgcatgacagccgccacagtcgcgtgttccaggatcaggacgtggccagcatcatcagcacggtgctctcggtgcacgcgccgctggcgcattggtcctggcacgttggaagtactgctgccatcgaccgccggtgccggggctatcgcgtgcagtaccgccaatcggacatggcgttcctgcagcagttgatggccgatgaaggcctgggctggtgcatccgcacgctgcccgatgtaccgggcgggcatacgatgatgatcttcggcgacagtacccgatgctcgctgctgtcacggccccgacgcctgcaccagacccagcgcgtgcccgatgacgcgggcatcgcgctgttgcatgagacctgtcgcgtcgtgccgacccacatgacccgggtggcggatctggacgatccgttgcgtgtggtttcggccagcctgcctgtgcgcactgtggccagtggcccattggaggactattcgccggcacgccacgcggcgtgggagacctcgcgcgaggccttggccgaggtgatgcgcgacaccgaggcagcgttgtgtgagcagcggcgctggaccggcgaaggcaccgagccggacttccagcccggctacgcattcgaggtgttgccagagcccggccagcgagtagcgcccgcgttgctgcttacagcggtgcagcacgcagcggtcaacacgctgcctgaggttctcgaactgcagcagcacctgccgctgcacgcactgcccgacaccgtgcctgccgaccgcgcgcagaggctgggctatgccaatcgcttcgaggccatgccgtacgaccgtcgatggcgacgttctccggatggcagggcagggcggtcggcggcccccggcccacaactggccactgtgctcggtggcgatgacggtgcaccgctgcacatggacagcaacgggcgcatccgtgtgcggttcggctttgccaccgacagcagggccgacagcggttggctgcgcgtcgcccagacctttgccggccccggcgggggcagccagttcctgccccgcgtcggccaggaggtggtggtggacttcatcaacggcgacctctgccgccccatcgtgatgggtgcgctctacaacggccggggcgagtcacgcgctgaagcgctggcgttgtccagcgatgctggcagcagtgcccagaacaacctggccggtggcaacgccccgcgctggcatgctgcaggcgcgggtgaatcggcccagcgcaatgtgggcgccgtatggggcatcagctcgcagagctgggacggccatggcggtaacagtctcgagttcgacgacagcgatgaccagctgcaggtacggcttggcacaacgcagtgccacagcgcgatcagcatgggtcatctgcgtcacctgcagcacaacttccgcggcagcctgcgcggaagtggattcgagctgcgcagcgacgcgtggggcgccgtgcgtgccacggcaggcctgtggctggacagcatgcagcgctctgcgtccaccccggccggtctgcgcgctgcgccggtcgcgctgttgcggcagacgctcgtgctggcgcactcctttgatgaagcggcacggcagcaacgtacggtgcggctgcgcggccacgccgccgagggcaacggtgccagcgtgctgcaggccttggccgacagcgtggcggcatcgcagcggctgcagggcgctgacgaagacatccctgcaaccgggtctgcggtgcttggcctgtccgcaccggcaggcatctgccaggtggccgggcaggcgatccagctgggcgtggggcacagtacgttgctggccagtggcggcagttcgtcggtgaccgttgccggccatgggcgttggcagtgccgccaggccataggtgtgttggcgggtgccacacgcaatccgggaagtgccggattgagcgtggtggctggcgaacaggtgcttgatatgcaggcgcaggcagacgccgtgcacctgcaggcgcgcgctggggtggtggcggccagccagcggggggaggtgcaactggcggcaggcaacacactgcacatcgcaacggccggcggcgcttcgatcacactggaggacgggcacctgcgggtgagctgtccaggcacattgaccttcaaggccggcaaccggcacttcaccggtccggtgcaggagctgtttccgctgccgcagttcgcacagacggtctgcgtggagtgcctgctgaaggcgatgcaggccggcctgccatggtctacgaagaatggctga

SEQ ID NO: 527961 - DNA, 405 bp, Stenotrophomonas maltophilia
atgtcataccgcacccattacccgaacctgtatcaactggtcggcgaatcgatcaggcagctgtctgtcgaaatcgcccagcgcgtcgaggacgtactgtccgggcccgatggcctgatgccgatgctgaaggggcagatggacatcgacggttctacgcagcgcaccgggctgagtgccccggaggctggcacgctggcgggcatccggcacaccgtcgcaggaatcacgagcttgacccggatgatgtatgccgtgcatgtcgcacgcactcggggaggcccgtcgcaggtcgtgcccccggatgcgatgaatggcctgctgctggctgcgcgggagctgaccacccacgcacaaaggcagttgcaggccgaaaggaatcggggttcggcgacgctgcaatag

SEQ ID NO: 527962 - DNA, 477 bp, Stenotrophomonas maltophilia
atgtatcgcgtcaccatgatcgcgttgttgctggggctggcaggcacggctgtcgccaagccggaaaaaaccgttgtacagatggaccggcagatgccggtggccgaacaggtccggaaggtcgagaaggccctggacgacggcgactacagtgagatttccgcggatgaccgcgcccaggtgcgacaggcactggcgcgcatcacccagcggatgggggaccgccagacgctgcaggaactgccgccgcaggtccagaacgacgtcttcaacgaccaggaacgggtcaataccctgcttgcccgggcccatgatgacagccggcaggtctgccaatacacccgcaccaccggcagcaacatgcccaaaagccgctgcatgaccgtggccgaacggcggcgcatcgaggagaagggcaaggccctgctccatgaccagcgcaccttcaccgacctctcgcctcccagcaaccgctag

SEQ ID NO: 527963 - DNA, 366 bp, Stenotrophomonas maltophilia
atgcgaatgggaattccgctgttgttgctgtttggcctggcggggggcgccaccgaagtgcatgccgcgcccacccatgcagtctcccggctctatttcgacgccagcaacacgctgattggccagagcctgcgctactgcaccggcagaacccagcaccagggggctgcctcacataccaacacccgctggatcgatgtcacctatgcctgcaacggcgactcgaccgaggtgagctacggaggctgggtaccggccgacctgcggcaggatttctgcggcctgtatgacgcctgcaccttgttgatgccgtggccggaacacacgttgcccggcccgctggcgcccggattcaattccgactga

SEQ ID NO: 527964 - DNA, 792 bp, Stenotrophomonas maltophilia
atggcggccacgggaaatgcgcccgccgcctatcagaagtactacaccgctcgaaacgttcagccgttgatggcggaccttgaattcctgtccaggagcggcgacgcgaacgcgagttttgtactcagccgcatccatgacgactgtgccgtcattcctgactggggctcgctcgcgggattggacatcgcacaggaaaagaaggtcgcactccagcgcagcacggcgtggttcaaggcgcgatgcgaaggaatgcccgaggacgttgtgagcggcttccgcaatctgaagcgctaccgggaactggcggtgaatcagggaagccttgctgcacagatcgaacaggcggcgcctggcctccacctcgcggaccaggatctttcggtggaggaccacaagacgtttgtcgaagccgtgctcatgcaggacgacggtgaagcctacatggcacttgcggcaaccatgggggaagccgcctcccaccgcatcgaagcgttgaagccctacaaggcgggcacagccgtcgaggaagctgcatggatgctggcgggctgccgaaagggcgtaccgtgcggcgccgattcccccatcctccaacgcatgtgccgcgccggtgtgtgtggttacaactcgcttgaggagctgtacagccatgggatgcttgcgcccgagcagatgcaacaggcgcgcgcacggatggaagagatcatcgcactgtcgaaaagtgtctccggcgacgatggctccatcgccggagacgttgccgcggggcggccggtcagtcggaattga

SEQ ID NO: 527965 - DNA, 147 bp, Stenotrophomonas maltophilia
atggaagggtggtccccgatcttcgccgctgcggccttcacgcggtatcgggcagaggtcatgggcgaaggcctttggtgggtgcggaccaaggtccgcacccaccaaggcgaatacaacccggaatccgcgcaaaaactgccctga

SEQ ID NO: 527966 - DNA, 1227 bp, Stenotrophomonas maltophilia
atggatagcgacagcggcccgggcgacatgggcgatgcagggccgggcagggaccaccttgcaggggtgatcctgaccctgatgctgggtggcagcgtgatcgcgctggtggggcagcacaccgccgcacaggcaggccctgcgatcgtgttgagcctgttgctggctgcgctgggcaccgcgccgctgctgtattgcctgcacatcctgggccggcagctgccggtggccgagggcctgcacggcctgctgcgggcgcgttggggcagggtcccggccggcctgctcggcgccgcgctgctggtggaactgatggcgaccagcgccggcgtggcgcagtccatggccagccacgtgcatgcgctgctggccagctgtggcatcgaggccggtaacgcgatgccggttgcgctgatggccacccttggcctgcttctgcttgggctgatcggattgctgccaccgaggcgtggggcgctggtggcctgtgcgttgctgacggtgaagctgggcaccggcctgttgctgctggtgctggcggcccgccatgtgcactacgcgctctggataccgtggctgccggaggccacggcgccctatcgcttcgggccaggaggagtgctggcagccagcgtgccgctgctcggcgtgtttgcctgtgccggcctggtgctgggatttcccggcgtgtgtggccaggtgcggacgcgacaggcggcgttgctggcgagcacgctgctgctggccatgctgctgctgatcgtgctggccgcgttgcagtccggcctggtcgagtttccggccttggccagtacgcggccgttgtcggtggcattgcagcagcacccgcaactgcagtggatgatgccgctgctgccactggcgggggcgagcgggttggcggcactcctgctggtgctgctgcgggtggctgcgcggttggcaacgcagttgtggacggcggcccgcgatgcatcgcatgggcgtgttgcgccgccgatgccggtcgcggtggtgctggccgcggcgctgctggcgctggcgatgccgatgggcacattgccggtgctgcctgggccggcaaccctgctggtgatggcggcgctgtgcctggctgccctgcgcgcgcaggttccgctaccacgcgccctgccggtgctggcccccctggccgccgcgctgtgcctgttggccgccgcggaacggatgcgtgcgtggcccggctga

SEQ ID NO: 527967 - DNA, 471 bp, Stenotrophomonas maltophilia
atggcctcccgttcccccttgtttcctacccgcgtcaactaccgggcattcggccgccagttgggtcgtggcgaacaggcgctgctggcgtcaatacgccaactgcgcgagcccgacctgcgggccgatgggctggccgggttgagcgacctcggccttgatcccgagggctgcggagcgttcatcaacctgctgccgctgctggccacggctgcagcgccgatcgacctgctgcggtccggctccccgttcatcgccgccagcgaactggacctgctggcctgcctgctgcgtattgcacagtggcggcacgcacgcccccgcgacgacgacacgctggcgccgttgcgccggcaactggcacgctgtgcattcgtggtgcacgcggcgaagctgccactgcggcagcgctcgttgtcaccggtcgggctccgcctgctcgatccggccggctggctgcggcagcgatga

SEQ ID NO: 527968 - DNA, 687 bp, Stenotrophomonas maltophilia
atgacgggcggttccgttgccggacagcgtgccgtggccagcgtgtgcgcggcgctcaaagcagtgcgcggaatgctcagggaggggtgttgcctgcagggctgcgccctgcacccgctgcaggcaacagcaacagcaacagcaaaagcaacagcaacagccgaagcaacggcgggcttcctgtggggaggcggggtgggtccggttgcgggagacgccgtaaacccatccctgggggcttggccgcggcatccatgccgcggacactcccgcaaccggacccaccccgccttcgacagtttcccgcgatctgcagtagatccacgccatgcgtggatgaatctccatcggaatcgaatatttcgaattggaatcgaaaagcatccacgcatggtatggatctaccgtgtcgaccgaggtcgacacccacccacagcagcgggaatctgtcggaggtggggcggtgtgggtgggcaggaccgttggcgccatggatggcgccatcgagcccccatggatgggtttacggcgtgtcctgaccacccacaccgccccgccatcccacggaatgcatggctgttgctttggctgttgctgttgcctcggcgggtgcagggcgcagccctgccgaacccccttaaatgtctgtgggagccagtccgtactgctcggcgaagcgcttgctga

SEQ ID NO: 527969 - DNA, 477 bp, Stenotrophomonas maltophilia
atgacccgccttcgcaccatcgcgccgttcgtcaccctggcgctgctggccaccagctgcagcaccgtgcaggcacgccgcgacccgttgtgtgcacatcttcttgccttcgccaacagcgcctcgatcggcacccagccggcgattgaactggtcagcgactggagcagcttcagcaagcactgcacgcatggcggcacccttgcgggcaggcagttctgcgattggctgctgcccaatacgtccaccgaattcgccacgatcaacatccagcgcaccctggcctgcctggcccccgggacgaactacgccggctcggaacggctgttcccggaatacgtgaccgggaaggtgcagtccctgaatgtgcgcggactcgacgcggacgtagtgatcaccgtcgaatacgccgtcggcatcgagggggaacggccgcgcatgaagatccaggccgaacgcctgccgccgcaggactag

SEQ ID NO: 527970 - DNA, 231 bp, Stenotrophomonas maltophilia
atgttcctgaaggggcaaccgctggatatgccggcgctgcagcaggtgctggcgcaggcgcagcagctgccacttccgcgtcgcccggcggtgcgcctgtcgaccgccgacgacaccgattaccaggacatggcgcgtgtgctgctggctgtcagccagcacggcctgcgcttggacgcacttgcccgcccgtgggggcactggcaagacggcttgatgaaagacggttga

SEQ ID NO: 527971 - DNA, 1518 bp, Stenotrophomonas maltophilia
atgtcggtgctggttgcctggctccgccacgatctgctgctggcgacgctggaggacttccatggtcagtctgcggcgcagggagtgaggtttgaggagatcatcgccgacgccatcgcggtgcttggcatgcacgagatcggccgtgctttgctgactgaattggctggcgatctggctgtgactggaagatcgtctttgctgtggcgagtcattgcgcagaatcaggacgctgcccggctggagctgcagcagacgctcaaggcggctgacgccggagccaacaccgttctgtctgccgcaggtgcgagctggtcggcatttgtgtccggaacggcgcatctgaagaccttcatctccaactatcgcaagctggaggctgcgcagaaagaggccgcgccccccaccgccagtgcccgcatccttcgcgacagtggcgttgatcgcttcgtcactaccgcaggtgcgtaccttctgaatcgatttccgatgaagggcatccaggacactgtcggcaatgccatggtccgcgttgtgctcctgacgcgggcattgatggagcgcgacgaggcgatcagcctggtggccgaagagctgagcagcggccagcagggcaagcgctatttcctggagcgcatccagttctatcgcaagaaggggagtgcactgccgatgcagttcgcgcttcgagatctggagctgcaccatggcgcgctggcgatgcgcaagcgttggcaggcagcggcggaaagcagccgcaatgtcgtccgtttgaattcccttacgggcgtgttggagatggtgaatttcatccatctggcaaccaaggtggataaggatacgcgtgactacgcaacgttactggcgtccggcatgtcgcttgtggctgtgtataccagtgtgcatgaaacggtagccagggagttctatggggcgggtagtgtcagtgctattcggatgaaggttgccggcagtgtgctggcgggagcaggtagttttactggggcggcttacagcttgtcggacttcaaaagtcggcttgaagatgggcgacgctggtctgccgcggctttgctgatgaaggcagcgctaacgtcagcggttggtagtgcgaactttctcaccgcgctggcctattcctctccagttctagagcgtcatctggggcgaaacaagttgagtttgggtcttcgtgggttgagggccgggatagaggctgcggccgcgagggaaggggaactcgttttgtcgagtcaggctatgaagcgccttggcggttggatactgcgcttgggcggttgggagattacgttggcactgcttgtgattgaagcgaccgtgtgggtaatcagcccgaacgatctcgagaagtggtgcgagtccaacgtattcgggagggcagctagtaaagctcctccctcggccagcgatagtaggaacctccaggaggccgttctgaagcagaacgacgcgtttgacaaagcaatagggaaagtaactacaaggtcgcagtcgtga

SEQ ID NO: 527972 - DNA, 2919 bp, Stenotrophomonas maltophilia
atgacgcgcgatagcaaagataggtacgactccagcgggcccttcacgggtgaaagcaacgtcgggatccgcagcgcgggcagtccagacatcgtcgatcttccggcggttgccgccacgctgccggacgagacagagaaatcagcctgcgacgtctgccgctccactgggctggccatcctgccggtgcgctacacggtggtgcctgccagctgcaacgtgagccttggtggcctgtcgcccgcacacgccagcgacgttgatgtcagtgcggcgggatacacctacgcgctcagaacgttgcgccagggtctgctgtacctgtactacgagcagggtccctacggtccggagtactgggagtgctacgccatcgccggaaacggcaccctgtggcggcaacccaccgcctacagtgcgcgcgcgatcgcaggcggtggcctgcccagctgtggccgcagtggccacgatccgatgcgcacggagttcatcaccatccagcgcccgcatgtatgcgggacggtctggctggcctactcccaacacccctggacgccagcgacgttggatcgctatggatccgacccggccctgcgcgccgagcggatgcaatcgatcgagccagccagatggatcacgtcggcgagagcagaaggcgaccaagcgccattgaaggatgccgccgggctggcctcgatcatggaatatcgatggctggataacccctcaggcgatccgccagaccttccgtacagcagcgcactcccgggtgcctctaatccggacggggcgcttcgcaacgtgcggctgcacgcgcatggcacgcgttacccctggtcgcggcgggattaccctcgtagcgacggtgtcgacccgcgccagcagcggtttgagcgcctgaagcaacacagcagcaacgggcgcatcggcagtgatcgtcaggagtacccgcccatgctgctgggcttgtgggatgcggttggcgtcgtgcacgagctcagtggttactgcaatgacctggtcgcctgcatcaaccagttcaagagcgagcgcgaactggaagtcagcgctgttgaccagatcgaacagatctcgcgcctgctggagctcaacggtgcggtgatggcagggaactacgcagcacagaccgtccgcgaggtggagcggcagcgccgcctcggcaatccctcgcttccctcatgggaccccaaggtaaagctctccgaggaggagaagcgggaactcgcgcgggagtatgagcgccagttcctgccgctctatctgaaggacgcccaggatgcgtggaaaaacaagtactggccgctgattgacgagccccgtttcaccgcgttcaagaggaacatggacgcgatgacgcaacaggtactcgaccggctgggaccgaagatgtcggtgctggttgcctggctccgccacgatcttctgctggcgacgctggaagactttgacggcaagtctgcggcgcaaggggagtggttcgaggagatcatcacagaggcgatcgccgtgcttggtatgcacgagataggccgtgcgttgctgactgaactgtcccacgatatagaagttaccggaagaaaatccctgctctggcgagtcattgcgaagaacgacgaagagtctcgcaaggagctgcagcagacactcgaggcggcgcaggtgtgcgccaacacaattctcgaagcggccggcgcaagctgggcggcatttgtcgcaggcaccgcgcaacttaagtcttacttggccctttaccgcaagttggaggcggcgcagaaagaggccgcgccccccaccgccagtgcccgcatccttcgcgacagtggcgtcgatcgcttcgtcactaccgcaggtgcctaccttctgaatcgattcccgatgaagggcatccaggacaccgccggcaatgcgatggtccggttcgtgcttctgacgcgggcgctgatggagcgcgatgaggccatcagcctggtggccgaagagctgagcagtggccagcagggcaagcgctacttcctggagcgtattcagttctacagaaccaagggcagcgcgctgccgatgcagttcgcgcttcgggacctggagctgcatcacggcgcgctggcgatgcgcaagcgttggcaggctgcggcagagagcagccgcaatgttgtccgtctgaactcactgaccggcgtgctggagatggtgaacttgatccatctggccacgaaggtggataagcagacgcgagactatgcgacgctattggcttctggaatgtcgcttgtggctgtgtataccggtgtgcacgaggctttggcgaaagagttctttggcgcgggtagcgccagtgccatacggatgaaggttgccggaagtgtgttggccggggcgggtagttttattggggcgttctacagcgtcttggaggctgagaaggcaagtgaatttggtatgcgcgcccctatagcgttggtgataaaaggaggagcaatggcagctaccgcatctgctcagttcttgaccgctcttgcctattcttcccctgtcattgagcgcgtggtaggacgcaactcactaacgatcggccttagaagtttaagggctggcattgaggcagcggcgggtggagaaggtgggcacatcgtttcctctcaagccatgaaacgtatcggtacatggatcttgcgacttggcggatgggaggtggctttgggtcttctgctcgtcgaagttttgatatgggctgttagcgcgaatgatctggagaagtggtgtatgaccaacgtcttcggtaagaggattggtgacaggtcgagagggcgtcgctcgtccgacaatgtctatgcgactgcacaggagcagcagctggcatttgacagggctattggctcggtttcgattcggtctcaatag

SEQ ID NO: 527973 - DNA, 246 bp, Stenotrophomonas maltophilia
gtgcagctgtcggcgccgagcaagcatctgctggcgacggcggccggtgcctacatccgcattgagggcgacaacatcgagctgggcgcgccgggcaaggtggagttcaaggccagccagcgggattgggtgggcccgctgatcagttcggaggagaccgacgttccagctgggcagttcagtggctgcgagccgcacttgaacgcagcagtatgccgacaggaagggtgcgctgatgtcggttga

SEQ ID NO: 527974 - DNA, 498 bp, Stenotrophomonas maltophilia
atgaagatccctgccactgacaccggccgcctcgcccaggcctcgatcctggcggtgctggctgccggcatgctgccggcccagctgctgggcggcctgttgtttgcactcgaattcaggcgcacaccgctaccggcgctcaacggcggcggtctgatgttcgtgctggccgcctgcggtgccgttgtggtgctgctgccgatggcgctgctccagcagtctcagcatcgcctgcgccgggggcgcttcgtgtgggtcggcttcgggctggcggcgctggccatggccatctgtacctggccgggtgaggacagcggcccgctgctgcagcgcctgcgttacgtcgacaccttcgatgtggtcggctatggcctgctggtgctggctgcagggggcttcggcggggtcgccgggctggccttccacgccgtgttccgcctgtccatggacggcacttccagtgggggcccggcaatgccgccgggcgaggacgcctga

SEQ ID NO: 527975 - DNA, 450 bp, Stenotrophomonas maltophilia
atgcgcacgcgatccctctcatgcagaagatcctcgccctcaagccttgagtggcgtccctcgcggctgcaggccgccgcccagctggcggtgctgctggccgcgccctggctgctgcgcgcctcggagctgccaccgcgcctgctgatccctgctgtgttgctggcctggggccttggcctggccgagctggcctggcggctgcgcaggccgcgcctgcaggtgcggctgccgccgcttcccgagccgctgcaggtggccgggcaggacatcgaggtgccacggctggtggtgcgtggtgcctggctgttgttgtcctggcgtgagggccgacgccgccggcacctgttgttctggccggatgtgctcgattccgggcagcgacgtgaactgcgactggccgtggccgcacgtgccgtttcccgtcggccgcgtacgatggcaccataa

SEQ ID NO: 527976 - DNA, 300 bp, Stenotrophomonas maltophilia
atgaacaacgtgatgggaatggccctcggcggaatgcgcgcggcccagcagggtgtgcaggtggccgcgcacaacgtggccaacctggcgactcccgatgcccagcgcctgcagcggcagcgtggtgccgcagagcagggtggggtgcaggctgtggtgacgaccaccggcaccgcatccggcgcgccgctgggtgacctgctggcggcccgggccgatgtggtggcgttcgccgccaacgccacggtgatccgccgccaggaccagatgctgggctcgctgctggaccgggacgcctga

SEQ ID NO: 527977 - DNA, 462 bp, Stenotrophomonas maltophilia
atgcgttggcttgagacacggattccaccaccgctggtgatgctgctgtgtggtggcatcggctacctggccagccgcctggcagcggacctggtgttgccattgccgatgccggtgctgcttgcaggtgctctgctgacgctcggtgtgacgctgaacctgctgccgaagctggccttccgccgtgcgcgcaccacggtcaatccgctgcgcccgtcggcctcgagcgcgctggtcacgcacggggtataccgctacacacgcaatccgatgtatctcggtcaggcgatcgttctgactggtgccgtgctgtacctgcagaacccggtcgcgtggctggccgtgccgctgttcgtgctgtacatcacccggttgcagatcgtgccggaagagcgggtgctgtcggctcgttttcccgaagcgtatgcgctgttccgccaacgcgtacgccgttggctgtag

SEQ ID NO: 527978 - DNA, 1245 bp, Stenotrophomonas maltophilia
atggaccgcctccgcaagctcgctgccagcaccctgctcgccctgtccggcgccgccagcgcaacccctgccccgcactgggtggccagctggcaggccagcccgcaaccggtgtggggcgcagacttcctgttcccggccctgatcccggcatcgctgcacgaccagaccttccgccaggccgcgcgcatcagcctgggcgggccgcgcctgcgggtaaggttgagcaatgcctacggcacgcagccgctgcgaataggagcggccagcgtggccgcacgaccgggcgcggcaccacggccgctccacttcgacggccagcccggcgtgctgatcggcgcgggccaggaacggctgagcgatccgctggcactgcccaccggcaatcagcaggccctgcaggtcagcgttttcgtgccggggccgacgccgctgcagaccttccactgggacggccgccagaccagttggatcgccggcggcaaccagagcctggcgcgcgacctggatcgagccacccccaccaccgcacgcctgttcctgaccgggattgaagtcgaggccgcacccggcgcacgcagcgtggtggtgatcggcgactcgatcactgacggcgccaccgccagcctcgaccaggaccagcgctggaccgactatctggccgcgcggctggcaccccgaggcgtcgcggtggtcaacgctggcatctccggcggccggctgctgcgtgacggcatgggcgagtcggttctggcccgcctgcagcgcgatgcattggatcagcccggcgtggccagcgtgatcgtgctgatcggcatcaacgacatcagctggcccggcaccgccttcgcccggcagcaggcgcgtcctacgctggccgagctgcaggacggctatcgggcgctggccgaacaggcccatcggcgcggactgcgcatcctgggcgccaccctgccgcccttcgccggcgccctgcccggcacgccgctggacgactactaccagcccggcaaggaggcgctgcgccaacagctcaacacctggctgcgcacacgcagcccgttcgacgcggtgatcgatctggacacggccctgcgcgacccggccgatccgtcacggatggccgccgcctacgactccggcgaccacctgcatccgggcgatgccggcaaccaggcgatggccgaggtggtggatctggaggtgttgatggggccgtccacgcatggcgtggatctactgtga

SEQ ID NO: 527979 - DNA, 1050 bp, Stenotrophomonas maltophilia
atgctgcacccagcactgcgggccggctgcctgattctggccgctgccctggcctgcgcgccctgcgcggccttcgaactgcagatggtgacccgtgcccaagccaaggatctgcgcaccaggctggaccagcttggcgttcgcggcgtctcgttgcagatgatcctggatagcggctacgagcccgtgcacgagcgcatcatgctgatgtcgtacggctgccccggccaaccatcctgcgcggcccattccgagcgcggccatatcagcatggggctgcaatggaacgacaatcccccggatgtgccctcccttggcgcctgccaggggaaggtagtgatgatgccgcaccggagcggaaactgctggctggctcatatgctgaaggccaagcgcaatcccgatgccggttacggcgaagcgtcactgatggcgcagcgctcgcactacggcgacatgcagttcctgcatgccatggcgagcgagcccggtgaagcggcgtcgaccacgctggaacacatgatggcctgggccgagtacagctaccgcctttccctgcgcggaggcctggagcagttggatgtggaggcaccggtacgtcagttcgccggcctggcgccctggttccaggccgaaaagcgccactggaccggcgccgaccttttcatgttcggccacgagtacgacgaaccattgatacgcgacatggcattcggctccctgctgcatctgctgcaggattcctactcgcagagtcatgtccagcgcgactacgctgccgatggcttacccatcgaacgcctgttgacctatcgcgggcagtccagccactgccacgccaaggccgatcgcaagggcccggagggaaagaagccgctggcggccaacctgcgcgcggcaatcgagatgggtcgcgagctgatcgcactccgcgaacgcactgcaccgtggacggaggccgaaggcctgctacgtggcagcgccttccgcctcgcggcggacgtgcagccagccggcaccggggcgttcaccagcaagaactgcaagtag

SEQ ID NO: 527980 - DNA, 1098 bp, Stenotrophomonas maltophilia
atgcggcggattgccggcctgtgcctgatcgtgtgcggtctttcgtcctgtaccagcgtgcccgatgtcgcctactggcccgagcacgaggccgtgcgactcgacgcaccggcgcgcagcgagcgcatggtgatcgagatcgatgatgcggggcggttccattggccgggccagttcgaccgcctgcagcattggctggcggaggagccggcagagctgcctgtggtggtattcatcaacggctggcaccacaacgcatcgcccaacgacagcaatttcaccgattttgaccggttccttgcgagcgtcgaggccaaggctggagcgccggtgagagggctgtacgtgggctggcggggcgattccatcgacaccccactggcctgggagccgagcgacttcctgaccgtatgggaccggaagaacgcgtctatagccgttggtgagggtgggctggcgcaggtggtgacgatgctgcgcgagcagcaccccgagcgtgcggtctacatgatcggccacagctttggcggctcggcgttgttccatgcgatcaaggacggactggcgcaggagcagttgcacggcttcgagtacttcatgctcaacccggcggtggccgaaggcgaattcgacgcggtcgagcaggcgctggtcgcagcgtgggcggcatcgccggcgttcagcggcgcggtctcgatcacggcagcagacgctttgcgccagcatcgcaaggtcacggtgctgcaggcgcagggcgacaaggcggtgggctggggctaccggatcgccttccgcgataccccgatcggctttgaccgccagcggcagacccaccgtgccaaggtctgcaatacaggggatgcctgtcgacccacgccagcggatacctgtaccgcgaccctggccgatggccgcttcgtgctgcgcgcggtcagcatacccggccagggctgcgtgccgatgcagcagcggccggtatgggtgattgccggcgaggacagcgtctccgccaaccataacgacatcctgaattcgatccaggccgaggccttggccgacctgctggcgcagcgttggcgccagcgggcagggcgctga

SEQ ID NO: 527981 - DNA, 1437 bp, Stenotrophomonas maltophilia
atgtaccgcacccttgctgctgcattgctctgcgccctggccatcgccctgcccgcctcggcgcgtgacgtccctaccggcctttcttcccagctcgacgctcaactgcaggccaaccgcgaacgctacggtattgccggccaggcggtactggtcgcgcgcaacgggaacgtgctctaccagggcgccagcggtgaacgcgacccggccacgcatgcgcctgccaccgtcgataccatcttcacctcgcagtcggtggccaagctgctgaccagcacactggtgatgcagctggtggaacaaggcaaggtggacctggatgcacccgccagccgctatgtgcctgaattgccgtcggcatggcaggcgatctccgtgcgcgattttctcaaccacagttccggcattggcgagtacgccgaccgccgcgacggccactggatcagcaagggctatgacggcatggcacccgatctcgcctcggcgctgaaggtggccggtgcagcaccactcgtattcgccgccggcagccgcgtgcaatacacccaggccaactacctggtgctgaccgccctgctggaagcgcactaccgcaagccctacccggccatcgcgcgcgaacgcatcctgcaaccgctgaagatgaccagcacttcatggggagcagccagcgtgccggcgcagcgcgcagcggtgccgcacatcggcgaggacggcacattgcagcccgccaacgaagatccgtggccggactacggctggggccatgccgatctgcagactaccgtgggcgacatgaaccgcttcctgcaggcgctggcgaccggaaagctggtacgcacggcgacgctggaaaaactatggaagccgcagaaactgagcggtggcggcagcaactttttctccactggttgggacaccacgcacagcgacgactacacccaggtcggtcacgatggtggcacccgcgtacgggtgcggctggcctacaaggacacgctggccagtggctactgggtgttcgtgtacctgaccaatggcagcgcgcgcaatgtgtggtcgagcacgttggtggagagcacgatggcggtggccgcgcccgccgagtttccgcatgcagtgctgtcggagcgactgatcgcctatgcacaggatgatgatgccggcgccgcgcaggcgatgcgggcctggttgcgcgacgacacgcggattacgggcaacgaacgggagcgtgcgatcaatgcgagcggctatgccatccgcgagagtctgggcgcgcgcaaggcgctgaaggtgttcaccctcaataccgagctgtatccggattcggccaatacctgggacagcctcgccgagtgccatgcggcgctgggcgagaaggaaacgtctgatcggctgtatgcgaaggccaaggcgctggcgaagccttcaccgtaa

SEQ ID NO: 527982 - DNA, 255 bp, Stenotrophomonas maltophilia
atgacagactcgcagcgctggacctgcggcacgctggctctgctgctggtgggaattggcgcagcgttgcggtggtgggttggcagcaccctcggttacaacccttggcaggagctgctcgcacccggcgacggctcgctcggttcgacgctgctgagtacgtcgccgaagtggttggcggcactggtgctgatcggcttcgcgccttccatctggaaacacagcgagcgcctgccggcctggtgtatcagctga

SEQ ID NO: 527983 - DNA, 189 bp, Stenotrophomonas maltophilia
atgatccagccgccggcgcgcgagtacaaagcaggcgccagtccggtccgtgggtgtttgacccgcagtcccatcgcgctagactccgcccatcaccacctacgcgtgcccggcaaggatgtccgcatgcagtatcaggttcccgacgttcgtggccgcgatgcctcccgtcccctggcggctgcatga

SEQ ID NO: 527984 - DNA, 810 bp, Stenotrophomonas maltophilia
atgcgtggatccgtgctgcttgccggtgcaatcaccgttgtcatggcgctgagcacgccactggaggcggccgaacaggcggcggtcaatccgttgctggtcaagcctgttgaacagctgcgtccggacgaagtgcgtttcatgcagcagcaactggccgactggccgcagctgcagcgttatcgcgacgccaacgcacagctgcctgcggcagtgcccggtcaaccacgcgtggtgttcttcggtgattcgattaccgaaggttggggcagggaaggcagcgcctcgttctttcccggcaggggctggctcaaccgtggcataagtggccagaccacggcgcagatgctgctgcgtttcccgcaggatgtgctggcactgaagccgcaggtggtggtgatcctggccggtaccaatgacattgccggcaacaccggcccgtctacgcaggcgatgatcgaagacaacctgcacgcgatggtggatctggcgcaagtgcatggcgtccgcgtggtgttggcctcggtgctgccggtcagcgagtacccgtggatgccgggcatcacgcctgcgcccaaggtgcgtgcattgaatacggcgttgaagcgctatgcagaggcgaagcagctcatctacctggactactacgcgccgatggccaacgcggccggtggcctcgacccgcagctggccgacgacggcgtgcatcccaccgcgaagggctatgaagtgatggcgccgttggccgaggcggcgatcaagcgcgcgctggatcaggcagactcaccagcaaccactcaccgaaactga

SEQ ID NO: 527985 - DNA, 834 bp, Stenotrophomonas maltophilia
gtgaacgctgagcgcgatcctgcagtggctggcaggtggctggcaagcgtgtgccggctgcggttcggcctgctgctgtgcttgtcgatgtcggcgatgctggtggggtgcgggtccgacaggaaagagccagaggccgcacggctgcagggacgcattggtggagtcgcgctggaggtgcccagagaggatgtgtggatatgggagcaggaccgggacgcgcgcgccgacccctcgtcaagctgcggggcaccgttgcgcagcgtttccatccagctgcgttggccggagatggtgccgcgcaacgcacagacccgggaggactacgaccggcatcactctgcggggaacggcgattcgaactggattgacatcggcctgaaccaggcaggcgagggcgagaacatcacgctgcggcagattcgtgactggggactgtaccgccttcaccatcaaagactgcccgccgaggtcacattcgagttcggtcgtgacgccgcccttggactggagatggccagaccggcgttgccggagagccggagcttcaactggaacagggtcacctataccgacagcctggacccggcacgcgcacccaccgtcctgatccgctgcatgaccgggccgcaatacgcacctccgcagtggacgccactgtgcgaggcctcgcttgagcagcctgggctgctgaacgtacgcaccaccgttgtttatcgtcagaacctgttgccgcattggcggaagatcgagtcggatgtccaggcctatctgaaacgcatcaggtcccattgccctacacaccggaacgtgaaggagattgaacatggttga

SEQ ID NO: 527986 - DNA, 264 bp, Stenotrophomonas maltophilia
atgttgacgctggggcgggtggcggaccagaatcggttcatgagccgattccttcccgtggtatgtctggtcgccagcatggtgctcctgctgcgcggaatgcaggtgatactcaagggtgtcgcggtgatggccaacgaaggtgccagcgctgcgtatgcacaaggctacctgcatggacaggcggtagccgggtggatgttgattgctgcagcagcagcctgtgcgctcattgcctggcagagggtgcgcgcgaagaagtga

SEQ ID NO: 527987 - DNA, 1431 bp, Stenotrophomonas maltophilia
atgagggcttttggacgcctgtttctctgcaatgcgctggcctgcgtggtcctggtgaccgcctcggcttctccggtagttggcgcaagttctttcgagcatgcgcatccacgtgcgcagaatgccatcgatgactggcttgcggccttcaatgcgggcagcctcgaggggctgcaggcattcgccgacagatatgcgaagcaggagggcagcactcccaaggactatctcgactttcgcgagagcacaggcccgctgagcgttctggaaacactcgagagcacgtccagccaggcgaagctgttggtgatgggccaggtgaacgagcgtgcgatgcgggtgacggccgtcatggatccggccaatcctgcgcacgtgaagcagttccagattgagggcgctgaaacgccggacaagtacaagccagcgcgggtggctttgcctgtcctgatggccgatgccgcggcaaaactcgaggcgctgcgggcgcgggacgcgctgtcgggggcgttgcaggtggtacagaacggcaaggtgctgctggactggcgcggtggcgattccgatcgcaccgctggcatcccagtgggcgtggatacgcagttccgccttgcgtcctccaacaagatgttcaccgcagtggccatcctgcagctggtgcaggatggcaagctcagtctcgatgacacgatcggaaagcacctgccggactatccgaacaaggccgtcgccaacaacgtgaccgtacgtcatctgctctcacataccagtggcctgggtgatttcttcggcgatgatttcgaacagtattctgcgtcgctgaagacgctggatgactacgtgcagcgctttgccaaggatgcgccgcagttcgcgcctggcagccaggacagctactcgaactatggcttcatcgtactggggcgcatcatcgaagcggtttcagggcagtcgtactacgtctatgtgcaggaccacatcctgcgcccggccggcatgaccggcaccggcttcgagccggaaatagtgagtgttccgaagcgtgccgtcgcctacacgaagaaggatgggcaatggctccgtgaaacgaagtcgctgccctggcgtggcatgtcagccggtggtggctacagcacggtgagcgacatggtggcgtttgccgaggcattgcgtagtggaaagctggtctcacctgtattgctgcaacaggccaccacggcgcagaatcacaagggctggtacggattcggcttcgtggtgcagggcgagggcagggaacaccagtacggccacgaaggcggtgcgcccggatcgaacagtgccatcgtggtgctgcccgcgcagggctgtgtgatcgttggcctggccaatgtcgatccggatgcgatcggcaacgaggtcaactacatcgcgcgaagagtgccgctgtag

SEQ ID NO: 527988 - DNA, 246 bp, Stenotrophomonas maltophilia
atgaacacccggatgcgtcgcacgctcaccgcgcctgcggtcactgcagtttccaccctgctcgtgctcacctggctggccgtgcccgcctctcccgccaccgcactgccctccggcagtgcacaggacacaaccgcttcgccggcagggaacgccgactcctccccccctcccccgcgtcggctgcacagctccctgtccatgccgtatttctcgttcgcccagccgctgaccccacggagctga

SEQ ID NO: 527989 - DNA, 360 bp, Stenotrophomonas maltophilia
atgcgttggcagacgctgtcgagggccgatctggtcaaaggggggccggactccgaaaccagaatggggcgctgttccgctttgatcgggatgggtcggcctaagtcggacaagcatcacctcaccggcaagccgactgatctcatgcgccagctggtgcaggtctgcgagcagggtgagcgcatcctcgatccgttcgccggctccggcaccgcattggtagccgcggatgctgagggctacagctgggctgacattaagatgatgaatcaccactacgaagttccaagaagccgactgctcgcagctatgcggtcactacgcaaaaagccgccctggggcggcttctcgactatgtga

SEQ ID NO: 527990 - DNA, 135 bp, Stenotrophomonas maltophilia
atggggcgcctcttctgcattgcccacggcaaggccaatccctggccctacatggcgttctccgccaccgcaaactattggctggcctgccgcttcctgcgcatattcctgacgatcgaatactcccgcatatga

SEQ ID NO: 527991 - DNA, 816 bp, Stenotrophomonas maltophilia
ttgaaagccgcctacatggccgctctcttggcgatgggcgttctttcaacctcatgcacagagtccaatcgccccgctccgactgagtgcattgcaggtggcagtgcaaccttaaggtcggtgtacgccgatgattttgacgtgatcgtctttggcgagacacacggaaacgcccaaactccgcagctcttctttgatgctgtctgcagctttgcatcaagatcaagtccaattcttgtaggaatggagatccctccttcttccatcaaagccgttcgggattcagcgacgcgcgggaggagtgaagtttttcgggacgccttttgggccagatcgagggatggtcgatcaagcgcggcgaatctggagcttatcgagcgactcattcgactggagtcagagggatacattcgacttgttggattcgacaagcgagtaacgggcaaggaagatttcggctcaagctcgctgtcagcgttggagaccgaacaggcgaaaagcagtaggagcaaatggatcctgctcaccggccggggccacgcaaggtatgtcaatgacccattgagtctgacatacgcccttgtccaaagtggacgcagcactggagttgtggacctgaccttggtcgctggaaatacctgggcctgcgtgatgggcgaatgcggggtccagcagatcgggaacggccagtgcgaaagctcctacatttccacgaacgtcacggcgggcacgcgcctacaggtcaccaatcactgcattgactccgccactgcatctgctccggcggctgactcagcgaccaggatcggcagatag

SEQ ID NO: 527992 - DNA, 678 bp, Stenotrophomonas maltophilia
atgccgcccgcacttccacccctgcttcccgaccggccccaacgcctggcattgctggacccgcatccggtattgcgattgggcgtggaagtgctgttgcgacagcagagtggcgtgcaggtccgggtgagcctgtccagcgaggcgcatctgctgcagctgctggagcgcagcccgacctgtgtggacctgctgctgatcgacgcgctgccgatgggcgatctgggcgatggattggccctgctgcgccgcttgtcgcaacgctggccggcgctgccggtgctggtgttgtcggcacactgcaacgccagcacggtgaccaccagcatgcgtgccggcgcgcgtggcttcctgtccaagtcgaccgcgccggatgtgttgttgcacgcgatcgacgtggtggcccgcggaggatgcttcgtgccaccggagctgcgtgcggaactgaacgcatcgcgggcgcgcagcacgccggcgccggtgctggcgccgttgagccgtcgcgagcgcgaagtgcttggcctggtgctcaaaggggtcagcaccggcgagatggcgctgcaatcgggacgttcggccagcacgatcagctcgcagaaaacctcggcctaccgcaagctcggcatccgcggcgacggtgacctgttccgcttccgccacctgctcgattgcggatga

SEQ ID NO: 527993 - DNA, 1329 bp, Stenotrophomonas maltophilia
gtgcagggcacagccctgccgggcaaccctatacttgcggccgtgactgccttccctgcccttgttccgctggatgtgccgctgctggtcggctacagcggcggtgtcgactcgaccgtgctgctgcactggctgtgccgctgcgcacaggcctccggcactccgctgcgtgcggtgcacgtgcaccatggcctgcagtccgcggccgacgactgggtgcggcactgccagcagcagtgcacagcgctgggcatcgacctggccgtgcaccacgtaagaatcgataacaccgcaggcctgggcctcgaaggcgcagcgcggcaggcacggcgcgcggccttcgccgccgagttgcgcgacggcgaaacactggcgctggcccagcaccaggacgaccaggccgagaccttcctgctgcgcgccctgcgcggttccggcgtcgatggccttgcagcgatgtccgcacacagtcgctttggtggacacgccctgtggcgaccattgcttcaggtcccgcgcgatgcactgctggactacgcgcaccagcatgcactgcactggatcgaagatcccagcaatggcgacgatcatgctgaccgcaatttcctgcgcctgcaggtgctgccgctgctgcgccagcgctggccacatgcggccgcggcgctggccggcagcgccgcgcattgcgggcagacccgtgaactgcttgatgaagaagacgccgagctgatcgcgcatctggaggtggcaccgcgcgtgctgtcgctgcagctgctgcggcagatttcgccgggccgcgccgcacgcgtgctgcgtggctgggtgctggccaacggtgcagcccccttgccggccacggtgttgcagcaggcactggccgaactgcttcccaccgacaacgaccgccaggcgcgcgtggggtggcacgatcatgcgatccagcaatggcgggaccatgcgtacctgctccccgcgacgcttcccgtactgccacgcgactggcaggccgaatgggatggacgcgcgcccttgccgctgcccgatggcggccagctgcgcctgcagggcgccgcggccttcgaacacgcgctgcaggtccgcgcacgcgtgggtggtgagcgcatccagctgccaggacgccagcattcgcatgccctgaaggactgcctgcaacgggaacacctcgcgccctggcgacgcgcgcagctgccgctgatcttcgatggcccgcagttgcttgctgccgccgacgtggtcatcgcagcacctttgcaggcctggttgcaggcccatggggcgcaactgcagtggcgcccgggcggctggtga

SEQ ID NO: 527994 - DNA, 660 bp, Stenotrophomonas maltophilia
atggttcgtacgtatcccgttgcatccccgcacttcgaccccgcccgcgttgccgcctggagcgcggccatcgccctgcatctgctcgcgttcctgttgttgctgattccggccacctatcaggccatcaccacactgccgcgcgacaccaccacggtgcggctgattccgagggaactgcccaagccgctgccgccgccgcccaagtacgtggagccacagcacgtggacgtcgtgccgaagcagcagagcgtgccgaaggaaacaacgccattgccgacgccgaccgccacgctggaggaggcacagggcatcatcactcccgccgcggaatcgacaccggtgcagtcggccccgggcatcgaccgttcgacaccgttggccggtgcccagctgcagtaccgcagcgccccaccgccgtcctatccggtgccggcgttgcgcaaccacgagcagggcacggtactgctgcgggtggaggtcgacagcagcggccaaccagtcgcggtcagcatcgagcgcagcagcggctcgcgcagcctggacctggccgctcgccagcaggtgctcaagcgctggcgcttcgagcccgcacagcgtgatggcatagcggtaccggccatcggcctggtaccggtgcagttctcgctgccggactga

SEQ ID NO: 527995 - DNA, 966 bp, Stenotrophomonas maltophilia
gtgcgcgcactcctgttgctgggctcgctgctgcttgtggtgctgccgttcgcctcggcgaaagctgaacctcccacctggcacccgccgcagggcgccacggagctgccgttgtggccggatggcaaggcggcggtgccgccgaaactgaagggacccgagcagctcagtgaggcgatttccgaagccagtggcgaacgctggatgatgctgcagaacgtggcggtgccgaccctcaccgtgtttccgccgagggagccaggcaacggcgctgcagtgatggtggtgccgggcggtggctaccgcgtgcttgcgatggatctggaaggcagcgagatctgccaatggctgaccacgcagggcatcacctgtgcgttgctcaagtatcgcgtgccggcgtcgggaccgaactgggaccgggactgcaactgccgcgatatcccatcggtgccgatggcgctgcaggatgcacagcgtgcaatgggaatgctgcgtgcgcaggccgcgcgctggaagatcgacccgaaacgcatcggcgtgatcggcttttccgcgggtggccatgtggtggctggcctgagcacgcatgcgcggcgcagctacacgccgatcgatgcggccgatgcacagccgagccggcccgatttcgcgatggtcatgtattccgggcacctgtgggcagggcacggcaagggactgtcgctggtcaaggacatcgtcgtggatgacaaggtgccgccaacgttcatcgcgcaggccaccgatgaccgtaccgatgacgtgcgcgaatcgctggcctactaccgtgccttgatcgatgcgggcgtgccggtggaaatgcacctgttcgcacgcggcggccatgcgttcggcctgcgcaggcaggatgcaccggtcgcggcatggccccacctggccgagcgctggatgcaggacatcggcatgttgccggaacgcccgttgtag

SEQ ID NO: 527996 - DNA, 600 bp, Stenotrophomonas maltophilia
atgtccgtgctccggcgtgatcgttggttggggctgcttgctgcagccatcttcgtcctggccgtggtgggtttcggcgcgacgctggacggctacgcgcaggcgcgccacccggtggccctgctgggtgcacgcggcgtgccgcatgcgctggggttcaatctgctgggcttcgtgctgcccggcctgctggcggcggcggtggccgagtgcctgcgccgccgccttgccgcgacggccggctgggcgccgcgggtgggcagccagatgctgctgctggccggcctggcctttgcggcgatgggtctattgccgttggacgtggaagacctgcatggaccggccagccagctgcacgccagcgcctggatggtctgggtgctgggattcgttgccggcgccctgctgctgggcatctcccacctgcgccagggtcatggcaaggccctcggcgggctggcggccgcctgcgccgtactggcggcggtggcggcctttgccctgcagggcgtgttgccggcgccactggcacagcgcgtggccttcgcctgctggtcggtctggctggccctggccctgcctctgtcgcgggctcgctga

SEQ ID NO: 527997 - DNA, 267 bp, Stenotrophomonas maltophilia
atgatccatcgtatcctcatcgccggtgcgctcagcctgggcctggccaccacggcccacgccggcgagttccagtgctcagcctggatcggcgcgcccagcgccacggcaccgccgagcagcaacttcttcgggggccccaccatcaaggcgcccgacgcccgcaccgcggctgagctgtatcaggcccgcatctccgaaacgaccctgccgctgaagaccgggcgctggatcgtgcatcacgtccgctgcgatgagctgaagtaa

SEQ ID NO: 527998 - DNA, 1317 bp, Stenotrophomonas maltophilia
gtgttgaagatactgcgtgggttgggttggaccctgctgggcctgctggtgctggccatcgtcgtgtggtgtgcctcgcgcatgtggcccatccccgaatcgcggctgcaggcgcagcagcggctggagacccgcctgccggcacccggccgcaatggctatgcgcagttgtggacgcttggcgttgacggcctggatgcccgccagcgcgagcaggcgctggccgaagacgtgcggcgctgggacgccgacccgcacggcaataacgtcacacagccccagctggccagcgcccccggcggcttgcattcgcgcccatccgccagctgcggcccggccgccagcggctgcctggcgcaggtgcgcgccgatccgcagcggtttgccgaagcccacgccggtcaccagctgctgcatgcgcgcctggaccagctggccgaggcggaccacttcgtgtcgccgttccagccgaagggcgaaggcatccaggtgcccctgccgacctatggcctggtgatggatgccaccagcgcccgcgcgctggcctacgtacagggcgatgttgatggcgccctgcgcggcagttgcctggggctgcagctggggcgccggctggtgcccgggggcagctatctggtcgagagcatcgtcggtgccagcctggtccaggccaatgcacagctgctggccgacattctggtcgagcttccggccgaccacccgttgcccgcggaatgcgcacgggcgatgcagccgctgcgggccgacgaacagagcctgtgccgggcgatgcagggcgagtacgcgatgagccaggcggcgatcgaaacctcggcgagggaattcggcggcgtgctggtactggaccgcagcagcaccctggcacgcgtggccggcaacctcggctgggcctgcggcgcggcagcgacggcggcactggaggcggatcgtccgttgcccgtgtcgtcgccgccacagcgtgacttcggttgcctgtcgaacatcatgggttgcgtgctgacggatatcgccgcaccggcctatcccgcctattcgtcgcgtacccaggacgccgctgcgatgctgcggctgcttggggcgcagcgctggctgcggcagcaggcggatgacccggcagacgcgctgcagcgtctgccggaacagttccgctcgccggtgcgcgccccgcagctgtcggccgatggcagccgcctgcaggtgccacgccgctcgccatcgcgcagcgctgccgacagcccctggctgtcggtaccgctgcaggcttcgcccgtcacaggggcaacggcgcgcgactga

SEQ ID NO: 527999 - DNA, 534 bp, Stenotrophomonas maltophilia
atgacgacacacgaccacgattctgattccgcgctgctggcacgcctgcgcgccctgcccagcgaacgcagtctgcccgccgatggctgggagcgcctgtcggcccggctgccaccgcgtgaaccaccgtcggcacctgcagcggagggcaatgtggtggccctgcccatgcgtccgaggcggcgctggtggctgccggtgggcgcggcgctggcggccagcctggcggtgtatgcggtggcgccgtggcgccatgcgcaacccggcatgccggcgccgtccgctttgcagttgcaggcggctgcaatgaccgagcagtaccagcaggccgtggcctcgctgcccgatggccgggcgccggaatggcagccggccctgcatgaactcgatgaaagtgccgcgcagatccgcgccgcactggcgcaggacccacgtgcgccgcacctgcttggccagctcaagcgcacctatgcgctgcgtctggaactgacccggcaggcggcctatgccgccgagtccggcctggcgacctga

SEQ ID NO: 528000 - DNA, 642 bp, Stenotrophomonas maltophilia
atggtcgatgaactgcccgtgcggcttgccggtgaagccatggtcctgatcggcgcgcgtgcgctgtactggccggcgcggcaggcgctgctgatcgccgacctgcaccttggaaaggccgacgtgttccgtcgtgccggcatcgcgctgccccgcggcggcaccgtcgacgacctgcaacgcctgcagtcactgctggacatgcaagcctgccgcgaactgtggattctcggcgacatcctgcatgggccggcacatcgcgccgcctggtaccagcaatggctgggctggcgcgaacgcaatgttgggctggacgtgcacgtactgcgcggcaatcacgatcggcagctgccgcacgcgcagctgcaggtacagatccacgatgaaatcccgctggcgccgttcctgcttcgccatgagccggtgccggacgcggcgatgcacgtgatcgcagggcatctgcacccgcaggtcgcactgccctcgttgcggcggcgctttcccgcattctggctgcgcgagcggatgacgatcctgcccgcgttctccgcattcaccgctggcatcgtgcctgtgcccatccgcggcgaacggatgattgcctgcgtcgacggcggcctggtgcagcttcccgcccgctga

SEQ ID NO: 528001 - DNA, 879 bp, Stenotrophomonas maltophilia
atgcaacaccgcaatggacgcaccggggcgctggccgccctgctctgcctgggcctggccgcatgccagaccctgcccccgccttcgcccctgccgccagcccagctgcaaagcctggagcaacgcggcaccgacggcagcttcgacggtgcctggaacaccgcgcagaccttcgagcacttcaacgatccgcgtgcgatcacgtactacgagcgcgccgctgcgatcacgccctggaccttccacaacaccaaggcggaagaagcactgggccggatctggacgtccggcacgctgcggcatgccgacagcccccatatcgatcctgcaccggttctgcgtgcgtcgtggcgacgtggcgaacgcgcctacctggcagcggccaaccacggcaatccctacgcgttccatgaactcgccactgcctatcgcgcgcgcagcgacgcgcagctggcattgcgctgggacctgcgcgcgatgatctaccaccgctatccaagccgttcctcacgactgccggatgcggtggccgcgcaggccggcaccgtgcacccgttggtggcccgcatccagcgacgcgccgagcgcggcgatgccgaagcgcaggtggacctgggcgcgctgctggaaagaggcgtgggcctgccgcgcgatccggcgcgcgccctgcagctgtaccagctcgccggtgcgcagggcaacgtgttcggccagtacttcgctgggctgttgctgggtcggagcgcgccgggcgtggagaaaaacaccgatgcagcgacgcaatggttcgccagggccgaagcgcagcacttctacatggccgcgccgagctattggaagaaggcgatcgagccgccgttcttcattttctcggagtag

SEQ ID NO: 528002 - DNA, 219 bp, Stenotrophomonas maltophilia
atgctggtcgccagtacgcccgcgtgggccgaccccagcagcagtaccgtgcagatccagctgaccgtggtcgaagcctgcagcggtgataccggcggcgaccactgcccatccccgcatcagcgcagcgatgcaccgcagctgccatcccaggtccgcgaccttgccccgccggccgccgacgacgacgcagcgcctgccgtgaccgtcatctactga

SEQ ID NO: 528003 - DNA, 699 bp, Stenotrophomonas maltophilia
atgcgcacacggctgaccctgctcgcgctgctgctggcgccgtcggccgcggcgctggacctgctgccgactacgctgcagctgccagccgacggcggccataccgcgctgtggctgtacaaccccggcccgggtcgctggcagggccaggtgaggatcctggcctgggagcagcaggcggacaccgagcgactgcgccccagcgaccagatcgtggccagcccggtccagctggacctgccagcaggcgctcgccagcgcgtctggctgctgccgcgcctgccgtctcccgtggccagcgaacgggcctaccgggtcgtgctcgcgcccagcgcgcctggcctgccgcgctactcgctgcccctgttccagggacatgccgcgccgctggcgcagccgcagctgcggtccgaggtcggccccgagccgtcgcaccctaccctgcgactgaccaactcgggtaccctccacgcccgcctgcacgacctcgccttcgttgccgacgatggccggcgcctcgtactgctgcccggcctggccggctatgtgctggcgggccaggagcgccactgggcgctgcccgcccatgcccgcggctatgccggcggccatttccaggcccgcctgcaggacggccgcgtggtcgaactgtccacgccggacccggcaattgcagcaaacgcaccgggcgggctataa

SEQ ID NO: 528004 - DNA, 645 bp, Stenotrophomonas maltophilia
atgaagggcgagaccgtggcacgggtgagcctgtggctgctgtggagcctgtgggcgctggcctgcatcgtgctgctgctgggtgcagccgccaaccatctggcctcgcgcacgcagaccctgccactggtgctgcagccgggcgcctcggccgagatcacggtctatcgcttcatcgacgatccgctgcgcctgcgactgcgctatgccgatgacggcgccgatcctttggttgaccccgagctgcgcctgcgcgctgaaaccccgaccgatcgcaatgagttccgcgcggacacccgctcaccttcggcaacggctgacgtcgttcgtgcactggaatcggtcgagcccgaccgcttcgccgcctcgtacttcggctacggccgccgtgatgcactgccgcgtggccgttcctggctgcggctgaccgtgctggcggtcgacccggcgctggccggccgtgcggcctcggtggatctgctgccgccgatggacgtgctgaagctgaccgacctggactacctctggctgtggccgttcttcttctggcagcccgtggcactgctgttgctgattgccggcggcgggctggcggctgccagcatcgcgctgcggcgctggcggcgccgttctccagcccggtag

SEQ ID NO: 528005 - DNA, 357 bp, Stenotrophomonas maltophilia
atgaccagtcgcaagaccccgccgttccatgttgttgagcccatcaacgacgacgccaatcccgccgacgatctcagcacgttccagggctgcctcacccgcatccgtgatggcgaaggctccgatggcatgctgtggccggaggaggcactgtccgacggacgacgtcagtccctggcgcggatcgaccgtgcggccgtgggcatcctcaccgctgtggagatgctgcatgcggccaaccgttgcgccaccatggcgacgccgcgcaggcacctggacgaaggtgtggtggaagggctgttcttcgcctgccgcgaacttgccgagctggtctgcagggaagtcaggccggcctga

SEQ ID NO: 528006 - DNA, 204 bp, Stenotrophomonas maltophilia
gtgcgcagcaccagcagcgtggtccagtcgtccaccagtgcggtgcacagcgacaggatggccgacgcgagcagcgcggcgatcatcaacgggcggcggccgatcgcatcggacagcagcccggccagcagcatcgccaccgccagcgtgccggtggtcagcgacagcgacatcgcgctgccggcagcggagacgccgaaatga

SEQ ID NO: 528007 - DNA, 243 bp, Stenotrophomonas maltophilia
atgacggctgaactcgggcagcagcggctgcaccgtatacagcaggccgaaggtggagaagccagccaggaacagcgccagcgcggtacgccggaaggcgggggtaccctgctggatgcgggtctcggcagcagggtcgacagtgtgggggcggcgttcgacggccgccgcagtttcgccagtcatgggatcgatgggccggtggggacggccgggcgtgggagggaacgggccccagactag

SEQ ID NO: 528008 - DNA, 417 bp, Stenotrophomonas maltophilia
atggccaggacagggaacaagggcggcatgcggcgctggtggcgtccgctggctgcggtgttcggcgcgttggcactggggagtgccagcgtgtccgcgcaggacgctcctgcgcactggatggcctatgccgccgccgtgggcggccagctgcagcagcgcctgcagctggagcaggacccgcaggcccagcgtgtgctggaatggctgcaggcgcatccggacacgccgacaccgttgccggtcagcgtgtggatcgccgccgatggccgcatctcgaaactggaattcgacagcctgggcgaccggcaggtggacgcggatctgcgcgcggcgctgctggccgcacccctgcaggcgccaccgccggacatgcgccagccgctgcggctgggcctggcgctggaaccgaagtag

SEQ ID NO: 528009 - DNA, 612 bp, Stenotrophomonas maltophilia
atgagcacgcccgtcgcaccgaccacccgcaagccccgccaacgtgatgccgaagcgacccgcgaggcgatcctggcgtccgcacgccgggccttcgccctgtccggctatgacggtgctggagtgcgtgacatcgcggccggggccggggtgacggcgatgatggtcaaccgctacttcggctcgaaggagcagctgttcgcggaggtggtggaagacaccatgacccagggcagccttattgccggcggcatcatggaccagccggaaccgggcaaggcactggcgcgcgcactggtgaagatgacccgcgccgatgccacgcccatggacggattcctgatcaccttccattccgcatcgagcccactggcagcggaaatcggccgcgacaagatcgccgcgcatcacctggagaccgtggccgcctcgctgcagggcacgcagcgggccgagcgcgccgcgctcatcctggcgatgatttccggcttccaggtgatgcggcagatgatcgcgctgccggcccttgccgatgccgacgaggacgagctggccgagttgctgggtacggtattcgagcggctgatccagcggcctgcagccgggccgtag

SEQ ID NO: 528010 - DNA, 462 bp, Stenotrophomonas maltophilia
atgagaacgaccgtcctggtgaccggtggcaccggcttcatcgcccagcactgcatcctggccctgctcgcggccggctacgacgtccgcaccacggtgcgctcactgtcgcgcgaagcggaggtgcgccaacagctgaaggtcggtggcgccgagccgggcgatcgcctcagcgtggtggtggccgacctcggtcgcgacgagggctgggccgaagccgttgccggctgcagccacgtgatgcacggagcatcgcctacacccaccggcgaacagaccagcgaagaacagtgggtgcgcccggccgtggatggcaacctgcgcgtcctgcgcgcggcgcgcgacgccggcgtgcaacgggtggtgctgacctcggccttcggcgcgatctgcgccggccacggcgacatcggccgcccgttcaacgagaccgactggagcgatctgtccgccgatgtctga

SEQ ID NO: 528011 - DNA, 492 bp, Stenotrophomonas maltophilia
gtggtgaacccgaccgcagtgctcggcccggtgctgggcagcgactattcgcactccatccgcctggtgcgcaatctgctccagggccagaagggatcgccgaagatcaattgcggattcgtggacgtgcgggacgtggcagacctgcatttgcgtgcgatgacccatccggcggccagcggcgagcgcttcatcgccatcgccggggacagcctctggctgggcgaggtggcaaagatcctgaagcagcgcatgggcgcctctgcgggcaaggtcagtacccgtgtcattcccaactgggtgatgcgcctgggtgcactgaaggacccggcgctgcgtggctcgatcccactgctgggccgcaccatgaacgcaaccagcgagaaagcgcagcgcatgctggggtggtcaccgcgttcgcgcgaggacgccatcgtggcgaccgccgaaagcctgatccggctcgggctggtgcagagccccgatcactga

SEQ ID NO: 528012 - DNA, 375 bp, Stenotrophomonas maltophilia
atgaagatcgagtccatctctcccatcctgtccgtagaccatcttgccgagtcaatcgcgttctactgcggcacgctcggattcgaactggcgtggtcgtggggtgatcccaccgacattgctgccgtctgccgcgacggcgtggagatcaccctcacgcaacggtccgggagcaagccggcaggcgcagcacacgcctatctggtcgtatccggtatcgacgactattaccggacccttgaaggatcgggtgtcacgatcgtcgtccctatcggggacaggccctacggcatgcgcgatttccgcctggcggatccaagtggcaatgaactcagcatcgggcaggtcatagagaacagggacagcgctcgttag

SEQ ID NO: 528013 - DNA, 1128 bp, Stenotrophomonas maltophilia
atggctttctggaccgtcgtcttcgccattggcgccgcgcaggccgcgctgcttgccctggccctgtggcggcggccggccaatgccggggcgaaccgggtgctggcgatgtggatcgcgctgatcggcatcgatctggcggtgaaggcgctctactgggatccgtcctacccggcacccaccaaggcgctgcggttcgtcggcctgttcccgttcctgtacggcagcctgttctatgtctacgtcagggtcctgaccgaggccagggccgtacgctggcgcgatgctgtgcatctttcgggattcatcatcgtgctggcgctgcatgcaggcttcttcctgcgtgggctggtgccggccgagggcatgctggcgcgaacgctgccgggcatcgcggaactggaatggatgcggctgaacatcgtgctgtacgcgtacagcctctcctatgtcattgccggtctgctgcgggtcggccgctaccggcgcggcctgctgcggcggcgttcggatgcggaccggatgtcgctgcactggatcgatgcgatggcgatctcgcagatcctcatctggctcattgccaccacgcaatggctggtcaggattccctggatcgactatccgctgatctacggcctcgttgcagcgtgggtattcctgatgggctacttcagcctcacccagccggccgtgctggtcgagccggttgcggaaccggcacccgccaaccgcgaagtagtaccggccagcgacgatgcacgcgttgccgaggttgaagtgcgcctgtcgcagctgatggccgaacagcagctctaccgtgaaccggcgctcaccatcggccagctggccagacgctccggctaccccgaatatctggtgtcggcggtgatcaaccgccgcttcggcgggaatttctgggaatacatcaaccgccagcggattgaagccgccgcttcccatctggccgatggcgctgacacccggaccattctcgacatcgcctatgcctgcggcttcacctcgaaatcgacgttcaatgcggcgttcaagcggctgctgggtgaaacgcccagtgtcttccgcaagcgccatgcgatggcgggcaccccgcaatcaccgagccgctga

SEQ ID NO: 528014 - DNA, 675 bp, Stenotrophomonas maltophilia
atgaagattcgagctgcagggatggcactgacggtcgcgctgctggcggcctgcgggcagacgccggagaaggccgtcgaaacggcgcctgcggttgcatccgacgcacccgctggaacaccggcagcgacgaccaccgtggtcgagagtgaaccgtccatcgaggacggagtggatccgtcggtgtgggacagcgaaggcgagccggaagactccggtggcggccgtgagctcacctgcaaggacaacccgttggcgacccatttcttcaccctggtgggcggcaacacggtggacgattgtggccgcaaggacccgaaggtgctggccgcgttcgatgcattgatgaagggaacgcaggccgccgaatccgccgacaaggacatcccgtcgctgcgcgaacgcctgttgagcggccccagcgggcctggcgagctgctggtgcttcagggcgaaccctggtggttctacaccgcctgccaggcccacgactgccccggcaccgcgctggcgatgctgtattcgcccgatcagtcgaagatggtcggccgcctcaccgcgcgctgccgggtgtggtggctgggcgagcctacggccgaacagcgcgagcagatcgaacagctccgcccgctggatgatgccgcattgaaggaagacagcgcgatctgcgaatga

SEQ ID NO: 528015 - DNA, 477 bp, Stenotrophomonas maltophilia
atgcgccgtacacgactcgccgtgatcttctgcagtgccctgctgctggcatcgccgaccatcgcccacgatgctgaaggcgcgaagcccgcaccaccgcttcccgatacagccctgcctgcgccgctggatcgcgtgctgcgcgactacgaacaggcgtggcgcaagggggatgcaaaggcgctcgtccggctgtttgccgaggatggcttcatcctgcagagcaaccaggcgccggtgcgcggacgcaaagccatcgaggcggcatattccggccagagcggcagcccgttgcggttgcgcgcgttggcgtatgccgtggaagggaacgtcggctacatcatcggtggctacaccttcggcaacaacgtgggggacaccggcaagttcacgctgacgctggagcgcgtgggcgatgggccgtggatgatcttctcggacatggacaacggcaacgcgccgccacgggcgcggtga

SEQ ID NO: 528016 - DNA, 462 bp, Stenotrophomonas maltophilia
atgaagcacgtccccatcctcatcattgctgtgctgctgggcatgtctgcggatgtagccgttgccagcacgcccagcaacgatcggcttgaagcacacctgtggcaactggtgcgcgccaccgacgcgcagggccggcgcattgacgcgttgttcgtcccgggccacgcgccctacacgctgcgcttccgctccggtttcatgagcgagttgaacctgtgcaaccacgccagcagccagtaccagctgcagggcaatcacttgaacctgcgcaacggcgtgcagaccacggccgagtgcatcgatccgaaaatgaccacgcagcagaagcgcgcgcgaatgctgatgcacggcggagggtcggcgccgatgctcgagctgggcgagcggggcacgctgacggtgcgcaacgcgcagggcgataccgcggtgttcgaaccggcatcgccgccggaggaatga

SEQ ID NO: 528017 - DNA, 798 bp, Stenotrophomonas maltophilia
atgatcaagtttctctgtcccgtattggcctgcagtctgtcgttcgcggcgttggcgcaggagggccccggcggcggtcccgatgaccaaggccccccacgctgggggctgggcctggcagccgtggtaacagacagcccctatgccggtgaaggcacccgcgtgatgccgatcccgctggtgagctaccacggcgagcggttctacttcgaagggctgggcgccggctgggtgttcctcaagaacgattcttttgaactggccgctgtagccaaagggcgcatggatgggtttgatgtaaaggacctgggccgcagcgagctggcacgcaacggggtggactaccgcttgctggacgatcgcgacatgggcctggacctgggtgccaaggtcaagtggtccggccgtggcggcgaacttgaggccgaactgctggccgatgccaccgacaccagcggcggtcaggagttctcgctgcagtacggctacggctttgatgtgggcaaggcccggctcaccccgaatgcgggcgttacgtggcagtccaaggacatggccaactattactacggcacattgaaggaagaggtggcgcgcggcgtggtcgactacaagcccggcgcggtaaccatcccgcacgtgggcgtgagctacttcaggccgctgggcgagaaatggatgctgatgggctttgcgcagtacaaattcctgccggacaagatcaccgacagccccttgatcgaacgcgataccagcgggagtgcaacgctgttcatcgggttctcccgcgggttctga

SEQ ID NO: 528018 - DNA, 1323 bp, Stenotrophomonas maltophilia
gtgaatagtccgccgcgcctgcgtggggttcactggtggaccagcgttgctctgatcctgctcggcctgctggtattgttcgccatcgcagtacagagcttcagcggccaactgttgatggaaggtcgctactgggaagatctgaccggcgcgatctccgacgaccatgcagaacgggtccgcagcggccacgaagacgcactgcccagcgaaggactggtgcgctcctggtacctgcgcgacggcgtcgttccgtccggcttgccacgccagctggcccacctgccgccgggcatctacacctccgaagcgtcgctctttggcgatgcggtgaacctggatagtggggagacctaccatgccgtggtggctggcctgccacatggcaggctggtaaccgtagtgaacatcgagccgcttgagcagcagcagaatcattacgcgcgcctcagcctgctttggatcctgtgctttgctgcggtcattggtggcttcatcgtctggctgcatgccaacctcgtgcgcccggtgcgcgacctcgctgcccgcatgcaggccatcgatcccagcgatgccagcgcacgcctgcccacagactatccgcgagaagaaatacaggtgatcgcgcaggccagcaatgcccacctggaacgcgtggctcaattcatacaacgtgagcgcagcctgttggaccaggccagtcacgaattccgcactcccattgcggtgattgccggggcggctgatgtcctgcggcagcttccactgccagctgcctcgcagccagcgctggcacgcatcgagtacgcggtggaggacctgtctgaaacgatggtcgcgttgctctacctggcccgtgaggccggaccgggcgttgaagacgcggagataaccgcactgcatgacttcctgccacgcctggtgctcgatcatgaatacctgcttcgcggcaaggacgcccagctccgccttggcgcgctggagccaaccttcgtcgcggcgccagaggcgatggtgcgcattgcggtaagcaacctgatccgcaacgcaatcgagaacaccgatgtgggattcgtagagatcgtgctttcgcagggcagggtggctgtgatcgattcgggcagtggcttcgacccggtggaagctgcgcgacgctaccgggacagtcttcgtcaaccggctccgatgcggggccagggactgggactgttcctgattgggcgcatctgcgagcgcttccgctggacattgggaatcgactcaggcgcacgcggtacccgcgcgaccctggatatgtcagccagtgtagtcgaggtgccctga

SEQ ID NO: 528019 - DNA, 696 bp, Stenotrophomonas maltophilia
atgaacagggaatcgctgtccatcctgataatcgaagacaacgcgcagcttgcggcgaacctttacgatttcctggaagcctgcggacacaccctggacgccgcacccgacggtctttctggcctgcacctggcctcgtccaaggactatgacgcgattgtcctggactggaatctgccccgcctggacgggctgaccgtgttgcggcgcctgcgcggcgaggcaaagaaacacgtaccggtgatcatgctgaccgcccgcgaccaggtggctgacaagattgatggattcgaggcagggctggacgactaccttgtgaaaccggtggcgctaccggagatcgaggtccggctgcgttcgctggtggcgcggcgccgccatgccggcgccaccgacaacgtgctgcgggtgggcgatctggccttcgaccttggcaccctgcaggcgcaccgggccggcaggaagatcaccctgacccgtaccggccgccgtcttctggagctgttgatgcgcgagagcccgcaggtggtaacccgggcaaagctggagcgcgtggcctggggcgaggtcgcgccagggaccgatcttctgcgctcacatatgtacgtgttgcgccgcgcccttgaacagaatgaagaagcaccgttgctgcataccgtagccgggtcgggctacaggttgagcccaggtgaatag

SEQ ID NO: 528020 - DNA, 990 bp, Stenotrophomonas maltophilia
atgattgtcatgatgatcgtgatggccggaatgttgatctacatctcggtgtgcatcctgtatgtctaccgcttccgtggacagcagcgataccaggggttttcgcagtacctgcgcaaaagctggccagtgttcgcaccgctcaactgcctgctgtacatggccacggcacgcgaggcgcggcaaccggtactgaaaccgcattacattgagggcatcgagcggctgcgccgcaactggcgaaggatccgcgacgaagcaatggaactgcatgcgtccggcgcgttcgaagcggcgtcggcaccggggtcggccgggcatcatgatcttggtttccgtacgttctacaagcgcggctggcgcaagttctatctcaagtggtacgccgatccacaccggtcggcagagcgcctgtgcccggccacggtgcggctgctggagggcataccagggattcgtgccgcgatgttctcggtgctgcctgcgggcgcggagctgagcatgcattccgatccacttgcctgctccctgcgttatcacctgggactggatacgccaggcacggcggactgctacatctgcgtggacggccacttcataacctggcgcaatggcggagactttgttttcgacgagacctacccgcacttcgcacgcaacgacagcaccacgaatcgggtgatcctgatgtgtgatgtggagcgtccgatgaacctgctggggcgtgccttcaaccgcctctatgccagactcgcctgggcgatgacggtgcccaatacacccgaagaccggcaggggccgatcagctggctgttcgcccgtctggcgcccctccgcgaggtcggggtggcgctcaagcatcggcatcgcctggtgtatacgctattgaagtacctgctcaacgccagcctgctgctgcttctcttcgcagcgatcattggcgtgatagggtttctcttgaggctgttcggcctactggggatgtcatga

SEQ ID NO: 528021 - DNA, 3096 bp, Stenotrophomonas maltophilia
atgaacctcaacgtgtctggctggtcgatccgcaatccggtggcagtgacgctgctgttcgttgcgcttgcgttggtcggtgccttcggctttgcggcgatgaaggtacagaatttcccggatatcgactttcccatcatcaccatcaccgcaacgctacctggcgcctcaccagcacaactggaaaacgacgttgcacgcaggatcgaggatgctctggccaatcggcagggcataaagcacatcaagacgacgctggccgacagcgtggccaccatcagcgctgagttccacatcggcaaaccagtacaagaggcaatggatgacgtacgcgacgcggtggccggtgtccgcgcggatctgcccgccgaacttcgagacccggttatccagaaggcggaactggccagccagccggtggtgacctatgcgctgagctcgaccacattggacatgcaggcgctgtcctggttcgtggacaaccaggtaagcaagcggctgctaggcaaggcgggcgtaggtgcagtatcgcgcgttggcggcgtggaccgcgaaattcgggtggcgttgagccccggccgactgctggcgttgaatgccaccgctgccgatgtttcccatcagttgcgtcagctgcagctggaggcctccggtgggcgggtggctctcgggcgtgcagagatgtcagttcgcactgtcgccaccgtggattccgccgagcgcatcgccgacatgaatctcaccctgaccgacggccgccgcatacggctgggcgaggtggcggaggtaagcgataccgtggccgagcctcgtacggctgcgttgatggatggccgcccggccgtttcgttcaatgtgctgcgctcgcgcggcgcgagcgagctggaggtggccagagcagcgcagtccgttattgccgacctgcaggagagctacccgcagattcacttcgaacaggcggtggactacgccgggcccgtggcggagaactaccgcggctcgatgatgctgctgctggaaggtgcggtgctggcggtggtggtggtgctcagcttcctgcgcaactggcgtgcgaccttcattgccgcgattgccttgccactatcggccgttccgacgttcgcggtgatgcatctgatgggcttctcgctcaacacggtgtcattgctgtcgctgtcacttgtcgtcggcgtgctggtggatgatgcgatcgtggagatcgagaacatcgagcgccacctcctgatgggcaagacgcccctgcgcgcagccggcgaagccgccaacgagatcggcatggcggtgatcgccaccaccctcacgctggtggcggtcttcctgcctacctcgttgatggggggcgtcgtcggccagtacttcctgcagtttggatggaccgcagcggtagcggtcctgttctccctgctggtggcgcggatgctcaccccgaccatggccgccttcctgctcagggcgccggcgaagcggcacaaggagccgcgctgggtactgcgctatctgcagtgggtacgagcctgcatgcatcggccggtgttgaccctggccagtgcggtggcgatggttgcgctgggcatgctggtggccgcgcagctgccgggcgagttcatgccgccagatgacggcaaccaggtacagatcagcctggccctgcccccgggaagcgccctggcagacacccttgggctggccgagagcgcccgcgagatcgccgtgcgcagcccgatggtggcctcggtgcacacctcaataggcggggggagcggcggctccggagacccgggcgaaactgcacccacggcaagcgtagccacggccgtactcaccgccaacctggtggcgcgcagtgagcgcaatggccttacccgttcaatcatcgaagggcagctacgcacggaactgcagcaactggcgggcgcgcgcgtcagcgtgggcagcgacagcgaaggactggaactggttctgagcgccgacgacggcgatcggttggccgatcatgcgcgcctcgttgagcgggaactgcgaggcatacccggcatcggtgccgtggtgtcttccgctgcactggtgcggccggaactggtggtgcgtcccgacttcgcacgcgctgccgacctgggagtcacctctcgcgcgatcgccgataccctgcgcgtggcaacgctgggtgactatgtccaggacctggccaaactgaacctcagcgagcggcaggttccggtgctagtgaggctggccgacagcggccgcaacgacctggaaacgctgcgccgattgcctgtccccggggtccgcggtccggtgcccttggagagcgtggcggacctggcgctgctgtccggccccgccgagctgacccgttacgaccggcagagaaacatcagcctgaaagtcgcgctcaatggactgccgctgggcgatgtggaacgtgcggcaatggcattgccgagcctgtcgcggctgccgcacggcatcacgatggcgcccgcgggtgatgccgaagccatgagcgaactgctggcgggcttcggaatggcaatggctgccggggtaatgtgcgtttacatggtgctggtactgctgctgaaggactttgcgcagccgctgacggtacttgtagcgctgtgcctgtcaataccaggagcgttcgtggcgctgttgctgactgggcagagcctgtcgatgccttcgatgatcggcttgatcatgctgatgggcatcaccaccaagaacgcgatcctgctggtggactacatcgtgatcgcgcgccgcgagttgggcatgaatcgccgccgcgcagtggtggatgcctgccgcaagcgcgtgcgaccgatcgtgatgaccaccattgcgatgggcgcgggcatgttgccggtggcgctgggccttggggctgatccgagtttccgcgcaccgatggcgattgtggtgatcggcggcctgctgacatcgacggtgctgtgcctgttgatcatcccggtggcctactgcgcgatggacgacctggtcggaggtctgcgcaggcgaacgcgtcctgtcgccgctggtacagctggttcgttgggagtatcagcatga

SEQ ID NO: 528022 - DNA, 1119 bp, Stenotrophomonas maltophilia
atgaaacgcaaccgattcgccctcgcaacggggctgtgtttggccgcagcaactgttgccaccgcctgggtgcgcattgccgaggacgatgcagcgcccgtccctgcgcctgcccccgtaatctccgtgcatctggtgcggccgctgcacactccgctgcaagtacacgcgccagctactggcagcgttgctgcgtgggaagaagccagcattggtgcagaggctaacgggttgcgccttaccgatgtgaaggtgaatgtcggcgacacagtacaacgcggccagctactggcgagcttcaatcctggcctgattgaggccgagctgggcgaggcggctgcagcggtagcactggctgcagcagagtcgagccaggctgccgccaacctgcagcgggctcaagtgctggatgcctccggcgctattgcccggcagcagcttaatcagtaccaggccacggcgctcactacacgcgcgcgcctggattcagcgcgggcggtagtgcagagggcccgcctacggctactgcagactcgggtactggcacccagcgacgggatcatcagtgcccgcacagccaccgtgggcgcggtggtgccagcaggtcaggaactgttccgcttgatccgggatgggcgcctggagtggcgtgcagtggtggcatcggaagatctgctcgccatgcggcccggccagacggtgaacatcagcataccgggagccggatctctggaagggcgcgtacgtgcgctcgggccggtgattgacgtcgccacgcgcagcgggctggtctacgtggatcttcctgccggcgcgccattgcgtgcgggcgcattcgtgcagggatacatcgcggtcggcgaggagggcatgttcacacttccccaagctgcggtgctgctccgcgatggcttcaattacgtaatgcaggtagggcaggacggcagggtactcactcgccgtgttgaggtgggccgccgcagcgcggaccgggtggaagttgtatcaggccttgaaccgtctgatgcggtggtggcctctggtcttggtttcctcaatgacggcgacttcgtgcgggttatcagcgtacctgcttcaggtaaggcctcgcactcatga

SEQ ID NO: 528023 - DNA, 954 bp, Stenotrophomonas maltophilia
atgtgtgcactcagtgaggtcagtgccctgctatcaagactacagggtcaagttcgagttgaggatccagtcgtacgctacctgggcgcgctctttgccgaactcgcgtactaccacgttccggaagcggagctcgatgacaggaagcgcgcccttctgatcccttgcgagagttaccaggatctggtgcagtcgggaagccgaccgaacgtgctgaagttggtcaaccaagtagaaatccccgagtcggatacgttcatcgtgaccagccccggggtcatcgtagtcggagtgcgcgttcatcgaacgctgttcttgggctttcgcggcacacaatttctgttcgattggtcaatcaacctgcgctcatccagggtaagtctatctcgatgggccgggcggagtgatcggtttcatgaaggctttgcgatggaagccatctggatatcccaacagattgatgggaagctcttcgaaatggggagaggttcgtttgacaatgtcgtctttagtggtcactcgctaggtggtgctgtcgccgctatcagcgctttgatccttaaatggccaagatcggcggtctgtctcatgggagcgccgcggtactgcaatctgtctgcgcttgcttcaggctatcggcaactgccgatgcaggttcgtcgtgctggcgatggagtgcctaccgtaccgccaaagtttctcggctacgcggaccatctccggcagatcagtaccgacggcagcgcatattcagaaccagatcactttagtggtttgtttggcggtttcgttcgttgggcggcttttctcgtgtctggggccaagtctcatagcgtggaaagctatcgcaaggaaatgggacgcgcggcaggtgcggctaaggctgagtcggatctgacgtggcacccacgactaaccaatgctcatgtgaggaagtcgaagtcagctccttga

SEQ ID NO: 528024 - DNA, 687 bp, Stenotrophomonas maltophilia
gtgtccgcgctaggccggggcacgggcggggctgcgaaccacagcgcatcagcagaggccggcctggccgagagcggctcatccacgggcgggaacctgctggccaaagcctatgcccgttggcgggcgcccatcctccgcggccttgcgcgtgtcagaggcggagacgctgaggacgccctgcacgacggtgcagtcaaatggattgcggcaaatccttcgctggcgtccagcgaccagcagggcgcctaccttcgccggacggtaatgaacaccgtggccgatgaataccgcgagcgcagcgcaggccgccgcgtgcagaccgtgcccctggcagatgcggaggatgccggccatccgatggccagcgatgaatcacagtgcccgttgcagctcaccgcacagcgccagcgcctgcaacgtctggcagatgcgatggccgaactgcccgagcgccaacgcgaagccttcgtgctctgccgcttcgatggcctgacccaggaagaggtggccgcccgcatgcagatctcccggcgcatggtggtcaagcacctgtcgcgcgcggttgcttactgccaagtgcgggtacgctatgcgtcgctggaacagatgcaggaactgcatcggtccagcggggcaggcgaggagttggcgcctgccattgatgccgatcttccctgccgatga

SEQ ID NO: 528025 - DNA, 1389 bp, Stenotrophomonas maltophilia
atgctggcgctgttcgcagcggcggccccggcattgtccgccccggcggaggcagccccgccagtcgacgctggccgccaatggctggccggcgaccaccatgtgcacagcgaatggagcgtggactgggaccgccgcaccacgccgcccacgcccgtgcgtggtggcgactctccctacagccgcagccacaacgcggcacaggccagggccttcggcctgcgctggatggtccacaccgaccacggtggccccggccactccgcggtcacccgcgaccacgcttatcccgcgctgctgcaggcgcgcaccgatgtcccggaggtgatccagttcaacggcatggaattcgatgtgccggccggcgagcacgcctcgctgatcatcgcgcccggcccgcaggaacgcgagcagctggtcatcgccgagcgggacttcagccgcagcgagccactgcacggcagccgcgatagcgaacagcagatgcaggcagcgctggcctacctgcgcgggctggtccctgcgccgctgatgttcatcaaccatccttcgcgtaccgcgaccggcatcggtgagtggggcgaggtaacgccggacgagctgcgcggctggcatgcagccgcaccccaggtactggtgggcatggagggcgcccccgggcaccaggccatccgcagcgaacgcgggctgtaccgtaacgcggccgcgccgacactgggcggctacgaccagatgaccgcacaggtcggcggaatctgggaccagatgctggccgatggcatccgcttctggatcaccgccaactccgactcgcatgtgaacctgcgcgatggcggacgcgattacgacccgggcgagtacagcaagacctatgcatgggcgcggccggaggccgaagacatcctggatgccctgcgcaacggccgcatgttcaccgtcaccggcgacctgatcgacgccttgcagctgcgggtagccgcaggcgactccagcgccgggatgggcggcacgctggtgctgccggcagtgcagacgatgcagctggaggtgcgggcacggcagccggcgcgcgccaacgcgaacggacagcacccggcgctgaagcgcatcgagctgatcgtgggcggcagggatgagggcggtgcgctgcagatgcagcggcgcggattcgacacggcaacctggcagcgtgacggcgactggatcgtggcgcgctggtcagtgccggtgccgccgcgcggtggcttcgtgcgggtgcggggcaacagcaccggtgcggtggatgcactggcggacgcgcccggcgaggatccgtgggcggatctgtggttctattccaaccccgtcttcgtcagggttgccgaaggtgctggcccgtcgcgcgagtga

SEQ ID NO: 528026 - DNA, 681 bp, Stenotrophomonas maltophilia
atggataaggcaaagtcaatcccccagcccaggcaggcgatctatcacgccctggctgacgtcgcccaggcgatcgggcatgtccaccggctggagctgctggaggcgatttcgcaggggccgcgcagcgtcgaggcgctggcggaggcgaccgggttgagcgtggccaatacctcgcgacaccttcagttgctgcggcgggcccggctggtggagcccgatcgccagggcaagcgcatctattacagcctgtccggcgaggccgaggtcgttgcgctgctgcgggcgctgggctgcttcggcgagcgcaatgttgccgaagtgcagggtgtcatgcgggacttcttcgaacagcgcgacgcccttgaacccgtatcgcgcgaagcgctgctggagcgcctggcgacggatggagtgacccttctggatgttcggccttcgtcggaatacgccctgggccatcttcccggtgccttgaacgttcccgcctcggaactggaagcggcattgatcaacctgcccaaggacagggagatcgtggcctactgccgaggcccgtattgcgtgatgtccttcgaggtcgtggaaaaactgagggcgctgggcttcaccgtgcggcgcctggaggatggctttcccgaatggaaagcggccggtttcgaagtgattaccgggccgtag

SEQ ID NO: 528027 - DNA, 1506 bp, Stenotrophomonas maltophilia
atgcccagcgccatcctgcagttctccatggagtggaagcggtcagtgctgagggtggtttccgcagcggcgggttcgctggtgttgctggccggcatcgccgggcaggcgagggcggccgctggcccggccgagatcgcgcagctggtggacagttatgcagcgaatcgtgatttcaacggcgtcgtgcttgtcgcccagcacgggcgcatcctgtatcggggcgcccatggactggccaaccgcgaatggcaggtgccgaacgtcgaggatggtgttttccgcatcggctcgctgagcaagccgatcaccgccatcctggtgatgcagctggtgcaggaaaacacattgcggctggacggcacgctgggcgagtacctgcccgcgctctatgccggcacgcctgcggctgcggtcacggtggcgcagctgttgaatcacacgtccggcattgccgacctgccacgcagttacgaagacccgtggtggcagacgcaggcccggctctcgctggcgcccgatgacttcgccaaagcgtggattcccggcacactgcagagcgcgccgggggccgagtggcgctacaacaacaatggctacttcctgctcggcctgatcatcgagaaggcaacgggcgccagctacgaggccaacctgcagcgccggatcctggacaaggccggcatgaccaacagcgggctgtaccgcgccagcgcactcattccgcgcctggcgaccggctaccagacccggccggacttcagcctggcccgcccgatgcccatcgatccgagcgtctcgttctcggccgccggcctgtactccaccgttgacgatctgctgcggctggaccaggccctgcaggatgactcgctgctgagcgcgccttcgcggcaggccatgtggaccaaccatcgctcgggctatggctacggctgggaagtggagaactggcccttgcctgcaggtggcagctacccggtggaatcgcatacaggcagcgttccgggctaccagacctactggctccgcgccgggcaggaccagtcggtggtgatcgtgctggacaactattggcagggcgaaaccgcagcgagcctcggcaagcaactgatgggcgtactgcacggcatgccggttaccctggcccggaagaatctgggcaccctgctggtgccggccgcactgtcagcgggtgtgccgggcatgacccgcgcctatgaggcactggggcctgcggccagccagtacgacacctccgagcaggcgctgaactcgctgggctatcgcctgctgaggatgaagcgcgtgcccgagtcagtggccgtgttccagtggaatgcccgcgcgcacccgcaatcggcgaatgtgcatgacagcctgggcgaagcctaccgggccaatggccagcgcaagcaggcgatcaacagctaccgcacggcggctgcgctggcgcccaatgatgcgcgcctgcgcgccgtattgaaggagctggaacaggagtag

SEQ ID NO: 528028 - DNA, 873 bp, Stenotrophomonas maltophilia
atgtccgcacgtgcgcctgcccaggcagcggctttcatcaacaggtattcgctggaggtcagcgcgaaggccctgcctgcgttgcgcgccgaagcagatcgcatcgcgccgggcacgatcatctccattccctacctggccagcgaagacgacaacacgcgactggcggcggcacgcgccgtgcgtgagctgggtttagagccgatgccacatctgtcggcgcgccgcatcgagtcgcgggctgcgcttgagcgtttcatgcagcgtgccgccagtgaggccggggtggagcgatgcctgttgatcgccggcgatctggcagcgcctgccgggccgttcgccgacagtgccgcgatcatcgacaccggcattctcgaaggctccggcatcaaggtggtcgccatcggcgggcacccggaaggccatccggtgatgggcagtggcgagcgctggcaggtgcttgaacgcaagtgccaggccatcgaggcacggcgcatggcgccgctgatcatcacccagttcgcctttgatgccgacatcgttctggcctggctggatgacctgcgctcccgcgacatccgcgttccggtgctggtcggcgtgcctgggccggccagcatcacgcggctggcgcgctacgccgcgatgtgtggcgtgggagccagtgcctcgatgctggcgcgctacggcatctcgatcggccggttgttgggaacggccgggccggaagtgtttgtcgaccgtctcgtgcgggggctgaccgacgcccatggcgcggtcagtccgcacttcttcccgtttggtggcatcgcagcatcgctggcgtggatcgagcgctaccggcggcacgcactggcgtccagcccttcatag

SEQ ID NO: 528029 - DNA, 1179 bp, Stenotrophomonas maltophilia
atggaagctcccttgaagacgatgcggtacaggccccggctgccggtcttgctgatgtccagcgcgctcctgctggccgggtgcggagggcagaagccctcggcggatcttcaagcagatatcgatgaagtggcgcagaccctggtcgagcagcccttgctgcactcggcctccatcgcggtggtacaccggggcaggagtttcatcggtcatcgcggccagatggtggccggcagcccaggcgcaccgaccgatgcaacgatctacgagatcggctcgctgagcaagacgctggcaggcacgctgatggccgatgcggtgctggacggccggctcagcctggatgacgacgtccgcacgttcctgcagggcaactacccgaacctgcaataccagggggagcccatccgggtccgccacctgctgtcgcacaccagtgggctgccgaacatgctgcccgagcgcgcaaacacggtgctggaagacttcaccgatcaccgcacgcccgccgagctcaatgcgctgtacgcgcactacggaaagccggatttcctcagggatctgcacgccgtacggatcccgcgcgcgcccggcaaggagtacgcatactccagcgccgggaccgaactgaccgcgcacatcctggaggtgatccaccagcgtgactaccagtcactgctgcgtggcttcttcagcgacgccgccgcgatgaccggcctcaggatcaggctggacgatgccgatgcttcgcggctggcggtcggctaccacagtgacaatccggtaccgaccacgccgatgccgccgttgccgtggggtgcctcgggcggtgtgaaggctactgtccccgagatggtgaagtaccttcagttccagctggccaatgggccggtggtaaaggaatcacatcgcgctttggcccggttcgacgatgagttcagcgtcggctacttctggaacatcgtcgctggcgatcgccagaagggcgtctactacgcccaccatggcggcgtcccccgatcgcagtgctacatctacatcatgccgaagcatgacctgggtatcttcgtcatcaccaaccagagcggcgaccagaccgcgcgtgccatggaagcggcgatcgatacgcttgtcggaaaagtggtcgcacgcgaagcgttaccgcctcgggcagggtga

SEQ ID NO: 528030 - DNA, 123 bp, Stenotrophomonas maltophilia
atgagcgacaccaccgcggccgtcgccactccacgtgctgacccgccgatcgtccacgtcctgatgggcttcatctgcgtctggcacaggcgcgaaccggagcaggcacgtgacgaggcctga

SEQ ID NO: 528031 - DNA, 840 bp, Stenotrophomonas maltophilia
atgatatcgcttgcagggcaggacgaggtcggtccggactaccccgatcggatcgacctgccggtgatggtgcttggactggaacccattcccgatgcctgggaaatgcctttccatgaacaccggaaggcacaggtcatggtcgctacgcgtgggttgatcacgctggagacccacgccggcctctgggtggttccaccgcagggtgcggtgtggattccgggcgggctgacccatcgggccagcagcagcggaaaaccgcatggattcgtcgtgttcgttgaacccggagcggtaacgggtttgcctacgcagtgctgcacgatggcgatcactccgttcatgcacgctctgctcgaacgcgtggcagatcacccccaacagtacgagcacggcagcgcacaggcgcggctgatggcggtgctcctggacgaactcattgccgcgccaccggagtggatccacctgccgatgccatccgagccgaggctgcgccggttggccagtgcgatgttggccgcgcccgccgagcgggcaacgctggacgtctgggccggccggatcggcatgagcgagcgcaacatgtcccggctgttctccggtgaaaccggcctgagcgtcaggcgctggcgccggcagatgcacgtggtggtcgcgttgccgatgctggccggcggcaagaccgtccaggccgttgcggatgagctgggctacgacagcgccggcgcattcgtgaccatgttccgcaagaccgtgggtgccccgcccaagcgcttcctggcggagcggagcacccgactgcgcgggcccggcgctgaagaccagtctcagcgctggtag

SEQ ID NO: 528032 - DNA, 486 bp, Stenotrophomonas maltophilia
gtgagcagcggccctgtggcggacgcgctgcccagtgcgctgcaggccctgcatcggtgggccgcggaggaacgcgtgggcgccggcatgcgcatcacgcaggcaacgatcgacgccttcgccgacgccaccggcgaccacaactggatccacgtcgatccgcggcgcgcacaggcgcagttgcccggtggatgcaccattgcacacggcttcctgctgctctcgctcaccgtgcaggacgacgtggcggccctggccggatttcccggtattgcccatgtcctcaattacggcctgaacaaggtccgcttcctggcgccggtacccagcggcaccgacgtacgcgtgcgctcgcagctggtgtcgctggatgcacgccagccgggtcagtggctgctcacccagcgcaaggccgtcgaacgcgttgacgatggcgagctggcactggttgctgagcagctgtcattgatcgtgcttgccccgtag

SEQ ID NO: 528033 - DNA, 1248 bp, Stenotrophomonas maltophilia
atggcgcttcagcaggaacttcgcgacctgatcaacctgtctcatgcgttggcctggaagggcgcgggagactcgcccagcgcatccaacattcccgacgaacccgggctggtttcggcgtttctcgatgaatccatacagaatcagctcgaagccagccttcagggcgcgctcggcagcagcgcaagcgtacaggtcaacagcatttttacccacaagaccccattggtgacgcctgaaggccgcagtgcggtggagatcggcgatctgctgctggtgcggcagcacttcgttacgacaaccgactccgtcgaggggcgggcgctgctcctgcaggccaagaggaacaagcatccggacagcggcgacatctcggaaggcaagccgcagatccagtatctcctgtacaaggactggccgcgttttcacggtgacggtcgcctcggccactgtccggacccgacgccgacggggggcgtggagcaaccctgggacttcagtctttccaatccactgggcaggtttggccagtatgtggccatctttgatggccaggcccacccgcatccggcggtattaccgcttgctgcgcccacggcagcttttgatgcatcacgttatccgcctgatggcgggaaggggacgccgaggacaacatgggcatgcggacaggtccagccgaccccaccggtcacgaacattgcctgcaacgaggactttgccgaggtactggagcatttcttccttggcaccgtgggtgaacacttcacgcccggcacggtgagtggcgacgaccattggtcgcgctttgtaaccaccatgctgggggcggccacgcaatccagctacacattcctgtcctcccgtacgaacgtgctgaaacccatttcgcgcggtgcgaagataagtacgcttctgggtatccagcccctgctcaaactggcgatcatgaaggagattgatcgccactttcgcagtgcggcgttcactgcatcgtttgactacgaccacgagccgcacttcttccaccgggcgattgagcgttcggcattcgtcaatcatctcgcccagatccagcagaggctgcgccgggagctcgatatcgagtatggcgggtggttgccgccggacgatatgcccgggccggacaagagtgggggaggtcatgttccgatcctctcgatcgccagcagtggaccgaaaccgcttctgcctgagccaagagagccccgcttccggggcgaatag

SEQ ID NO: 528034 - DNA, 930 bp, Stenotrophomonas maltophilia
atggacttcaccggcttcacctcgaggtttccgagcaaccgtcccctcgccgcgttcgatcgagagcatcggctgcggcagaagacgcgtctcgacgtgcctctgctggcccagcgctgcgtcgtgaagatgaactcgaactgcctggtctcagtggatcggtggtacggcccccgaggctttgtcgccctgctgggtgcgataggcgtggcgttcggagttggcggcatgtcgatgctgctgtggctgctggtcgtggagaagctgcccaacgagaatggcctctgggcagccgtgttcatcagcatcgcgatgcttgcggtgttcactgcagcaagtgcgtgggtagcgtgccgcgaactgttccgctggacctactaccccatcgtgttcgaccgcaagcatcgccaggttcatgtgttccggttggacgggacgatcctcagcgcgggattggaccagatctatttcaccttgggccgcggaaccggaaccttcggctggcgcaactgggatgtccgcggcctgatcctggacgcggacggcgcgacggtcagggaagcattcgccttctgcatcgccacctcccgcatcaagaatgcgcatgcgcactgggaattcctgcagcgctacatggaggaagggccggcggcggtgctggatgcggtgcagtactgcatgccggtggacggcaagcgcgagagccttgcattctgcaaggaacgcatcttcgccgctgacgcgcagatgcctgcggtgatgtggttgaccatgctgccgttcaaccacctgcacgcgatgatgcgctgggcggtgatgcggaccagcaggattcccatgttcccgccggacatcgaagcgcgattgcagcctgagcccggcgatgcccatgtgcgcgacgcatcaatgaatccgccggacctgcgctga

SEQ ID NO: 528035 - DNA, 291 bp, Stenotrophomonas maltophilia
atgctgacactcgccgcgttgttcggcgtggccctgctgatctacctgggcagcgccatcctgccactggccaggcccggtgggatatatggcggaatgggggtgatgatgatgctgccgatcctgctggcgtgcgcggcattggcggcactgctgggcagctcggtggttgcggcgattgcatggtgggccggggtgcgccggatcgggttcgttctggtgatgctgcttgctgcgtgcctcagcgcagtcagcttcattgcgggctttgactcgccactggcgaggtga

SEQ ID NO: 528036 - DNA, 1488 bp, Stenotrophomonas maltophilia
atgaccatcgcgcggctgctgcttgccgcggtacttgttgcgccgggcgcggcaggcgcagcgacggattggcggggcacgctgttgacggacctggaggctgccgacgcggcgatgcgcggcagtcatcctggcacggtggaccggcagaacccgggattcgtcctccagttgcgggatgcgctggcccttgcgcggtcacgcgcggacacggtcgacagcttcgccggctactggtgggccatgaagggttacgcggcctcgttcaatgatggccatgtcagcctcaacgcgcgtgctgctgcgccggagctgccgacgcggtggccgggcttcctgaccggcttcgacggcgacgtgcaggtggtcatgagcgtggacgatggcccgggccatccgccgttgggtgcacaactgttgtcctgtgacggcgtcgatgcggcgacgcttgccgcgcgtcgggtgggcgacttcagcgggcgctggaacctgcaggccagccgcatccagggcggtggcgaagtactgctggagcagggcaatcccttcctgcccacgccgcgccgctgcgagttccgcgccgatgggcgtgagacggcgtatgcgctgcaatggacgccgctcgatcccgcgcagcgtacgcagcggctggccgatacccgtcgcagtttccggccggccaacggttggcacgccctgcccgggggcggctactggatcaccaccagcagcttcaatgccgatccggcggcgcagaatttcaaggaactgacagcgttgcttgaggcgcttgggcgggtgcccgaaccgctgcaacaggcgccgctggtggtgctggatgttcgcggcaacacgggtggcgcgtcgcagtggagcatcgaactggcgcgattgatatgggggcgtgctgccgtggatgcgttgccggaccacagctgggtggaatggcggacgtcggatgccaacatcgcgcagctgcgcggcttcctgcagaagctggaacaggcgcccgatgcatcgccggagctgctgcgcatgctggaaaccgtgacgcagggaatggcacaggcacgcgagcggggggaagccctgtggcgtgagccgccggagcccaaggcgagtgcggcgccggcgtccgcgcccgtcgtacccgtgcgcgcgggcagggtggtgatcgtggccgatgccgcctgtggttccgcctgcctggatgcgctggatctgtggaagcgcctgggtgcggtgcaggtgggtgtcgagacctcggccgacagcctgtacatggatgtgaggccggacatgctgcccagcgggctggcccggatctcggtaccgatgaaggtgttccgtgggcgggtgcgcggttcgaacgagcctcacgcaccggatcgccgttatggtggcgacatgcggtatacgccggcgctggaagcgtgggtactttcgctgcaacagaacagcgggcccggtccagtgggcccaccatag

SEQ ID NO: 528037 - DNA, 531 bp, Stenotrophomonas maltophilia
atggacggcaccaccctgattcgtggcctggctgcatcgctggcccttgccctgctggccgtcgccacgggtgcaggcgcgtccggcgcccgccagggggtgaaggcacaaccgggcgaaatagtcctgttgcgcgatgtcgcggcccggccggcctaccgcatggcgccaccgggcatcgcgttgattgccgatccgaagccgcagcgcgaggtcgccgcggcgctcggaagcggtgacccggcctccggaatggatgagctcagcgatgccgactacgcgggaatgggtgcaggccatatcactcccacgaccgcgccgggcggcaccaccgttgaacgcgttacccagcaggccctgggcggcacgctgggccgcaacggcgacggcatggtcggcagcagtcttggcggcacgatgagtggcccgctgggcgcggtcggcaacagcacccgtggcatcgccgatacggtgcgcggcgcgctgggccagttcccgctgcagggcaccgccccggcaggtggcaagtga

SEQ ID NO: 528038 - DNA, 618 bp, Stenotrophomonas maltophilia
gtgaaggccctggcgtggccgctgctggcggtgatcgccgcgccgctgtccgcatcggccgacgactacagcggcatgctcgcctatctggacctggcccgcatcgagggccgcgcactggcaggtgccagcggcgccatcgcggtgaaccaggcggcaggcgatttcaacctgcaggccaatctgcgcggcatcgcccgcgctgaacgcgccgatgtggccatcagcgcgcaccagctgcagaacggcaaccgggtactgtccgcacccctgcatgccgccgcgcacatcggcggtgaggcactggcaggcgccagcggcattgcttcgatcaaccaggccagcggcagcgccaacacgacgctcaacgtcgtcagcgcgacgctggcccgacagggcatacgcgaaaccgacgacacggccctggccgccgaaggttccgcgttggcaggggggcgggacggcgtcgatcgcggcgctgcgacgggaacccgcagcgtcggtgtagccagcaccgcactgcggggattcgacggggtcctgcaactcaatcagatcgcgggcagcggcaacgacacggccaacgtactgggcctggtcgtgcaggaccgcccgtga

SEQ ID NO: 528039 - DNA, 1524 bp, Stenotrophomonas maltophilia
atggcaaacatcgcagaagacggccagcttggctggatcgtcagcaagcgcccgaccgtccagggcatcgacatcggcaagggcggcgaggcgctgcccgacaacacgtatggcatcgagatcgagttctgcacgcacgacagcgtgatcttcgcgttcacccacgtggtcgcagcttgcttcgacatcgctggcaccgagccatggaagctcgaatccgattccggcaacgtcttcgaactcgtcacgccgccgctgcgcttcggcgccattgatcaagcctacgccttcaaggaacagcttgtggcgatgctgcaggcgtccatccagaaagcagagacgcagggcgtcaacgccatcacgctcggcgactgggcgggacagttcgcacccaagctggtcgaactgctcaacacccacatcaacacgggccagctgaagctggagctggtggcactgaaggccatcgactatgccagctggaaggaggtgggcgaagggttgaacgtcggcaatgtagacgatggcatcaacattcccgccgggctgctgcgccacaagctgcgcaagctcgactgggaaagctataccccgggcatcatcctggcccgctgcagcaaattctggtccgaaggctacgcctcgcagatgaacctgccgatgacgctcagcggctacttcctgtacatgatgtacaagacccacgacaagcactactcgcaagcggttcgtacacagcagaagctgagcggcgaaaaggccgggcagaagctgacggcctggtactggcggcatgtgctgctgcaggcgtggtgccgataccagcgtgcactcggtgtggaaccggaggcgaggaagctgttctcgcccgaggcgattggtcgctccgccctgctctacctggtggttggaaaactgctgaccggcgccctggccgaactcgcggaagcgccgcagctggagctgcagcagaaggcctgggatgccggctccacccgcgcgatcgatgctgacgagccggaggtgaccctgggtgactgggccccgtaccacagtgcgctgaaagacctcaccggcatctggctgaaggcctcgctgatggatgtgatgcgcacccagaacctgcagacctatacctgggccgtcaccgagctgccgcgggtgctggccaggaccgaagtgtgggagaacgcgcttctgaactggaaagggatggagcggatcaaggcgatgggttcaaccatcgaatggaccgacctggaagagttcgccgagcctgagcgacggcaggtgctctacgaaaaggtggtcgaggtggccggaagcctggccgagcacctgaaacacctgtccccggacaaacccgggccaccggatctccctgacgagaaggatcggccgttcctcgatcggcgcaataccccggcgtgggaggcccgctacgacaccctcctcccgcccattgcaccgcgtgagaacacgcggaacgaattcacctacctgatcgagcatcgcaaccactga

SEQ ID NO: 528040 - DNA, 1053 bp, Stenotrophomonas maltophilia
atgacacaggtctacgcaacacttcgctcggacgatcagtacctgatcgcacgcaagcagatcaccaatgcctggtggagcggctatgccgcgccggtgctggtggccgaggcggcgtccgccctgaccacggtggtgaacgttgccgcaggcagcgccgtcaatgccggcgcggtcgccgccatcaacgcgtcgctggccaatgccgtgcttgcagcgacgtctgcgtggcccgcgggggctgccgccaatggcgtcgccacgcgggatgccatcaatcaagcggccgttgcggtcaacaacgccggccaggtcctggcgcagctgcaggcagcattgccgacggtactggccgccgtggaccgggccgccgccatgggagcggccgattgggtcgcgggtggaggggccgtgccggcctgggtccaacttcaaaatgtaggcatccccgcatggccggacccgaacctgcaggcgaccgtcaacgccgcacagcggcgcatttcgggctgggccggctcgcaatcgccgcgtctggtcaaccaggccgggcagtgggcactgcccgggggacgcatgtcggatgcggaaaccgccgagcatgcggccaggcgggaattccaggaagaaaccggcgtcgagctggacgcaggttatgtgatggcctaccacacgctgttccagaccgcgccgggaggtgccgatttctacctggtctgctttgacctgcccggcggccaggacatcgccgacctggtgacacggatcaacgcgaacctgatggcccagaccggttggctcaatcgtccgaccgccgggtcggtggtcgactgggaactggatgcggtctgcaccgtggcgcaggacgagctgagcagctctctggggacattccagcccgtctcgattcccgacacgctgcggccggtgcccgtgccgatgcctgccggaggggccgccctggcggcgtgggagcgcaggcagcgacgctttgccgagtcccagtccatcgactggtacctgcgcatggcccgctacattgaacagcagtag

SEQ ID NO: 528041 - DNA, 270 bp, Stenotrophomonas maltophilia
atggcattcccgaccgctgtaaacgaccagatcaccgattcggtcacccaggccaacaccaaggtgctgggcgacgcgcccgccgtcgccatgggcaacctgtaccaggccaccgcgcaggcgctggccaacgccgcccacaacgccaccaacgcccagcagcagtcctacgtgaccgcgcaggcggccaccaccatgggcgtggccacgctgtactcgatcgataccgccaccaccggtgtggccaccaagcagatcctcggcgcgtga

SEQ ID NO: 528042 - DNA, 513 bp, Stenotrophomonas maltophilia
gtgagccaggacctgcccgtgctgtggtctccggcccagcaggcctggctgcaggccatgggctacaccgtctaccacgacggccagctggccgccgagctggatgccgcgctgcagctgagcgtggccgaagccgaggcggccgccgtgccgccgacgcagccggcacgggcaagcgcggcatcttcgtcgggcgaacgccgcgccgaggctgtgccgtcgcccggtctgcaacgcccggcgccgccccgccgcgaaaccccggtcaacgcacccgataccgcgccggcatcggcgcgtccgctgccggccggcaatgcccggcagcccgtggtgcgcctgccggatcgcctgcagatcgcgctgctgcgtgcgtccggctgcaatcccaatgatccggcgacgcaggcgctgatggacagttggcccctggaccagctgcgccatgacccggccgccaagcgcgcgctgtggccgcagctgcgtgcgctgcgcaagcggggcgcgccatga

SEQ ID NO: 528043 - DNA, 612 bp, Stenotrophomonas maltophilia
atgttgttcccccacgacctgcccgatgccgatgtccagcacctgccgggctggatggctgcggccgaggcggatcggctcatgtccgtgctgcaggccgacgtgccgtgggacgtgcaccgcatccgcatgttcggccgctgggtggactcaccgcggctgagctgctggataggcgacccgcaggcccgctaccgttattccggcgccgagttcgttccacatccatggctgcccgtgctgcaggccctgcgtgagcacctgcaggccgggaacatcggtcggttcaacagcgtgctgctgaaccgttatcgcgatggcagtgactccatgggatggcacagtgacgatgagccggagctggggccgtcaccggtgattgcttcgctgagcctgggcaccgctcgtcgcttcctgttgcgccgtcgcgatgagccagcgcgcagggccgaattcgtgctggaccacggagacctgctgctgatgcgcgggcagacccagcgcttctaccagcacgcgcttccgaagtcagcgcggatccgggaggagcggatcaacctgacgttccgctggatccattcccccggagcgggcgatcgtagcaggacctag

SEQ ID NO: 528044 - DNA, 1443 bp, Stenotrophomonas maltophilia
atgcctccagcgacgccagccacctcccccgcagcccatggccgcgccctgtgcgtggacctggatggcacgctgctggactcggacatcctgtatgaatcactgctggtgctgcttgcacgcaatccgctgtacctgatcctgctgccgttctggctgctgcagggcaaggctgtactgaagcgccggattgctgcccgcgccgctgtcgatccccgtcacctgccctacaacccgagggtgctggaactgctgcgcgacactccgcaacgaccaagggtactgtgcactgcgtcggaccagttgctggtcgcgccgatcgcagcgcatctgggcctgtttgaacaggtcatcgccagtgatggccagcgcaacctgtccggtgcgcgcaaggcgcaggccctggtggatgcgtttggcgaacgcggcttcgactatgccggcaacggcacggtcgacctgccggtctgggcacgcgcatcaggcgcctgggtggtcaacaacggcccgcccctcgccagcgccgccgcccggcacacccaggtgctggggcattggccgggtccctcccggctgcaggcatgggtgaaggcactgcgcccgcatcaatggttgaagaacctgctggtgttcgtaccgctgctgaccgcccatcgcttccttgaagcaacggcggtcgccgacgccctgctggcctttgccgccttcagcctgtgtgcctccggcgtctatgtactcaacgatctgctcgacctcgacgcggaccgccgccacccgcgcaagcgccttcgcccctttgccgccggccggctgccactgctgcacggcttgtttgccggccccctgctgacactgtgcggcctggccatcggcctggcctgcagcccgtcatttgccaccgtgctgctgggatactacgcactcaccctggcctattcgctgcgcctgaagcgcgtggtcatgctcgatgtggtgctgttggcaggcctctataccctgcgcatcatcggcggcacgattgccatcggcgcggagctttcgttctggctgctggccttcagcatgttcatcttcctctcgctggccctgctcaagcgctacacggaactgcactcggtgctggcccggggcaacacccgtgccgacggccgcggctatgacgtggaggacctgccgctgctgcagtcactcggtgccgcggcaggctactgcgcggtgctggtgatggcgttgtacatcaacagccccgacagcgtggagctgtaccgcaacccgaagctgctgtggttcatctgcccgatcctgctgtactgggtcagccgtacctgggtgatcgcccatcgcggcaagatgcatgatgaccccatcgtattcgcagccaccgatcgggtcagccagatcgtggccgcgctgtgcgtcgggtttgcgctggtggcgatctga

SEQ ID NO: 528045 - DNA, 1305 bp, Stenotrophomonas maltophilia
atgcgcgcgcgcgcgtattcctggggaaggtatccgcgttcgccgcaagcgctggcgagggtgcatgaccgccaagctggactaccggacttcgaaggcagcgcgctgccgtacggcaatggccgcagctatggcgacagctgccagaacccgggtgcgaccctgctcgactgtcgtggcctggaccgcttcatcgccttcgatccagccagcggccggctgcactgcgaagccggcgtgaccctggacgagatcattgccctggcactgccgcagggctggttcctgccggtgacaccgggtacccgccacgtcacggtggggggcgccatcggcaatgacgtccatggcaagaaccatcatgtggcgggaagctttggccaccatgtgcgctctttcgagctgctgcgcagcgatggcgaacgccggctgtgccgtcccggcgatacggatggctggttcggggccacggtgggcgggctgggcctgaccggcctggtcacccgcgccgagctgcagctgcgccgggtgccaggcagcagcctggaagtggagaacatccgcttctgcaacctcgccgacttcttcgcgttgtccagggagagctgcgaaagccacgagtacagcgtggcgtggatcgactgcctggcgcgtggccgttccctcggccgcggccatttcacccgcgccaaccatgccgcacaaccgctcgacgaacgtcctgctgcaccccgcaggcagtgggcgatgccgctgacgccaccggtttcgctggtcaaccggctcaccctgcgcccgttcaacgtgctctattactggcgccagctgccactgcgccggcgccatgcgtcgcacctgctgcccttcttctacccactcgatggcatcgaccagtggaaccggatgtatggtccggctggattcctgcaataccagtgcgtgctgccaccgcaggcggccgccgacggcatccccgccttgctgcaggaaatcgcccgcagtggccagggttcgttcctggcggtgctcaagcagttcggcacgcggccatcgcccggcatgctgtcctttccacgcccgggcaccacgctggccctggacttcccaaacaccggcgagtccctgctggccctgctgcggcgcctggaccagatcgtcgatgccgcaggcggtgcgcagtacccggcgaaggatgcgcggatgacggccacgtcattccaacagtcctacccccgctggcaggacttcagtcgtttcatcgatccacgtttctcatccggtttctggcgccgggtgacggagtaa

SEQ ID NO: 528046 - DNA, 1395 bp, Stenotrophomonas maltophilia
atggtcatcgccgacgagaaggatttcatgagcagagtgcccgcagggcccgcggtaccaagcggattgcctccatttgccgtggtcgcaggcgtcgcgctggtcgcattgctggtgcggcttctttacgtccagtttttcagtacgccgatgcccttctgggaccagtgggacggcgagggcgcgaccgcgctgcaaccttggctgcatggaaccctgcaatggagcacattgctggaaccgcacaatgaacaccgcatcttcccgacccgcctggttgcgttgctgtcgttcttcctgaccggacagtggaacaacgtctacgaagcccgcatcagcgccgtggtggcctgcttcatcccggcgacgctggtctggcacgcgctgcgtgacagtggcgtcgtgggtgggcgcaggttgctggttgcattcgcactgctgatgtcgatcctgccgttctcctgggagaacctcctggtgggcttccagagccagttctacttcctggtcctgtccagcatcgtggctgtcggcctggtggcgcgccatcaccagagcatccccgcgttgttggcggcgatggcgctgagtgtgctggcggcggtcaccatggcctcgggcatgctgactgctgtcgcggtgggcgccacctgcgtgatcgcctgcctctgcctgcccggcaagcgtgcgccggcgttgtgcgccacagcggtgctggcggtgttggcggtgatcgcctatcgggcgattccggtcatcgatgccaacggaatgctgcgcgcgcagtcgcttggagagctgttccttgcgaccacccgcgtgctgtcgtggccggggcgctcgaacggctgggtggccatcgtatggctgccgggtgtggtgatgatcacgcgcatgctgctacgccggcaggccacccggaccgatgtggcgatggccggattctgtgcctggaccgtgctgcaggccttggcgattgcctatggtcgcgggcatgaaatgggttccccggcgccgcgctacaccgatctcttcgtacccggcgtattcggcaacgcgtggttcgcgttgcagctctggggcctgctgccgcgctcgggcctgcgcagcgccgcgcgtgccgcggtagtcatgttcgcgctggtggtcgtgggcgctccgctcagccaggtggggaaggacttccgcaggatccgggcgtttgccgcggagagccgcgtgcagcaggacaatgccacgcgctatctggtcacgggtgatccggccgcgctgcaggtgggcgaacgcgaactgccttacccggatgctgccaagctgaaagcacaactggatgaccccaggctgcgccggatcctgccagtcaaactggaagcgagtgcatccgaagggcgctga

SEQ ID NO: 528047 - DNA, 906 bp, Stenotrophomonas maltophilia
atgaagctgctggtgttcggcggcaacggccaggtgggccaggaactgctgcgcgcattggcgccgcagggtacggtgattgcaaccacgcgcagcggcacgctgcccgacggccgttcctgcgagagggctgacttcagcgagccagacagtctgttggcattgctggatcggctgcagccatcgatcgtggtcaatgcggcggcctatacggcagtggaccgcgccgaacaggacgcaggcgcggcctttgcggccaatgcgctggcaccgggcgtgatcgcgcgctggtgtgcgctgcggggtgtgccgttcgtgcactactccaccgactacgtattcgatggacgcggcacacggccgtaccgcgaggacgagcctactgcaccgctgggcgtgtatggcaccagcaagcgcgatggcgaggatgcggtgcgtgcagcgggcgggcgccacctgatcttccgcacggcgtgggtgtatgccgcgcacggtgcgaacttcctgcgcaccatgctgcgggtgggcgccgagcgcgaccggctgcgggtggtggccgatcagatcggcacgccgacgccggcggcactgatcgccgatgtcactgcgctggcattgcagcacccgggcccgttgtccggcacctggcacctgaccgccacgggccagaccagctggcatggattcgccgaggcgatcttcgccgaggcgctggcgaaggggctgctggaccgtgcgccggtggtggaggccattccgagttcggactatccgaccccggcgcagcgtccggcatggtcggtgctggacaaccgccggatccagcaggatttcgctatcgagctgcccagttggcaggccggcctggcgcgggtgatcgacgagatcgcgttgcctcgcaactga

SEQ ID NO: 528048 - DNA, 558 bp, Stenotrophomonas maltophilia
gtgaaagtgattcagacccgcctgccgggatgcgtggtgcttgagccgatggtgttcggtgattcgcgcggttttttcttcgaaggctggaacgcgtcgcgattcggtgcgcttgggttgcccgaccggttcgtgcagagcaatctttcgtcctcgagcaagggcgtgctgcgtggcctgcactaccagtggccgcgcccgcagggcaagctggtcagcgtgctggaaggtgaggtctacgatgtagccgtggacatccgacgcgggtcaccgacgtttggatgctgggaggcagtgatcctgagtgccggcaacaagcgccagttctggattcccgaaggtttcgcccacggtttcgcggtgctgtccgagactgcgctgttccactatctctgtaccgacgtgtacgtgaaggaagccgatgctgctgtgcgctgggacgacgccgatatcgcggtggactggccgatcagcgatccgatcctgtcggccaaggatgaggatgcgccgttcctgaaggatattgccgaagaccgattgccggcctatacgccatga

SEQ ID NO: 528049 - DNA, 522 bp, Stenotrophomonas maltophilia
atgctgaaggaatatctacgacgcttcgtccagcacctgctgggttccttcctgttcgacgcaccggggctggtgcaatgcaagatgttcgtgctgcgccgcttcttcgatatcggcgccaattcgtacgtttcctaccgggccatgctggtgtctccgcacagcacccggcatgcgcacttcagcatgggccgcaacgtaggcgttgagcacgactgcgagctggactactccggcggattgaagatcggcaatgacgtctggatctccgaaggcgtattcattgccacccatggccatcggatcaagacacgagcgctcaagaaggagcaaccggtggatttcaccggcctgaccatcggcgacgatgcctggcttggcgcgcgtgccgtgatcctgccctcagtcaaccggattggcaccggtgcggtgatcggcgcatgctgcgtggtcaccaaggacgtcgaagactgggccgtggtggttggcaatccggcccgcgtgatcggctaccgcaactga

SEQ ID NO: 528050 - DNA, 2031 bp, Stenotrophomonas maltophilia
atgtgcggaattttcggtctggtgctccgcaaggatgccgctttctcccactccagactgcagtcgacgctttctgaacttttcaagctgtccgagacgcgcggcaaggaatcatcgggcatccatgcctatgttcccgaccagcgcgcatcgtgggggctgaagtcggctgatcgcgcgaccgacctgatgaagtcgccggagtacgcgtcgatcatgcaggcgctggccgctgccttcgaggctgagaaggtcggtgcgtcgctggccgtgatcgcacattcgcgcctggtcaccaacggtacctcggcgctgccacagaacaaccagccggtcagccgtgaaggcgtgacgctgatccacaacggtatcgtcgtcaacgtggatgagctgtgggcgtcccacccggagctgcagcgccacgccgaagttgacaccgagttcatgggcgcgttcctcgcccagcatggcggtgcctccacaccggccaaggccactgccgatgttttcgccctgctcaagggcgctgcgtcgatcgcctgggtgcatggacagaccgatcgcctggtgctggcaaccaacaccggcgacctgtatttccatctggacgaacgccagggcgtgctggtgtttgcctccgagcagtacatcctggacaacgtggtcaagcacatccatggagaagcagcggttcccgctgtacgttggctggaaccgcagaccgcgctgggtgtgggcatcaacaacctcggcaccgccgccttccgcctcgacgaggccaccgcggccgcggccgatgctggcgtgcaggtgtacccaaccccggtgagcgcccaccaggccgctccggcccgccccgcaacgccggtgctggccgttggcagtgcggacttctcgctgctgcgctacaacgaagacaatctgaagaagctgcgtcgctgcagccgctgcatcctgccggagaccttcccgttcatcgccttcgatggcgaaggcgtgtgcaattactgccgctcctacaagccgcgctatgcgggcatgcatccggtcaagaccaagcacgatttcatcgagtcgctggccggttaccgccgcggcaatggtcgtccggacgtgctggtacccttcagcggcggccgtgacagcagctatggcctgcacctgatcaagcacgagttcggcctgaacccgatcaccttcacctacgactggggcatggtgaccgacctggcccgtcgtaatgtggcgcgcatgtgcggccagctgggagtgcagaacatcctggtctcggcggacatcaagcagaagcgcgagaatgtccgcaagaacgtggcggcgtggctgaagaagcccgatctgggcatggtcccgctgttcatggctggcgacaagcacttcttccgcatcgtcaaccagctcaagcggcagaccggaatttcgctggacctgtggagcgccaatccgctggagaacaccgatttcaagtcgggcttctgcggtgtcagcccggacttcgacaagagccgcgtcgattatctgtcgatgagccgcaagctgcacctggcggcctactacggcagtcgcttcctgaccaatcctggctacatcaatacgtcgttgctggacacgatgggcgctttcctcgcctactacgttgaaccacgccgcgacttctacttcatcttcgaccacatgatctgggaagagaacgaagtcaacgacgtgctgctcaaccagtatgactgggagctggcaccggacacggacagtacctggcgcatcggcgacggcaccgcgccgttctacaactacatctacatgaccgcgcgtggattctcggagttcgacacgttccgcagcaatcagatccgcgaagggatgatgacccgcgaggaggcgatctcggcggtgtacaccgagaatcgcccgcgtccgcagtcgatcaagtggtacctcgataccatcggcatcgatttcgacagcgcgatccgccgcatcaacgaaatggatgtaatgggcctgcaccgctga

SEQ ID NO: 528051 - DNA, 1299 bp, Stenotrophomonas maltophilia
gtgagcatctcgccgtccgccctgttgaagaccctcgcgagcaatctgtcctggacggccgcgagtctggtgatcctggccgtcagcgggatcgccatcaacctgatgatcgccggcttccgcagcgccagcgatctgggtgttttcaaccaggcgtacgcggtgtacgtggtcgcatcgcagttgaccgtgttcggtatccacaactcgatcatgcgcaacgccgcccattacagcggtgatgccgaggaagggcgcagcctggccggtagcgggctgctgctttcggcgcttgccggcgtagtcggcgccgcgctgctggtgctggctgcaccggccctgggcaagtggttcgacagcccggacactgccctgggcgtgcgcaacgtggcgtatgggctgctgctgttcccgttgagcaagaccctgctgggcctgctcaacggcctgcagttgatgaaggccttcgctgtcctgcaatcgctgcgctatctggtcgtgatggcctgggtggcggtggtctcgatgacttcggccagtatcgacaaggtgttgtactgcttcctcgtcgccgaggtcgtcaccaccgtagccgcgctgggctatctgtggtcgcgccggatgctgcagggcatgcgcgtgcggcgggtatggatcgggcgccacgccagcttcggtgccaggagcctgttgtccaatacgttcgtcgagctcaactctcgcgtggacgtcatcctgatcggcttcttcctgaccgaccgcgcggctggcatctacagcttcggcgcgatcctgatcgatgggctctaccaggtctggcacctgatccgggtcaacctgaacccgatcctggtgaacgccagccgcgaccgtgactggtcgacctgtcgcatgctgctcaacaaggctctacgctacctgtatccgttggcggttctgctggccttgggcgtggtgttcgcgtactggttcaccatcacctacgtgatgagcggcaaggggctggaagagggcatgctgccgctgatcatcctgctcctcgggctgacttcggtggcgccgttcattcccttcgaccagctgccgctgctgggcggctccccggggctgcagaccctgcagcagctgtcggtggtgatcgtcaatgcaatcctgaatgttatattcattccgtggttggggatcgagggtgctgcgcttggaaccgcactgagctacgtcttcggcgtgctcgtgttgatgttgatggtgcggcgcctgtactcctggaatctaattacaaatcgtatcgaggcataa

SEQ ID NO: 528052 - DNA, 1008 bp, Stenotrophomonas maltophilia
atgtaccagaacaaccgtatcagtgtcgtggtgccggcacacaacgaagagacgcagatcaagcgcgtcatcgacaccatgcctgactatgtcgactacatcgtcatcgtcaacgacaccagtacggaccgcacttccgacgtggtccgcgccacgccggaatacgccagcgggcgcgtcgtgctgatcgagcacgaagtgaaccagggcgtcggcggggcaatcgcaaccggctacaagtggagccgcgacaacggtatcgacgtgtcggtggtgatggcgggcgacggccagatgaatccgctcgacatgccggccattctcgcgccggtgatcaacgatgtggccgactactccaagggtaatcgcctggtgactggcgaagccttcaagcgcatcccgaagatccgcttcttcggcaactcggccctgtccctgctgaccaagatcgcatccggctactggggcgttgccgattcgcagacaggttatacggcgatcaacgccaaggcgctggctgcgatcgactgggaccacatgtacaagcgctatggccagccgaacgatctgctggtgcggctgaacatcgccgagatgcgcgtggtcgacgtgccggtcgagccggtctacaacgtcggcgaaaaatccggtatccgcgtgcgcaaggtgctcttcagcatcggctggctgatcgtgcgcctgttcttctaccggttgaaggaaaagtacatcatccgcgacttccatccgctggtgttcttctatgccttcggcggtgcgactgcgctggttggcctgctgttcctggtgcgtaccatcctgctgtggttcacgcagggcagcatgccggagatgtcgttcctggtgacgctgttctccttcagcatctccttcaatgccatcggctttgcgttctggttcgattaccaggccaaccgccatctgaatccgcccatcacccatcgtgacgtgacccatcgccaggcgccggatccgatcgacccgtga

SEQ ID NO: 528053 - DNA, 1116 bp, Stenotrophomonas maltophilia
atggaaattcagtttatcgacctggccgcgcagtaccgcgccctgaaacaggatgtggacgcgcgcatcgccaaggtgctcgagcacgggcgctatatcatggggcccgaggttcgcgagatggagcaggcgctggaagcccgcaccggtgcgccgcactgcatctcggttgcttcgggcactgaagccctgctgatcgcgctgatggcgatcggcgtcagcgcaggcgatgaggtcatcaccacctcgttcaccttcgtggcaaccgctgaagtgattgccctgctcggcgcggttccggtcttcgtcgatgtcgagccggatacctgcaacatcgatgcgaacctgatcgaggcggccatcaccccgcgtaccaaggccatcatcccggtgtcgctgtacggccaggttgcggacatggatgcgatcaacgcgatcgccgcccgtcatcccggcatcaccgtgatcgaggatgcggcgcagagtttcggtgcgacctaccgcggcaaggcaagctgcaacgtgtcgcgcatcgcgtgcaccagcttcttccccagcaagccgctgggctgctacggcgacggcggtgcgatcttcactgacgacgccgcgctggcaaaggcgatggccgagatccgtgtgcatggccaggagcgccgctactaccacacccgcgtgggcgtgggtgggcgcatggataccctgcagtgcgcgatcgtgctggccaagctcggccggttcgacttcgaatgcgagcgccgccagcacgtggctggacgctatctgcaggcgttggctggcctgcagggctgcgagttgccgagcctgcgcgaaggcaacagttcggtctgggggcagttcaccgtgcaggtcgatgatcgcgccaaggtggttgagcgcctcactgcggcgaacgtgccgaccgctgtgcactacccggtgcccctgcatcagcagcctgcgtaccgcgaccgcgaccgctgccgcatcgcgtcctctctggcgaactccgagcgggtggcgcagcgcgtcatgagcctgccgatgtccgccgacctcgatgagacgcaacaggattacatcatcgagcagctgcgcgcggccctccgcgactga

SEQ ID NO: 528054 - DNA, 570 bp, Stenotrophomonas maltophilia
atggccctgttcatccatccaaccgcgatcgttgatgagggtgcgcgcatcggcgatggcagccgcgtctggcattgggcgcatgtgtccgctggcgcgcagatcggcaacgactgctcgttcggccagaacgtgtacgtcggtaacgacgtggtgatcggcaacaacgtcaagatccagaacaacgtgtcggtctatgacgcggtgcggctggaggatgacgtgttctgtggccccagcatggtcttcaccaacgtctacaacccccgctcggcggtcaaccgcaaggccgagtaccggcagaccctggtgcgccggggagccacgctcggcgccaactgcacgatcgtctgtggcgttaccgtgggcgagcacgccttcgtcggtgccggagcggtggtcaaccgcgatgttgcgccgttcgccctgatggtcggggttccggctcgccgggcgggctggatgtgcctgtgcggcgagcggctgccagggaccggaacggtgacgtgcgcgcactgcgaccgccgttacctggtcgacgatgcgtcctgcgcgttgctcgatgcctga

SEQ ID NO: 528055 - DNA, 1062 bp, Stenotrophomonas maltophilia
atgcgcgtatttaccccgcctgtgctggacaggaagatccggttcgccctggtcggctgtggccgcattgcccagtcccacatcaatgccatgcgccagcatgctgatcgcatcgagttgaccgatgtctgcgacgtcgacccggccgcgctgcagaaggccgtcgaagacaccggcgccgttggccaccgcaagctgagcgacatgctggccagcacgacggccgacatcgtcgtgctgaccacccccagcggcctgcatccggagcaggcagtggaaatcgctgccgccggcaagcatgtgatgaccgaaaagccgatggctacccgcctgcaggacggcgtgcggatggtcaaggcttgcgacgaagccggcgtgcgcctgttcgtggtgaagcagaaccgccgtaatgccacgctgcagctgctcaagcgggcgatggagaagcgccgcttcggccgcctctacatgatcaacatcaacgtgttctggacccgtccgcagtcgtactacgacagtgcatcgtggcgcgggacgtgggagttcgatggcggcgccttcatgaaccaggccagccactacgtggacctgctggaatggctgggcgggccgctggaaagcgtgcaggcctataccgcaacccttgcccgcaacatcgaggtcgaggattccggcgtaatcggcctgcgctggcgctccggtgcgctgggttcggtcaacgtgaccatgctgacctacccgcagaacctggagggcagcatcaccatcatcggtgagaagggcaccgttcgcatcggcggcgtggcggtgaacgagatccagcagtggcagttcgccgaatccgatccggacgacgaagccgtggccagcgccagctacgaaaccacctcggtctacggctttggccatccgctgtactacgacaacgtgatccaggtgctgcgcggcgaagccgagccggagactgacggccgcgaagggctgaagtcgctggaagtcctgattgctgcctacatgtccgcgcgcgatggcaagcgggtcgcactgccactggagtactga

SEQ ID NO: 528056 - DNA, 1305 bp, Stenotrophomonas maltophilia
atgaacaagcaactgattgaacgcctggattccaagacggccacgatcggcatcgtcgggctgggctacgtgggcctgccgctgctgctgcgctacagcgaagtcggctacaaggtcgtcggcttcgatatcgatccgtccaagatcgagatgctgtcttccgggcgcagctacatcgagcacatcgattcggcggacatcgccaaggcgttcgccagtggcgccgaagcgaccaccgactacgcgcgggcgaaggacgtcgatgccctgatcatctgcgtaccgaccccgctgaccaagttccgtgagccggatctgagcttcgtggtcggtacggtcgacgcgctgctgccgcacctgcgcgccggccagatcatgtcgctggaaagcaccacctacccgggcaccaccgatgaggaactcaagccccgcgtagagtcgcagggcttcaccatcggcgaagactacttcctggtgttctcgcccgaacgcgaagatccgggcaatccgaacttcagcacgcgctcgatccccaaggtctgcggcggcgtgaccgcgccgtgcctcgatgtcggcctggcgctgtacggccaggtgatcgaccgcgtggttccggtcagttcggcgcgtgccgcggaaatgaccaagctgctggagaacatccaccgcgccgtcaacatcggcctggtcaatgagatgaaggtggccgccgatcgcatgggcatcgacatccatgaggtcatccgtgctgctgcgaccaagccgttcggcttcgtcgcctactacccgggtccgggccttggcgggcactgcatcccgatcgatccgttctacctgacctggaaggcgcgcgagtacggcgtgcatacgcgcttcatcgagctggcgggcgaaatcaattcgtcgatgcccgactacgtgatttccaagactctgctggcgctgaacctgcgccgcaaggcgatcaacggcagccgtgtgctggtgctgggtatcgcctacaagaagaacgtggacgacatgcgtgagtcgccgtcggtggtgttgatggagaagcttcgcgatctcggtgcggaagtgtcctacagcgatccgcatattccggtgttcccgaagatgcgcgagcaccagttcgagctgtccagcgtggacatcaccgccgacaccctcagcagctacgactgcgtgctgctggcgaccgaccacgacaagttcgactatgcgctgatcaagcagcacgcgtcggtgctggtggactcccgtggccgcttcctggaaagcgccgataacatcgtaaaggcctga

SEQ ID NO: 528057 - DNA, 2505 bp, Stenotrophomonas maltophilia
atggcggtatcaggcagttcccgcgcggtgggcggggtgggggaggaaaaccgggattccctgatttctccctatacgttgacggtcctttgggtgtcgctggcaagcgtgcttgcgatcgcgctgatttgcctgcgcaggttcgatgttccgctgctgctgctgctggccacgctgctcacggcggcaatgctggcggtattccgggtacgcatccgctggtccctgcccaagctcggaattggcttcgtcgccatcgccgcgctggcgctgttcctgcgatcggatctggatccgcacctgaaggccggtcaggaccagggcctgtacaccaacatgtcagcacagctgctgcgagccaaggcgctggactacaccgatgaattccgcgcctcgctgagcggcgaggagctgcggatgtatgacagcgcgccgatggccgctgtcgatctggtcgatccggtgcgctcgcgctatgtggttgcgttctacccactgcacccggcgtggatggcaatgtccacctgggcgttcggacagaattaccatacggcatcgctgctgctgtttgccgcgctgggaatagccggtggctactacctggcgctgctgctgttcggtagtcggcgcgcggcagggttggcagcaaccttcctggcgctcaacccggcgctggtgtttttcgccaagtttccggtcaccgagatggtggcgttcgcgttcacggtcaacggtttcctgttcttcgccaaggcgtgtttcgagcccgcgcggggcaagcgctggctgaacctgctgatcgcgatcctgtgcttcaacgggttgttctacacccgcatgcagttcttcctgtacatcccgttcatgggcctgctgttcgcctatgcactgatcgccatccgccagccgtggagccgtcgcgtggtgatgatggtgttcccggcatcgctggtgatcaccttcctggtgagcatggcgttctaccgctactaccagccgatcctctatggagggatggtcgaaggccacctggacaagctgaagaagcttgccgcactgatggccgctggcctggggctggtcgtactgggcctgcttgcctacgtggtggcgcgccgccccaccctggccgtgctggaacgcctcaatgaccagatcctgcgctggtccggcaaggtcacttggctgcttccgctggcactgctggcctcgattcccagcgtcgttgccctgtaccagaccggctcgctggcgccattcccgtggacggtgccggtcggcactgatcctttcctggtccgctaccacgccatctaccgcctggcgcagatgctgtcgccgctgggcgtagcgctgctgctgctgctgccggcgttccggatcgcctggtccggcgcagccaagttcgggctgctgttcctggtgctggtctgggcggccgtgctgacccagcccgccatcccgtacctgtactactacggccgttacctggctggcgacatgctgccgtactcgctgatcctcaccgccggcgtgatcgcctacctgtgggacggccgctggcgccgcctggccatcgcgattaccgcgttccagtgcttgttcttcctggtgttctccattgcgcagtacaaccacgacgaaggcgaagatcctcggttcttcgagcgtattgccgagcttgtcagccccaatgacatcatcatcgcctccgggctggatgatgcgcagctggtcggcctgcgggtcacctataacctgaacgtgttttccatcaccggccgtggctctgttccgctgcctttcgacaccggtacctggcatcgcctggaagccaacgcgcaccagaagggggggcgcctgtacctgttgaccaaccagcggccgagcgcgctgcaggagcaactggtcgagcgtgtcccgttccgccaggggtacatgagcaacagcgagcacgctcaggccgggaacatgttccagcctacatcgcgttcgcggttgctgctgccgttgcgcttcaagcaggccgaagtggaaatcaatctgtatcggatcgataccagcaccttcgaccgtgtcgccaacgcgagctgcacggacgagctcggcctggccaccgacggtgcaatcctggtcaagggcctgaacggtttcagcagccccgagacgcatggccgctggaccgatggcaagcgtgcgagctacacctgcacgctgcctgaggggcattcggccagcaccgtggaaatccaggccaccgcctacctgccaaacgggcgcaagcagcgtgtcggtgtatcggtcaacggcggtgcaccccagcagttcgagttcgcaccgggtaacgacacccagcggctgcagattccagtgggcaacaccgacaagcgatcgctgacggtggacttcgacctgccggacgccatttcgccacagcaggcacaaagcgcgaacgacgcgcgcgtgctcggcatcagcatcagtgagatcgagatcaaagaatga

SEQ ID NO: 528058 - DNA, 585 bp, Stenotrophomonas maltophilia
atgaccaccaacatttcaaagattgcgctgcccctgattctcgcctcgtcgctgatgctgacggcctgctcgaatgacagccaggcgcctgcggcggctgagggcgcagcgcctgcggcggtgaaggagaacccgcagctgactcacgaacaggtctcaagcaacatcgagcaggtcggcagcaccgcgtacaacgccgctgacgataccctgaccgtcaagcttaagatcagcaacaagggcactgctgcctggccgacttcgggcaccaacccggttaccgttggcgtggttcagctgctcgacccggcgccgggcactgccgagccggcccgtggcgaggaagctcgcgttcccatgactggcgacgtgcagccgcacgccgagactgaagtaactgcggtcgttccaggtgacttcgctgccggtcacaaggtgcggttcgagctgctgcaggaaggcgtggcttggttcggctacaacttccagcagccggtcctggtgctgggcccgttcgcacgctgcgccgacggcaagggcctgtgcgacgacaagggcgcaccgatcgcggctgccaccccgtaa

SEQ ID NO: 528059 - DNA, 1296 bp, Stenotrophomonas maltophilia
atgaagatcgtctgggccggcccctattgcggacagtcggcgatcgcccgtttcagtctccaggtggtcaatgccctgcgcgagctgggccatgaggtcgccatctatcgcaccgagaccggcgaagcagcgtcctatcctgcactgccggatacgacggtgctgtcctccggcagtgcgatggaagacgaatggctgcgtacggccgatctggtgttcgccaatgtcggcgatcattacggcttccacggtggcatcttcgagctggcgcgcaagcgccagttcatcggcatcatgcacgactggttcgtgctgaacctgttctggggaatgctgagggtcgaagggcggcagcaggacgcgccgcgcattattcaaggcctgtatggtcaggaggcgggcgagctgtgtgccgccgctacttccgaaaccatcatgcaggtggccgccacgcatttccccatgacagagtgggccgtggcagacatgcttggctgcatcatccactccgagttctatcgcgccaaggtgcaggcacgctgcccgggcccggtgcacaagctgtcgttggcctatccggcgccggacgtgaggcaggacctgcggtcggcggtggatgatcacagccgcctgcggctgtgcacgctgggtgtggtcaatccgaacaagtgcgttgacaaggtcgtgcgcgcgttgatgcgtgaccccgggctggccgcacgcaccgagtaccgcgtactcggcggtgtcagcgagcaggagcgcaagcgcttggaaggcatctgcgccgaggtcggcttccgcgggctggtgcttgagggtcgggtcagcgatgagcgcctgctggaaggcatggccgaagcggacgcgatctgctgtctgcgcgatcccgcgctggaaggtgcgtcagcatcggccatcgaaggcatgcagtccggggtgccagtcatcgtgtcggatgccggcttctatgccgaccttccggacgattatgtgctgaaggtaccgcagggcgactgtgaggacgaactgcttgcgcgactgcagcttgttgatcgcgaacgcagcgcgggccgggatatgggagcccgtgcccgtgcctgggcacgcgatgagttctcggccattcactacgccaaggggcttgacgcgttgatcccggagttcatagaaagtgaaccctacattgccgctgccagggcgctgggccgcgagctggggcggatggggatccccggcagcagtccctcggcaggcaggctggctggcatgctcgaccgcatgttcagcctctga

SEQ ID NO: 528060 - DNA, 1125 bp, Stenotrophomonas maltophilia
atgttggcctcaaagcggattccggtagcagttcccagcctgtcgggcaacgaaaagaagtatgtgggacagtgcctagattcaacgtggatctcttcggccggcgaattcattggtcgtttcgagcagagctttgctgacttctgcggcgttcgccatgcggtagcgatcaacaacggcaccaccgccattcatctcgcgctggtggcgttgggtatcggcgaaggcgacgaagtgctgatcccgaccctgacctacatcgccacggccaatgcggttgcctactgcaacgccaagccgatcctggtcgactccgagcccggcaccatgaacatggatccggccaagctggaagccctgatcacgccgcgtaccaaggcgatcatcgtggtgcacctgtatggccatccgaccaacatggggccggtcatggacatcgcccgccgccacaatctcaaggtcgtggaggacgcggcagaagcacacggcgccgagtacctgggcacgcgcgtgggtggaatcggcgattgcgccactttcagcttctttggcaacaagatcatcaccaccggtgaaggtggcatggtgaccaccaatgatgatgagctggcggcccgcctgcgcctgtaccgcgggcagggcatggacccgaagcgccgctactggttcccggtggtgggtttcaactaccgcatgaccaatgttgctgcagcgatcggcgtggcccagatggagcgtatcgacgaggcactgcaggtgcgccagcgcgttgccggctggtatgaggctgcttttgcgcagcacgtggatctggtcgagcgtccggccgtggccgagtacgcgcaccatgtctactggatgtacaccgtgctgctgacaggcctgagtgaacagcagcgcgatgaagtcatgcgcctgatggatgccgatggcatcgaaacgcgcccggtgttctacccgatgcatgtgctgccgccttacctcgaagacggggctgcctacccggtcgccaacgaccaggctgcgcgtggcatcaatctaccgacgcacgccgacctcactgaagaggacgtcgagcgcgtcgtggaagccctggtatcggccatcggccgcgtgagcgcctga

SEQ ID NO: 528061 - DNA, 2538 bp, Stenotrophomonas maltophilia
atggcattgaaaatcaagctgggtaatgctgtaagcagtgctgctgacaaggctgcgcagtggcgcgcgagcgacggtttcctggctccgggggaggagctggtactgagcagttcctcctacgcgagcatggacgcgatcacgatgcgtggttttgccctgcccgaatctgatggaatctggtccagcggggcgatcaacacaattgatgtgcgcctgcgcggagtcgacgccagccgccgctatcgagtgatgatcaatgccatcgccttcgagggcagcgggcatcgcgcgctggtctcgatgcgagtcaacgacgggcccgcccaccaggtattggccaacagcgtcggctggtcctcgatcgtggccgactgggaagtacaggttgtaggcaagatcccgatggtccgtatcgagttccaggtcgccaatccgatgtcgcctaccgcaataggcctgggcgaagacaaccgcctgctgggattcaaggtgcgctcgctgcagttgcttgatctgggcccggccagcacggcggtcgcagcaacgcctgtggtcgtggagacagttgaagttgccgacgtgccgcaggatgccaatgcgggtgtcgtcggggtcttcgcccagtcaccgaccgagaccatccgtgcacttgccaagcgcggccctattctgcgcatgctgttgctggacaagaatcccgtggttcgcgtggtgcgctggatgcgccgggtcagccgcaacatggaggagatgcgtcgccagctggacctgatccgaatcgattcggcgcgtcagacgcgtgagcttggcgaacgcgtggacaacatcgagatcgacgcccgtgtgcaggagcgcgaacgtcgtcgtgccggttccaacgttgatgcgatcatcgagcagctggagctgaatcatgctcgtctgctggccatcgaggagtcggcgcaggaggtcggtcgcatgcatgagcagcgccgcgacgagcacgctgacagtctggaaagcattctcgctaccaccgatggcctcggtcgcgacgtggcggcggtgctggacacgctcaataccaccctgtccgagtcgatgcggatgctgcgtgaattcgagagcgtcgacaacaagctggcgggaatggatcgcgccctgcgactggtgcagatgcagggagaagaacatgcgcggcatgcgatttccggcatccgcgagctgcgtgagcagctgcacctgtccctgcagcagcagcaggtccgctcggaagaggcacaggccggcattgagtcgagtctgcagggcatgatcgagcggcagtggttggagtcagatgagctgcgtcagcacatgcagtccaccttgcagctgctggagaaaaggcaccaggttgagcgcgaggagctgaagcagcaggttcaggaaatcctgagcgaaggcgcgcgctcgcttgacgtgcgcaacaatgtcgatgccgaggtgttgcgtcaccacgtgctgcgcctgcatgagcgcctggatcatctgtcggtggtcaagccgggtgcggggggctcgatcgtggtcgccgaccgtgcagtgtcggagcaggcactgcaattgatcgccctgctgcatcagaagctggacaacagtgcgctcgagaccggccaggtactcgagctgctggtcgccatcagggatcgggttgaggcccagaggctgacgctgtccagtgccgccggccgttgggccggggctgcccagcgacgcgtgctgcgccgccatgatggctggctgataaacgtcgagttcggcacgttctcctgcagcgagagtgacgacctgctggcgatgtacctgctggaaagtggtgacgtcgagcgcggtctgcggctgttcctgcagcatgcgctgaagccgggtgatgtgttccttgatgccggtgccaacatcggcctgcatacggtggccgccgcccacgtggtggggccgtcaggcagggtctacgccgccgaggcgatgccgcgaaccctgcagcacctgcgtgcctcgctgaggctgagtgcggttgaggaccgtgttgaagtgctgccggtggcgttggggtcctgcgacgaggatgggcgtgagttccatatcggcgcggtggctgggcacagctctctgtatccgatcgacacagaggttgaagtgctgcgggtcgacgtgaggacggtggacggattgctcggcggcacccgggtggcactggccaagatcgacgtcgagggtgccgaacttgaggtactggcgggcatgcgtggactgctggccgccaaccccgacatgggcgtgatagccgagtacgccgtttcgcacctggcgcgtgttgggaccagcgaggcggaatgggaggcgttccgtgccgagcacgccttcgatctttaccggatcgacgatctgactggcgcttgcgtgccgctggccggcttctcggcgctgcgcgagcatgcaagctcgaacgtcctgctgtgccagccggggagcttgctgcccggcgctgttgctgctggaggcgctgaatga

SEQ ID NO: 528062 - DNA, 759 bp, Stenotrophomonas maltophilia
atgaccgccaagctcaatttcgagaacgttaccctccgttatcccatctacaactcgcacagcctttcactgcgccggaacctggtgggcatcgccaccggcggcaagttgatggccgcttcgggccaggtcacccaggtcacggcgctggacaatatttccttcagcctgaagcagggggatgcggtaggcattgttggccacaatggcgcgggcaagagcacgctgctgcgcgccatggccggcatctacactccgttggaggggcgcgtcgagcgggtcgggcggattgccacgatgctggaagttggcgcgggcatggatccggaactgtccggctacgagaacatccgtcgcatggggatgatgctgggactgtccttgaaggaggtcaacgagcggatccccgagatcgaggagttcaccgacctcggtgatttcctgcagttggcggtgcgcacctactctgcgggcatggccatgcggctgatgttcgcggtggccacctgcacgacgcccgatatcctgctggtcgatgaggtgtttgacgtcggtgacgaggcgttcaaggatcgcgccgccaagcgcatgcacgatttcatcaagtcgtcgcagatcttctgcctggcttcccactcgatggacaccatcgccaagtactgcaatcgtgcgttcgtgctcaaccacgggaccttgcgcgaaatcccgatttcacagctcacgtcggaaggatatggcattgaaaatcaagctgggtaa

SEQ ID NO: 528063 - DNA, 789 bp, Stenotrophomonas maltophilia
atgcacagctactcgtcaaccttcaaagatctccttgatggcatcaggggggccaaagttccgctctacatcgccaagggtgatatcaccgcgcgctaccgtcgcagcgtgctcgggccgttctggcagtcgctggccaccgcgctgggcgtggttggccttggcctgttgtggagccagctcctcaagatagacaagcagacgttcattccgacgctgacggcgggcctaatcatctggcagatgctgtcgggcatcctgatcgaaagctgtggcctgttcgtgcggcaggcgtcgatcatccgcaacgtggtgatgcccttgtccgtgcacccgttgagcgttgtgatccgctatctggtcaacttcgcccacagcctgctggtgttcgtgatcgtagcgatcgtgatgaaggttgatgtcggctggaacacgctgctgttcatcccgaacctggccctggtcgtggtcaacctgctgtggctctcgttcgtgttcggcgtggccggcgcacgctatcgtgatcttgaatacggcgtggcttcgatcatgccgatgctgttcctggtcagtccggtcatgtatcgcctggaatacctgccgttctcgtcggtgatcctcgagttcaacccgttcacctacctgatcgaggcgttgcgtgccccgatgctgggccatgtcgccagcctgcagacctacgccgtactcgccgtcatggcgatcgtcggctggcttctggccttctggatgctgcacaaggccaagcttcgcctgcctttctggatctga

SEQ ID NO: 528064 - DNA, 1401 bp, Stenotrophomonas maltophilia
atgagccagccgacatacaggattgccgccggctaccggttggtgcagtgggtgatccgccagcagtggttgagagccgtatacaggcatgtgccgtcccgtctgcgcgacaaggtggccgggcacctgctggccacgtccaaggaagagcatcatcatcgcttcgaaggcgaggcgcgctgggccgagaggcggcacgccgtgcccgatgcgccagtgcatttcttcggcgggatggacccggcgtggagccgccatggctgcaacatcttcgcgtatctgcgtgggcagttcggcctcgccgagtgcgcgcgactgtatgcccgcgcgctgctgggcgcgcgttatccggccgcgctggtggatgtcgacatcaatcttccgcatggctggaatgaccacagccttgacgagtacatcggaaacgatgcgccgcatcgtgtccatctgatcttcgtcaatcccgacttccttgatgccgcgatcgaacagatcggcagggcacgactgcagggtggctacatcatcgcctgctggttctgggagctggagcaggttcctgattcctggctgcctgccatcaaccaggttgatgagatcctggtctcttcacgttacgtgggtgacgcattcgcccgtgtcaccagcaagcccatcctgtgcgttccgctgccgctgagcgaagtgggagacagtggactgcagcgacaggacttcggaatcgccgagaaggactttgtcttcctcacctcgttcgatttcaattcgttcgtgcaccgcaagaaccccttcgcgaccgtgcaggccttccagcaggcgtttccgcgcgatcggcgtggcgtgcagctgatcatcaagaccagcaacggctttcgccgtcctgagcggctccagctccttctggaggccgtcaaggatgatccgcggatcgttgtgcgcgaccacgtgctcgatcgtgccgatgtgcaggcgctccagcgctgtgctgatgtgtatgtgtcgctgcaccatgccgaggggttcggcctggggctggccgagtgcatggcgcagggcaaaccggtgatcggtaccggctggtcgggcaacatggagttcatggatgccgggaacagtgcacttgtcggctacacgctggtgccggtgctggaaggcgagtacgcgcaccacgaaggacagcgctgggctgccgcggacgtggaggaggcggcgcactggatgcgccggctggccgacgagccggggctggcccaggcgatgggcgaacgtgcccgccaatcggtgctgcagaccctttctcccgagcgtgcagcagctgcgctgatcaaccgtattgaacagatccatcagcagcgcggattgacctccgctgcgctgcccatgcaggaagtacaggactga

SEQ ID NO: 528065 - DNA, 1395 bp, Stenotrophomonas maltophilia
atgcccgcggctgagcgcacagcgacgctggtcgtgatgggcttgctgctgggaggctgctcgctggcacccacctatcagacgccggtcctggcgatgcctgcagcctatgagcacacggaaaaagtggatacccgctcgccgctgccacaggcgtggtggcaggccttccaggacccggtgctggaccagctgcaacagcagttgggcgcggccaacccgagcctggcgctggccgtggcgcactacgatgcggcacgcgccgcagcgggtgaagtggcatcggcgcgggcgccgcaggtcggcttcagtaccggcccggtgcgccagcggcagtccgatgacaagccgctgcgcagcgccacccagccggccatctatgacagcaataccgccacgttctcgctgtcgttcgaccttgatctgtggggccgcctgcgcaacgcggctgccgcgggcaaggcgcgtgccgaagccagtggcgatgaccttgccgctgcgcggctgagcctgtcgcagcagttggccgggctctatctgcagcttcgcggcgccgaggcgcagcaggcgatcctgcatgacagcatcgaggactaccggcaggcgttggcgctgaccgaagaccgtttccgtggcgagatcgcttcgcaactggacgtatcgcgggcgcagcaccaactggccagcgcgcaagccgatctggatgcgctcgacggccgccatgaactgctgcggcatgccatcgccgaactggttggcgcgccggccaccggcttcgtcatcgccgacgcgggtctgccagccctgccatcggtgcctgccgatctgcccagccgcctgctgcagcgacggccggatatcgctgccgctgagcgccgggtgttcgctgccaatgcgggcatcggtgtggcgcgcgccgcgtggttcccgcagctcagtctcagcggcctgctgggtggccagacctcgggtggcagtgccctgctcgacgcgggtaaccgctactgggcgctgggtccgctggcggcgctgccggtgttcgatggcggccgtcgcaaggcggccaaggccgaggcctatgccgagttcgacgcggcctcggcgcagtaccgggctaccgtgctggccgcgatccgccaggtggaagaccagctgaccctgctgcgccagctcgatgcgcagcgcggccacgagcaggatgcggtgactgcggcgcggcgtgccgagcagatcgccaatgaccgttacaccggtggtgcggtgagctacctggacgtggtcagcgcgcagaccgatgcccgccaggcgcagttggggctgcaggacatccagagccggcagctgcaggccagcgcggcgttgatggcggcgctgggcggaggctggtcgcgatag

SEQ ID NO: 528066 - DNA, 243 bp, Stenotrophomonas maltophilia
atgatggcctggaatcgaactgtcgttgccgcctacgcaccggcgatgattggctggtgcctggcgctggccgccggcttgcgcctggaacaactgcgaggcgacctgcatgcgcaggcgttgctgccgctgctgcacggcggcgttgtggcgttgctggtgctgacactggcctgcacgctggccgcaagcgcggtgctgtggcgggccaatcggccaccaccgcgaaccgccgccccgtga

SEQ ID NO: 528067 - DNA, 570 bp, Stenotrophomonas maltophilia
atgaaggcaacgacgacccctatcccgcgtgccagcgactggaccatcggcagcccgcggctgagccttaggcccttcacaacggatgacgcaggcgaggcgttcatcgcgatcacgccgggcctgacccgctacatggcattcgatccgcctgcatcggagcaggcattcgccgtggtctggcgcacgtggttgctcaccatcgctgatggttcggacttcacattcgtcatccgccgccgcacggaccacaccttccttggcttggcaggcctgcatcgtaccggtgatgcggaacccgagctgggcatctggatcgctgaatccatgcatgggcagggctatggccgcgaagccgtgtcggcggtgctggcgtccgcgtccctgcggctggactgcgccgcattccgttacccggtagccgagcagaacgcgcccagccggcgcttggtggaatccctcggaggtgtgccggtcgcgcgtgagcaagctgtgaagtacatcgcgattgtctaccgcatccccgcaatggcgccgcaagttgcgacggacgtcgcggaatcccgctaa

SEQ ID NO: 528068 - DNA, 1440 bp, Stenotrophomonas maltophilia
atgacgttgcgtgctgcactgttttttgtggtcacgcacgcgctcgtcattgccttgatcggaccgcaggacccggtcggctcctacctgatgctgatcaccgccccgctgctggccgcactggcctgcgcgcggcgtgcacgtgacagccgcgcggcctgcaaatggcggatgcttggcgccgccgtcgcgctgttctcgcttgcactgctggccctgctgtaccgcaacgtggccggcctcgatcccacgcagatgagcgtgtcgtcgctgatcctgtacgtgttctaccggattcccctgacctacgtcgccgccagcccgggaggcggaagccgcgccatccgtgcggtggacctggcgatcattgcactgctgtggctgctgtactacgtgcacacccaggccatggccccgctgaaccccgcgttgtggacgcagtgcctgaagacgatgagcagcgtgcagaacagcctggtgttctgcttcgcactgatccgcttcattgccgaggacaatcccgaccgccgcgatttcttccggacactgaccctctacgcgctgggctacttcctgctggcgctctacatcaacacctaccagccgcaactgcccgatggcagctggggggacctgctgatcagcggactgttcgtgctgctggcagtgatggccggcagccgtcgtcgccgcgccgcggcggagatttccctcactctgcggcgcatcgtcgatgccggcgtgccgttgatgctgcccctgctgttgatgatggtggcgctgctggtcgcccgcctgcagccgaccctggccacggtgggcttcctcggcgccctgctcggctatgccctgcgcagtgtgctgagccaggtcgaaatccagcgccagcgcgatgaactggaaaccctggcccggcgcgatgcgctcaccgggctgggcaaccggcgctgcttcgatgagtcactcggcgcggcccaccgccgtgcccgccgccagggcctgggcctggcggtgctgatgatcgacatcgatcacttcaagcggctcaatgatacctatgggcacccggagggtgaccgccgcctgcgcgcggttgccgcgatcctcgatggttgcctgcagcgcggcgatgacctgctggcccgctacggcggcgaggagttcatcgccgccctgccctcggccgaggcaatgcacgcgctggagctgggcgaacggctgcgcgccgccgtcgaaagcgccgcactgccggctgccgatggccaggtgaccatcagcgtgggcgtggcctggcaggccgccggcgatgagcgcgaacccagtgacctggtcgctcacgccgaccaggccctgtatcgcgccaagcgtgacgggcgcaactgcgtgcacctcgccccggcgcccggcaccgccgaggccccgtccggccagcgcgcctag

SEQ ID NO: 528069 - DNA, 468 bp, Stenotrophomonas maltophilia
atggtcccgctacctctctctctgccgggcgtgatcgaacacaccagctggggcgacatctcggaacacgccttgcgccagcaggtcgcccgctatatgccgggcggccccgatcagcgctgggcgctggccgatgccgaggacgggttgatcggcaccatcggcttgaacggcatcgatctcctgcacggccgcgccgagctcgcgtatgacctcgacccgcattggcagggacaagggctggccacccatgcggcgcgcgcagtgctcgactgggggcacgcagtacgccgcctggtccgcatccaggcgactgtcctcgacagcaatgcccgctcgatcgccgtgctggaacgcctcggcatgcagcgggaaggcctgctgcacgcctatcgccgtgtacgggggcagccccgcaatttctggatgttcgcccatctcgaaggtacggccacgccccctcgctga

SEQ ID NO: 528070 - DNA, 780 bp, Stenotrophomonas maltophilia
atgccggtggtgttgattcttgtgtgcgctgcgctggccatggcggttgcccgcctgtggccacgcggaaacgccccggagccgctgccgtcggcggccagcatggtgctggacatgctcctgatcggcctgctgtgcggtcgcatcagtttcgtggcactgaatttcgcgctgtatcgtggcgcgccgtggagcattcttcagatcaccgatggtggctatcatctggtggtggtggtgctggcggggcttgcgtgggggctgtggcgcctgcgccgatggcccgtgttacgtgcgccggtgctgacagcggccctggtcggcgtattgctctggtttggagggagccaggtattgtcgctgtggcaggagcgccagatgccattgccgacgctgcaggtgacggatctgcagggtggcccggttgatctgcaacagttccggggctcgccgctggtactgaatctgtgggccacatggtgtggcccctgccgccgagaaatgccggtgctggccgcggcgcagcaggcacatgccgatgtgcagttcgtattcctcaatcaaggcgaaaccctggatgaggtccagggttttctcgccgacgagcggctggtgctgggaaacatgttgctggacgacgacgcggccgcatcaaccgtgctgggcgtgcaggcctatccttcgaccctctttttcgatgccgacgggcgcctgcgtgaactgcacctgggcgaactgaccgccgctggtcttgaacacaaactgcgccggctgcggtag

SEQ ID NO: 528071 - DNA, 801 bp, Stenotrophomonas maltophilia
atgtggcgttctagccgccgttggctgccgctgtgcctgcttgcgctgacctccctggccagcgcacagccgatgcccggcaaagtgatcgacctggccagcggccagccgctggacgagtccatgttcatccagcgtgcggccggcgcgcagcgactgctgctgggcgagcgtcatgaccttgcgggcgaccatgccggccagcgctggttgctgcaggcactgcaccagcagcgcccccagagggcgctggtgatggagatgatcgccagcgaacgccaaccgcggttgcagcgggtacagcgctggctggccaagggcaaccaggccgagggcccacgcctgcaggaactgctggactgggacgcgcgctggccgtgggccgcctacggcgggctggtgcaggacgccacggctgcgggcattgcgctggtcggcggcaacctgtcgcgcgccgaggtcaaccgcctgctggcctctacagaaccagtagcatttccggttgctgcggctcggcaacggttgtcggcggtggtgctggcgcagcatgccgatgcggcaccgatgctggacgggatgctggccgtacagtacgcccgcgatcgccgcatggcacaggtactgaccgatgcgccggccccggccctgctggtcgccgggcgctggcatgtactgcgcggtaccggcgtgccgggccatctgccaccgggtaccccggcgctggtgatcgtgctggcatctccaggcgaacaggtcgatgcgagcgatgccgacctgctgtgggtgctgggcgatgactga

SEQ ID NO: 528072 - DNA, 927 bp, Stenotrophomonas maltophilia
atgagccaggacaccatcgcacgcgaagccgcccgctggtggctggatgggcacgacggcgaacgcgatgagaacgcgttcaatcaatggtgccaggccgacccgcgccatgccctgcagtaccagcacctgcagcagctgtggcaggccggtgccgccacccccagccttcagcgccagcagcaacgccggcgccgccgccacctgggtgaagccggtattgcggtgctgctgctgtgcgcgcttggactgtatggccgccctgccccgccgccggccgcgcaggtgctgcgcaccgccgctggcgaaatccgcgacgaagcgctgccggacggttcgcatgtcctgctgtcaccaggcagcgaagtgcatgtgcgcgttgatgggcaacatcgccagttgcagctgcaacgcggccaggcctggttcaaggtcgctgccgacgcccgccggccgttccaggtgcatacgccgcatggcacggtcactgcgctgggtactgccttcgacctcgtcgtgcagggcaacagcagcagggtcacggtcaccgaacatcgcgtccgggtagaggacggcagcgggaccgtgcaggcggccgaggggcaacaggtacgcttcaacggacagtcaccgcctgccgcccagccggcagacagcggcggccttgcctggcgcgaacgacgcctgcactgggtctcggcccccctcgccgatgtcaccgaaggcctggaccgctggcacggcgggcacacctggatcatcggcgcgcgcctgcgccagcaaccggtcaccctgctgggcagtgccgacggcgcagccagcaaccgcgatcaactggccgcgcagctgcacgtgcgcgtgctgcgcctgggcgcgggcgtgcaggtctggttgccgccgcgcagggaacatgctgatgcgccctga

SEQ ID NO: 528073 - DNA, 384 bp, Stenotrophomonas maltophilia
atggataccaccgcagaacatgaaatccaccacctgcacgacaaactgcaggcctggttccgtgccgaggccggcatcgacgcactggatgatctgatggcgcatttctgcgcggacttcagcatggtcggtatcgccggccgccggctggaccggcatgccgtgcgggcattgttcgcgggtgcccatggcgcacgggcagggctgaggatctccatcgaagccgtgcaggcggtggaagtgccatcaccgctggcggtgctgcgctatcgcgaagggcattcgatcgatggcggcgcacccgcatggcgcgaatcgctggcggtactgaggcaggagcaggggcgctggtgctggctggcgctgcatgaggtggccgcctga

SEQ ID NO: 528074 - DNA, 306 bp, Stenotrophomonas maltophilia
atgacccgaatcagcatcatccgtctcgccgttgccgcccttgccgcgcccctgctgctgtcggcctgtgtcagcacccccggcccggaagtaaagggaacgggccgctgcgacgccagtcagctgggctgggcggtaggccagccaggcaacgaagaaaacctgcgtcgactgtcgcgtgagagcggcgcgggcctggtcaatccgatcggcccgaccaccatcaccaccaaggacatccgcccggaccgcctgcgggtctacatggacaaggacaacatcatcaccgccgcacgctgcgagtaa

SEQ ID NO: 528075 - DNA, 621 bp, Stenotrophomonas maltophilia
atgctgaccatgggcggatgtggcgggtcggcccccaaagcgacgttcgagacatctcctgcactatccgatgcggatctgaaaggtctttacccgggcacgctgctgaggcaggtggtgttcgaggacatcgacggcgcgggcctgctgctgatttcgcgtagcgaacagacatcgccggcgcaggaagacaaggaaccattagatcagatcacgctgcgtgcagagctgttccggcgttctgacctggcggcgccctggacgtcgcgctggatccaggaagatccggtccaatgcgaaggcctggacctggacgccggctatttcctggaccaggtaaccgcaaccgacctggacaacgacggccgcgccgagcttacgttggccagccacagcttctgtggcggtggggtggacccgcagcagttgcgcatcggccttcgccagggggagcagtattacgaagtacgtggtgaatcgctggtggaggtggaaggcgatgaacccttcggcggcgaccggcaggacgatcctgcgctggtatcggctgcgccggcgctgcgcgcgcacgtggacaaggtgtgggaagcgatcaagcgcggccagcccggcccgccgtga

SEQ ID NO: 528076 - DNA, 261 bp, Stenotrophomonas maltophilia
atgtctacccatgaactgaagccgatcatcgtcaacggccgcaggctgtttactgccgaagtggattgtgacgaccgggacgcgcccctgtatcgagccacctcaacgtgtcatgtggcattcatgcccatggccaatgcccacttcttctatagcaatttcattctcagcaatggagcgacttccacaccgggggtcgatgagcggacgatcatggacatctggaaaagcctggccagtaccggtggcgggcacggatga

SEQ ID NO: 528077 - DNA, 492 bp, Stenotrophomonas maltophilia
atgtcctggtgtgcccgattcaccgccgtcgtgctgctgctggtgtccctgccggcgcctgcccgaggcctgcacgtcgatctgatcgactatccgcgaccggaggccaactgggagcgcgcctatggcctggaggcggcgctgacgagggagttcgacgcgcgctgcgccgatacctggtgtgaagggcagtacagcaattaccaggtactggagtttcgttgtgccgtactggcccatcgcggcaccgtgcagcgatgtgcctgggtcattgccgccagtgagctggcggtacaggccgacagtggcgagattcgcgtcgacaatggccgctgggtctgtccggtggagttgcatccgggggtgccggttgaggctttccatgccgcgctggacgcaccgggtggcctggcggcctccctgcccgggctcgatcacggcctgttcgacgtgctgcccgactgcatccggaatgcgcggagggacggctga

SEQ ID NO: 528078 - DNA, 477 bp, Stenotrophomonas maltophilia
atgggcgggttcaaggcacgatggctggcctgcgcgctgttgatggcgggggccgtgcaggccagtccgttctacgtggatgctcgtgactaccccgcaccgggcgccggccacgcgcgtttcctcgccgccgagcgtcagctggtgcgcggctttgacgacgtctgtggcgataccttctgcgagggggagtattacaacctcagggcgatgcgcctgcgctgctcggtacaacaatccaccggcgtggtcgccggctgcatctggaccttttcgggaagctcgacctgggtccggcagaccgggcagatcgatgccgatgtcggccgctatgcctgcgcggtgcctctggctgcaggaacccggctggacgaactgttggaggtatggggcgctggatccggacatgacgcgctgcatgccttgctgcctcgaacccgtacgagtgtctacgacgggctgaccgactgcctgtga

SEQ ID NO: 528079 - DNA, 603 bp, Stenotrophomonas maltophilia
atgcggatcgatctgttgctgctggatgtggatggtgtgctggtgcagtaccagcgcgcgcagcgcgtgctgcacctggcgcaagcgctggacgtttccccgcaggccgtgcaggccgcgctgtacgacagcgggctggacgccgcgcatgaccgtggcgcactggatggcccaacctatctggcgcagctgggcgggcttctgggcaggacggtcgatgtggccgcctgggtagctgcacggcaggccgccagccatcctcagttcgccgtgctgcatcgcctggaaacgctgcagttgccgatggcggtgctgaccaacaatggggcgctgatggtgcaggcattgcccgccttgctgccggacctgtttccggcgctgcagggccgcgtgttctgcagtgccgatttcggcctgcgcaagccaacgcctgcggtgtttctgcgcacgctggaagcgctgggcgtggcgcctgctcgaacgttgttcgtcgatgacctgtttgccaatgtgcgcggcgcacgcgccgccggcctgcacgccgaaacggtgcgcgacggccgcgggttggggaaggtgttgaagcgctacgcaatcctgtag

SEQ ID NO: 528080 - DNA, 285 bp, Stenotrophomonas maltophilia
atggcgcagggcaaggcaccgtggtgcggcgtggccagttggctgggcatggtggtcggctggggtgcgggcacaatggctgcacaggcggcggtggcggccggtggcaatggcctggccgcggggatgggcgtggcggtgctgggtgcggcgctggtgggtgccggctttgccgtggcatcgcgcgtgcgcggcgagcgttggccgtggatcggcattgccggtgcggtcgtgagcgcgctgccgctgctgatgtacctgctgcggatgatgttgaaactgtag

SEQ ID NO: 528081 - DNA, 651 bp, Stenotrophomonas maltophilia
atgcgctctgctgtttcccgcctcggccgcctgttcgggccgggggtgatggtgtttctgttgcagctggtggcgctgctgtcgcttggcctgggggccagctgcttccactcccgcgtggatctgctgctggtaccggtagcggatggctgcggtggtcccgatccggtggcacgcctgcgcgtggccgagcaactgctggcgcgcgccgaggcgctggatgattggcaaccgctgcgctggattccgctggtgggcacgctgctggcgcttctcggcgcggcaacggtctgtgcgctgcgtgccatgccccaacagcaccgcctgggtacgctccgccgagggctggtggcgctgcatgtgggcgtgctggcgttggcagggtggacgctgcacctgtacgaggatgcgtggagcagcgtggcaaggctgtcgccggcggcctgcctggtggacctggccgagcagggcggggtgccgttggcacaggcccagcaggtggtgctgcacgtgctcacccgcgaatacgccccgttgcagcgcaacccggatgatctggcgatgatggcggtatcgctgctgatgaccgcgatggtggccagtatcgtgctgtggcgtgcggcggccaagggtatgcggacgcctacctga

SEQ ID NO: 528082 - DNA, 681 bp, Stenotrophomonas maltophilia
atggtgacgttgtacctggtggtgcgaacactgctgccactgctggcattcgcactggcggcgtggggagtgtcgcgcctgatcaaggcacgcgttgcccgcctgccgccggttccgctgaacctgcctgcgcacagcagcagcccgcgcaagaaggaccgacggctgtacgcacgtgcactgcgtcgccggcccagcctgcgcaccgcaacccgccccgccagcgcaccgcgcagctggcatctgctgggcgtgatggtggcgatcgctgcgctggcggccacggtgctggccatgcccgacggcgcacgcttccaggtgatggtcgagagcgtgcgtggctacccggtcacgctggctgaagtccgcgtcccggcggcggcacaggccgtagtgctgcagcgatggcgaccctcgcttgcgccgctggcgcgcccggtaacgatgcgctatccgatcggccgcttcggcggcgaccatgaagcgcgcgcatggcttccggtgcagatccgccaccttgacgatcgattgcaggtggccctgcccatcgccgtggatgcggtggcattgcaggccgagctggcacagttggcggggcttgcgaccggggcggtttcggtgcgccaggcgcaggtagcgccttggatggacgcgggctgggaaccgctgggcgacccgtag

SEQ ID NO: 528083 - DNA, 897 bp, Stenotrophomonas maltophilia
atgatcgatattcgctgttgggttgaaaagttcaagagcctgagcaccgaggtaaagctgtacttggtgggcttggtgccgatgaccgtgtggttcttggtcttgcttctcaccaagaacactggctggtctactgggattctcgccttgtcatgctcgtgcatggcgctaggcgtcattgcccgactcacgcctcttttccaaagagcacgacgtcatcccgcagttcgacgcgcggctatcctgtttcacctgggagtactgctgcttgttgccatcattgctcgcaatgtaatgacagctgcaacaggacttccagggcaggacttcgcactggcaagcagcgcgcttgtattgccgctctatccatttgtatgggtgtggcttgtggcctttgctgctggcatcgctgcgattggcttacagatatatttcctgttggcgatgttcgcgcaggccattatccccgctctttctccctggaaaggcagcgggcgcacggaatcccttaagcggatggcagcgcttggaggggcgcgattcgttggaatgctgaccctgttcctggtacttaatggtgcgcttcagtacgccgaaagctggcagtttgaggtcgagcgctttgcaagatgggtcgcgtacgtcggtgactaccaggctgccagtcgctatccaggaattcctgaaaatgagcgattcttgatgcatgccaacggcgtgtactccatagctcgtcgtgtgcccggaggtgacgtatcaatagatgttcactactgggagggcccgggtacggaacccaagaatcaaaaatcctccggcgtggcctgtccagcaccagccattggcgtgccgaaggtggatgctgcgcccgagactcttcgaaaatcaactcgatga

SEQ ID NO: 528084 - DNA, 210 bp, Stenotrophomonas maltophilia
atgacccgaatcgatgccgcatggctggaagcgttcgacaaggaactgctgtgtctgttcgccatcgaccacaacgatgccggcatggatgagttcctgctgggctgctacgcagaccttccgccgcgcgaggcggcgcttgcctttggcagcgactatgacctggagcgcgacgatgcgctatggccacggcccggcgtgcctgtgtga

SEQ ID NO: 528085 - DNA, 426 bp, Stenotrophomonas maltophilia
atgccccgtttgaacgccgccctggcactgaccttcgttctgatgctgctgggcgctttgcctgccatggcaatggatacagacctccgtattttcacggaggtgtttgtagaggccggggacaaccccaccttcaaggtgcagcaggtgcctgcggtggtgtattcaacgccaccggtcacgacggccgacacgttgccgcagtttcccctgcaggtgctgttggtggctcagctggatgagctgggccacgtgtccaacgtgatggtggcgcggtccagcgggcggcgggagtttgatcgtgcagcgcttgatgcggtggatgagtggcgcttcgatccggtcgtggttgagggcgtcgcgaagcacgcgcgggttcgggtccgtttgatgttcaccccggagaccgaggcgcctgccccctag

SEQ ID NO: 528086 - DNA, 1404 bp, Stenotrophomonas maltophilia
atgaaaattaacattggtaactttggtccaataaaaggtgatgctgagattgagcctggtcgcctcaccgttataagtggtgcgaataatacagggaagacgtatctgatgtacgttctctgggctctctatcagcggagagtaacttatgtatttgatttttcaaatgggctggcgaatgaattggctgccaagaatacgctgcgtatagattttgttgagttctttagtgagcactggggcgtgattcagcgaggtatcactgagggtctcaagaggaatctttacgatatttttagcgccccggcaggcgcttttagtggggcgtcaatctcggtaaagtttgataaggataagttcgttgattttgctggaagaagctcgagctataagaagagaatggaatccggggcgactggcctcgacgtaagattccacagggagaaaggaattctctggctatccattagcatgctctccgcctctacatttccaaaggcactgcttgccgaaatactctcggctctggtcatggaaatggttattggagcatatgcaagaggcgcgttcttgctcccggctgagcgatcaggactcaatctcttttatcctgaccttgacgcgaaaagctcggctattctccgtcacttgaagagggacgctaataatccattcgagctgatcaaggacatgatggttgcccagtatgcggaaccgattgatgcgtatctttcgttcttgcgtcaagcgccgaggatcactagaaagcctggcgagatgcatgttgaagcgctacggcttcagaaggatctggcgcgagttaggtacaaggttagcaaggacggtgtcattagcgttaagccgtaccgggcaaaaacggatcttggaattcaccttgcatcgtcaaccgtaaagagtttctacgggctgtgggcatggcttgagggcgctgcgaaggccggggactgtgtaatgatagacgagcctgagcttaatcttcatccggataatcaaaggctcgttgcgaggcttctggtgaggcttgtaaatattggcatgcgagtggttattagcacgcattcggattatattgtccgagaaataagtaatatgataatgctgtcgcaagacttcccggagcgcagatcgctggagaaaaagtttgggtacaaccaagatggtgcggagcggatgtcgccggatctagtggcggcctatgcattctccgataatggcgttgagcgcagtgaagtgagcgctggatttggtatagaggttgttggcctggatcgatctatcaattccttgaatgaaagcaattcttcgatttattttgctgtatctgaatgtattaatccgttctctgatgcgaaggctgtcgacgtcagcggtgagaaggtctga

SEQ ID NO: 528087 - DNA, 381 bp, Stenotrophomonas maltophilia
atgcgcgcctgctggctgctgctgatgctgcttccatccctgccggccctggccggcagcagcagcgcgcagacgctggagtggcgccagcaggatgcacggctggcgctgcgctcgaccgaaggccaggtgcgggtcgaagccgctgcccccgaagcccgcttcggcgtgcgcagcggtgaccgcatcctgcgcgtggatgacaccgccgtgcgcaggatcgagcatctgaccgaagccctgcgccactccaccgcccccaccgcctacctgttgctgcgccgcgacaggcgcgaactgaccgtgccggtgaatgcggctgcctggcgcctggcactggttgctccggtgccgccgccaccgcctcctccgccgcggtaa

SEQ ID NO: 528088 - DNA, 180 bp, Stenotrophomonas maltophilia
atgcgctggatgaagtggcggcctgagcggctttcgcatctgccggccagcggccggcacgacccgaccggtagtgccggccgctggccggcaaacgccagactcggctacaccccggcctccaccaggtggtcgatgaagctgcgtaccttcggtgccaggtggctgcggctggtgtag

SEQ ID NO: 528089 - DNA, 1173 bp, Stenotrophomonas maltophilia
gtgagtgctgcttcgcctgcgcatgccgtgccccctgtgcgccatccatggtgggccgtcagcgcggttggcctggccacgttctcggtggtcaccaccgagatgctgccggtcggcctgctgaccccgattgccgaagcgctcggcgcgtccaccggtaccgccggcctgatgatctcgctgccggccctgctggcggcgctgttcgcaccgctggtggtgatcgctgccggtggcatcgatcgtcgccgcatcctgtgtgcactgctcggcctgctgacagtggccaacatcgcctccgcgctggcgcccagcatcagctggctgctggccgcgcgcgtactggtcgggttctgcatgggcggcatctgggccatcgccggtggattggctgcacggctggtgcccgcgcatcgcgtcggcctggccacctcgatcatcttcggcggcgtggccgcggcgtcggtgctgggcgtgccgctcggtgcactgatcggcgacgcgctgggctggcgctgtgcgttcgcggcgatggcgctgttcagtgcggcgatactgctgctgcagcctgcggtgcttcccgcgttgccggtggcgaggtcaattcggccgatgcagttcgtgcagcagctcggccatcgcggcctgcgccagggcctgtggctgaccctgctgctggtggccgggcacttcatcgcgtttacctatgtgcgtccgctgttgacgcacgtatcgggtgtgcaggcgtcgtggatcggcggactgctgtttgcctatggcctggccggcatcgtcggcaatttcgttgccgggccactggccgcacgccatccgcgcggtacgctgctggccatcgcctcgggcctgctgctgacgccgccgctgttgctgtggatgggcggcacgccagcgggaggcatcacggtgctgctgctgtggggactggcctacggcggtgtgtcggtcggcctgatgggctggatgatgaaggcggtgccgcaggcggttgaaattgctaccgcgctgtacgtgggtgtgttcaacatcggcatcgcgctgggggcgtgggccggaggcaggctgctggacagcaccgggctgcacgccaatctgtgggctgcggcggtgttggctgcgagcgctctgctgatggttgccactacccgcaggtag

SEQ ID NO: 528090 - DNA, 345 bp, Stenotrophomonas maltophilia
atgcgcctgttcctgcttgcctgcgtcgctgcgctgtcactgggcggctgcgagaaatccagcaccacctcgatcacccgtacccaggccaacggcgtggacacgctgtacagcaagggcaccgtggtcgagggtcaagcgcggttccagtgcatcgccagccgcagcggccagtgccactatgtggtgctggacccggcctgcagcaccgatgcggcctgcgccaagccgccgctgcgccggttcgcggtggcggtgggcaagaccgaagcgatgcgcgacctgcccaagggcttccgccagtccgtcagccaggacccgatagaacaatgccaccgtgagtga

SEQ ID NO: 528091 - DNA, 681 bp, Stenotrophomonas maltophilia
atgctgcgccatggtggggcgtgggtgctggcggtcggcctggggggttgcgcgccgcccgatccgccggtgctggcgccggcgccggcatccccggcggcgatcaccccggcacgccaggttgccagcaacgacgatgctgcagcacatcgtccgatcgaagacgcaccgttgccaggcgcagacgatgctgccgatgacgacagtgctccggcggtggtttcggtggcactggaccatgccggcgaggtgctgatcggccaacctttcagtgaactgcagagcgaggggcagtggcactcggccgggctgagcgaggcgacctccgggcgctgtgagtattacgagcgcggcacgctgcctgaaggcgtggcgatgatggtgcaggacggtgacgtggtgcgtttcgacctggcccccatcgacgattcgggccaggtggtggtccagccggggccgttcggcctgcacctggacatgccgcgcgcgcaggccctgcagctgctgcccaagggcgtctccgcccagccttatggcaaggatgtggaggccggcgagaccctgctctggcaggaccccggttccgacctggcgatccgcgtggagatcgtcgacggcaccgtatcccgaatgtactggggcgccagcggcgccgttgacctgatcgaaggatgtacctga

SEQ ID NO: 528092 - DNA, 708 bp, Stenotrophomonas maltophilia
atgaccgacgcggcgcccctgccgacgccgcaacgcccggacacggcggatgttgcacgcctggccgactacggcgcgccactgctgcaggcgttggccgcgcgcgacgtcgcgttgccggcgaccgccggcgatgggctggtcgaggcgctggcacgcatcgcgctggcgctgcaggctgccgacccggcacgcctgcgccggcaggaaagctggtggggccgcctgcttggccgcgatgtcgagcgtgaggccgcaggccgcggcctgcagtcgcggctgggggtcctcgccctgcaggcacgcgagcaggcccagcagctgcagcagcacatggccgtgcgtgccaccgcgatcagcgcgaccggccaggccgccgaagcactgcaggcctgggcggacgcggccgccgcggacgtgccagcgatgcagggcgccggccaggaagcactggcggcgcgcatcgaccacctgcagcggctggcggcgctgcgccgcatcgaagccgggcagtggcagctgctgcagcaacaggacgaggtgctgctgcagcgcttcgcccgcatccatgatgtcctgctgccagcgtggcggcaggccgcactggccgcgcaggccgccaccggcgcggtccgtgccggccaggcggccacgctgcacgcacagatcgacgacgaggtcgcggcggctcaggctagactgcgctga

SEQ ID NO: 528093 - DNA, 2937 bp, Stenotrophomonas maltophilia
atgtttgattcatcaggggatctacacatgaccatccgcaaggcgctcagccgccacccgctgagctttgcgctcaccacggccctgctggccaccggcatcgctccggccttcgcccaggaagctggcaacgaagcaggcggcaagaacgcaaccaatctcgaccgcgtctcggtggtcggctcacgcatcaagcgctctgatgtcgaaggcccggcgccggtgaccgtgatcacccgcaccgacatcgaccgcgaaggtttccagaccgtcggtgacatgctgcagacgctgacccagaacaccacgtcgtccttcaccggcgacctggccgttaccggcttcacccccaatgcccaggtggtcaacctgcgcaacctgggtcccggctacacgctgaccctggtcaacggccgccgcccggcgcagtacccgcagccgtacaaccgcgacaacaacgtcgccaacatcaactcgatcccgagcagcatcgtcgagcgcgtggaagtgctgaccggtggtgcatcggccatttacggctccgacgccgtggcgggcgtggtcaacatcgtgctgcgtgagcactacgacggcaacctggtgcgcgtgaccgccggcacgactgccgaaggcggcggtgacacggtcaacgtggaactgaccggtggccgtaccggtgaccgctggagcgcggtgtgggcgctgcagtacagcgaccgcgagccggtgttcgccagccagcgcaagtggctgtccgacctgcgcgagggtccgctgggcagtacggcgaccccgaacctttcgatggccgtcattcgtggcctggcctccgccaatggcccgctcaaccacaacgtcctgtacccgggccaggagaagtgcgacgcactgggcttcgacacggtcaccaccgcgtcccgcggcaagtactgcggctcatacaccagcaacgccgcccgttcgatctccaacaagcgccagttctactcggcctacggttacggtaccttcgacttcaccgataccacccagggcttcgccagcgtcaactactacaccaccaaggccaaggccagcgcgggtacggagttctgggcgacgtcgggcgaccgcttcaaccagaccagtgccggtgcagccacccagtacttctgggacccgaacctgaaggatatggtgtcgctgcagcgcatcttcactccgcaggagctgggcggcaacgaagcagccagcaccctgtatgacgagtacacctacgacttcaacgtcggtgtgcgtggcaacttcgccgaccgcttcgactgggaagccagcgccggttacggctactacgactacaagatggatcgcccgcgcctgctcgcgcaggccgtgcatgactacttcctcggcccacgcctgggctacctcaactccaccggcggtaccaccggcaacgcgatctatccggtctacgccttgaaccaggatcgctggacgtcgccgatcacgccggacatctaccgctcgttctcgacgcgcgtgatcaaccgttcggagaccagcgtcgccaacgccaacttcaacgtcagtggcgatctgttcgatctgccggccggcgccctcggcttcgcgggtgtgctggaatggaaccggcagaagatggacatggtcagcgatccgcgcaccgatcagttgcgtccgatcgacaaccagaccatctacaacctgaccagctcgggcgaaacccacggtacccgcgaccgctacgccattggtgcggaattccgcgtgccgatcttcagcagcctcagcgccaatgccgcggcccgctatgacaagtacgacgacatctcgtcggtcgatgcggccaccacctacaacttcggcctggaatggcgtccgttcagcaacctgctggtccgcggcagctacgccaccagcttccgcgccccggacatgcagctgatctacgcacagggtgcggcgtcctacaccaccgagctcgacgagtatgcgtgccgctcgggtaccggtgccggcgcagcgcagggtccgcgtacccgtgccgcctgtaatgccaccgccaacgatccgaccaagtactcggtgcagaccctggtggcaggcaaccccaacctgaccgaagagaagggcaagtcgtggggcgcgggcttcgtgtgggacgtgaccgatggcatgtcgctgacggttgactactaccgcatccgcctggaagacgccgctgcgcagctcagcaacgactacctgctgcgctccgacgccgcctgccgcctgggcagcaccagcgacccgtcgcgcccgatgccgagcgctgcactgtgctcgcagctgtcgaccctgatcacccgcgtcaaccagccggacgctccggacaacggccgcatcagccgcatcaacaatgcttacatcaacaccgcgctgcaggacaccagcggcatcgatgccagctacaagtacaacctggacaccgatcgctggggtcgcttcaacttcgacctgggctattcgctgaccctgaccaacaagtacaagcagctgaaggatgagccgctgatcgactaccgcgatctgccgccggagtactggaacccggaacgcagccgcgcccgcggcagcgtcacctggtccaagggcgactgggcaaccaccgtgttcggtacccgctacggctcggcattcagcagccttgacacggcgggcaccaacagcgcgggcggctactacccgcgtcgcctgccgccgttcttcctgtggaacctgagcgttggcaagaagttcggcgagaacgtgctggcaaccttccaggtggtcaacgtgttcgacaaccagtaccgcaaggacaacagccgtaccgcctatccgttctatgacccgttcattggcgccgacccgctgggccgtcgcttctacatgagcctgcagtacaagttctga

SEQ ID NO: 528094 - DNA, 831 bp, Stenotrophomonas maltophilia
atgaaatcccgcacctccctgctggcaccgctgctgctcgcgctggctgtgcctgtcacgtccctcgccgcgcctccggccccccaggcgccttcggcgttgccgtccgatcccaccgaagacccgttgctgatcagcgcaggattcctcaatggccatcccgacctgcgcttccgcatgctgggcatggaaaagcagcgtgccaacgacctgcaggcggccttcggcttcttccagcgcgcgggcttctacggcgacaaggtgtcacaggcgatggttgccgaaatgctgtggaacggcacgggcaccgcggtgaaccgcccgctggcctatgcctggatggatctcgctgcggagcgtggctacaagggcttcctcgagctgcgtgaacgctactgggccgcgctcagcgaggccgagcgggtccaggccgtgaccgagggcgaagccgtctatgcgcgcttcggcgatgctgctgcggaaccccgcctggcgttggccatgcgccgcgagcagaagcgcatgaccggcagtcgcaccggtttcgccggcaacgtgaagatcctcgtacccggtccgaacggcaccaccgaacagatcgatggcaccaagttctacgacagccgctattgggatcccgcgcagtaccgccagtggcaggacaccatctggtcgacgccgcgggtggcacgtgtcgacgtcggcagcgtgacacagctgcctgcggaaccgggccgcccgtcccgcattccggaggtggctccgcagccggatgccccggagccgaagaccgacgatgctcagccacaaccgattccggaacaacactga

SEQ ID NO: 528095 - DNA, 2412 bp, Stenotrophomonas maltophilia
gtgaacgtcgttgggtttcccgccgctgccgtcatggcatgcctgctgctgccagccactgcctctgcctctgccgcacgttgcggctcgccgctgcgcatcgcctggccatccgaccgcgcgccgttgtccgccaatgtgcatggacaggcgagcggacccggcgcggactacctggcattgctggctgcacagcgcccgttgctgccgcagccgctgccggccgtcgcggtggtcgagggcagggtgcccggcaacatccaggccctgctgggctggccacgttcgcagctgcccccgggctgggtggccagtgcccccttcctgcagttgccgcaggtgatcgtacggcgccgggatgcgccgccggtgctgggaatggcggcgctgcgcgggcgcaccgtggccagtccggaccccgagccgttggccgcgctgctggccgaacaggcacccggcgcacagctgcttcctccggcaccgctcgatgacgcgctctcgctgctgggcaccggcctggtcgatgcggtgatcgccaatctcggtgaggtcgaggccgccctgcggcgctaccggggagatccactggtcatcgctgcaccggccggcttcgacgatgcgctggtgctggccacggtgcccgactgtgcgggcgtcatcgatgagttcgagcaggcagtgtccagtttgagtggcgcacgacgccaggcgatgcgtgcggcctggttgccggcggtgccgcgaagccagtcgtcactttcagcactgcactggctggtgccggcctcgctgatcctgctggcgctcgcgctggtgtacgcgttcggctattggcgcgtgcaccgcgaaagcgagcgacgccgcgtggccgcccagcggctgcaggaggtgacctcgaatctgccggcggtggtgttccaggcgcgtcgctcggcagaaggccactacagcattccgcagatcgcaggggatgtacatgcgctgttcgggatcagcgtcgagaccgcgctgatcgatcatcggcgtctgctggccgcggtccaccccgacgatcatgcgcggctcacggaagcggtcgatgcggccgcgctggcgcgcgagccgatcgatgtcctcttccggacgcagtcgccgcagggctggcgttgggtgcattcgcatggacgaccgctgccgcgtggtggcggcgtcgtcgagtggagtggttactggatggatgtcagcgaagtgcagtcgcgcacccttgcgctggcacaggccagaggcgaggccgagcaggtggcgttggccaagacccacttcctggcgacgatgagccacgagatccgtacgccgatgagcaccctgctggggatgctggaacggttggccgacagcgacctggatgcgcgccagcagcaggtgcttgccacggtgggcgatgcggcgaggatgctgcggcagatcctcgacgatgtgctgcacagccagcgcctgcagcctgcgccattgcagctgcggccgaccgatctggcggcgatgctgcgggcagtgcagcagctgctgatgcctgttgcggccagccggggcctgcatctgcgcatcgaactcgatccggcgttgcaggccgggctgcttgctgatggcctgcgcctgcgccagatcctgttcaatcttgccggcaacgcgctgaagttcaccgagcacgggagcgtggacctgcaggtgcgggtgctgcagcacttggaggatggccagcggctgcgcctgcaggtgagcgacagcggtgtgggcatcagtccggaacggcagcaggcggtgttcgccgcctacacccaggccgagacgtcgacgacgcgccgcttcggcggaagtggcctgggcctggcgatctgccgcgaactggcggcgtcgatgggcgccgaactgcagctgcgcagcaggcccggcgagggcacgacggtgtggatggagctggacctggcggcctgcgagcagcctgcggaggcatcaccgccgccggccgcagcggtgccggcgctgccgcccgcctgggtgctggtggccgaagaccatcccaccaacctgcacctgctggagcagcgcctgcgcggcctggggctgcatgtgcatgcctgcacggatggccgcagggccctcgaggcctggcaggcgtggccgttcgatctggtgatcaccgactgccacatgcctgacatggacggattcacgctggcgcgcgcgatccgcgccgatgcctgtgcagcccgtgcgcgggttccgatcatcgcgcttaccgccagcgtgctggacaggacgcgcgaggcctgccgcgacgccggcatcgagcatttcctggccaagccggtagaagcgccgtcgctgcacgcgctgctggccgtactgctggtaccggactcaacccgccagtaa

SEQ ID NO: 528096 - DNA, 429 bp, Stenotrophomonas maltophilia
atgatgtcgcgcgcggcagtgctggttggcgtggcaatcctgctggcgatggtggttgcggccgttgccgaatggacggcacgcgtgtgcagcaggctgcgtgcgctgcgcagggccagcgtgctacgcacattgaacgctgacgaggacgccgctctggcgcccctgcgcgcaatgacgggcatcgtccacgacgatcaggttcgattgctgcgcggcgcgttcatagggggcgcttaccgccccaggcacccgttcaacgatggcatgctcggtggcattcccgtgctgtttccgtccgctgcacgcgaccacatggccgcctggaacgaagcggaggtggtgcttgccgaccgttgggcggtcattgtccgcctcaacggcgtgcagatcgccccccgatcacgctcacggcgcgtccggcactga

SEQ ID NO: 528097 - DNA, 648 bp, Stenotrophomonas maltophilia
atgatgctggatgcttccaccctggccgcgcagctgcggcacccccacggcgacgccgcacaggctgtagccgaatcgatgaaccgcagcaatggcgcgctcaaccgggccgcgatcggcctgctggcggtgacctcaggcgaacgggtgctggagatcggccccggcaacgctgcgtttgcgccgctgcttctgcaggccagcgacagccgctacctgggcatcgaactgtccagcgccatggtcgaggccggcaaccggcagctcgtcgccgccgggctggccgagcgggccgggatgcgccatggcgacgcccatgccctgccgatcgccgatgccgcgatggatgcggcactggccgtcaacaccctgtacttctggccagacctggcgccggtgctgggcgaactggcacgggtcgtgcgcccgggtggccggctatgcctggccttcggcgatgccgccttcatgcgcagcctgccgttcaccgccgatttccagctgcacgagctggatgcagtggagctggcgctgcgtgtcgccgggttcggcgtttctgcctggcgcagccaccgcgaaaccgcgcccggcaacgatggccaggcccgcgaaaagcacttccatctgctactggcacagcggcgctga

SEQ ID NO: 528098 - DNA, 1365 bp, Stenotrophomonas maltophilia
atgaaccctcctgcatctcctgctgcgccggttgcgcagccgctgtggcgcacctatctgaccctgctgcttccgatgctgctgaccaatgcgctgcagttggccgcaggcacactggacaacatctatctggggcacctgcttggcacgcaggccgtggccgccgccgccgcattcttcccggcttttttcctgctgctggcgctggtgatgggcctggcgaccggtgcgatggtgctgatcggccaggcctggggcgccggtcggccacaccaggcgcgagcggtggcaggcagcgcggtggcgctggtgctgtcgctgtcggtgctggcgatggcggtgggcggcctcttcgcgccgcagctgctggcagcactgggtacgccggcaccgatcctggacgaggccatcgcctatgcgcgcgtgttgttgctgggggcgccggccttcttcctgctgtggctggcgaccgccgtaagccgcgcggtgggcgatgcgaagacgccattgcacgcgctgctgctggccacaggggtgggcctgttgtgcacgccactgctgatcctgggctgggccggcctgccgcggctgggtgcggccagtgcggcggtatcggcggtgttcgcttcgctgctgggcctggtctggttgctgtggcgctggcatcgtctggcacacccgttggcgccgggccatgatctgctgcgcgccatccgtttcgatcgggggctgatccgctcgatgctgcgcatcggcctaccgtcctcgctgcagatgttcagcctggccattgccgagatcgtgttgctgggctggatcaaccgctacggctacacggccacggcggcctacggtgcggtcaaccagttgatgagctgggtgcagttgccagccatgtcgctgggcatcaccgccaccatccttgcggcccacgcgatgggcgcggggcgtgcggcgcggttgccggccatcgcccgcaccggcgtgctgctggggctggcgttgctggcggcggtggtgatgctggtgatggcattggcgccctggctgagcggcctgatcctggcggcgccggaggtgcgcgaactggccgcgctgcagctgcgtacggtggtctggggcgtgctggcaatgggtgtcaccgcggtgctggtcggggtgatgcgtggcagcggcacggttttgctgccagcgttgctgggcatgtcggcggtgttgctggtggaactgccgctggcgatgtggctgcaggcgcggcatgggctggccgggctgtggtgggcgtggccgctgggattgctggcgatgctggtgatgcaggtgttctgtttcgcgcgttggcggcgacgggtgcaaggcgggtaa

SEQ ID NO: 528099 - DNA, 630 bp, Stenotrophomonas maltophilia
atgcctgcgtcccgacttcctccgttcagctgtttcgacggccatcgcctggtggcgtccggtaccccggaagtcgccgcgttggcgctgaaacagctgcgcgccgacaacgccgccggtccgctgctggtgttcgacaacgccaccggccgcacccgcgatttcgatacgcgcggcacggatgcgcagctgctggcgcgggtggccgaggcgttcccgccggccgtggaagcggatccggaaaccccggtcgacgatacacctgcaatcccacgcggccgcggtcgacccaagctgggcgtggttgcccgcgaagtgacactgctgccgcgccattgggcgtggctggccgaacagccgggcggggcctcggtggtgctgcgcaggctggtggaatcggccagccgtgccggcgcggacagggatcggcagcgccgggacagcgagcgtgcctatcacttcctgcagaccatcggcggcgacctgccgggcttcgaggacgccatccgcctcctgttcgcgcatgaccgcgcgggttttgaaacggcattgcacgcgtggcccgacgacgtgcgcacgcatgccctgcgcctggcgttcgatgaccctgccagcactgccgacggctga

SEQ ID NO: 528100 - DNA, 768 bp, Stenotrophomonas maltophilia
atgcatgccctgatcctgctggcccatcccgaaccgcgctcgttcaatgcccatctggctgcccaggcaaccgagcagctgcaacatgaaggcctgcaggtggacatgatcgacctgtacgcggatgccttcgacccgctggaagcggcccgccaccatccgcagcgcctgcggcccggccgcttcgatgcgcagcgcgagcagcggcacagcgccgagcagggacagctgccggccgaggtgcagcgccacctgcgcctgctgcgggccaccgacctgctgatcctgcagtttccgctgtggtggttcgcggcgccggccctgctgaagggctggctggatcgcgtgctggtctacggaccgatctacaacagccggcagcgccacgagcacggcatgatgcgcggcaagcgagcgttgctgagcgtcaccaccggctcatcggcgcgggcatgcgcggtggacggccgcgagggcgacacccggctgctgctgtggccgttgatgtacagcctgcgctacgtcggcttcgaggtgatggagccgcacgtggtgcatggtgtgcgttccgggcttccgcccgaacgtgtgcaggcacacgatgccgcgctggaggccgccaccggcaactaccgtgaacggctggcgcactggcaacaatggccgagcgtgccgttcaacaacagcgaggacttcgaggagggcgtcgtgcttcgtgcggacgcaaccgcgttcagccccttcatccgccatcgcaacggggaatga

SEQ ID NO: 528101 - DNA, 507 bp, Stenotrophomonas maltophilia
ttgaactacaccctccgcaatgaagccgcggccgacatcgccgccatccatgcgctgacagccgcagccttcgctaccgccgagcacagcagccataccgaacacttcatcgtcgatgcactgcgcgcgcgtggcgagctggcggtttcgcttgtggccgaggtcgatggcgagcgggttggccatgtcgcgatttcgccggtggcggtcagcgatggcagcagcggctggttcggcctcgggccgatctcggtattgcctggatggcaagggcagggcatcggtgcggcgttgatgcatgccgcgcttgaagccctgcgccagcaaggagcacggggctgcgtgctgctgggcgaaccgggctattacggacgcttcggtttccgcgccgaaccaggcctgatactgccgggtgtgcccgcggagtacttccaggccctctgcctgcgcccaccgatggcgcagggcgaggtgcagtactcaccggcattcgaggccacctcctga

SEQ ID NO: 528102 - DNA, 675 bp, Stenotrophomonas maltophilia
atgcagcagccaacgatggactgggtggcacaggcgcgcgcactggcgacccaggcccatgccgggcagcaggacaaggcaggccagccctatatcgagcacgtggcgcgcgtggcggcggcgatccatgacgatgacatggccaaggcggctgcctggctgcacgacgtggtcgaggactgcccccagtacgcggcgcaggtgcaggcgttcccggcgccgatccgtgacaccgtgagcctgctcagccggcacaccgccgctgatgccgatcagtactacgcgcgcatccgccagcatccacttgccctgaaggtgaagttggccgacatcgccgacaacgcccacccgcgccggctgctgcagctcgccccggcactggccgaccgcctgcgcagcaagtacgccgccgcgctggtcgcccttggcggccaacgcgcggccaccgccacacccgctacggcaaccacacggctgctgcagctgatggatgcagcacacacgttggcagcgctggccagcgaacctgaagtgaccgccggcggcggccaggacgctccgtacccacgccaggcggcgctgctcaccgtatgcgaagtcgtgcgtgccgaagtggaggcacagatgacaccggagaccttcgtcatctggagcgacatgtacgtgcagccctga

SEQ ID NO: 528103 - DNA, 645 bp, Stenotrophomonas maltophilia
atgaccccatccccgggccgccgcgagcagcgcaaggccgagacccgacaagcgatttcagacgtcgccaccgagctgatcatccggcgcggcttcgaggcggtgtcgatgtccgagatcgccgaggccgccggggtctcgcgcaagacggtcttcaactacttcgccagcaaggaagacctggtcttcgaccgcgacgaggaggcgcgcgctttgctgcgcgagggcatgctggcccacaacgacatggccccgctgggcgccttccagtcactggtacggcaactgctggacagcggccatccgctgctgcggatcaacgccggcgcagcggcgttctgggcgaccgtagccgacagtcccgtgcttgtcgcgcacgcgcgcaggctgcaggcgcaactgagcgacgacctagcgcagctgatggccgatgctgccggcaggcccgccagcgatgccgaggcaaggctgggcgcgggcatgctgatggcgtcgatggtggcggcctacgagaagggcctggccagccagcggcagggtgaagacccgcgcgaggccatgcagcagctgatcgtgcgtggcgccaccggggtgctggtggccttggcaggcacgccgtatacagacccggccttgcgtccatag

SEQ ID NO: 528104 - DNA, 2142 bp, Stenotrophomonas maltophilia
atgcccctttccgctcctctgccgcgcgccctgtgccttgcgctgggcctttccctgacctccctcgcactggccgccgagaccccggcagacgcccccagggacctggacaaggtcgaagtccgcggccgtgcgcagaccctctaccgcgccaccgatgcggccgttggtactcgtaccgacaccccgctggagctggtcccgcagtcgatccaggtgatcccgcgcgagctgatcgacgaccaggccgcgcgccaggtgaccgacctgtaccgcagcatcagcggcatcagcttcttcagctatgccggcgtgaccctgcgcggtttccgccaggagaacgtgctgtacgacggcctgcgtggcgatccctatgcaggtttctcggtaccgcagctgttcaacatcgagcgcgtggaggtattgaagggccctgccggtgcgctgtacggcggcggcgatgccggcggcgtcatcaactatgtgacgcgcaagccgaaggctcgtgccgagcgccgcatcgagctgcaggtgggcgacaaggatttccgtgcgggctcgatcgaaggcaccgggccgttgaatgccaccggcagcgttcgctatcgcgcaggcctgtatgccgacagcgaacagggcgtgcgctggaacgccgacagcgaaagcgtgatcggcgatgcgtcgctggcctttgatgtcggccagaccggcgaactggtgctgcagttcaccgacatcacccagaacctgggcggcaaccgcctgcgcggtgtgccggtgaacgatgccgggaccttcctgaccgaccgccgctggaaccacaacgaggccaacgacttcctcgacatgcgcgccaaggtggcattggtgcagtaccgcttcgcaccacgcgacacccttgatgtggacgttgccgcacgctggttcagcaacaacgaacaccagatgtaccacgagccgatggggctgatcgaccgtgaccgcgatggcgtggccgagtggatgacgcgccagctgcgcaaccagatccgcgacaacgaggcgttcaccgccagcgcgaatgcggtctggcggatcaacaccgggctcatcgaacacaaggtgttgttcggcgccgatgtgtaccaactcgacgccgacttcaccgcgcagaccgccaacagcgccgacctagcacgcggcgccggcccggtgcgcggcatcgatctgttcaacccggtctatggcgccagcacctggcatgactacaacctggccgccctgccctggcgcagcacctccacgcgcagcaagcgctacggcggctatctgcaggatgagctggcgctgggcccgcgctggcacgtgctggccgggctgcgctgggatggcttcaaggatgaggaccgcctgggtggcagcggcgtggaaggcaacgacctcagctggcggctgggcagcaccttcagcgtgcgcgaggggctgaacgtatacgccaacgtggccagtggcttcgtgccgcagagcgcggccaaccagaacccggccgcgggcggcccgttcgatgccgagcgcagcaggcagtgggaggttggcctgaaatccctgctggccgaccgcgtgaccttgaacatggcggcctaccgcatcgaccgcagcaacatcgtacaggccaccggcgaggtgatcggcggggtgaaccagctggccgcactgggcctggtgcgcagcaccggcatggaactggacctgctggccgacatcaccgagcgctgggtgctgaatctgacctatgcctacaacgacgcgcgggtgaaggatgccggtccaggcggcatcaccaatgcctcgggcgaccgcttcgccaacgcaccacgcaacaaagtgggcctgtggacgcgctatgacctgccctcgatcaactcagcgattggcttcggcgtggatcatgtcggagaacgtgtcagcctggacgggcagacggtgaaggcctacaccgtgttcgatgtgagctggaagaccacgtggaagcagtggcagttccaggccaacgtcaagaacctgttcgacaaggtgtacgccgccagcggcttcatcgagcgcaacgggcacttcccgggtgaaccgcggcgggtgtatgtgcaggcggcctacagcttctga

SEQ ID NO: 528105 - DNA, 627 bp, Stenotrophomonas maltophilia
atgatgccgcgtccgggtctgacaggaagcctgcatgtgacacagggagcgcatccctcttcgtctaccacgcgtactccgccccccggctgtacgtccagtctgaccgcggcagcgtggaatcatcgcgcgcgaacgtggcgcagccgtggcggcaagcactggccgcactggctgcggatacctgccgaacccgagcgggtggacgccctgatacgcctggccggcgcactgttcctgctgttgcctggcatgtcactggtggctgcaacattccgccacgcgccgggaacagccgccgccatcgtgctgttcgtcaccttgcatgcggggctgcatatgctggcagtgtggcgcgaggcagcatcccgaccgattccctcgatcccccgggtgctggacgcgcgtgccgccggcatgatgctggccgttaccttgccggtcatcgtcctcggtgccacaggtccgaggcccgtcatcacgtcagcctggctgctggctggcgcgatatgccagctctgcagcctgcgccgcgtgtcgcaacgcctgcgccacgtcctgctggcgctcggcagcgtgctgcagttcattgcggtaaccctgctcgcactcggcacggtgcactga

SEQ ID NO: 528106 - DNA, 408 bp, Stenotrophomonas maltophilia
atgcctgaccgtactcccgacattccccgcctgcgcgagctgctcggcgccgccgcgtgtgatcttcccgccgccctggccgaaacgcttgaggcggcgctctgcgaatccgcggagtccgtcgcgccgtcggcgttcttcgcgcacttgaaaggccacggtgagaatctgcgagccgatggccagccttggaccgaaacccggctgagccccggccgcgccttcgatctggccctggccacccgcagtgcctcgggcatcaccgcgctgaccgccatgctgcacgccgcgcatgtggcgcgggagagtgatgatcccgcctgttgcccgtccgcagcgctggtcgaaggcctgttcaacgcctgccaggtgctgtcgctgcaggtggagcgctgcctggttccgtga

SEQ ID NO: 528107 - DNA, 1197 bp, Stenotrophomonas maltophilia
atggcacggaactggattgtgatgggagacccgacctccagcggtgggcgtgtaatcactgcgtcgaaccgaaccgatatcgagggcatgggcgttgcacgcgtgggcgacaaggcgacgtgcccgcacatgcacaaaggggtgtttgcgattgtcgaaggtgacagcacgatcatcatcgatggccagcctgttgcgctggacggatgcgcgctcgcgtgtggctgcagggtgatgtcaagccaacagctcagggggtacgtatccaatactgccaccacaggcgggactgccagtcccaacatggccggtacgcagcgtgctgaaacgccgctggccagcggccgccgccttcagttcgaccaggctatccgtttcaccggctcacagggcatgccgttgcgggaacttccctacacgctccatctggcgaacggccagaccttctccggcatgaccaacgcactgggcgagacgtcacgtgtttcaacccgcgagagcgtggcggtggtgcgcgcggagttgcgcccacccagcgccacgagcggttgttgcgaacgcaccttgttggccgggatcgatgatgcagcggtttttgatgtcgatggtgtgattactacctctgacaccatgggaacgtcgatcgtaccggtgcaggtaccaagccatgaacgcggcttgacacaaggcgagatcgagatggcacagctggtgttcggcgatgcgattgactacagcctggtgaggattcacaaccatggctactggatgttgtttgggatgcaacctgaggacacggtggttgcgccaaatggcgagatctacttcccgaaagacctgtacattcatgattactcttctggcgatcttcgcaaccagcagcttttcatccacgaaatgacccatgtctggcagcatcagctccgctacaacgtgaggctggtgcgtggaccgcgaccgaacatgagctacgactatgtcctcgatgacgtgcgcctgctccacgactacaacatggaggcgcaaggcgacatcctcgctgactactttctcgttgccttccgtgattcacaaagcaagatgagcaacacaaggtatcgaaccacattcggcatccatgcccagttgaaacgcgtcctctcactattcctcgcgtcaacttccgacaagcgcaacctcccgaggaccacacgatga

SEQ ID NO: 528108 - DNA, 483 bp, Stenotrophomonas maltophilia
atgttgaaaggatttagacctctcaccgcagctgcgttgtgcctgcttggcctctctgccttcgcccagaccgccgccgcggcgcaatgggtcgacagcggccgcactgcatacctcaagtacagtttcttcggcagcttcgccgaacatacctgcaacgctggcactgcaccgatccagggctatccgggcagctgcgccaatgatgcacccagcggctggacggccaactacaccgcctccagtggactggccaacgaccaggtgaatgcctgcgggcacaacccgttccagctcggttcggcctgctatggcctggcgtatgcgatcaacgggcaggtctacgccggtgggctgccggccgcatgcaatgtcggcgcgcgtgccgtagtcacctccgcccgcatggaaaccgtcgaaatccagtacgaagaactcgacgttgatttcatcgagtcggcgcaggagtacatctgccagtaa

SEQ ID NO: 528109 - DNA, 1068 bp, Stenotrophomonas maltophilia
atgcgtcagttcctgcccattgccctgctggccttggtcaccccgcccgctgcgaacgccggggcaccctccagccggctgtacttccagcaccacgactgggtggtggcctgtgacaacacccgcacctgccgcgccgccggctacgccgccgacgagcagagcacgctcagcgtgctgctgacccgcaagggcggcgccaaccaggccatgcagggccgtctttcgctgcagccggatgaaggccagacccggcccgccggcgcgctgcgcctgcatgtccggcagcaggacctgggtgtgctggtaccggaccagggcgaaggcacctataccctgagtgccgcgcagaccgccgcactgttgtccgcactggtgcgcgacggtggaatcagcgtgagcgatgccaccggtcaacgttgggcgttgtcggacaagggcgctgccgcagtcctgctgaagatcgacgagtaccagggccgcctcggcacgcccggtgccgtgatgcgcaagggcagcacgcccgaagccagcgttccggccgcgctgccggtgcccgtcgtgcacagcgcaccgactgccgattcgattccggatgacccggccttcgcgcaactggcggcctcgcccgcgctgcgcgccgcgctgcgtgccacgctgaaggacaacagctgcgagggcctgctggaggccgatgccgatattccgctgagcaactcggcactggagatacgtcgcctggacgcgcagcacgtgctggtcaacgtgccctgctggcgcgcggcctacaacaccggcgacggctactgggtggcccgcccgaaggccccgttccaaccgcagtgggtgaccagtgatgcgatcgactatgacgatgggcagatcatcgccgcgcagaagggccgcggactgggcgactgcatctcgcagagcacctggacctggactggcacggccttcgtcgcgacctccgaaatcgcagcaggcctgtgccgcggcgtacccggtggcacctgggaactgccgaccctggtgaccgaagtggaaaaaggggacggaggggattaa

SEQ ID NO: 528110 - DNA, 393 bp, Stenotrophomonas maltophilia
atggaacggaacatcgttgaagacctgcatgaactgcagttgatcgcactggagcagcgcctgtgccaggcactgctggccggcgaccacgatgcgctgggcacgctggtatcgccagcgctgttcatgatggatggccagggcgggcgcatgctcgacctgccctggctgggcgagtggctcgcaggccatctgcaggtgcgcagcctgcaggtggacacggtggagacgctgctgtgcgggcggttggcgctgttgtccagcgacgtgcgcctggcggtgtaccggcaggaccgcgagcgcgaactgaaactgcgcctgctgcgggtatggacctgcagttccggcgacggcggcgctcaactgctgtcgatggcggtgctggccgcgtga

SEQ ID NO: 528111 - DNA, 576 bp, Stenotrophomonas maltophilia
atgctgagtgcaatgcgcaaatggctgcggcccgaagcggacttcagcgagagccagggtatctacctggacgccgtcgatgctgcagatgaggaagcgctgatcgcctacgcagcattggctcgcatctgccctgggtcatctgggcgaggcgccaacgaggaaagggcctttgccgaacggctcgcccggatcgcatccagtttcatgctggagggcatgcttgagcccggcagctatgtgctggccgaggccgcaggtggctccggcggcggcgaagcgatcaccgtgacatcggagcatcttttgctgctgcgaagcatgaacacccgggtgctggggcgggcggtgatgctcatggacagcaagcgcccgtacggggatatgtcgcacttctacatcgacctggcccgcgcgctgggggagccggttccgctggatgcaagcggcagagtatcgttcccgccggaggtcatcgcccggtatgacgagttgcatgggcagatgctgggcgtggtgcgcgttttctggcgctttgcagcgccggcgcagtcggggcctgaggcgactctgtaa

SEQ ID NO: 528112 - DNA, 1986 bp, Stenotrophomonas maltophilia
gtggcactacgcctgaactgcctgcctgccgccatcgcgttgggcctgatgctgactccgccggcatcggcagaagaccccgctgccgtcccggtacacgacgctgcccttgccaccgacgcagaccgcacccaagcggtcgacggcgcggctgctccgccctctcccgatgactggagcacccgcatccaggtggtacagggcgcgcctgccagtctgcctggacaccgcgatgtcgatctgaaactgcgcctggtctcgcgcggcgacaccggcaaagtggtcacgctcaagcttgtccagttggcggccgccgccaaggccggcggtggccgtgtcgatggcttctcgaagaagaacctgcggggcaccgtcatcgaatcagtgcccagcccggccgtcgacgaaatccccgcactgctgcgccgccatctggccgagtacttcatcgcacatccggatgcgcttcccgagcacgcgcagatcgtcagcgcaaacgccggcctgtggtcgctcacctaccagtcgctgtcgggcaacgcggttccgtacgatctgcagcatgaggccaccctcaccattgcacagtcgtcccccagcagcccgccctggctgagcatcacctgcagcgacccggtgcagacggcgccgctggaagactggcaggcagatgactacgcgcaggtcaggaccgcggcacgccagttcgcgcagcgctgcgttgaccggctcgtggaacagctgcccaccgtgttcccttcgccaagcgtccagctggccgctgcgatcagtgccgcctcgctcgatccagtgccaacccaggacgaggccgcaacggccacagacgccggccatccggcaccggtactgtccacggactggatgaaggcggtccacatcgaccatggcaccggcaccgatgccaagggcaagcgttccggtgacgcagacctgcgactggtgacccgatcggacatgggcgtggccacgctggccaagatgaacatcttcgccctggccgtggtcggtgcacgcaaggcgcgtggcttctccaaggacaccctgcgcggcgacaccgtcgaaggcgtgtccagccccgcagtggagcgggtgccggcactgctgcagcagcgtctttccgagtacttcaatgcctatcccgacgcggttcccagcgcccccgtgaccgtgcgggccgacccgcacgagtgggcgctggtctatgggcagctcagtggctcgcagatcccctacgagctcaagcaccgcaccacgatcgaggtgctgccggcctcgggcgcatcggccatgaccgttgactgcaccgatggcacgcagtccgctgcgctgccacagtggcaggcggatgactatgccgaagtgaggagcgtgtccgacgagctggccgagcagtgcgtggcgcgattcgtcgcgcgtctgccagaagcgtttccgtctgcgatgcgcgccgcagcgcctgccagcgccattgctgctgccctgcccgccggcaatcgctcccgcatccgcatcttcggtgccaacggccgcagcatcaccatgcatatcggtggccaatgccgtggcgacgcgcgaaggaaagtcgtggtcgcgcgcagcaacagcgcagccgtaggcagcctggtgggcggcagcccgcagaacatttccatcggaatgccggaaaccgacaccgtgcgtgcgatgaaaagcgtcctgttctctaacccgaacttccaggagtattcggtggaggccggcaagccgttgatcttcgacgcacagttccagaacgtcgcccacctccgctgcggagcagcaccggactcgctgtcgatccagttcgtgccgaaggcgggtcaggactacgaagtgatgatgcggctcgagaacgagatgtgcgtgctcgagagcaagcaggtggctgccgatggcagcctgcgcgtcaacctcgtgcacgcccccaaggcgtgtgccgcgcagtag

SEQ ID NO: 528113 - DNA, 1335 bp, Stenotrophomonas maltophilia
atggcacgctcacggttcaagcaggtagtcgatggcctcgtatcggacatccagagcgggaacctgcgccctggaacccgcctgcccacccaccgcgagctcgcccgccgccatgatctggcgcttgccaccgccagccgcgtctatgccgagctggcccggatgggcctggtcatcggtgagatcggtcgcggcacctatgtgcgcgaggcgttcggcgcacagggcatggcctgcgacatgctggccggtctcggcagcggcatcgatctcaacgccaacatgcccaccgcgttcggccaggacacgcagcttcgccgggccctgcgccacctctcacagcagggcgacctggaagcgctgcttctgtaccagccgcccctgggtcggccccaggagcgccagctcgtggccgactacctggtgcagcgcggggtacctaccgatgccggacgcgtggccctggtccagggcgcccagcacggattgaccgtcgccctgctgggcgcactgtgcccgggcgatgccatcgccgtggatgcgttgacctatcctggattcaggcagatcgcggcgatgctgcggatggagatgatcccggtgccggtcggcccggagggcaccgacctgcaggcactgcgtacgctgtgcagccagcgccgggtcaaggccgtgtactgcatgccgaccatgcacaacccgctgggcttcgtcctgacgctgcaacagcgccaggagctggccgcgatcgcccgccagcatgggctgctggtgcttgaagacgcagcctatgcctatctggccgcgcccgccgtggtacccgtggcggcgctggcaccggaacgcaccgtgtacatcggcggcctgtccaagaacctcgccaccggcctgcgtttcggctacatcagtgcgccgccggcgatgatgggtgcgatcgagcgcgccatccgcgccaccacggtcaactcgccggcactggtgacggcgctggtgcgccgctggctgatggatggaaccgtcgaccgcatggaacgccaccgccgcgccgacgcccggcacaggcaggcactggcaaggcgcctgctggaaggtgtggcgatggtcggccaccccggttcctacctgctgtggctgccactggaagggcgcgaccgcgccgaggcgatctgccaggacctgcatgagcagggcatcgtgctttcgaccgccgcgccgttcgcggtcggaacccacgttcccaacgcgctgcgcatcgcgctgggaacggtcgatccgtccaccctggaacgcgccctggcgcaggtacgcttgcgcctggaccagctggctggctga

SEQ ID NO: 528114 - DNA, 1032 bp, Stenotrophomonas maltophilia
atggagcacatctgtacggcgatggaaggtcacaacgaattattgaactatgcagcgcatgcactggaagaaatgaacgtgctgattccccggatcaagggcagcatgccgggcatccgccaggcccatgaagccatcgccagctacctgcaccgcagcgtgaagttcctgctgcccaattgcgcggagatgatcgatctgcgtgagctgcgccaggtgcacgtggacatggcgcgcccgccgttcgaggtgatggcgctggaagcggcgtggatcctgcctgacgggttgccgggacacaaaggggcgggccatgcggcgcctcggcgcatcgcgctgtgcctgaacatgaaccgcgaagtcgccgcggcctttccggccacggagtgcttcctggatgaaccggccggtggcgtggtggtgatcccgatctactggcaggccgatgcggccgcgtggaaagtgccgctgggaggcgtgttcctgccgcaccagaatccgttgagcctgtaccggccagaggaggccagcctgcccacgcgcctggtcaatgccccggtggaagcgatggcgtccggaaaacccttgcagcagttccgggttgcgccgttcgcgctgctgccggaatggcacgcctgggcggtggagcagcagggcagtgcggcggtgaaggcgcagatcgtgcaggactgtcgcgacgaggtcgccatgctgttgcagacctgctgcgtgctcaactgcgccaatgtcgcgtcggtggagcggccggcctcggtggcgctgaacaagcggcggatgcgcagaggcaagcagccgttcttcagctaccgggtgttcgaggtggatggcgccacggccgcgtcagacggcacggggccgggcgggggtgcggcggggccgcgcacccacgtgcgccggggtcacatccggcgattgaaggaaaagctggtgtgggtgcgcgccgccatcgtcaatgcgggcagccctgatggcctgctgcacaagagttacaggctccgtcagccgcagtga

SEQ ID NO: 528115 - DNA, 474 bp, Stenotrophomonas maltophilia
atgaagcgttcgcttttactcgttctgctgatgctggcatcaggctcgacggctgcagcggtttcagtgcacatcgggggcaagccaacggagcttctgaccgcgcaatctccgggtatgaaggtcgaagtgcgactgggcattcgtgctacaacggccgacgacccgcgctacgtagtctgcgaaggcgcgcgcccctgcaaaggagtgcaatcgctgcagatccgagtcaatggtgctgccttggttgttccgcgctccgcctatttcgatctggtggatctttccagtgcgacgattgatctcagctccaagggcggcagcctgatgttgcagggcggggatgcctcagagagttacaacgtgcgtattcggttcagtaaaaaccgggtcctgtcgagagagatctttgttggaacgtctcaggatgacctgttggaggaaaccacctatcacgaggcgagcatcggatag

SEQ ID NO: 528116 - DNA, 447 bp, Stenotrophomonas maltophilia
atgcgagccaatagcaagaggctgcttttccttgcctgcctgggctgcctcggtgcatgtacgcaccgcgacggcgacgctccaacgccgatgagccgcgagttcggggtgtgcattttccttcgggccggtgacagctaccacgtgaaggccccgggactggattttgaacagggattgttgaagctggctggcaaggacattgatgtctacatcgggaatcatccttcctacgatggcgttcgatggaaccgggatctgagcccgacccgtggattcgtgctggtcggcacggagcattcaagaggtaaggatcgagtgctgctcggcaacaagcgcgcagaccagaaaggcctgatctacgtgcagttcatgggtgttgaccttgcggcgcaggttcccgttctgacgcgcaaggatctggtagtggattgtggactggattga

SEQ ID NO: 528117 - DNA, 1242 bp, Stenotrophomonas maltophilia
atgactgagctgctcgacggactatggcaggccagcctgtggctggcggtgggcgtggtcgtgctggccacgctgcggccgttgctggtgcgactggggggcgctggattggcctatcgcagctggtggttgctgcccttgctgatggtggcgctgctggtgccgttgccccgggttgcattgctgcagcaggtgccgacgctgccgctgaaggtgatgccgggcgccctcgagggcgcgagcggtcatgcgctgccatgggccggtctgctgctggtggcctgggtactggggatgggcgtctgcctgctgcgcgagctgcgtgcacagcggcgcttcgagcggcgcatgggcccgttgcggccgcgtgccgatggcagctggcaggccagcggtgatcccgggctgccggcgctggtcggtttgtggcggccgcgcatcgtggtcggcccggcgttcgaccagcagttcagcgcacaggagcaggacctgatcctgcagcacgagcgcagccaccgtcgcaatggtgaccactgggccaatggtgcgctgctgctgatgcgcacggtgttctggttccacccgctgttgccctgggccgcacgccgtttcctgcgcgagcaggaactggcctgtgatgcccgcaccatggccccgcagcctgcgctgcgcggcctctacgccagcacgctgctgaaagcgcagctggtccatccggttgcgcccgcggtctgccattggcgcagccaacccgtgttgaaggagcgtatcgccatgttgaagcagtccaagcggaaggcattgccgtgggtgtcgggccaggtgctggtgatcggggtgtgcctggggatgggagcggtggcgtgggccagccagggcggtacggcgggagcgccgaggatcggggtcgagccgtttgaacacgctcaggaagacgcagccagggctgggctggaccgacccgtccaggtcgacaagatgccgccgccgtcctatccgaagtctgcggccgaacaacgccaggtgggcgtggtgaacctgcgcgtggaggtggatgcacaggggcgtcccgccgatgtccaggtgctcagcgctaccaatccgggcgtgttcgatgcggtatcggtggctgctgcgcgcagctggacctatcgtccggcaatgaagaacggtaagccggtggccgctgccgtgcgtattccgatcaccttcgcgatggacgacaccgaggacgcgaagtga

SEQ ID NO: 528118 - DNA, 450 bp, Stenotrophomonas maltophilia
atgagcgccaacctgccgctgcgcgacgtgcagctgccgccggccccgtcgtggtggccaccggcaccgggctatctgatgatcggtgccgcgttgctactgctgctgttggttttcgcattcctgtggtggcagcgtcgccgccgtcggcagcgctggctgcagcagttcgacagggagctggcggcgtgcaccgacagcgcggcggaactggcggcgatcgccggcctgctgcgtcgtgccgcgcgccaggcacgtccgggcagtgaatcgttgcgcgacgacgcatggtggcaacgcgtcgacccgaagaacacgctgtctgacgcacggcgcagcctgctggccgagggcgcctatcggccacgcgtcgatgccagcgaagtggccgcggtgcgcagctggtcccgcgcgcgctatctggcattgctgctggagcgtcggcgatga

SEQ ID NO: 528119 - DNA, 747 bp, Stenotrophomonas maltophilia
atgtacggatgggtacgccagttcatcaactatcgcagcttctacctgtggcgtgcgcgctatcggtactacacgcgcaatgtggacggctggatgctgtccagcgcgctgtgcctggcgtgcatggcgatggtgctgtggtactactggcgggtagcgagcgtgccgcccccacgcgtgcatcccgaagcggcagcgctgcgcgtggagaacatcacccatgaggccatccgccgcatcgtgcgggtacggcacggcggcagcatgcctggcgagatgttcagcacgcccgaagaggtccgcgccggcacactgcgcacgctgcaggtgcggcagctgctggacagtgcggaggcgtggcaactgaaggcccacctgctggccgacatggccgactacatcaccgccaccggaagctgcttcccctacgagtgctggcgggtgacgcatcgcctggagctgctgcggacggcgcaggcggagaatacggcgatcaacgaggcactggcgtcggtgctggtcgagccgttggacaggatgccgaacctcgatggcggtgagcgcacgcgcgtgcagagcgcctggtccgatacgttcggcgatgcctacaaccacacctggttgctgggggatctgcaggccatgcacgcacggatgatgctggaatacccgcaacgcgcgggcgcaccgtggctggcgcgcttgctgaccggggatgcggaagagccgcacctgtaccccctgtag

SEQ ID NO: 528120 - DNA, 708 bp, Stenotrophomonas maltophilia
atgaaaaagatcgctctctctctgctgccgttggtcctgctggttgcactgccggcccaggccaacctgaccatccatcccatgcgcacctcgattgaaggcaagcgcagcgcgcagattcgcgtgtactcgcagtccacccagccgcagtacgtgcaggccgcgctgcggcgcatcgacaacccggccagtgagaacgagcgcgaggtcgaggtggagccacacgaggctgccatcaccatcaccccgggaaagttcgccttgtctggcggtggcaatcggctgatccgcctgattccgctgcagagcgtggagaaggaaaccgcttaccgcatctatttcgagggtgtgcgcgggccggaagaaatcgagcgtgaaggcgagggcggatcacaagccaacgtgggcgtcagcttggtctggggtgccctggtgaacgtgttgcccgccgatggcgaggtggcgctgcgcctgcagggcaacaccctgcacaacaccgggacgctgcgcgtcggcatcaccagcgtggccgagtgcagcagtgcgggtgcctgcactgcccacgacgtctcgcacagcctatatccggatgccgcgctggaacttccgttccagcccaagcccggcagcaccctgcagctccgctatcgcctcacccgcgacggctaccgcgagcacgtgcagaccgtcgccgcgtcggcaggctga

SEQ ID NO: 528121 - DNA, 639 bp, Stenotrophomonas maltophilia
gtgcttctggtcagtcagcgaagcctgcagcgtcttactgcgggccactggaaaggaacgctcgaactccgcctgcgccgcccgcccgcagaacacctcgccacttacgtcttcaatttcgatttcacggtcaccgatcacgacgcggtctcgatctacctgccggcgttcgagtacggcaacgcgcacgtcaatctggatctgcgttacgacccgatcgccaagatgatcggcgggcgcaaggacgtcgatatgtgcctgtacgacggtgtcggctcaagtagcgagtacctgggcgttaccgtgcgcgacgctggcccacacccatccggcggtgatggcttctcggtctggcatccggataccaccggtgacgagagcgagcgcgtggacttcgacgtgctgctcgactacgccggcaacaggcggcgcatgcgcaacggtgtggaggagcaactgcacggcgtcgacagcaccgcactgcgcctggtcaagctgcccaagctcgaccagccggtgtactgcgtgcccacgccgttgaccctgctcacgccgcaattcccttccagcagcaaacgccagggcgtctatagcggcgaactgaaggtcgaactgcgcgtgcccacggttcgcccctga

SEQ ID NO: 528122 - DNA, 2733 bp, Stenotrophomonas maltophilia
atgaattctcccgcacccgccgtgacccggctggcgatggcgctcgccctggcgttagcgccaacgctggcccacgcccgcagcgtccccgctggctttgaagatctggtggaaggccagaccgagcagctggacgtcagcctgttcggccaatcggccgggctgtcgccggtgcgggtgacgctggacgaggtgcagctgctggagccgcagcgcgtggcccaggcgctgggcctttccgcggaagcgcaggccgcactgctgccggcgctgtcgcagccgatgccccgcaacagtcatctggcctgccgttttggcggcgctgcggctggctgcggctacatggcaccgccggaagatcctgcggctgtgcacgcgctgtatgacgaaggcgaaggcgtgctgcgcctgttcattgcccagcagtggattcccgggcagacaccggatgcgcatcgcttccacaacgtcaccgccaacgcagagaacgcctggctgcaccggcagaccttcaacatcagcggtggccgcgactatcaatcgctgagcgcgcagggcgcgggcacgctgggcctgttcaagcgcgggcatgtggcgggtgagtggaactacaaccgccagcactaccgccgcagcggcagccgcgatgacttccagctggacagcgcgtattaccgccacgacctcggccaggagcactacctgcaggtcggcctgatggaccggcgcaacctgtccagcacccagggcggcacctttgcattcggcatgctgccgctggaccgcttccgtggtgtgcgtgccggcaccacctacgcttacgtggacgccgacggtgcgatgcaggcctcgccgctcaccgtgctgctggcacgcgatgcgcgcgtggatgccttcgagggcgagcggctgctgcagaccttctatctgcaggccggcgtcaatcagctggatacccgcagtttcccgatgggcagctacagcgtcaccctgcgcatctacgaagacggcgtgctggtacgcagcgaggatgcaccgttcgacaagggcggtgactggaccgatacgcgactgcagtggttcgtgcagggcgggcagcgcgacgagcgccgcagccgcagcggtgacggcgagcgcgcgctgcaggccggtgtccgctttcctctggcgcgcgacctggcgctgaccgcgggcgtggccgacatcgccggtttcagctacggcgaactgcgcctggacgtgcgccgccagttcgcgacccaggaactgcgcggcgccttcagcgtgctgcgtggcagtgacggcagcagcggccagcagcatcaactgtcgtatcgccggcgtgcgtcgtggaatctgtaccagcagcgcatgcgcggcaatgcctgccgcttccaggatgacagccgggaccgcctgggctgcagcgactcgctcagcggctcgatgtctttgccgttggccggaggcagtgcctacgtgggctatacgcgccgccagacctggcgccccgcgcaggcgttgcccggcttcgacgaagatcccctggaaggcctgctgccgtggctgccacccgacccgctgcgcccgcgccgcgaagcccagcgcagccgtacgtggcaggccagctacagccgtaccgaccgctggggtgagttcagcgtgtccagccgtgccggcgtatggaagcagcacaacgacggcaacaccaacacgccctccagccgcgacaggggcgtgttcctcagcttcgccctgagccgcctgcagaacggcgagcgcggcagctcgcagcggcgctacgccgtggatgcgcgccagcccgaacaccagcgcccggacgtgacctacagcgtggcgcagagcctgcggcaggaggtggatgccacctaccgcgaagccaatgccgaactgcgcgccaccaacaacgaacgctacagcgcgaccgtgggcggccagctgcagaacccctggggccagaccggcgtcaccgtcggtggttatcgccagccgggacgcagcgaattttcctacagcgccaaccatgcctccagttttgcgctgagccgtcgcggcctctactggggcggcggagccaccgccgatgccggcctggccgtgcaggtggacgacaccgacgatttcgacctgcgtggcgtggctgccgaactgcaggtggggggctcgcgccgccagcgcctgaacctgggcgagcgccggctgatgccgctgcaggcctaccagtcgcaccgtgctgacctgcaggacgcgagcacggtggatggcatcgcctcggtgcgggtgagcggcgtatccggcatgcgcccgttgttcctgtcgcccggccgactggttcggatgccggtgccgatcgaggtgacctacaccttcgtcggcagtgcgcgcgatgttgccggactgccactgggcggcgcgcgcattctcaacgcaccggtcgccggcaccagcgccaacggcggcttcgtggccgacttcccgcgcagggaaaagaccctctacctgctgcaggacgaccgcctgctgcagtgcccgctgcaagtgcgcgaacgtcgcagcgtggtgctgctggtgggcgcagtgcagtgcgagccgcttgcggtggcgcagctgccggcggagatccgccagcaggcacgggtgacccggctgctgcaggaacaggccttgatcgcggttgtaccgcagaccgctgctacaggagaaacgccatga

SEQ ID NO: 528123 - DNA, 510 bp, Stenotrophomonas maltophilia
atgaacgccatcatcaagaaagccgcgctcgctgcagcgctggctaccgtttccacgtccgcatttgccatcgatgcgcacatcaccgtctacgccaacgtggatgccacgctcgccttccagaaggaagacgggtccgcgctgccggactcggtgcagctggattatctgcctggcatcggcctgcgcccgtggaaggaaaacacccgcattttctccaacgatgaaagcaaggacatcgaagtgaagctgggcagtgatctcgaactgcggcccactctgggcaatccgggtgcaaggccggtgccgatgaccgtgatcctcaacggcatgacgctgaccacggccgcgcaggatctgaaagcaaccgacattttcgatggcgccgtccagggccgttcgatcatgttgccgctgagtcttgagcagacgacccagggcgaaatcgtcgctggcgattacgacggcatggccgtcatcgtcatggcccagaaggccaccagcccgtaa

SEQ ID NO: 528124 - DNA, 915 bp, Stenotrophomonas maltophilia
atggtcctgcgggcgagcctctggactgttgccgtgctgtacgcagcgacgcgggcctggccctgcatggccggagaaaccctcgaggaaggctacgctgccgtgctgcatgcgatggacaggctttccgggccagaccacgcctggcacgaccgcggcaaccaggttgagtacaccttccaggcccacgtcctgcctcatgcgcgtgctctacccgcgctttcgacccaggacctgcgtcttctgttgcgagcgatccacgcgacgacacgtgcaaccaggcagcccgatcattccgggctcgccatgcgggtcggcctgcagctgcgcgcgcgaggcgcgctgcttgccgctgacatgcgcgagggtgcagccattgccgtgatcagccgcgatcgcagtgcactgaagccctcatcgccatgggcgcccgcctttggcggccacccgctaccccagatgccggaggccgtacagcgcttcgagtactgggtgcccagccctgacggcgcggcctacagcagcggagtcgcagacatggcctcactggatatcgtcgtcatcgcgcatccggcctgtggattcacccgcgcggtcgccgacgcagcacgcgtggatccacagctgctccagatgctgtccggcgttcgttcgctctggctttcaccacaggacggaacgctggatacccgcatcttcaccaactggagcaggcgtcaccccgatctgccgatacgcatcgcggcacgtcagtcggcgttccctgcgtttgactactggggaacgccgaccttctacgtcctgcgcgatggcgaggttgctgcacgtgttgtcggctggccacgcgatgggaacaagactgcgcttgtgcaggcattcgccaaggctggcatcaggatagccggaccgccatga

SEQ ID NO: 528125 - DNA, 558 bp, Stenotrophomonas maltophilia
atgacgtgcagaacgcttcaggctgtcgtggtatcgatcgccttgctggtgtcccttcaatcgcgtgcgcatgtggctggcgtcgacacggccccactggcacagctggaagagcagcggcgcgatctggacaggcgaacggcatcgatcaccgaccgtcgatctttcgatgcgcatgcaaaagcaaccgaaggcaccggcgcctttccactctacaagcttgcccctgcatcgcgtgcccgatttgtcgaatcattgcgattcaatgcccgcggactgaccacgttcgactactccgatctcgtgagggaactgggagctgctgacatccaccggctgctcaagcccttcggcttccagcatctgcttgccgtgattccagatgtcagggtgaactcgcaggaggacaaggaggtactggagacattgcgggcgacccgtgccctgcgttgcggcatgggcgagcattgcaatgaaacggactacccgggttacaagtgcatccagcatgcgacctgcgaggactcgacccagcacatatgcacgtccaactgctga

SEQ ID NO: 528126 - DNA, 2487 bp, Stenotrophomonas maltophilia
atgtcgctgcaccagtaccggcgcaagcgtcgcctcggcagaggcagcggtcagacgccggagcctgacgacacccccgcccacggtgacccgaagcgacggccaacgttcgtcatccagctgcatcacgccagttcgcgccactacgatttccgcctggaaatggacggtgtactgaagagctgggccgtgccgaaggggccttcgctgcgcgttggcgagaagcggttggcggtggaagtggaagaccatccgctgtcctatgccggcttcgagggcgacatccctgaaggtcattacggtgccggccacgtggaggtcttcgatcatggcacctgggcctgtgaaggtgatccattgcaggcgctggcggcgggcaagatcgacttcgtgctgcacgggcagcggttggccggcagttggaagctggtgcgcacggcgatgaaggggcgccaggtgcaatggctgctgatcaagcgcgatgatgagcaagcgcgcgatgccgaagcggacgatctattggaagcgcccgtgccgaaacgctcatcggcggtgaaggcgcgcacggcaggaaggacagagcgcgctacgccggccgcacgcaggactacccgcaaggccgatgcacactggcatgcgcgggcgctgaaactggatggtgcacgtgacacgccctacccacgcgccttcaaaccgcaattgaccgatcaccgcgacaccgcgccggatggccagcactggctgtatgagatcaagtgggacggctatcgactgttggctgatctgcacgatggcgaagtgaaactgcgttcgcgcaacggcctggactggacggccgattttcccgaagtcgtgcaggccatccgggcgctgccggtgcgcgatgcgcgcctggacggtgaactggtggtactggatgcgcagggccgcagtgacttcgcagcactgcaacgggtgatcgacggcagttcgaaacagccgctgcgctacatcgtcttcgacctgccaggtgttgccggtgccgacatcagccacgcgcccttgctggaacgcaaggcgctgctgaaagcgctgctgggcaatgtacccggcatcctcgccttcagcgagcatgtgatcgatcacgggccacaggtgttcgctgccagtggcaaggcgggtttcgagggcatcgtgagcaagcaggtggatgctccgtatgtgaatgcccgtgcgcgcagctgggtcaaggtcaagcacgaggacaccgacgagttcgtgatcgtcggtcacacggcaccaaagggttcgcgggtgggattcggctcgttgcttctggccgcgcaggacaaggccggcctgcgctatgtcggtcgcgtgggcaccggcttcgacgatgaacgcctgcgcgcgctgcacaaggcactgcagccgctggcggtgaagacccccgtgctgccgttgccggcgcatgtgccgttcagcgccgccagcgtgcgctgggtgaagccggtggcggtggccgaggtcgccttccgtggctggggcaaggaagggctgctgcgccaggccagcttcaagcggctgcgcaacgacaagcaggtggaggacctggaagtgaacgctgcagacgtggacagcgtgggcgaggtgcagatcacgcaccccgaacgcgtggtattcccggatcagaaactcagcaagggcgacgtggccgactactaccggcagatggcgcgctggatcctgccggagattgccggcaggccgttgtcagtgctgcgctgtcccgacggtgtcggcaagacctgcttcttccagaagcaccatggccccgggctgggtgatgccgtgcatgcggtgcccctgcagcagaagagcggacgcgaggactacgtctacatcgacaacgcgcgtggcctgctccagctggtgcagatgaacacgctggagctgcatccgtggggggcgacggtagacgacccggagcatccggaccgcctggtgttcgatctcgaccccggcgacggcgtgagctgggcgcaggtgaaagcgggggcgcgtgatgtccgcgaccgcctgctgcagatcggcctgcagagcttcgtgcggctgtctggcggcaagggcgtgcacgtggtggtgccgctgcagccgaaggcggactgggagcaggccaaggcgttctgcgaggcattcgcgcaggcgatggcactgcagcagcctgatcgctacgtagcgacgatgagcaaggcgaagcgcagcggtgtgatcttcatcgattggctgcgcaacacgcgcggtgctaccagcgtgtgttcgtggtcattgcgggcgcgcgcgaacgctggcgtggcggtgccgttgcgctgggaggaactggcaaaggtgaccgccgccgatgcgttcccgatggccagggcgctggcgcgcgcgaaacggctgaagggcgacccctggcacggcatcgaacggttgaagcagacgctgccgtcgctgaagcggtag

SEQ ID NO: 528127 - DNA, 975 bp, Stenotrophomonas maltophilia
atgcgcatcgcgcaccagcgaggtgggtgtgcccagcgcgcccttgtcatccagcggaatgatcgaacgcagctccgggccgatgctgtcggcgtagacggcgatgtccttcaggccggccggggtcatcatctgtgcgtaggtcagcctgccaccggccttggcgacgtcggccggctgggtatcgcccttccacagcagctgcagcaggcggatgttgctgtcgcgcgggatcttgccgcgcaggtagcgcaggttggcggtctcgaacgactggatggtgaccgggccgacgttggtataggcattgccgcgcagcgccgccagcagtttgtcttccatcggcaggccgatcgactggaagtaggtcgggtgcttgatctccggcaccaggccgatgccacggttggcacggcccgcctgctgcaccaggaaggccaggatctcgtcgaggctggcaatgcggaactggccatcgtaggcggtgctgcgcagttccggcaggcgctcacgcgcgtacagcgtcttcagctcggccagggtgaagtcttcggtgaaccagccctcgaccttctgcccgtcgatgaccttgctggtacggcggctggcgaactcgggatgcgaggccacgtcggtggtgccgctgatctcgttctcgtggcgggccaccatcaccccatccctggtcatcaccaggtccggttcgatgtagtcggcgccatcggcaatcgcctgcgcataggcggccagggtgtgctccggcagcagcgcgcttgcgcctcggtggccatagaccgacaccttgtgtgcggccggggtggaggattcagcactcatggccaccgatggtgccacggccagcgacaacagcaacgcacaaccccacgacttcactgcgacttccccaagcggtatgtgatgggcgtcagtatgcggcggcaatgtgacaggcgggggaccccacgcgtccggtag

SEQ ID NO: 528128 - DNA, 543 bp, Stenotrophomonas maltophilia
atgcgccggatggcctacctgattcccgccctgctgctggcggcctgttcgcagcccgcgccgccggccgagcctgcggcggatgcgccgccgccgatgcaggccagcgcctcggcgacgcctgcggcagagcccgctgccacagcgccggccacgcctgtcgtggatgcccccgccgccgaggagggcgatgcacgcgcgcgcatcgaaagcgtgctgggcgatgccgcgcagtacgagaaggtgttcaacgcgttcaagaccgccgtggttggtggtgaccgcgcggccgtggtggaggaagtgcgcttcccgttgaacatcgctggtggcaagaagatcaccgggccgggcgagtttcagcgcaactacgagaagatcatcacgccggcggtggtcaaggcgatgtccgggcaggacttcggcaaggtgttcgtcaaccagcagggtgtgatgatcggtgatgggcaggtctggctgaccggcgagtgcctggacaaggcctgtgcgcgtaccgaggtgaaggtcggcaccatccagtga

SEQ ID NO: 528129 - DNA, 501 bp, Stenotrophomonas maltophilia
atgctgctgcgcctgacctgcctgctgttgttgtcgctctgcctgccgctgacggccctggccgaaaacgcccctctcaatgaagtccgccctggcctgtatgccggcggccagcccagcggcacgcagctgcgggcgttggccgcgcagggcgtgcgcacggtgatcgacctgcgccagcccgatgaagaccgcggcttcgatgaagccggcatggccgaatcgctgggcctgcgctacgtacgcattcccgtggccggggccgatggcctggatgcggccaacctgcgcgccgtgcaccaggccctgcagcaaagcgcaggtccggtgctgctgcactgcgcgtccggcaaccgcgccggtgccgtgctcgccctggtcactgcacgctacgaacacgccagcccggaacacgccctgcagctcgggcaacgtgccggcgtgacgtcgctggaagccgccacccgccaacgcctggccgcgcccgccgcttcgccctga

SEQ ID NO: 528130 - DNA, 726 bp, Stenotrophomonas maltophilia
atgaagtttcctctgctgtgcggtgccttcgtggtgatcgccgtgaatgcacctgcacctgcaccggatgaagaggcgggcgcagtcgggcaatggctgcagcaacgcgtcatgcaggcggctgcacaggcgagcacgtcgcctgcgggcagctaccgtgtcgtgcggttggcagacctggatgcgcccgaagaagtgaagcagcagcttcgcgctgacatcgaacgatccaacggtgtcgtgcaggctgcagcagggaacatcccctcacaggctgaaatgctggcggccgtgccccgcactcagcgttcggcgtcggaactgcgccagcgcctgccgcagccccccagcagcctggaagccagcgtcctgggtccggccgagctgatagggatggagcccagtggcgcgctggagggaggcaggtcctcgggactgagccgcttcttccagttggaaggcgtcggcgtcgtggaattcagcgagaacaacttcgtcgccgcgggcacgcgtatcgaggtcatcgccgaggcgcagaacacaacggtgaaaggcgcgcccgcgcacgtgaagaagagcgcggacagtgccggccgtacccgcgtcgagcttgcctggacaggagacagcaagacctacagcttgatcgccaccggcgaacgggggagcgacgtggagcgcaacgcgcgagtgctgcacgacatcgctgcggatattgtggattag

SEQ ID NO: 528131 - DNA, 270 bp, Stenotrophomonas maltophilia
atgcataacgagagcccgctcccgatcggtagagtcgagcaaggctcggctgatgccttgggtagagtcgagccatgctcgactgacgaaaagcagccgagcatggctcggctctacaacagcgaagagcagccgaccagcggtcggctctaccagagcgggagcgtcgagcagcagcgccagcgtgccaagcgtaccgctgcctgggtcggcgccatcgccgtgatggtctacgtcggcttcatcctcagtggggtgatcggccgatga

SEQ ID NO: 528132 - DNA, 816 bp, Stenotrophomonas maltophilia
atgttgtcgccctgctgcagcgcgccgatcgtgccgccggtcatgacgaaatcgtcgcgtccactgccctgtgcgaccacgccggtgatggtgccgccagtgaccgtcatctggtcatcgccgctgccctggtcgacacggtcgagggtgccgtcgttgagcagcagcacatcgttgccatcgccctgcaggacaccgccggtgatgctgccggcctgcatctccaggcgatcattgccggcaccgaactgcacgccggttccgccactgagcgttccgcggttgaccagcacgctgtcaccattgccgacgaactgcagggcgatgttgttgcccgtgctgatgctgccaaggttctcgacgcggctgccgccgccgagctgcaccgccacgccgctgagcgaactgatcgcgccctggttggacagcagatggccccctgcgccgaccagcgagatggcggaaccgccaccgctctgctgcagttgcgcgctgctggcaacgttgacggtgatgccggccgcgccgctggcagcgatgggaacggtctgcgggttgggtgcgctggcagtgcaggtgaccgtctggccggcaacgggcgcaatggcgtcacagccggcccaggcgacgctggcggacatcagcatgacggagggaacggccagggcctgcagcacggaaacggtgaggcggcgcggacgaaacgcgcgcgggacggcacgggacatacagcactcctggacaggggatcaggaactgcggatatgcggtactgcgagcgcagtctgccttgtcgtgaatggtttcgacaggtga

SEQ ID NO: 528133 - DNA, 1233 bp, Stenotrophomonas maltophilia
atggccctgctgctggtgcccgtgctggggacggcggccacgcccgtggactgcacgcagggcctgctgcagcggctgggctggcgcttcgaagaggcggcggtggccacgccacaggtgcacggcggtgccgtgtgcacgcgcgccacgttggccgaggcgcaggcggcgggcgatctacgcgtgcagtggccggccgcaatgcccgctgcggcccgacaggcacaactgcggcaactgctggacgacccggccacggtctgcgcctatgcgttcgaactgggcgccgccacgcagcgtgcggcgaccgcattgcaggacaatcccacgttccgtttttccggcccgcagctgggctggatcggcttcggcctgcggggcgcaccctcgcaagggtggcagcgcacacgcagtttcggccgcggttacgtgcccagcgccggcaacagccgtgcattgcaggcgttctacagcggcagcgtgcgcgccgaatgcggcgttggccgccaggtcgcgcagctggcaacccagcgcgaactgtatggcgatgctgcgtacgataccgagttcaaacccgcagaactgtcgattggcacgttcctggcgctgcatgacaccgacagcattctgctgggtgcaagcgcaggtgatttcttcgccgatggcaaggccgtgcgcacatcgatgatgggacggcaggcgttcgtcggcgtgccgggtttcatcgaacatgtgtacgacaagggcacgctggacgatctgagcaaccaggccgagaacttcgtggtggtcgaggtgggcgagggcgctgcgcaggcgctggccctgcacggcgggctggcctggtacgaccagcgcaatgccgagctatggaaactcgcgcaggacatcccacgcatcggccagcgctatttcgagcgcctgctgttcgagcgcgaccaggacctgcgcgcacggctggaaccgcgctaccgcgacacgctggcacgcatggaccagctgctggacgatccgttctaccagcagttcgtgatctatgtgcatccacgcggtatacgtcccatcggctaccacgttgcccgcctgcttgatcgcaacccacgaacgccgttttcgatcgacctggcggtgcacaatctgcataccacgctctaccggcgttggcgcgaggcgcagctgcgccactgcgcggctaccggcaggccaggcagcctgaccctagaccccaactga

SEQ ID NO: 528134 - DNA, 399 bp, Stenotrophomonas maltophilia
atgcgcctgcgcttctataccagtcttgtcctgaccgtgctgctttccgcctgcagcagcgcgccaccggtcgtggccacggcggggcaggccggcgcggccgccacgcccgaagccaccgaggcctaccgcgaagcacgcgacgtcgactgccaggccgccggcggcaccctgcagcggctgggccgcctgcagcgcgagcagtgcgtgattccctatgccgatgccggcaaggcctgcagcggcaagagcgactgcaccggccagtgcctggccgggggggaggtggccgctggcagcgccaccaccggtacctgccagcgtgatgccagccagaactttggttgccgccagcgcatcgaggacggcaaggcgcagggcacgatctgcgtggactga

SEQ ID NO: 528135 - DNA, 264 bp, Stenotrophomonas maltophilia
atgctcggcaaccgcgcgccagcgcggcacaggcatcccaagccgaaggccgtgccgaccaaggtcggcacccacccggacaagaacgccccggccggagccggggcgtgcccatggagagggacttgggctcagtactgggcgttgagggtcaggcccgagaaggtgctgtacgccttgacccgcacataccaggtgccggcagcggggctgttgatggtgcaggtttcgctgttgccactcaggtacgggcgacaggtgtag

SEQ ID NO: 528136 - DNA, 1023 bp, Stenotrophomonas maltophilia
atgacattgcttccacgcctgattgcagttctggttctcgcccttccagccctcggtggcagggccgcgacgagcgatccgcgccagcagggggcggcgttgaccacgcagttctacgagggacacatcgacgccctgtgggagcggatgacgccgcagatgcaggcggcgctgcagtccaggcagaacctggtggcactgcgcgagcaggtgatctccggctggggggcggaaacggaagtggtcagcgagaaggtcggcagtgcagatggaaacgacacctatctgcgccaggttcgtttcgagaagcgcccgggcatcgtccaggtgctgtgggcactcgacgccgaggggcggatcagcggcttctacatccgccccgaacagtcctcgcccccacaggccgcggccagccggttccttgactacaccacccgcacgcgcctgcaactgccgttcgacgacgagttcttcgtgttctggggtgggcgcagcatcgagcagaactaccatgcggcccacgccggccagcgcttcgcgctggacctgctgatggtccgcgagggccgatcgcaccggggcgacgggctgcgcaatgaagactacttctgcttcggtcgcccgatcctcgcgcctgccgatggcaccgtggtagaggtggtcgacagtgttgccgacaacgtgcccggccagatgaatgcggcgcagctcaccggcaaccgggtcatcctcgaccacggcaatgacgagtactcggtgctggcgcacctgcggcagggcagcgtgcgcgtcgcacaggggcaggtggtccgcagcggtgcgcatctggctgactgtggcaacagcggaaattcctccgagccgcacctgcactaccagctgcaggcagggcctgcattcggcgtcggcgcggcgctgccggcgcagttctccgattacctggccgatggccagcccgtcgcgcgcggtgagccggtcaaggggcagcagatccgtcccgccggtgttgcgcaggcacagtag

SEQ ID NO: 528137 - DNA, 6564 bp, Stenotrophomonas maltophilia
atgagcagtctgcgcgatgcgatgagccacgcggcgctgggctgggtcaagcccgagctggacgagaccctgcgccaggtgcgcaacgaggtcgagtactacgcggaagaccccagcgatgccagccgcatgcgcatctgcgccggcttcctgcaccaggtgcagggcaccctgcgcatggtcgagctgtacgccccggcaatggtggccgaagagcttgaacagctggccaatgccattggtgcgggccgcgtcgctgatcgtgacgaggcctgcgcgaccctgatgcgcggcagcgtgctgctgcccgattacctggaacgcctgcagaacggccaccgcgacattccgatcgtgctgatgccgctgctcaacgagatccgcgccgcgcgtggcgaggacggcgtgcacgacagcgtgctgctggcgttcgcaccggacagcgtcaccgccaccgaggccgagctggaccatgcccgtggcagcctgagtggacgcaaccgcgaactgctggataccgtcggcagcgcggtgaaggaagaactgctgcgcatcaaggatgcgctggacctgcacctgcgtaccggcggtgcaccggagcagctgcagacccaggccaacgaactgggcgcggtggccgataccctgggcatgatgggcctaggcgtggcccgtggtgtggtcgtgcagcagcgcgacgcgctgcgcggcgtggtcgacggccgccagcagatcgacgagaacctgctgctggatattgccggcgcgctgctttacgtggatgcctcgctggacgaccaggtggcccatctgggcgccggcggcagtggcgaggacgacccgagcgcggtcgagaaccggcgcacggtggaagtgctggcgcacgaagcgatcgccaacttcgcggcggcgcgcgaacacttcgtcgccttcatcgaaaccagctggaaccatgccgagctgcaggatgtgccgcgcctgctgggcgatgtggccggtgcactgcgcatgctcgatctgggcaccgctgccgactacctgcgcggtgtgcagcagtacatcgaagccgagttgatcgggcgccagcgcgtgcccagcggtcgtcagctggacaccctggccgacgccatggccagcctggagtactacctggaagccctgcgcgaccgtcgtccgggtcgtgaggacatcctcgacatcacccgcagcagcctcgaggcgctgcgctactggccgctgccggaccgcaacgcggtcgagccggcaccgttcgcggcacagccggtcgaacgtgagccggttgcgctgcaggccgaggccctgcagccggagcgcatcgagattccggtgcagccggccgcgcctgcggcaggcaccgtgccggtgccgctgccggacttcactttcgatccgccaccggtcgcacccgcgccagaggttgtcgacaaccgcctgatgttcggtgcgctgggctccgccgcgatcgacgccgctaccgcgccgctgtcgttgcaggacgacgcggaggcaccgctggtctttgccgcttccagtgcgcccgcacccgacgtcccgcaatgggatcttgcgccgttccatccggatgccgatccactcgacgccgctggcgatgagcgcagcccgacctttgccagcttcgatccggtcagcttcgaacagggcgatgcagggcagggcgctgcggcacagtggacgctttcggaggccgtgccgtcggcacaggcggatgcggtcgctgtcgatgccgacgaggacgcaggcgcgacggcaggaatcgaccccggtgcgcacgccgcgccggtgttcgacccggtggccgccgagcacgacgctgtggcggcgcacgacgacgtggtgttccgcttcgacgccgatgcgttggacaacgccgatgatgtgctgtcgctgcatgcgatggagacgctgtcgctggacgacgactccgggcagcacccgtcgctggagatcgtcgatgccggcccggcaacgctgtcggacgaggctccggcggttgccggactggacgccgcgcctgtggatgcacccgcggtctcggtgatcgatatcgacaccatcgcaccgatcgatttcagcgaagccgacgcgcagttcttcgccgagctgagtgcggccgccgcggacttcaatccgcaggccgtggctgcaccgaccgttgccgaagcgtccgttacgacggatgccgaggccggcttcgaagcaggcttcgacgatgacgccgagaacatcgacgaggacatccgcgaggtgttcctggaagagttcgacgacgaactgaccaatctcggcaccttgctgccggcatggcgcatgcagccggacaacatggaccggctgcggccgatccgccgcatcttccacaccctcaagggcagtggccgcctggtcggtgcacgcaccctgggcgagttcgcgtggaagatcgagggcatgctcaaccgcgtgctcgatggcagccgcgcggcctcgccggcggtgctggccatggtcgacaacgcgcatgccgcgctgccgcagctgaacgccgcgctgcgccacggccagcgcatcagcgtggacctgcaggccatgcaggccattgccgatcgtgtcggcgccggtgaagagacctactacgtgccgctgccggttgcagctgcaccggtggcacccgtgctcgagaccgaggccgaaggcgaggacgagatcagccgcattctcgaagccgaagcgattgcatcggtacacaccgacgctgaggcggcacccgaggctgtgggcacgcccgccaacatcgacagcgtgctgcgcgagatcctcgaagccgaagtggaagtgcaccaggcgaccctgcagggctggctgcgttcggcgcagcaggcaccgcagccagtcagcgacgcgctgctgcgcgcggtgcacaccatgaatggcgccttcgcgatgaccgaagtgccggaaatcaccgccgtcaccggcggcgccgagtcctacatcaagcgtgcactggccgccgatgtggtgccgggtgacgaaggcgtggccgcgctggacgcgaccgcgcaggcgatcaccgcgaccatggaagccttgcaggccgagcagccgcggattgcaccgcaggaagcactggtgcagcgcctgcaggcgctggccggcgaactgccggaagcgcgctggccgatggtcgggctggaagacgaagacgacgatctggcgctggaggccgaagcagcgtctgaggccgcagccgatacgcaggctgccgaggtagcggatgctgccgcagccgaggctgacgagccggagctggaaccgcgtgctgccgaagtgcaggcagcggagagcacggacgcgatcggcgcgggcctggagaccgccgagctgaccggcagcgatgatctgtcgcgctacttcgatgccggatggccggcggtgccggctgagggcgacgcagccagcgtggatatcgggtcgattgaatcgatccagccggtcgagcatgcgccgcttgcagcagtggccgaagcggacgccgcaccgacgccggacgccgaagccgacctgacggctgcagacgatctgtcgccgtacctcgacgccagcgcgctgccggtggatgaccgcgacgccgatgaactgcctgtggtcgcagaagctgtcgcaatcgacctgaatacgcagtcgtccgccgacggactggacagcgaaggccgcttcatcgacgaagctgctgcactgccactcgacagcgggctgtcgagcctgcaggatgaaatggctgcgccgggttttgcagaaccggtcacactggcagccgcgctcgaggccggcctgcacgtgatcgacgaagagcagaccctggacgacgacgggcagtggcccgtgctcggcctccaggccagcgaactcgcgccaggcgaggcggatgcctttgccgaggatgcggacgtcggcggggaggcggcggtcggtgaaggagagagcgccgaccagccgtccccggcgacggtggatgggcaccccgcggtggatgtcgccgcgccggtgcgcttcttcgaactcgaagaagcaccgggccaggccaccgtgcctgccgacgtcgatccggtcgagatcgacctcgtgcccagcgcaccggtccatgttgaagcggttgacggggaagaaggcacggacagcgccgaggcactcgacttcagcgtgtatgaccgcgagctggtcgacatcttcgtcgaggaaggcaaggacctgctggatcattgcgatggcctgatcagcgaactgcgcgatgcgccgcaggaccgcgaggtgctggccggcctgcagcgcgacctgcataccctgaagggtggcgcacgcatggccggcatcaatgccatcggcgaccttggccacagcatcgaatcgttgctggaagcggtggccgccggccgcaccgagatcgagcgccgtgacgtgcagctgctggaacgtggcttcgatcgcctgcaccagctgctcacccgtaccggtgcccatcgcgtggtcgagccggcgcaggacctggtcgacgccttcgacgtccgcaccaccaccgatatcgccgccgccgccgcggccgtccacgcggtcagcgtgggccagagcgtacccgcgccggccgacagcccgtcgaccgccgtggtcgacgctccgttgtcggcaccgctgccgatcgaaggcatggtcgaagaagacccgctggcgcgaccgcagcaggaacaggtgcgtgtgcgtgccgatctgctcgaccgcctggtcaaccacgccggtgaagtggcgatctaccgttcgcggcttgaacagcagctcggtgccttccgcggcgccatgggcgaactggagcgcaccaatgcgcgactgcgcgaccagctgcgccgcctcgatctggaaaccgaggcgcagatcgttgcccgctaccagcgcgagcaggaccaggccgaccagaagttcgatccgctggagctggaccgcttctccacgctgcagcagctgagccgcgcactgaacgaatcggcggccgaccttggcggcctgcagggcgtgctcgacgacctgtcgcgccagtacgactcgctgctgcagcagcagtcgcgcgtcagttcggaactgcaggatggcctgatgcgcgcgcgcatggtgccgttcgatggcctggtgccgcgcctgcgccgggtggtccgccagtcgggcctggacaccggcaagcaggttcacctgaccctggaaggcacccacggcgaactggaccgcaacgtcctcgaccgcatggtcgcgccgctggagcacatgctgcgcaactccgtggcccatggcctggaagcaccggaacagcgccgcgccgccggcaagccggaggaaggcgagattgccatccgcctgcaccgcgaaggttcggaaatcgtgctggaagtggccgatgacggcgccggcctggaccgcgaagcgatccgccgccgcgccatcgaccgtggcctgctggccgccgatgcgcagccgaacgagcaggaactggacaacctgatcttcgcttccggcttcaccaccgccgaccaggtcagccagctggcgggccgtggcgtgggcatggacgtggtgcgcaatgaggtgcgccagctcggtggctcggtcgacatccagtcggtacgcggccagggcgtgcgcttcaccctgcgcctgccgcagacgctggccgtcacccaggcggtgttcgtgcagatcggcgaaaccaccttcgcggtgccggtcgcctcggtcagtggtatcggccgcctgtcgcgcgagcgctttgaagcggccgacagcagctaccgctacagcggcgaagactacccgctgtacgaccttggcaccctggtcggccaggccccggcgcgtgccgacggccaggaccaggtgccgctgctgctggtccgcgccggcgacctgcgtgccgccgtggcgatcgaccaggtgctgggcaaccgtgaaatcgtggtcaagccggtcggcctgcagattgcttcggtgccaggtatctacggcgccaccatcaccggcgatggccgcgtggtggtgatcctcgacgttgcaccgctggtgcgtcgtttcctggccaacccgacgctgccggtactggccaacgcaccgcgccaggagcgccaggtgccgctggtgatggtggtcgacgactcgctgaccatgcgcaaggtcaccggccgcatcctcgaacgccacaacttcgaggtcagcgttgcccgcgacggcgtggaagcgctggagcgcctggaagagcgcgtgcccgacctgatgctgctggacatcgaaatgccgcgcatggatggctacgaactcgccaccgccatgcgagccgacccgcgctacagggaggtgccgatcgtgatgatcacctcgcgcagcggcgacaagcaccgccagcgcgccttcgagatcggtgtccagcgctacctgggcaagccttaccaggaactggacctgatgcgtaacgtgtacgacctgctggggatcgcccgtgtccgtgagtga

SEQ ID NO: 528138 - DNA, 1341 bp, Stenotrophomonas maltophilia
gtgtccgtgagtgaagcccatccggccccggccgtcgccctgctggcccgcccgggtgcggcgcgtgagcgcctgcgcgaggcactgtcgcacgccgatgtgcagctggtactggaagacgacccgaacggcctggagccgcagctgctgcaggatgcccgtccgcagatcgtggtgatcgccctggaggcggccatcgaggatgcgctggaacgccttgagcccgtgctgtccgcgccgggcctgaccctggtgttcgacgaggccgaactggcggcgcgccgggatggctgggacgcgcagcgctggggccggcatctggcggccaagctgcatggtcaccagcaggtgctgccgcccggcgccgaggaagaacccagcctgcagctggagccgggccatccggcaccggcaccggcgccgcaggaagaagccctgcaaccgcatctggagcaggcgctgagctgggccgacggtgtgccggctgacaccctgtactcgccaccggcgcacctgcatgagccggtcgccctggagcaggcgctggcggcgttgcagccggtactgcccgagccgctggaggcatcgccgctgccgtcgcctccggtggccacaccggtggccgcggccgcaccgtcgatgtcgttcgaccacacggcatggtcgctggtcgatgacatggcggatgcaccggccgctgctgcccacggcgctgcggtggaagcgccgttgccttcgttcgataccgatcacctgagcctggtcgacctggatgctgcggcaccggccggcgcgcgcgccggttcgctgctggtgctggcgggtatcggcgggccggatgccctgcgccgcctgctcggtgcgctgccgcctgcgctgagcgtgccggtgctggtgcacatgcgcctggatggcggtcgttacggcaacctggtcaagcagatggcgcgcgtgtcgccgttgccggtgcagctggctgaagccggccagcgcgccgtacccggtgaagtgcacgtgctggccgacgacatcggtgtgcaggcggccagcgacggcctgcatttcctcagcgatgccgccggtatctcgattgcagcgttgccggccgaatacaccgcgctggtgctgctcagtggcgccgacctggcccacgtcgggccggcgctggacctcgccgctgccggggcctgggtggccgggcaggtgggcgagggctgctatgacccggcggcggccaccgctgtcgttgccgccggcatggttgccggtgaaccgcaggaactggcgcaggccatcgctgcgcgctggggcgagcaggatgacaacggagaggcaccatga

SEQ ID NO: 528139 - DNA, 723 bp, Stenotrophomonas maltophilia
atgcccgcctcgatcggcggagcgggcatcggaacgggaggtgccttgcatttctccgggggaagcggggccatgtccaccgtcatcagggtcgcggtggtcttgaaggggctgcttcgcatcggacgattgattctgcgcactcggttgggcaggcaaggtctgctgaggcgaaacctaatcacggttttttttactgtcaacaacccccgcgaaaaattttcacatccgcgccattcccggtggcgcctgcacggccgttgcgctccgctcgcaacgaccctcaaagcacaacgcacgcacgctggcgacaacaccagcaatgcatgcgttgaacaaaaaacacttgaaataggcactccgcgtagatgcacggatgcgattcgcagtgacggacacgcatcgccaacggcggtcgtcgccagtgccaacgccagcacaacggcaccgcaacggggggcgaaaagttttcacatccggacgcgccgacgcagggtggaaacgcggatttgcgcaaaactgcgcacgcccgtcggcaccgcccgcaggtcggctgatgccgcgtcgagggtgtgcagcgaaccctgcgtcatgagtccggcgcgttcgccaaaacaaaaacggccacccgaaggtggccgtgtccgaacccgggaacgacgactcagtggtcttcgttttccagggcttcggcgtatgcgtccgggtccagcagctcgttga

SEQ ID NO: 528140 - DNA, 1371 bp, Stenotrophomonas maltophilia
atgattgatctttaccgccttcgcggccgtatcactgcgctggtcctgagcgaggcctggcgccgccgcgccgcgctgtggggcggtgccgtggccgtagcactggtggcgatcctgttcgccaaggccagcgacgccgccttccacctgttccagcgcatcacctcgcactcgccgtggtgggccctgctgctcacgccgggcatcttcgcgttgctggcctggctgaccagtggtgtgctgaagcccacgcgcggcagcggcattccgcaggtcattgctgccctggacaagccggacgcgtcgttccgggaggccaacctttcgcccgccgtttcggctggaaagctgctgctgacatcgctgtcgctgctgggtggcgcgtcagtggggcgcgaaggccccaccgtgcatgtgggcgccagcctgatgtacctgttcggccgatggttcggcttcaaggacccacgcgagctctcgcacttcctgctggccggtggtgctgccggcatcgcggcggcgttcaacacgccgctggccggtatcgttttcgccatcgaggagctcagcggccgtttcgagcatcggttctccggcacgctgctgaccgccgtgattgtcggcggcgtggtgtcgctgggcctgctgggcaactacacctacttcggccatgtaagtgcgcggttgccgctgggccagggctggctggcgatcctgctgtgtggcgtggtggccgggttgctgggcggagtgttcgcgcgtgctgtgctggccagtgcggcggggcgtccacgttggctgggccagctgcggcaacggcatccggtgctgctggccgccggatgcggcctggtggtggtgctgctggcgctggtgttcggtgaaggtgcgttcggtaccggttatgagcaggcgcgcagcctggtgcagggccaggcgctggtgggccacgaattcgggctgatgaagctgctggccaatctggcgtcctatgtggcgggcatccccggtggcctgttctcgccggcgctggcggtcggtgccgggctgggccacaacctggcggtactgatgccgggcgtggacccgcgtgcgttcgtgctgctgggcatgtgcgcctacctgaccggcgtgacccaggcaccgctgacctcggcggtgatctcgctggagctgaccgacagcggcgatctgctgctgccgatcctggccacggtgttgatcgcgcgtggcgtgtccgggttggtgtgccgggtgccgatctatcgcgggctggcggagttgttgatggtgccgaagacggttggagatgtggctgtcgaggcgcccgctgtgcgatcctcccactcgcgtgaaaatggagatgagtag

SEQ ID NO: 528141 - DNA, 501 bp, Stenotrophomonas maltophilia
atgttcctcccgcaggaggtgttggcgccgttacggtgctacttcgtcaccgatgatggttcgctcccggaagtggagctcacgtgctgtgaagccgccgggacggctgatgcgttcgcctatctgtttgcctgcggtgcccgcgtcgcggcttctggaagcgtgcagctctggctcggtgcggaagatcgtggtcagccgttcatggggccgggcgacgcgcggcgtgttctccaggacgaagtagagcctttccatatcagtcttgcagacatcgcctgcgacggcgttcttctgccagaactgggtgtgctcgtcatgcgccatgggttgacgcttgactaccgcatgggaccgtcgtggggcgagcgggaggtacaagccttcctgcttcttctgcaccagttgcagcagcggggtgctgtgatgaccgttccctggtggggtgaagaaggccagcacaggttcgagaccgcgttggcagccattgagatatgttga

SEQ ID NO: 528142 - DNA, 702 bp, Stenotrophomonas maltophilia
atgctgaagtgcatgtctgccttcttcaacccagtccgccacgtgcaggctgcacttcgtgtgctgctaccgctccgctgcctggtctgcggtgacccgggccacgatgggctggacctctgcgctgcatgcctggccgaacttccgtggtccggccgcgcctgcctgcgctgcgcattgccgctgcccgacaacgcgttgatcgtctgcggaacctgccgcgaggaggtaccgccacaggccgccacgcatgccagcctgctgtacctgccgcctgtggatcagctgctggtgcgctacaaatttcatcaggatctcgcagccggacgcctgctcgcgcaactgatgcagcgcgcgccgccgccctggtggtgtccgccactggtgccggttccgttgcacaatcgccggttgcgccagcgcggctacaaccaggcgggcgagctatgccggttgctgccgatgccggtctggcaagggctgtaccggcgccgccacaccgcaccgcagtccgaacgcacggccgaacaacgcagggaaaatctgttcgatgcgtttgctatccgtggtccggtgcccacgcggctgaccgtggtcgatgacgtgatgaccaccggcagcacggtgatggaggtcgccgagacgctgcgcctggtcggcgctgctgaggtgcgcgtgtgggtatgcgcgcgggtgccgtga

SEQ ID NO: 528143 - DNA, 552 bp, Stenotrophomonas maltophilia
atgaattcccccttgtctcccttgttgtcggcggtcggccgtagttggtggatcctgctgttgtatgggctggtcgcgctgggcttcggcattgttgccatcggctggccgctgtcggcggcgatggcactggcgtggacgctgggtgtagtcgccatcgttgagggcgtcatcagcctgttcgcactgatcagcggtggcagtggtgcttcccgcggctggctggcgctgtatgccatcgcttcgctgggcttcggcatcctggcggtgatcaacccgctggccaccgccagcgtgctggtgctgttcctggcggcgtggctgctggtggccggcatctatcgcatcgtgttcgcgatccgcgtgcgcaagcagattcagggcgagtggctgctgattcttagtggcgtgctggcagtggtgctgggcctgctgtttgcggccaacccctatgcgggcgtggcggtgaccacgctgtggatcggcatcggcagcctgctgtacgggctgctgcaggtgctggtggcattcaagctgcggaagctgaagtga

SEQ ID NO: 528144 - DNA, 483 bp, Stenotrophomonas maltophilia
gtgagggcgctgcttgcgctggtgttgggggcggcgacggccctggccggttgcatgcccggcgccacgcccgccatgcgggtgggagcggaccgcccgccactgcccggcgtggatgtgcgcctgagcgcggtcgatgcggccggcaagggcgtgccggtacagtggcaggacgagatgctgacgctgcgcgagcctccaattgcccgcagtgcggacatcgctgacgtgcgcgccgtgcaggatgagtacggccagacggcgctgcagatccgctatcggcccgacgcgcaccagcgcatccacgatggcacagcggcgatggtcggccagcgcatggcgatcagcctggatggccgggtgctgatggtggcgacggtgcaggggccgtttgctgaatcgatgaacctgagtggattgaccagtagtgatgccgaggcactggagaaacacatcaccgggtctgtgccggtgaagcggtag

SEQ ID NO: 528145 - DNA, 1116 bp, Stenotrophomonas maltophilia
atgaacatgaaaattcaatatccggaactgaatccgtggcacaaacgccaagccgccctcatccatcatttcacctcgatggagtacctgaagggcctgctgccgcagatcgacagcctgctagccatgaccgaccagatacttgatgagcgctcgcatctggatacagctggcagagccttggcgggttgggaatcacaagatacggcatcgcatttttcgacgtatgcctatcctgcactgatggagttccgggaatgtgtggttgaagacatagcactgcgctcaatcgagcggtatcgaggagcaggtgaacaccaatgtgctcgcatgctggaggagtacgcctaccagatggcctgggcgacgccggagcaggaaaagctgttccgtgacaccaccgaaagcgtcttcagatatgcacgggagctctccggcatagtcgcacgcccccccgtcaagaatgacttctcattctggctgctctggaacaagggcgtgatcgactcacatcgaatcccaaaattccgtgtccgcacagattttgtcgtgcgaaccaatcaggttcctccgcgcactggtatctacgttgccaaagatgaccccatagcttcacttcagtttgcatggactggtgggtacggacacctttgcccagccatggcccccaatgatgttggacgagccgtactgcggcagttcggtcgagagcgactgtggggcgatgcagaaggcctgtatcgcttcctcgatgcaaaccggcatctggatccctatggatggtcagacattcaggccgatctggtgaaggtggctccgtcagtgatcgccggttcggccttcgatctgaaggattgcgactggtattttgtcgaacccatcgccgatgaattcgaggaaatcgacggcagctacaccggcaccgatcagccggatctccgaccggaccgagtcgccgccggcaagcgggtgcctgtggccggctggtggtacacgcccgcgcaaggtggtcggcgcttcttcaagcaaggcgatgtgttccccgccatcaacagcgactggggtgacaccttctggatctgggccgcagaccagacgccgtcgccagtacgctga

SEQ ID NO: 528146 - DNA, 1620 bp, Stenotrophomonas maltophilia
gtgggtgattcgcgcaccgatctccccaatcaggcagcccccgtcaccctgcagcagcttcgcgaagcgctcgccttcatcagcgagcagtacaggagtgctgtcgacggcggcaagaacgtcttcgcatggctgtgggagtcgatccagggggacttcaaccaggagcgcagcaccgggcaggtcgtattcgacaccgccatttcaatgatccccggcgtggaccaagtctgcgacgtccgagacatcattgccaactgcaagcagatcaacgacgacaagagcaattcctgggcctggatcgcgctggtcctgaccctgatcggcctgatccccacgctgggctcgctgctgaagggtgtattgaagatcttcttcctcttcatccgccgcttcggcttgaaccatcttgtgcgcgctgtggatgaggccatgagctgggtcatcacgctcctgcgccgacgtgaggtcgcccaatactggaaagcactgcgctgggaccgcgtgttccatgagctggccaagcagacccgcatcgtgcgtgcacgggtgacccaggcacagctgttgaaagccttcgatcgcgccgtgctgctgatgcgtagcctgctgggcaaggtggccgacatcccgatggtggggcgccgtgcccaggagaccatcgacctcgtcgttggcatccggaagatcgcagacaactacatcggaaaagtactggcccccgtacagcgcatccttgacacgatcatcaagcgccttgaattcgaagacatggtgcagcgacgcggcatcgtcaacgccggcaatttccatttcaccggaacgctgcccgaggcacatgccgtgacgttgatgcggcgggttgatccgccgccttcgtggcttggtaaaggagagccaaccaagaatatgccgctcgatccgtccgactatcgtgcacgtgtcgacaagatggcggacaagggcttcccgaaattgaccgatgaccagatcaagagttttgccaaaggcatgtgcgccgatacgatcaagggacctgcaaagctgtatcgcgtggtctcaccagcgaacttcagtgccggtgcggactgggttaccgaagaagtcttcaatacgatcatgaagtcagccgacccgagggccacctggcgaaagcacctggccgtctggccagactggaaccccaatggacagttcgtcgtctatgagctcaaggcaggagaagaactgaaggtgtggcgcggcccggcatctgcccagaagaaagacgttctgccggatcaccaccttgaaggcggctacgagcagatcaagttcgatgccgcgtttgaatacgacgctgccggcacgccgggaaagaggacgttggccgatagttctgagtactacgccgtcaatgaagcaaccggtgccatgaccaggagcagcatgacctatgacaagtggaagctcctgcctccgcatgagcaggtgaaatacgtcagcctgcgaaccaagatcaacaaccctcgcattctcggcccaatggacaccggctgggggacgaccgactttggtactcaaatgaatgacgtaaagcttggcctgccgaacatctccggccagaaaatgaatcaatga

SEQ ID NO: 528147 - DNA, 417 bp, Stenotrophomonas maltophilia
gtggtgctgcaggccggcagcagtgcgatcacgctggagggcgggaacatcaccttcagctgcccgggcgagttcaaggtcaaggcgggcgagcatccgttcatgggcggggagcacgctgtcccgttcatccctccgcttcctggagggcttcagcgcattcccgactggatcgcgttggactaccgcgatgtggaaacacaacaggccatggcaggcactccttacgaaatccacttcaggaacggcccggtcatcaagggaaagctggatgttgccggcaaggcccaccatgagcccatcccgaagcaggaggtagagaaggtcgtctatgaaccccgcagcgctgatacggaagacaactggcccgacctcgagctgatcgccaaccctcaacagggtgcgggccgtgggtga

SEQ ID NO: 528148 - DNA, 759 bp, Stenotrophomonas maltophilia
atgcaggatgcgcagtggtggtatgccaacagcaggcagagcgaagggccggtcgatcttgccgggctgcgccgcctgcaacaggacgggacggtgacggcgcgtacgctgttgtggcgggagggaatgccgtcgtggcgaccgctggccgagctcgaccctgcggtggccgcagccgggccggtcgcccaaccgcccgagcctgcaggagtcgcgacgaccgccgccgatccatccgatccctaccgcgcgcccacgacggccgccctgcccacgccggccaccgggctggagggtgacatggcgctgtatgccgccgtcgtcggcggcaacttcccgatctatcgccagcgctggcggctggatcagggcatcgccacgggcagcggtacctggcactggccggcgttcctgatcggcttgatctggatgatgtaccgcaggatgtaccggctggcggccatctgggccggcaccctggtgttcttcagcatcgccgaggctctgttgggtgtgcccgaaggcatgtccatgttcatcaacttcgtgctcaacatcaccgccgcggtgtatgccaaccgctggtatctgtcgcactgccagcgggagatcacccgggcacgtgtcgttgccggagacgatgcggcacgcctgcgcagcgaactggtagcccggggtggcaccagcgtaccggcggcggtcggggccatcttcttcgtcctggtgatgatgttcgtggcgcaggcgatggccggctga

SEQ ID NO: 528149 - DNA, 885 bp, Stenotrophomonas maltophilia
atgcagtcgaatccggacatcagcaacggcctgtatcacgggcttgaggcctggcacgtgcgcacgcccgtcgccacggcggtcatcagcgtgttcggcggacagctgctgtcgttcattccgcagggacaaccggatctgttgtggttgtcgcccatgcgcgccgagctgccgacgccgatccgcggtggcgtgccggtgtgctggccatggttcggtcgccagggccagggcgcggatgctcctgcacatggcctggtgcgcaccgcacgctgggaactgctgcacgtgcaccagggcgatgacggcgcagtggagctgcagctggccccgttactgcccgacccactcggcctgcgcctgcagatggtggtgcacgtcggccatcagctgcaccagcaactgatcaccgagaacatcggaaccgccccggtgacgttcacccaggcactgcacagctacttcagggtgggtgatgccagccgcgtggacgtcgagggtgtcgacggactgcagtacctggacaagtacgaggactattcccacgcgcggcagcagcaggggccatggtcgctgcgcgacccgcgcgatcctggccgcagcgaccgcatctacaccggggcacagggccactatgtgctgcgtgatcccgtgctgcagcggcagatcgagatccacagcgaaggcagccagaccctggtggcctggaacccgggagccgaggccgcggcgaaaatgtcggatgtcggcgagggctggcgcgactatgtgtgtctggaagtggccaatgccggtcccgagcagattacccttgaaccgggcgcaagccaccggatggcacagaccctggccagcgcaccgctgcaggccacgacaggacgttga

SEQ ID NO: 528150 - DNA, 1053 bp, Stenotrophomonas maltophilia
atgcctgacgcgccatccggatcggcccccgccgagcgcattggcgtcgcgctgtgcacctacaacggtgcgcgctacctgcaggcgcagctggacagcatcctcgaccaggaccttccggtgagcgaagtggtgatcggcgacgatggttccagcgaccagacgttgccgttgctgcaggccttcgaggcgcgcgcgcaggcgctgggcatccgggtcgagatcgtccggcacccacgcaacctcggttatgtccgcaacttcgccgacgcgctgcagcgctgccaggccgacatcctgttcctgagcgatcaggacgatgtctggcatccgggaagggtgcgccgctacgtgcagcgcttccgcgctgatccgggcctgttgctggtgcacagcgatgcacggctggtggatgcgcagggcgcgccgctgggccagcggctgctggaggtgctggtggtgcatccggccgaagtcgaactggaacgctcgggccgtgcgatcgatgccattctgctgcgcaacttcgtcaccggcgcgacctgtgcgctgcgtcgttcgctgctgcagggggcgctaccggtaccgccgggctggagccacgacgaatggctggcggtgcacgcgtcgctgcgtggagggctggacatgctggccgagcccaccatcgattaccggcagcatggcaacaaccagattggcgccagccgccgcggtttcctgcagcggctgcggcatctcgatctgttcgacgggaaggcgcggcagcgtaccgcggggcgtctgctggccctggacgcgctgctggtgcagcgcggcgtccgtgttgcacctgaacgcttccagggtctttccgcgctggcctggcgcatggcctggtcgcgtctgcaactgtatcgccgggcgggcgtgcaggcgcgctggatcgctcacgacgcgccgcggctgttcgcacgcttggccaatgtgtgcctggccggggcaggctggcgcggcgtccgcgcggcgttggcgggggcggccgcgggctggcgggagcctcgcgctgcttga

SEQ ID NO: 528151 - DNA, 879 bp, Stenotrophomonas maltophilia
atgacccctcccagccggttgcagctgccgcctggccactggcccagcctgctcgatggcctgtgcgcgcgtttcccgcgcatcgaccgcgcgcaatggcaggaccgcttcgcccgtggtcgcgtgcaggacgcgcagggcagggcgctggcgccggacctgccctggcaggtggggctggagatccagtacttccgcgaggtggccgacgagccggtgattccgttcgccgaggccatcgtccatctggatgcgcacctgctggtggccgacaagccgcacttcctgccggtgacgccggccggccggcacgtgcgcgaaaccctgctggcgcgtctgattgcccgcaccggcaaccccgagctggtgccgctgcaccgcctggatcgactgacggccgggctggtgttgttctccacgcggtcggcctcacgcgatgcctaccagcggctgttccgcgaacggcgcatcgagaagatctatgaggcactggcaccggccctgccgggcgtggcgttcccactgcagcggcatagccggctggtgccgggcgagccgttcttccgcatggccgaagtgccgggcgagcccaatgcgcggagccggatcgagctgatcgaggcggagggaccgatctggcactaccggctgcggccggagaccggccgcaagcaccagctgcgcgtgcacatggccgcgttgggcgcgccgatcgagggcgatgacctgtatccgcaactgaggtcgcgcccggagggggcggtcgagccgccgctgcagctgctggcacaggggctggccttcgatgacccgctcagcggggaacggcggcagttcagcagccagcgccgcctgtgcctgtcggatcgggcggggtag

SEQ ID NO: 528152 - DNA, 1143 bp, Stenotrophomonas maltophilia
atgcgtttggcagcacttacactggccgttgccgcggtcctggtcgccggcggttgcaaccgcatcggtgcgggcatggatgcgggcaaggccgcgtcgctcgaattcgacaagccggtgtccggcgagatcaccacgcgcagcggcatcaacttcaacgacggcagccatcaccagctttaccagatcaagctggacgacaacgatctggttggcctgaagctgaccggcaggctcagcggttcgatcgccgtgttcaacaacggcagcctggtatccaccagcaataccgtctacgagcgcgagggcgacgtctcggtggcattccgtgccagtggtggcggcacctaccaggtggcggtcaatgccgatggcccgtccgccttcggtccgtaccgcctgcgtgcggagaagctgaagccgtacgacggcaagccactggtgggcggtggcgagatcgtcgacatgctgggcggcgactcgcaggactacatcctgcaggtggagaaggaaggcctgtaccagatccggctggtgtcggatgccttcgatccggtgctgaaggtgtccggccagggcgtggatgccgagaacgacgatagcagcgacagcaccaactcacgcctgagcctgtcgctgaagccgggcaagtacaccctgaccgcgcgcggcctcggtgacggcgtcactggcatgttcaccctgtcggcgacccgcatcgaactgccgggcaatctggtcgagcgcgatggcaccgcactgccgagcacgggcagcgtgtacacgatgctcgacaacgaaggtcgccgccgcttcctgctgaccctggatcgtccggccgacgtgcgcctggatgcgatctccagccaggtcgacaccgtgctgcgcgtggtcggcgccaatgtcgagctgtccgacgacgatggtggcaatggcaccaacgcacgcctgcaggaaacgttgccggccggccactacaccgtcgacgtgaccagcgtgaacaacggcgcgggcctggtggaagtgcgcgtgcaggtggatggggccagcgccgacggcgccgctgcctcggcggcacgtgccgcggccgacgcagcagccgttgccgacgatgacgctgcggtggaagcggcgagccgttga

SEQ ID NO: 528153 - DNA, 795 bp, Stenotrophomonas maltophilia
gtggccggtggcagtctgcccggcacgggcgcgccgccgacaccggatgcgcgcccggcagagggcgccgtggtgccgctgtaccgcgtggagaccgccacctacgcggtggtgccgcccctgctgcgcgaggcctctctggccagcctcggcacgttccacgaacggcagggcgagcagcgcctgctgtacaaccagggcgcgctgcgcaccgcctggggccggctggtcgggcagagcagcgagattcactggaagggcgatgcgcagcccgggttcgacggcgatgtgatgggcctgcaggccggccttgatgtgtgggctgcggccaacgacaaccatcgcaaccagatcggcgtgtttgtcggccgtacccgcgcgcagggcaagaccaccggcctggcgctgggctgggagaacgtgcaggtgggccagaaccggctggacgacaagcacgtgggcctgtactggacactcaccggcagcaacggtggctacatcgatgcggtagcgatgcagagccgttacgacgggcgcgtgcgttcctcgcgcgggcttggcttcggcatcaagggcgatggcaccagtgtgtcggtggaggccggcaagccgctgctgcagttcggccagtcggcctggtggctggagccgcaggtacaggtgatctggcagcgcaccgcgctggatgaccgtcgcgatgcggtatcgagcgtgcgcttcgacaacgacaacgcctggaccggccgcatcggcctgcgcctggccggtgactaccagttggccgacaacggctag

SEQ ID NO: 528154 - DNA, 177 bp, Stenotrophomonas maltophilia
gtgatcgtcaactcgcagcgctcgcgtgcgctggaagccggcgtgggtgtggtcgggcgcttcaaccgcaccatcagcgcctacgcggtggccgattacacccgcgaactgggcggcgatcgcaacgagaagcgccgcatcatcgaaggcaacatcggcctgcgcgcggactggtga

SEQ ID NO: 528155 - DNA, 432 bp, Stenotrophomonas maltophilia
atgaacacgccctaccccgcttatccccgcctgcacgccctgctgggcgatgccctgcccggcctggcgttgcccacacccgtggctgaagcgctggaagatgcattgtgcgagggcgacggcgatgccgcgccgtcggccttcttcgcccggttgcgtggtatcgcgcaaagccacgctgccgatggccagccctggcgcgaacggcacctcggcgagtcgcgtggccgggaactggccgaggccacgcggtgcctcgcggcggtgtccgcctgcgggggtgtgttgctggcggcgcagtcggcgcgcgagatggatgatgcggcagcgcagtgcccgccgcaggtggaggaaggcctgctgcatgcggtggtggtgctggccgatcatgcgggcgggttggtggcacccggtgcacgcgcgggatcgtga

SEQ ID NO: 528156 - DNA, 1212 bp, Stenotrophomonas maltophilia
gtgtccaaacgcattgttgtcatcggcgccggctttgccggcatgtggagcgcgctggccgccgcccgtcttctcgatcaggccgcgcgccatgatgtgcagatcgtgctggtagcgccgtcccctgagctgcatgtgcgcccacgcctgtacgaaaaggggccggagcgcatgaaggccccgctgcagcccatcttcgatgccgtcggcgtgcactaccttgccggccgcgtcgagcacatcgatgttgccaaccagcaggtgcaggtggtgggccatggtgcggatgccgcatcgcagacgctgcactacgatcgcctggtgctggccgccggcagccgcctgaactgcccgccgattccgggcctgcagcagcacgccttcaatgtcgatcagatcgccgacgcggcgcgattgcaggtgcacctggagcatcttgccgatcgccccgaaaacgcaggacgcaacacggtggtgatcgcgggtgccggcttcaccggtatcgaaaccgcagccgaaatgccggaccgcctgcgcgacgtgctcggtgccgatgccgcagtgaacgtcatcatggtcgagcgtgccgaggccttgggtccggacctcggcgaaggcccacggccggtcatcacccaggccctgaccgagctgggcgtgtcgtggcggctgggttcgggcgtggcccacgtggatgccgaaggcgtgaccctcgagaacggtgaacgcatcgacgccgcgaccgtcatctggacggccggtgcacgtgccagcaccttggccgcacagatccccggccagcacgacgccgtgggtcgcctgcacgtcgatcgcaccctcaaggcgacgggtgtcgacgcggtattcgccactggcgactgcgcgcacgccgccacggacgacgatggcaacgtagcgatgatgtcctgccagcacgcgatgaacctggggcgctcggccggccacaatgcggccgccgacctgatcggggaggcgatgattccctacgcgcagcccaagtacgtgacctgcctggacctggggccgtggggcgccgtctacaccgagggctgggaccgccaggtggtgcttttcggtgcggaggccaaggcgctgaagacccgcatcaacaccgaatggatctatccgcccagtggtgagcgtgcggagatcctggcgttggccgacccgcttcgcatcgtggttgcctga

SEQ ID NO: 528157 - DNA, 561 bp, Stenotrophomonas maltophilia
atggcccacattggaacgggcgtcgagtacgccctgcactgcctgctctggctggtcccgccgctggaacagcggcccagcagccgcgacctggccgaactgcagggcgtgccggcagccttcatggcgaagatctttccgaagctggagaaagccggcatcgtcgagtccaccggcggcatccgcggcggctaccagttggcgcgtgcgcccgaggacatcagcgtgctggatgtggtcgacgccgttgagggacagaaggcgctgttcgactgccaggagatccgcgggcgctgcgcgctgttcgatggcaacccaccgcgctgggccaaccgcggcgtgtgcggcatccacgcggtgatgatcaatgcgcagaaggccatgcgcgaagaactggcgcgttccagcctggcgtcgattgccgagggcgtgcagagcaagggacgcccggcgagctttgcaggcgatgtgcaggactggtttgccgaccgccagattgcacgcgaagaagcgcgcatcaccggcatgcgcgcacgcacgtcggcacaggacgatgattga

SEQ ID NO: 528158 - DNA, 741 bp, Stenotrophomonas maltophilia
atgcgtacctgggtcttggccgccacgatcatctggttcttgtgcgcacgcgcgctcaccttgccctgcgcggcgtgcaacgcgatgccgcgctcctggttcgggctttcaccgctgggctgcacgccggcggtgtacatcaccagcccgccggccaccgccatcgtcagcgagccctgcgtcatccagttcagtgccacgccgctggccagcgtggtgtgggtgccgctcacccagacctggtcggccggggtcaggctcagcacgccggccacaccgctgcccagcagcaccggcgcgctccagcccggtgcctcgccatcgccgccggcgatgctgccggcggcactgccgctatgggtggcgcgcagcgtctcctgcagctcggtcagggtggtgtccaccggcagctcgttcggctcgccgggcagctgcgcctgctggttggcggccgattcggccagctgctgcagcagctgctggctttcctgcagctggctcaatgcctgcggcgcggccatctgcggcgagccctgctcggtggtcagcagcaggccgcggccggcgcgcagcgcgccctgtgcctgcgtggacagctccacgccgaaaccccgctcgccttcgcgcacattgtcctggccgcccttcagatgccccagggtcagcgtggtctcgtgctgggtggtggacagctgcgcgcggccctgcccgggcgtgtcgtcgaagcgcagctgctggtag

SEQ ID NO: 528159 - DNA, 1962 bp, Stenotrophomonas maltophilia
gtgccgggtgccgcgttggctgcggccgcggcattgcccgccctttggctgggcggccctcaggcgggccgcagcatcgcccgcaatggcctggcgttgttgttgtcgctgcagctggcattgctatgcgcgatggtcggcctgtcgccggcgttgccgatcgcgttgttgctcggcgtgctgctcagccaccgtgatcgcctgccggtatggctggccggtggcgttggcacgctcgcgctgttgcagccgctgctggaaggtgccgcggccgggccaacgctgctgcaggcaacgctgtttgccggccttgcactgttcctcggccaggtcgcgctgcgcctgcgccagcagaccgaggcgctgggccacggcccacgccgcctggctgcgctggcccgcgatatcgccaccggtgccgatcttggcgcgcatgcggataccacggcccatgcacccggttcgctggcccacgcgctggccgataccgcgcgccacgtgcaggcccagcgtgggcgcgaggctgaagcgcatgccgagaacgcacagatccgccaggccctggacgcctcgcgcaccgcaatgatgattgccgacaacgaccacgtgatccgctacgtgaaccgttcggtggtggccctgctgcgcaaccagcaggcgacactgcgccaggccttccccgacttcgatgccgagcgtctggtcggcagcagcatccaccgcttccacgccaacccggaccgcatccgcgcgatcctcaatggcctgcaggtcacgcacaacggcaaggtacagatcggcccggtgcactttgcgcaggtggtcacgccggtgttcgatgcacagggcgtgcgcctcggcttcgccgtggagtggcatgaccgcacgcacgaactgtcgcttgagaatgctgtagccggcattgttgccgccgccgccgcaggcgatctcgaccagcgtctgcaagcgggcgaaggtgccagcttcctggagggtctgaccggcggcatcaaccagctgctcgatacgttgggcagcaccgtcgacgaagtgcgacagatgctttctgcgctggccaatggcgatctggaccggcgcatgcatggcgagtaccaaggcgccttcgccgcgatccagcgtgatgccaacgctaccgccgggcagctggcgcgcatggtcggccgcatccagcagtgctccatctcgatcagtaccgccgccagcgagatcgccgccggcaacggcgcgctttccgaacgcagtgagcgccaggccgcgcacctgcaggaaactgcggcttcgatggaagagctgaccgccacggtgcgccagaacgcggcccatgcgcgtcaggccagtgaactggccgcctccacacagaatgccgccggtgacggcaacaccgccatgcagcgggtggtcgacaccatgcaggcgatcgaggacgcgtcaaagcgcatcggcgatatcaccggcgtcatcgacggcatcgcgttccagaccaacatcctggcgctgaacgccgcggtcgaagccgcgcgggccggcgagcagggccgcggattcgcggtggtggccagcgaagtgcgcgtgctggcccagcgttccgccgcagccgcgcaggagatcaagaaactgatcgacgaagccggccgccaggtgggtgagggtgcgcagctggtggccgatgctggccagcgcatgcagggcatcgtcggtggtgtcgagagcgtcagccacctgatgcgcgagatatcagccgcttcgcaggaacagtcgatcggcatcgagcagatcaaccagaccgtggtgcagatggaccaggccacgcagcagaacgcggcactggtggaggaagccactgctgccgcgcgtgaactgcggtcgcaggcgggaacgctgactgaggcggtctcggtgttccgccagcaggaagcgcgcgaggtcgctctggtcgcctga

SEQ ID NO: 528160 - DNA, 255 bp, Stenotrophomonas maltophilia
atggccgtcgtagcgtcgagcttgctcgacggcccgggccagcagcagtcgagcaagctcgactctacggaagcgacggttgggatggctgccgtagcgtcgaggacgctcggcgcgatcggaatatccggtagtgccggccagcggccggcactaccaggggcttacgaccagtcgtacgagaacagcaccgtgcggcttaccggttcgtacagcatcacgatcgcatcggcgccggtggcgcaccagttgtag

SEQ ID NO: 528161 - DNA, 879 bp, Stenotrophomonas maltophilia
atgaagactcccctgcgcaccctgctcgccagcgctctgctgtgcgcccctgtgttgaccaccgccgcgccggcgcagacgcccgaacaatcgctggacctgtacgcacgcgtgctgattgaagacgatgccgctgccgcgcgcacgctcaacgatgccctgcgcagcgcccccgacagcgaggacgcgttgacgctcgcgccgggcgcggtggccaaggccctggccgaaccgtggatggcgctgcaggccagcatcggcgtcacgcccgatgccgccgcggccgaagagatgttcgccaaggtgctgaaggcatcggcctgccgcgccaccggcagcaccatcgaagacaacgagtacgtgaacggccagaaggtcgccacggtcgatttcagctgcaaggtggtggacctggacagcgtgcgcccgctgttcatcgccagcatcagcagtgacgaccccgccgcacgccgccgcttcatcgatgcctacacgcaggcactgaagagcggcgcgcggcgcacggtgaagggcagccacaagatgtactccagcgcagagcaggcgtactggttcactggcagcttcgatatgctgatcagcccggtgctggatgcactcgcgccgttcgagcagtggagtgaagatgcccaagccgccagcgcaccgaaggtgaccggcgtgcccagctgcgacctgctgctgcagcagcaccgcagctgcgtggcgaagatcgccccggaccagatcagcggcgtggacgcgatggccgaggaactgaaggccaaggcacaggtgcaatcggccgatgaaatgacgcaggagtgcaaggctctgcgcccgatcgccgagatgatgtggaccgacgcgtgcgcgtga

SEQ ID NO: 528162 - DNA, 657 bp, Stenotrophomonas maltophilia
atgctggcctatcgcctccccctgctgctgtgcctgccgcttgccgcgcaggccgccaccgcggaaaaactgagcccggaacaggcctttgacctatatgcccgggccctgctggaaagcgatgcccaagccgcagaagccctggtccgcgcgctgcccgccgatagcctgtggactaccgatatggttcggggacttgcccgtttcgaatcggaaatgcgcgcagcggtagccgggcaaagcgatgatgaggaggaggtcccggccgcacttaccgaggcgatggtcgcccagatcaccagaacatttgccagcagccactgccgggcagtgcctggacaggtcattgctgaaactgcaccgggcgggaaggcgcgggtcacattcacctgccaggtaccggtgtgggatacagaaagcggtctgctggccgagccggacatccagcagaaactgcgggacgatcaggtgtttgctacgtatctgatcgcatcggagctgcgcatggcagagctgcagacgattaccggcaccgccgtgctggaaggaagcgccgagatgggatatttcccaggcggcggcatgatgcgatccctttccccggtgcttttctcggtctttcccgcagcactgaccgatgcgcttaaggacgaatag

SEQ ID NO: 528163 - DNA, 513 bp, Stenotrophomonas maltophilia
atgaagaacctgaagaccccgatggcgctggccatcctgctggccgctgccccggccgtgaatgctgctgatctgaccatcagcggtgagattgtggagaccacctgcaccgctgtcatcaacggcggcgttgccgtggcgatgggcaagatggatctggaagacctgaagggcgcagaccgtatcggccgccgcgatctggacgttgaagtggcctgcccgggcgctgctggcgcgcatgacgtagcggtgaagttcagcggcccgagcaccgccgatggtgcgttggcactgacggctgccagcggtgccgaaggcgtggcatacaagatcttcgacagcaccgacacgctgctgaagatcaacaacgcgccgacgcagttcgtgaacgtcaccgacaccgcgccgcagacgctgaagcacagcgtctggtatgccaaaaccggtgcagctgacgacgtggtggccggcaccgccatcgccaacgcgcagatggacatcgtctacaagtaa

SEQ ID NO: 528164 - DNA, 510 bp, Stenotrophomonas maltophilia
atgaaaacttcgcacctggtgtgtgcagcactgctgatcgccgccgcaccgttggcccacgccgactcggccaccatcaccgttaccggcaaggtgctgccgggtacctgcaccatcgcgcccaccgttgccgtggcgctggacgacatcgatgccaccgatctgaaggcagggcatgacaacggcttgaagcccgccgtgctcaatttcaccagttgcgtaggcgttgccggcatcgatctgacctttgacggcaccgacgatgccgcgcaggacgggcattggaagaacctggcaagcaccggcggtgccaccggcgttgcggtggctctgctcgagggaacggccggcaacgtgttcctgaaaaagacagcgaagcgaagcgtcgtggtcaatggcgcagccacagccaagttcgatatgcgcaccggctacttccgcaatgccagcacaccgctcacggcgggcacggtcagctcgcagatcaccgttacggctgcctacaagtaa

SEQ ID NO: 528165 - DNA, 993 bp, Stenotrophomonas maltophilia
atgaaacggcccggtcaggtattcgcgtttacgttgccgatgctacgtctggccgttgggttggccgcgtgcctctcaagcgcgagtgcgctggcctgtacatcgtcgggcggcagtactgcttccctgacagcggatatgagctcggccgatacgccggggcgagtgattctgctgagggggccgtccggctggatgagcaactgcgacgtgccccgccagcaccgtgtagagctctcgctggaaggcttgggcttgacgcccgtgtccaccatcgattaccagggaaagacgtatgtgacgtaccagctcagtgacacctcgccgctcttcttctttccggtgttcgtgaaggtgcgtgatccgggtgtcatcggtggttttgagctgtttccttccagcctgggatcgaccaatcccgttatttcctacgctgttgataaccacgatttggcgacctacccacagctgggcgtggtagccaggcgtggaatgcaatcggttcgacgtacgcagctgggcaccgaggtagtgcagcacacggagtttccgtactccatccgccatgacgtgttcgttacggtgaatgtgcagcagccgacctgcacgctgagcaataccggcttcgcactgacagatgtctcagccgatgttctgcggtcagtcggagataccagccgcgagcagccatttgcagtgaagatgcaatgcgggactgcgggtgtgccggtaaggctgacccttaccgactcgaatgatcccctcgcctccggaagtgtgctgaagccaaccgccaatgccactgcgcaagcggtacaggtggaactgctgcgcaatggcgtgccggtaacgctgggacagcagtgggaccatggcgtgtcggccaatggctcgcaggacatcaccctgcaggcccgctacgcacgtgttgcaggcacgttgaaggtgggcgtggtggaaggccaggcagtgctgaccgcggagtaccggtga

SEQ ID NO: 528166 - DNA, 174 bp, Stenotrophomonas maltophilia
gtgagggtctcccacgaggttgcgtcagtggtgctcagccagacctggacgattccactcacccaggacggcgggcagaacatcacgctgacggcccgctactaccgcgaagcaggcatcttccatgctggcgtagtggaagggcaggcggtgatcaccgcaacgtatcgatag

SEQ ID NO: 528167 - DNA, 1023 bp, Stenotrophomonas maltophilia
atgatggcaacttctacacacaaaagcagcgccacgcggcgccatgtgcgcgcccgctgcgtgtgggcagcgctggggctgctggcctcggccgccgccactgcgtgcaccagccagcacaatgccggcgggccggtaaacctggtgatcgacgcctgggatgatgtcgaacaggacaagctgatcgccaacttcacgatgggcaacggaaatgcccagttcctgctcggatgtgggtacaacgctgttgttcccatggacgtgacctcatcactttccgggctggagttcgttcgcaatgtcacggtcgacggtaagacctatccagccttcggcatgatcgattacccgcgctcccccttgttcattttttatcatcagatctggaccggggcgggcaacgtccaggaggagccacagccgctggatatccgcgtcagtgcccatttcccctcaaagcctctggatgccaccggtcgcggctcgatggtaaggatggcagcagtatcccgcggaggcatcatggagcgggtgcctaccacactgctgggcaccgtgagccgtcagtcaccgctgtacccagccttcgtcaagaccgatacgtttaccgtcactgccaacctgaaggttcccacctgccagctgtctgatacacccgtgaaacttcaggacgtcgctgcggccgaccttcccgccagcggcagtcatacgggcgaacgcggtttcgatgtcgccatgaactgcaacggtgctttcccggttgagatggtgctgaccgatgccaaccttccgggcaataccggcagccgtctggcgccgactgcaaacagcaccgcaggcgcggtgcgtgtggagttgctgcgcgaaggcgcgccggtagagctgggcaagacctggacgattccgctcacccagaacggacggcagaacatcaccctggccgcgcgctactaccgtgaggcgggcacgttccatggcggcgtggtggaagggcaggcggtgatcaccgccaactaccgatag

SEQ ID NO: 528168 - DNA, 1002 bp, Stenotrophomonas maltophilia
atgatgaaatttccattattcagtggcattggccgccgctgccccatcctggtgctgctcagctgcggcgtgctggcgccagttgcggcacaggcctgcaccagtgcgcatgccggggccaataccagcatcagaatcgatgcgtgggacgacagcgatgaaggtgtcgtcgtaagtccctggatgcacacaggcaacgccaccttcctgagcggttgcaactacggtgaattgatagccgttgatgtctcagccgcaatgcccggactggagtttgtccggaacgtttctgtggatggtgagacctttccggcgttcggaattcgcggcaaacccaaaaccccgctgctgatctttcagtatgcggttggcaacggcagcggaggaaatcagttctttcccttcaacccgcggaccggcctgcagttttccggtgccggctggagcggcagcagtcgctggtcgtgggtgcgcatggccgcagtgtcccgcggcggcgagatggaggcgttgccgaccactgttgtgggagagatcacctattcgacaccgagctatcctgcacttgtaaagaaggacaactacaacgttaccgccaccctgaagaccaagacctgcagactcacggctaccgctgtcacactgcaggatgtggacattgccgatctgccagccgaaggcagcactgcccgtgagcgggagttcactgtcccgatgaactgcaacggtgcattcccgatgtacctggcactgaccgacgccaacgcgccgggcaacaccggcagccgtttgacgcccaccggcaacgccacggccggggcggtgcgggtacagctgctgcttgagggaaacccggtggtgatggggcaacgctggtctgtgccgatgagccagaacggttcgcaggatgtgacgctgggtgcgcgctactaccgcgagacgggtgcgttgcacggcggtgtggtggaagggcaggcggtaattaccgccacctaccgctga

SEQ ID NO: 528169 - DNA, 723 bp, Stenotrophomonas maltophilia
atgaccccccgtgcatcgatctggatgaccctgctgctgagtgctgctgtggccggccctgcatctgctgccgtcacgctgcaaggcacgcgcattgtgcataacgccggcccaggccgcgatgtgacagtgaaagcgaccaatggtggtgcacaggctgccatggtgcaggtctgggttgacgacggtgacagccactcgcgaccagaggacatgcgcacgccgttccgcgtgacgcccgcagacccacgcctgctgaagccgcagcagagtcaggcgtatcgcatcacctacgcaccgcgcccgtcggacaccccgctgccgaccgaccgcgaatcggtcttctacttcaatctgctggatattcctccccgtcctgccgatgcaaagagcacgaacctgctgcagtttgccgtgcgcacgagggtgaagctgttccaccgaccggaggggctgccgggcaatgcgcgcgatgccgccggccagttgcgctggcgcgctgaaggaaatgcgctgcagataaccaaccccacggcctatcacgtaaccctcagcacgctgacgctggccgacggcagcaaagtcaagacagacatggtcgcgcccggcgcaacgctgcgactgccgttgcccgcaggcacctcgatgcccagcaacgtccgtttccaatggctggatgactacggctcgccccgcgatactgaggcctccgtcgagcgctga

SEQ ID NO: 528170 - DNA, 513 bp, Stenotrophomonas maltophilia
atgtcgaaccgattgaacctgattaccgtcggcgcgctcgcgctggcactgtctcctgccgcattcgccgagaagctggaaatcaccggcgagctgatgaccagcacctgcgctgtcgacgccaccggcggcaccatcaccgtgcccatgggcaaggtggatgtggcatgggtgaacgaggccgagcgcgccggcatgaagaacttcagcatcatgctggactgcagtggctcgggcgccgaccaggaagtgggcgtgcgcttcggcggcacccccgatggcagcaccggcaacctggccatcaatccgggcggtgccaccggtgtaggcgtagccctgtacgacagcgccggccaccaccagaagctcggcgaggacccgttgcagtgggtggatatccccaccggtggcaagggccagctggactacagcgcctggtactcgtcgccgggcaagaacgctaccgcgggcgtagccaacgcctcgggcgacttcgtcgttctttacaagtaa

SEQ ID NO: 528171 - DNA, 2451 bp, Stenotrophomonas maltophilia
atgggggggcatgccagcgccaacggcgatgactccctgcagttcagtgaaggtttcctgattggtggccgagccatcgacatgcagcgctatgtagacggaaaccccgtgcaggccggcacatacccccttgaggtgatcatcaatgggcagttgcacgacaagcgcgagatcgtctttgaagagaccgatggccggcaaggcgcggtgccttgcatcactgcgggtctgctgcgcgagctggggctcaaggaaacgctgctggctgggctggacgagaatgatgaacgttgcgtcgatcttgccagcctcatcgatggcgccacggtcgagttcgacgaaagcaacctgcagcttcagctgagcgtgccgcaggccgcgcaggcgcgcgatgcacgcgggtatgtggcacccgcgcagcgcgatcacggcatcacggccgccttcgtcgactacagcgtcaaccacaaccgtaaccagggccaacaggccacgtacctgggccttaacacgggtgtcaacctcggggcgtggcggctgcgtcatcgttcctccttcagccagggcagccacggctcgcgccacgatgtgatcagcagcaccctgcagcgcgatctgccggcgtggaatgcccagctgctgctcgggcagggtgcgaccggtggcgaactattcgagtcgctgtcatttaccggtgtacggctggccagcgacgaacgcatgctgccggactcgctgcggggcttcgcgccggtggtgcagggcgtggcagaaaccaatgcggtggtaagcatccgccagaatggccacgtcatccacgaagtgagcgtggcgccgggtccgttctccatcgaagatctgtaccccaccaacttcggtggtgacttgaacgtcaccgttaccgaagccgatggccgccagcagcagttcactgtcaacttctctgcggtgccgcaggcgctgcgaccgggcgcaagtcgtttcagtgctaccgccggtgaacttcgcgatgcacgcggtgtgcgcgaagcattacgctttgccgaaggcacctatgcgcgcggcatcagcaaccatttcaccgcactgggtgggctgcaggttgccgaaggttatcaatcggcgttgttcggcggggcaatcaataccccgctcggtgcgttcggtgccgacgtcagccattcgcgcgcgcgcctggccaatggtgagcagttgacgggcaacagcttccggcttaactaccagcgctacatcacggcaacgggtaccaactttggactggccgcgctgcgctacagcacccgcggctatctcaccctgaacgatctggccctggcgtacaacgacgattggggtgtcagtggccgcgctcgccagcgcttccaggtgaatttctcgcagcgcatcggcgagcgcagctcgatttcgctcaatggcggacaggtgcgctattgggacagctcgcggcagcagaacgatctgcagatgcggtttcagaccactatcggccgcgccaatctgagcctgtctgccatgcgccttcaggtgggcgacggacgccaggacacgcgctatgcggccacctttagtcttccgttgggctcggccccgagcgcaccgcgcttcagcacgcaggtggcccattcggcacgcggtgatcagggccagctgggtctgaacggaacgctgggtgctgatcagtcgctgagttacagcctatcggccagcgataccagcggcggggagggcagcgccagtgcctacgcgtcctatcgcagtgggcagggaacggttaccgcaggctacagccgatcaggcgatttccgcgcgttcaatgccagcgccgccggcagtgtggtggtgcaccgcgatggcatcaacttcggtggcccggttggcgatggcttcgcgctggtccaggccgatggcgcacagggtgcccgcatcggctacgggagtggtgtgcgcatcggacgcaacggctacgcgatgctgccgcatgtcagcccttaccggtggaaccagattgaactggacccctcggggctgcccatggatgtggcgctacttcagacatcgcagcgcacggcacccacggcgggcagcatcgtgcgcgtgaccttcaacgccagccgcgaacgcacgctgttcattgacgccacggatgcgctggggcagccgttgccctttgccgcacgcatcgaagacagccaggggcgcagctacggcgcggtgggacagggtggcgtcatccagttgcgcggtgcgcctgagggcggccagctgattgtcgatccggaagggccgcaccgctgccgcctggactacaccacccctgctgcaccggatgcctacggcctgtcctggagccaggccatatgcacgccgctcccagcgccaacccctgcattgcaggcagcgctggacgccgtcgagccaacctcgttctga

SEQ ID NO: 528172 - DNA, 510 bp, Stenotrophomonas maltophilia
atgaaactgctcaatcgcactgctctgctcaccgcgctgctgttggccgcgccgctggcttcggccgatacggccaacctcctcatcagcggccgggtcctgcccggtacgtgcacccttaccgcagcgcccatcgcgctggatgacgtgaaggccagcgacctcaccccgggcacggacaaccagatcaagctcggtgcgttggaattcaacggctgcgtcggcgtctccaaggctgtgctttcgttctctggaacgcctgccgatggcgatgccgagcgctggaagaacaccgcatccggtgatgccgccgaaggcgtatcgatttcactgctggccggtgccagtggcacgaccaatctgaaggatggcgacaccggcattgatgtgccggtaacgggtacgacggcgcgctatcagctgcgtgcggcttatcacctgcccagtggggcggtgccgagtgcgggcgatgtgtcgaccgagatcgtggttacggccgactacgagtaa

SEQ ID NO: 528173 - DNA, 1002 bp, Stenotrophomonas maltophilia
atgcttgtccctactcgttctgcgtgccgcgctaccgcatcgcgcccattccaacgcctgagagcgggcgccgtactggggctgctgctggcgaccgggtccgctgcagcttgtgaacattacacgctgtttcccgatgttgcacttgacacgctgtacgcgtccgccccgaccgcacccggtgtcttcatgtccgaggaaaggggaagatatgcctggaggcaatgctcgttaccgggcggtcctgtttccgtcttcgtccggctggacattcccggcttgaggtacgtgagtgatgtccagtatgaggggcggacctatgcgacgtacgcgagctcagatgattcagcgcttctcgcctttgacacatattgggacacgtttgacaagaagccgctccgtttgggcgaggagctggaaatgctgtatgacacggctgcgggcagtggtgagcagaaggtcatcagccatcgcgtgctggtgttctcgcgcggcggccgcatgcgcacttccagtgtccgtaccggtaatttctcattgcgctcgcctgcatatccggtattggattcgagcgcgtcctactacctggcgccgcaattcccaataaccacctgccccatgcaggacgtgaccgagacgctgcaggatgtacagtacaccgagctgccgacaccaggcagtactgcaaaggaaaagcgcctggtcgtacgtctggattgcggcgtggatgtgccgcgcgcacagatcaccctttccgatgcaacggaccgcagcaacagaggtagtcagttgacaccaacgcttgactccgatgccaagggtgtacgtatccagctgctgcagtcggggaaggaggttgagttcaaccggatttcggacttctccccgggcaccggtggcctgcatgagatcgagtacaccgcgcgctatatccggaccgatggacagctcgttcccggtctgatcagaggagaagccgtgcttgatgtcgactactggtga

SEQ ID NO: 528174 - DNA, 636 bp, Stenotrophomonas maltophilia
atgcggagctgggcagggatgattccaatggtgctggcgggcctgctgcccgccacagcagctctggcggaaggaccggcggcggagacggcgtgctcgccgttggcggccgttcccgcgctgcgcgatgcgggggtgaccgcgttgtcgatgcagcccaaggatgcgcgttgcgtggtggaggtgacggccgccaacggcaaggcgctgcgtcggcagcagcagatgctggaggtgctcgcgcggcatgcctgcgcgacgcctgcggaagtgagcgtggatgacgcacgtctatccctgcagttgcgcctgcccaagcattgtgcggcgcgcagcagccgggacctgttcgcgggcgaggggattgcgtggaagccggcgcgtggtgtgtcgccgcgttatccgccggaagccatgcagcaggggctgtccgggcgcagcctgctgaaggccttgattgatgcgcacggggcggttgtcgccgtgatcgtggagacatccagtggccatgcgctgctggatgaagcagcggtggatgacctgcgtggctggcctttcgtccgtgccgaagcggagagcaccgtgccggagttgaccatcgcgcgtgtgccgatgcggtacgagctggtggagtga

SEQ ID NO: 528175 - DNA, 1548 bp, Stenotrophomonas maltophilia
ttgcctaaacccttcttcttgcaccggccctcgggcctctacgtgcgcttcctgatccctcaagacctccgggccgtggtggggtcccgcttcctcgtgaggagcctaaaaggcctgaccggggacagagccaggctggctgctgctcagctgggtatggcactctcccagcagttcgagcgattgcgccttcaagaagacgatatgaagaagaagcccccttttctggacttcggcatccaggccgtgacgctgcgcaatggggtgcagttgaaaggcatcgacattgctaacaggaaagacgccaagctctttgcggacttcgtgcgtgacatcgacagcgatgacgatgaagagttcgctgatgaccccttgatggcggctgctcacgggagagccccccgtcgccctaccccgactgctccgccccctcccgcctctccgccgctctctgagcgattggggatctacgtggaggatatgaagcgggttggccgggcacccaagaacatcttggacacgcagttcacgctggggctctttatcgagctagtgggtgacctccccatcggtcaaatccagtcggcgcacttccgcagcttttttgatctaatggagtcttggcctgccaacgcttctaagaaaaaggagtttgttgggctgtcgcctgcagaagtaatcgccaaagctcggctcggggactacacccttttggagtcccggacgaaggaaaaacatcgagaccgactggcctcgttcttcaatcaaatggtccgggagggagtcattgatcgcgcgccccacctgggcatgatgcacccccgaaaagctgaatccgaaaagattactcgcactccgtttgacgcttccgagatcgaacttatttttggaccggcattccaggcttgggcatccaagtggccgcatcgtttttggggaaccatcctgggcttcgctaccggagccagagtcaacgagatcggacagctctacgtccaagacgtggaagaggctcatggggtggtaggcatccatattcgagcatcgcagcctgatcaacgcttgaagaactcgtcgtcgtcacgattcgttccgctgccccagcgagtgctgaatgctggcttcttggcatttgtggaagacgtgcgccggaccggaaatacccgccttttcccgaacctgcctctagataaaaactctggctacggcgatgcactcagtgatcaattccgagcttacgtcaaaaagttaggcatcaccggtcggttgaagtcgttccactgcttccgccacactctcatcaccgccctgcataacgagcacggattccccgctgctgttgtccaggaagtgaccggtcacgagcgcagcatcccgaacgggctttcgcattacgtccagcccaacaccctgaaagcccgccaagaagctgtggatgcctacggaccgcccgctctgctcccaccttatgaaccaggaatgttcgacgctgagctaaaacgagcagtaatcgtttccaatcgcaaaaggcatcttgacagaccctag

SEQ ID NO: 528176 - DNA, 483 bp, Stenotrophomonas maltophilia
atgcagaagaagaaatggaaccgcagtcagaaataccacaagagaacccgctacctatacgccttgttctttgacaatgagcaggccgtgtatatcggtcaatccgtcgatcttaaaaagcgctggcaacagcatcggtcagcagcgggcaaatggaaccggcactttcgccccgtagaactcgcttcatatgagatgactcagcacgaagcagaagccatggaagaattgtggcgctgcaaagccgtccagatgggctggcgcgtctacggcctgccacctggcatccttatcaacccctatcggagagcgggcctctggaaacgctggaaagccaggaagttggaatggaagacggggatgacgccagtgccgccgagtcgcttcccatggaagggattgggacttggcattggggttctcctggtcatgacaacagcccttccgtgggctgcaacactcttgctggtcagtggaatctga

SEQ ID NO: 528177 - DNA, 267 bp, Stenotrophomonas maltophilia
atgcaaaacgtaacggcgaaaaatcgtaataaatcagtggggcaaatcaagatgttcacgccaaaagatattttagaggctttttttatggcgaacaaagaagagagggctctcatcgtcaaggcgcacgacgatgctagtcaagccgcaatcgactactacaagagcaaggttcaacatcgacaagcgggagtaaacttcaacatcgaagaagccggttggtgcgcactcagtaataaaaatgggagtgacgcatgcaaaacgtaa

SEQ ID NO: 528178 - DNA, 1233 bp, Stenotrophomonas maltophilia
atgttagtcggaaaaattaccagagaccaagacatcaagattttacaaagggcggtggatcgatacgaagaggtgaccatcgatcccaacaccatttctgtcgtagagtcgcgctttttagatgtgcccttcgatcaagaggaagccgctatcttggctggcgcaaattacgatgctgatatccgctgttttgttgtgcccgaagccttggatttggagccgttcaagcaatggttcccgagagttgaagcggaccttttgcagccaagggatacgaagagttatttgacaaaaagcggaaggccgttggaatcgtatcggttgaaaaaggactcagtaatcggcgtggcatcgttggctatgcccctaatgtatgccgcacttcctcttgtcgccgctcttgcgttttttgtgttccaagtcacagggtctatttttttaagtgtgccaacactatttctaagcgctccttaccttatcactgtctatcaaaaagcctgggcttctcaaagcgaagtgatgaaatctgctgttctcctgctcatctgcccgtatacgattgccacgtgcgcttctattggaggcatcgcatcactcgtgatgctaggcgcgctaagcctcattcttcctgtgtgggttttattcgccggaattctacccttcgcctttgggaaagctatgaatttcgagaaatcgcgaaagctttggatgaccgttaacgtcagcgcaatactgttcagcgtgacgctgtttgcatcgatttgcttcaccatcaaccatttgtttggctcgctcgcatcctctttgatcttcgcaagcgcagcactctacgcgcttcactactcttcgaaagaagcccggatcagagccgcagacctcgcagatttcagcaacgtcaactcaatgagccgatatggctctgagcgcgaagcaatgcaaattcaaaaagcgcgtcaagcgaaagcatcggttgaagatcaatcgctgcgattccaggttggacaaagcaaaggtgttctgtctaaaaaggggtatgccctctccccaggagcaggagccaacatgcatttcagtgctaacgattctgggcgagggacggtcgttctgggttcgacaggttccggaaagaccatatttctaaacaacatcgttgcgtcagtgcttgtcaacaacatcgtcttcgatctaacgcatcaagacaaaaatttaactaaaaacggaggtgataaatga

SEQ ID NO: 528179 - DNA, 408 bp, Stenotrophomonas maltophilia
  misc_feature (394)..(403): n is a, c, g, or t
atgattgaaagttcgaaaaaaagaattcattttgggtctaagtttttagctctacatggtcgtttgcttattgcaagtccgacagaatttcttgggaaaagaaaggatatggaggggtctgttgcacaatcgttctactatctagaacaagacagatacttacctaacgacaaaaagaaatccgacgaatgggagcaggatcagcttttagccacccaagttgtggaggagttcagaaagcccgttgcatttcgcgcagtgcttttagtgttgtttgctgccctagctcttggagccatcggaggaacactgagcaagttcaaagctaaccaacccggctccttcggaaatgtcaaaaacacggttatcaatgcgatcaattctgcaaacgacnnnnnnnnnnaataa

SEQ ID NO: 528180 - DNA, 450 bp, Stenotrophomonas maltophilia
atggtgaataaatggatgttgaccgtagtcctaatagcttcacctttggctgctcatgcggctaccgaacccggctcgctgtcatgtggagcactgaccgctggcaagagcaagaatgacgaagagagcatcaagattctcactcgcgcgattccagaagggtcagcgaaacacctgactgatgtctaccgaaaagagttgataagaaaaggcgcgagtgactacgctgcgttcagcgcgtcgctcgactactacgcaaaaatagctctgcctcttgcggggaaagtcaccgctgagttcgcctcgattgccaagcgagaagggtcttatgtcaatggcgtgaaacgctattgcaaagacaaaaacatgaacatctctgagtttttcaaccgcgcgtttgatgccgcgctgatggacaaagttaaagaattgccgagcgacaacgattga

SEQ ID NO: 528181 - DNA, 618 bp, Stenotrophomonas maltophilia
atgaagaagatggcaatggcaagcgcgttcgtagcgctgatggctcctgagctcgcacacggggcagatttcatgggtatcgaattaggggcaaagttcgacatgcctgagtgcgagatcgaacggacgaactactcgtcgcgatacatctacgactctgatcagccggtaacgccgtgttgggaacatagcattctcgatgggaagcctggtgattacctggacacggctggcacgtttaaaatcaacttcattgctgatggtgctaagaggcctgctggcgttaggtcgaacgcagtcaagctcattgtcgtgagtggagttgttgaaggggtggaagcagccacaggtggttatgaataccaagaccgcttgttgcaagcgctcgtaaccaagtttggcaaacccacgtccctgagttctgagacgatgcagaatcggatgggagccactttcgattcgcatgaagcgatttggaagacgaaagtgctcgaagttaacttctctggcatgggttccagcaccgacttcggccatatcaccgtctattcgccgaaggccacggcctttgtcgaagaggaatacgagcgcaagcagaaagcagccccgtcgttctaa

SEQ ID NO: 528182 - DNA, 414 bp, Stenotrophomonas maltophilia
atgggacttttcagtggcatcaaagacaacttcaagaagagcgaggcagcgacctgcgtccagatccttttggaacagcagcagaagattggctatttcacaggcgatccagcccggactgctagcgttctgattcagtcggtgtgggatgagcgaccggatgtgttcggcgggaagttcggtcaaagaccccacaagatagccctgaccgctattgcgttgtccaagggcctggctcttagcagcgagagttcccccaaccgttttgccttgctctcgtgccttggaactgcgctttcagaggctcatacgaatgcaggcttctaccccttcaacaacctcgacatgacgctcctggaagcggcgggcgaggtgttcattgagaaaggaaacgagatgggcgttccgatgtga

SEQ ID NO: 528183 - DNA, 1110 bp, Stenotrophomonas maltophilia
atgattctgggaatcctggctctgctcgtgcttggcttcttcttcccaccactctggctggttctgatcggctacctcatctacatctatgcctcccgacatacaaggaaggaacgagctgtggagggccgtatccgggcaatgattgccgcacaaaaggacatggcgacgttctccgaactctactacgaagctgctaggtcatacgccgtgtcgaaaggttgcaccgtctcagaccatgactccgcatcggcggctgtaatgatcgatgggaaggcctgggatgccgtcttcctgagagagcggggtggtggcacgaccattacgcttcacgaccatgccgtggtccaaaagaagttcgataccgacctggaacgaacccttgctgtgtcgcgcagaccgcaagaccaaccatcctatatagaagagctagccgctgagactttggctgagcaggcaatggtgaaagggcatgagcccagttttctcgaactcttgaagcgtgcagaagctggcaacgctgaggctcagaaccatgtgggccgctgctatctacgaggcgtgtgcgaacccagcgattacaagaaggctcatctttggcttgtaagagcagccgagcaaggttcggcacaggcccagttcaacctgggctgtctctactaccgtgggcttgggcggaagagagatccagctcctgctgccaagtggttcaaccaagccatggagaacgggcatcctcaggcacgtcaagaactgcaaaagcttgccgatgaaaatccaatcatctttgagcggcatgaacgcagtcttgcggagggaattgaaaaagctcctgggcttctggaccacgaacttgctcatctctatttggaagagctgatggatatcactcatgattccgaagttcgtgcaggatttatcactgccacccagacggggcaactccctctatcaaagatgacggaggttcaagaggcgctcatgtggatgtggaacctttcatctgcgacggatttcagctaccaagaaatcattgcgcaggttgcggaatacgactggtccttgttcgcaggcatgccccgcgatggttccggagaatggaagaaataa

SEQ ID NO: 528184 - DNA, 159 bp, Stenotrophomonas maltophilia
atgagcgtggcctacatcaaagagcgtttcgaagatttttgcaattggttcacgaaaacccccgaggataggcaggcaattaggatcatgagggaagtgagaaaggctcggggcgattctcctaagaaccaacctcctgataagattaagagaatttaa

SEQ ID NO: 528185 - DNA, 369 bp, Stenotrophomonas maltophilia
atgagaaagcactctctcagcatcgtcaaagagctagttatcgctcatccggacttttctactcagacctttgttctgagctatctgccgcgccaaggcgtggtcttcaaagaatacgagagcgtgacagatgccatctcagagatggtctatgaagagacaaagcgcgtcatcgctacgggccagtcaaaagtagtggtcctggtcgagcggaatacgggtgacgacttggtgaccgaccatgagcttctggaagcctttgaggcctttgctgattacagccagaagtttggtcggaaggagatagagaccgtggtcaattttgctttccagatcatgaacggggattacaaaggcgtttgggaatag

SEQ ID NO: 528186 - DNA, 456 bp, Stenotrophomonas maltophilia
atgaagaaaattatcgaaaacgaaatcacttttggcttgattgaagggatgttgagaattggcctgaaaaacgacgaagaacagctggaacaggagtatcgaatcgccatcgatctagcgaatgaactttttggagcggtcgagccaggcagtgacaatctatcttacgtagcttggtttgaaagcgagttaacacgaggcctcccctttaatgcgattttgttgggccaagagaggcgtgttcgtaaagacaattacgctatgaatctctacgtcaagagcttagagaaggtgaaggtggatggagtagaggaaatcattctgtttattctgttccaaaaatgccgtcacttagagtgctacccgctgtatgaaagaaggattctaagcgagatgttcaagccggaaagcgaaattaatcaagggcggtcagtcatagcagagtggttgaagtga

SEQ ID NO: 528187 - DNA, 582 bp, Stenotrophomonas maltophilia
atgaatattgaaattgaaaaatgtgatgagcttatctcggtcatcgccccttacaacgctgctttcatcgcccaggcaaagaggatgggcgggaagtgggacggtggtgacaagtcgtggaacttcgacatcaagcttgaagagaaggtgagagccctctgcttgcagttttacggcacagacggcctcaaagttgacctttgcatcatcgaagtggacttaccggcagaccaagagcaatggcaaggtcctcttacccttcaagggcgagtgctagcctcagccagaggaagagacacgggtgcagtcgtaggcaatggtgtcagcgttttgaagggatgctttacctcaggaggctctcgacaaaactggacgacagcggtcggccctgagggcgtcaccgccctgattcgggacttccccagggccgcagcagaggctctgattgcaaaaggcgaattcccggttcgtatcgttgaagacgctcagaacgacagaaacaatctggtcagtgaaaaagagagattgctggctcgacttgctgaaatcgaaaagctgctggaagggtccgcagttgcataa

SEQ ID NO: 528188 - DNA, 300 bp, Stenotrophomonas maltophilia
atgaaaaaacaaatcaacttcgcagatatcaagagcgcagaagagtttcgcactagatttattacgtgctacaagaaagaacgcattgagggttggcataacgggcggaacggcagatacgtttatcttgaagatgaaaatggtgagctgatctttgatcgctactgggtatcagtgggatgttactggccccatttaaagcaatttatgactaaggagcgggtcagtgaggatcagttggaggtgtatatcaactactccaattggtcgggcactggatttgtgcggagattcgtttaa

SEQ ID NO: 528189 - DNA, 750 bp, Stenotrophomonas maltophilia
atggcaaagacgtggatcagacgaagtttgagagagcaacagaaaggcttatgcgcgtattgcgatgagccgcttcctgcgagagcgaaaagctctctactcattcctgcccaaatcggtggggcgaaggatgcgggcattgttcttgcgtgcaatgagtgtttagggagcaagagtcagtcagacttgatggggtggcttggtatgcctttccatcgtgtgttgccaaagaacgttccagccttgctggctcagcgcctggaagccgctgagcaagcccagaaccatgagctgccggtggcttactcagtgaaccgaaaagcggtcagaaaggcgctggaagagcgctggaagagcccgcgagtgagggtgaccttggatggagacaccttggtcttcgatagggaacaacacgggcgcggagccgtcctggctgtcttgcgaagccagttcgcaggggtcgttgacgaacgggctggtgaagtgagggtgcgtgttccagttcaacatctcgaaagagcaaagagcatgctggctgcactaaactgttgggtaggcggactacccacaaacaaccacctgggcgaattgaagcgcgctaagaagaagacaccgaacagagggattagcaaacggcaaaggcaagagatgctgatgctcagagacacggaccggctgacgactttggggcgggctgatgttgaactcgcgttgcttagagatagattgagaagctttcgaacgccttag

SEQ ID NO: 528190 - DNA, 1068 bp, Stenotrophomonas maltophilia
atgcagggcgacaacgggaccgtgattcgcctagtcaactcagccctcgaagcggcagcggcggattacaggggcgactcagacattgagtattacttccagaacgttatccgcaccgagccttcgccccggactgacttgcaacgcgcggtgatgaatcagtgcatcgccgacaccggagcgtcaatctctggcacgttcagagacgcgctcaacgaaagctacgagagaaacgctggaaagatctcatttgctagctgcaaggcgttcaatgacggccagttcagcatggaacaactccgtccgcacttgactcagtcagaaaacaaccagttgcaaatgggtccatctgctgcgggtctcaacctggattcgagcaacccaaagtgggactcttatgaagagaccatcaaaaaggaatgcaaagccaatccgtctaagcgtttgaataacgtcattggaagcgcagtcttcaatcgcttggatgacgaacggaaaatacgtcaaacggctgcaattgacgcgaacacgaagtatcgagcagagacaacacagataatttcgcaaatggactcgttgataaaaaacaaccaaccggtccaatgcgtgatgctgaaaagaattgatgaagataaaaggaattatgacaagacgcaaagcgaaatatatgaagctttgagacgcgcacatgaagcgacgttcgcaagacactcgctactctatgcggcagcagtgcgccggcagattaatttcagcacgctcaactacaacatttgcgcatcggaagggctaacgttcgaccagagcatcgaaaaagagttcggacccgataccaaagagaacgttgcgcgacttctcgatggacgctctaatcttgaagatattgctgcggaagagctggacgcacgcaacaaggcgcaggggttagcgcctgctgctcgggccgtgccagaagatctcggcgctgaacttgacgaaggggaggagatgcagatgaatcgtgcatcgagggctgatatggaagatgcgctctaccaagagcgtcaagcacaagaacagtcgaattaa

SEQ ID NO: 528191 - DNA, 372 bp, Stenotrophomonas maltophilia
atgaccgcccttttccaggaaatgccaatccagaggctttcttgctcgctacccagcgttcgcatgcacgcaggcctggacgcggatctacgagctttggcagagcttcaacagaagccgttagtgcaaatcatgcgcaacatcctttatcactacttgcagatcgaggaggaactgatgcggttggagatcgaagacgcgccaatccggcgttctgccaagtctgaccaggtgatgagccagaaggtgagcgtgacagaggaagtcaaagatgcttttgttgaacgtgcccagggtctttaccttccacaaacgacgatgcttcgcatgatctttgaagcgggggtagagcggtggaagcgaacgctgtga

SEQ ID NO: 528192 - DNA, 687 bp, Stenotrophomonas maltophilia
atgacgataccgacgcattgcggcatgccaccgcttcatctaaacattgaagggcttcgctcgcatgccctactgataagcgcatttattccagaaccagaggtgtcagccgaaaaaaggaaatggcgttcgtggctggtgcattgccttgtgaagacggcacgacattacaacgaggcgcggtcgttaatactagcgcagataagtgagggacgactctcttttgccgagacggcaaaaggccaatcttttcctattttcgacttcgcatttgcaatggaagactgcatcacgtctcttgaaaaggcagtagcgtgcatacaagctttgtcgaaaaaaggggaaatgacatccgcactcgaccaggcattacataacgagcggcagtccctaaatgcttttcgcaggcagcaggagcatatgcactctcaaatctccgccggtcaaactggcaagggaccatttgtagtgatgctcgctgacgatggcgacggtatgaggcttcgggatcttacgctaggattcgatgcactctacaagttaatcgatgctgtctaccgggatatatcgagcctcttcccgatgcacgatactcagtcgcctccgtccctgggaggggcacctcacctctcagtgtctatgaccaccacggtaattcaaggcgatggaacgcgatcagaggtttag

SEQ ID NO: 528193 - DNA, 444 bp, Stenotrophomonas maltophilia
atgaactactcatacctgctactgcccgctgtgcagacgaaaaagttggacgtagtgaaagcagctattggaaccgccgtgttccatcagcccagacacgacttcatcaacgacgccgattcacgaggtctcagcgccttggcgctagccagcgtcttatggagtcaagagtcagatgtaaaggcacgcgaagagctagacgcgatcactgcattcctcctcgccttcaaagcgaacccattccaagaagtcggcgtaaccctggtgaagcgctaccacgcttggacggggcgaaaagagttcgagagacgcccaggaaaaaccatcgctgaactgtgcggtggacggattccgccttccctaaagctatttatcaaggctgacgccgaacaaatgcccgttccagggaagcgtatcggtgaagaacaaaaggaggccgcgtga

SEQ ID NO: 528194 - DNA, 1602 bp, Stenotrophomonas maltophilia
atgaaaagacaagaagggtattcactgacagagctgctcatcgcagcaggcatcgttagcatggtcggcgctgtcgcattcgtgctctaccagccggttaaagcgcgtgcgcagacgcgcgcggagagcgaaagactcaacaatctgtctagcgaaatccagcaggcgtttggagtggttggaagctatgaaggcgtcagcagtgagcgcttgattgaagagcgcttcatcaagtcggagcaaatccaggacggcaaaatcagaaatgcgtggggcggcgtggttgatgcacagcctttcggtatccggcattttggagacgcgtttacgttggactacacgaacgtcagcgcttcgagctgctcagatttcgtctctgccaacgcgggcaatgcatacgatgtcgtgatcgatggaacaagcatcgtcaaaaacaacaacgatcggttgaatgttcctgcgttggcgaaggcgtgtgtgggcgctcgcgttgtgagcttcatctatcacaatgaaaatatcggccagttcatcgcttcaccgctcaatcttccgcaagctgatcagacggagaagaacccgtctcagggcccaggcctaaccaacccaggagcggcggcgggtggacaggaagccacaccagctcacccatacgtcccgcagtgcggccccaagccagctctaccttcctgtcctggcatcagcaaccagacgtgggacgccacggttttcccgcagtgttgggccctggttggctcttgcactcttcctgcagatccgaccccggctcccgttgtgccggcactccccgtagtggttccccttccaacccttccttccatacccccggcgctttgcagcgcttcttctgagtctcagccagcggcctgccttgcaggaagcttcggcaatgcgacggctacgcgtcagaagacctgcccggaagcctggggtgagccggtgtggaccacgtgggagaccgacaggagcagctgtcaaagctgcccaggaagctcccaggaagagagctaccaaaccgtcacgagaagcggctcctgcgcttctggcatgacgggctcaatgacctatcagacaaggctaaaaggcacgcggaacgtctcctatgcctgcccagcgggccagaccactctgccttctccttcatacaccgaatgggtgtgggtagagacaggtgaagtgctgtccaaagatgagagcggatgcaaaacagagggcctcacggttgccagcggaaaactcttcatctcaaacacgaacaccacgcggacgattcaagaaggcctggtcctagcgcagaacgcagattggaccacgcttgcgagcgtttcaagcgactggcctcaaagctatggccctgtgcgcgcatgggcaaacgtgagcttcactttcaacggggccacccagggcttctaccaagccgcaaacgggaataccccgagtccagggaactcgatcaactcatcggaaatccgaaccctcaactttaacgggaggttggtggacatcgatttcaggactttcggaacctctgacggcaccgtgattaatggaggaattcgcattctttaccgcgttcgttga

SEQ ID NO: 528195 - DNA, 483 bp, Stenotrophomonas maltophilia
atgagcgtgacgctggacaaagactcggtgacagctatcttgggactagcgacgcttgcgattgctctgtctcaaatgaagattgcgagcgcgaagacgaagctggatctctacaacaagcgcttcgcgatttatattgcatcgctcgactactaccacgccctgctgaacgaatcaaatgcagcggcaaaagagaagagtatcgcccagtcgaaaggctatcgtgaagcactttttctgttcagtaaaaaggatgagatctacacaatacttggtgagattgagggaaaaggtgcgtcagccagatcgtatgcggagcaaattgcggatcttgaaggccgtcaagcacccgagttggcgagcttgcaagaaaagcgaaatggcgtcctgggtgatattggtcaacttatcgacaagctcgaaaagcagttagaaccatatctgcgattcaaagccgcaagcggctggttcttttggcgctaa

SEQ ID NO: 528196 - DNA, 924 bp, Stenotrophomonas maltophilia
atggcagatgacagagcacccgatcaggccttcacggatctcgacacctatgaagtcaatgaccagtggctcgcttccgaagaggcgacaaacgctcagattatcgaagcgatgcagcgctggttccttgaacgctactgcgatccggcgaacgagacgccttacagcagcgagattggggacttctattacgttaacggcggtccctacgatgcccatgaacggctcatggcgaggtttgagggcctagtagatgatgacttgatccaggcgcttgccgaatatttggtttctgtcgttgggcatgattgggcacccacacagctgacctactacaaccctgacgaagatgtctttgttgatgagcgcaatgagccaactgttcggctagaacagcgattaggcgaaatcaatgcaattctgggactgggtggagatgattctgccgagatcactgcccgaaagcttgtcttcgcctctgtcatcagttgcctggaaaccttcctttgggagacccttgcctattgggtcgaaaacaatgatgttgttgtaaagcgactcatgaaaaagcatcccgtttttcgggataaaacaataaatatccatgcgattctggatattggtgatcccgttgcttatgcgaggaccgaaattcggtctcacatgcaaacgaccgtgtggcaccggtggagcacggtcagcccgctcttcgaccatggacttggtgtccgcctacctagcgtcaaaggttttatagagcctttgaaaatccgtcacgacattgttcaccgaagcggacagactgtggagggtgttcaacgacaagtgactgaaaaggaaattagggatctggctgatttggttaaaggctttgcaaatgagttggacgagctaattgcccaggcaaaggactttgagttctag

SEQ ID NO: 528197 - DNA, 441 bp, Stenotrophomonas maltophilia
atgattgctaccgcgttgaccgcaatgcttgcgttgacgggccaggtcgaggccgagcagcctgcgttccggcgaggtcctgttgattcggattctgcaatgaatgccattgtcactcgcgcaagccaggacgcgcttgatgcctaccgtcgacagaatcacaggaaaaacccgttggaagccgttgctgtgtacgacgtagcgaccgggctgatccgaatcgatctaaggggaggggagttgcctggggagggcggcgcagaattggaagacctgcaagggttcatttcgaatggtgctcttgaagccgccagacccattgtcccagctacaggaacgaagttcttctacaacggcagagaattcgatgagcagtatccggacgactccgcaggcaacggtggccaggaatccccgccggcaaggttggctggcctatga

SEQ ID NO: 528198 - DNA, 429 bp, Stenotrophomonas maltophilia
atgaccgccgtaggtgaactgctcgatgccgcccgcgaacgcacgggaatcccgtcagacaacgctttggctgcccggctgggaattcagaggcagctgctatcgaaggctcgcgcaggcgagaagccgctctcagatgaacgaattgcgcagatttgcgcgctggcaaagctcgatggcccgacgtggatcgccatgattcacgcggagcgggcgactaccgcgacggagcgcgccctttggcgtctgatgctggaccgaatgggcgcggcggctgcggtcgtcgcgctggtagcgctgtcgttgccgagcgtcggaaacgcaaaaaccgcccagattcaggcggttagcgagggtctactgacccattctgtatattatgttccaagcatcttggcccggccgccacctggccgtggtgtccgctga

SEQ ID NO: 528199 - DNA, 207 bp, Stenotrophomonas maltophilia
atggaagagacagttctcactctgtactgcaaacaggctgattttgatgcctctaccggccagtgtgtcgctcccttctatgggcctgcacccatgctcattccgcccatgagtgcacaggatggtttcgaggtctccgttgtcatcgcgggagcttgggccattggctacatgattcggcaatcgcgccgtatcaccggcggttaa

SEQ ID NO: 528200 - DNA, 219 bp, Stenotrophomonas maltophilia
atgcacaagctgatccagaagtcccgcgccaagatcgttgccgtcggcgcagccgctaccgcagccctggcccccgccgctgcgttcgctggcgagtatgcgaccgccgtcgaatccggtgtcgacaaggcggagcttaccgccatcggcgtcatcatcatgagcatcgcgggcatcatcctgctcatccgctccggtcgtaaggcgaccaatagctaa

SEQ ID NO: 528201 - DNA, 1383 bp, Stenotrophomonas maltophilia
atggctcgcactggatggctgattcaactcggcctgcttttgcttctggccgtagcgccatggcctgcacgcgcacaggctcagcaatgtgcaaatgcctctgccaactgcacccagccacaggcctacgcggcatgtcgtgccgagcttgcgtcgtacattgccattcgaaaggactttgccaaccagaatacggagtgcgttccttttggaagcggcggcaggactatccaatcgaagtttcagtacaaaaccagtgccaattctgcttggttctctggcatctatcgcacctatacgtggaccaagggttgtgatgtagagcccacgtacaccggtactggaccatggtcgtccggaggatccgccaaaaacggcagcatcgggtgccgcaacggatgtgatggcatgtggtcgacgaacgtcgattcgacaaagacctggacgcccactggcgacatttgcccgcaggacgaaaagaagaactgcgatcacatgggtgacggctactactggaacagcttgctcaaggtgtgcgagccgcctgagggaaagtgcccgggcggaaccaagccgaattctcttgggcaatgtgcgcctgaaccttgtccggatggcatggcgcagcagcaggacggaacgtgcaagaagaaggaaaacgagtgtcctgcagggcaggtgaggtcgcccgatggtcgctgccttcccggtgacggccaatgtgccaaaggcgaggttcgggggccggacggcacgtgtaagaaggattccgacgatgacgggaaacccgatgagccgggcgagaaggacaccttctccggtggcgatgattgcagcatgccaccttcgtgtagtggctcgccgatcctatgcggccaagcgcgcatccagtggcgaatcgattgcaacactcgccgtaaccgaaacatcgcaggaggcagctgctcggccatgcctgtctgcactggcgagaaatgtgatgcgatggaatatgcgggcctgttgatgcagtggcgcaccgcatgcgctacagagaagatggcaggccagggcaacaatggcggggatgggtcccagccggaatggacaaaggtgggcggaatgaacacggatcccggagcggggtcatcgccagatgacacgaaggtactcactaccaagcagatatcgataagcgatctagatcagagtggcatcggtggcggcggttcttgcatgggctttgcgggtggtggtggcggtagtggtattggctcaggttttgtgcaagtcatggcatctcctccgccattcttctgcgatcacatcgctcatatcaaagcggcaatcatcctattcgcctcagtcacgtctgttttcatcctcggtaggggagctccgtaa

SEQ ID NO: 528202 - DNA, 291 bp, Stenotrophomonas maltophilia
atgcctcaaattcttgccgcgctcgtagcgcttctcgtcagcgctctccgacagtaccttcccggcatcattggtcgtgtgctgcttgcattcggcataggcttcgtcacccacgaagtggcgatgcccgcattgaaaggctacgttgaatccaagttcggcgcgcttccgccgttgtttcaggcttactggggcgcaaccgggatcggcgtagctgtgacgatgatccttagcgcatggcttgcgacgcgcgctcaggccgccgtgctcagcaagattgggagcaagtaa

SEQ ID NO: 528203 - DNA, 1173 bp, Stenotrophomonas maltophilia
atggccctgtacctcgttaccggccaacccggccacgggaagaccgcctacgccctggacaaggccttcaagctgcagaaggagggcagggccatctatgcacacggtgtaaaggacctcgattacgccaaggccggatggacgtacctcgaagatccatccaagtgggaggaattgcctgacggctccgttgttctgctggatgagtgctacacggtgtttcccaaccgcaatcccggtgctgccgtgcctgcccacgtcaaggctcttgcaacgcaccggcaccgtggatttgacttcattctgatcgcacagcagggtttgcagctggatccattcctgcgcggtctatacgaagagcatgtgcatgttcggcagacgtccatcgttcgcagtaagaccaagctcaagcgctggaatcagtatcagagcaacgtccaagtaaagtgcgatgacacggttgattggatcaggcctaagtacgtcttcgactactacaccagcactacaaagatcacgaccaagcgcaccatgcccatgtggatgcgctggttgctgctgttgatcgttcttcttggcgccgttcttggctacttgaaatggcgctatgacaccaagatcgcggaagctgagcagcagactaagcagctgcatcccgtcgcgtttgacggggtgcgaccgactgcgcggagcggagcggaagcgggggcgggcgcacccgtcacgtatgctaccgtcgctgagtacgctactgctcacaacccgcgcatcgggaccatgccctggactgcgccgatatacgaccagcgcgccgtcactgctgatccgcagctgtactgcatcgcgagcggcgaagggctggatggaaatggccgccacactgaggccacatgtacgtgcctgacagagcagggcacgcgctacgaattgagccagccggagtgccgcacactcgcgcgcaatggaccggcatacaacccatatcggacgacgcagtctccgccgcccgccccagttccgcccatgccagccacatcaggcgaccgggccactgcgggcatacagggcgccgtgatcagccgcggtgatcgcgccaatggcagctttccggagtcgcccgcgtttgaaaccagcagctatatgacgagcccgacgatccccaccaagctctga

SEQ ID NO: 528204 - DNA, 453 bp, Stenotrophomonas maltophilia
atgaccgccgtaggtgaactgctcgatgccgcccgcgaacgcacgggaatcccgtcagacaacgctttggctgcccggctgggaattcagaggcagctgctatcgaaggctcgcgcaggcgagaagccgctctcagatgaacgaattgcgcagatttgcgcgctggcaaagctcgatggcccgacgtggatcgccatgattcacgcggagcgggcgactaccgcgacggagcgcgccctttggcgtctgatgctggaccgaatgggcgcggcggctgcggtcgtcgcgctggtagcgctgtcgttgccgagcgtcggaaacgcaaaaaccgcccagattcaggcggttagcgagggtctactgacccattctgtatattatgttcgcagcgtctgggccagactggcacgcagcttgcctcgacccttggccctgctatggcatggagcctga

SEQ ID NO: 528205 - DNA, 165 bp, Stenotrophomonas maltophilia
atggatgcgaccgttctaggcatcgtggggatgtgcttgatcgcggtgatcgtgggcttggcccggatcacggcttggtggctggaccggcgtgagcacgccgctggtcagggggtacgccaagcgatcgtcattgcccaggcacgcggcgaggtgcgccgatga

SEQ ID NO: 528206 - DNA, 978 bp, Stenotrophomonas maltophilia
atgagcggaggaatctgcaaattctgcggaaatatcaccgtctacctgttcaaaggcggcctctgttacgagtgcagcgaaagcgacgtgcgcgtgcctgtatcggcgacgcctgttgattgccgttcgcccgagttggctgcgttcgacgcggcaaacgcacgcgcctacggcgcccagcgtcgtgccgaactgttcaacgagaagaacgccgcgcacggtttctcggcggcggccggaggccgacgccttgggcttgtccattcttcaacaagtgacacgcgccgcgtgtcgctcactctcgacccaaatcacattcgcggactgcgactgaagaagtcgctgattaccggagcaaggcttcatgaccaagaggcgaaacaaggctcgttccgtggcgcgtggtacatgctcaccacgacttaccgaaacggaagtgacgctggccctcgtgacattagcgagacacttaagcgcatccggggcttcttcaatcgagctgtccgattgcgctaccggggataccgtccgcgtttccgttacctctggtgcggtgaactcactaaggccggggttccccattaccacgtcttgatttacatccctcgcgggatcttcttgcccaaggctgacagggcagggtggtggccgcacggccacaccaagattgaaaaggcccgcaacgccgtgggctatctggcgaagtacgccagcaagttctcccccgacatgctcgcgtccttcccgaagggctttcgcacgcatgcgatcggtgggttgaacacggaatccaagcgtgaactgcggtggtggaaagcacccaaggcagcacgtgacgcactcggcgtactggccgatatccgcaaagccctgggcggctacgtggacaaactcaccggcgacttctggccctcgccgtggaaagtgatcaccgaccggggccggatcatcgtatggaaattggagatacccgcatga

SEQ ID NO: 528207 - DNA, 303 bp, Stenotrophomonas maltophilia
atgagcaagatcatcatccgcactgccaccgtcactccgcgccagatcaagcgcaaggatggcaccaccatggtttttcgcgagcagtccgccgcgatcatgaaggacggtgaggatttcccgcacccgttccgcctcggtcttgacgatgcacaggcgccgtatccggccggcgaatatcaggttgatgcctccagcttcaacgtgggtcagtacggtgatctgatcgtcggtcgccgtctcgtgcttgttccggtcgcacctgctgcgactgctactgcctctgcaacagcttccaagtaa

SEQ ID NO: 528208 - DNA, 207 bp, Stenotrophomonas maltophilia; identical to SEQ ID NO: 528199

SEQ ID NO: 528209 - DNA, 219 bp, Stenotrophomonas maltophilia; identical to SEQ ID NO: 528200

SEQ ID NO: 528210 - DNA, 1383 bp, Stenotrophomonas maltophilia; identical to SEQ ID NO: 528201

SEQ ID NO: 528211 - DNA, 291 bp, Stenotrophomonas maltophilia; identical to SEQ ID NO: 528202

SEQ ID NO: 528212 - DNA, 1173 bp, Stenotrophomonas maltophilia; identical to SEQ ID NO: 528203

SEQ ID NO: 528213 - DNA, 1797 bp, Stenotrophomonas maltophilia
atgcgcgttgcacgtgtcgagattgagaacttccgaggtatccgcagcgctaccctttacttcgccgggactacggtcctcctcggtgacaacaacaccggcaagtccaccgtttttgaggcaatcgagctggccattggccctgatcgactggcccggcagcaggtgattgacgagcacgacttcttcggcggggcctaccaagccgctggcgacgagccagctcccagaattgttatcgaggctgtaattgccgatctggacgccgagcactgccagcgcttccgggcacacctagaattttggcgtgaggcagataagcggctgctgggacctggcgaagctcagcaagttgcccaagagggcgtcgtgcccgcagtccgcgtccgatttgaggggaagtacgatccagatggggacgagttcgaagccaaaacctggtttgccgtgcccaggtcggaggatgggaaggctacgagtgaatgtcgctctggtgacaagcgcgagttcggcttcttgcatcttcgggcccttcgcactggttcgcgggcgctctcgatggaacgcggctcgcttctcgacatcatcctgagaacctacgaggtccggacgaaaatgtgggaggggctgctcgacaagctacgccctctggatgttgtcggcgccgaagatgaggagtttgggcgaattcttaatgccattcaggaagccatgcgagacatcgtgcccggagaatgggcacatgctccgcatctgcgagtttctgagttgacacgcgaggatcttaggcgagtgctgaaatcattcctggcaacgggtgtcgagggctacgccgctccgttccagcatcagggctctggcacgatcaatgccttggttctctcaatgcttggtcttatcgcagagcgccgccggggacgtgtgatctttgccatggaggagcccgaactttcgctgccacctcatgtccagcaacgcgttgtcgacaaggtccgcgggcttgcctcacaggcgcttttcacttcgcactcgccttacgtgatcgagcagttcgagcctgagcaaatgacggttatgcggcgggatctgactggcgtgatgtcagcaacacctgtttcgcttccggccaacctgaaactgaagctctttcgcgacggcttccgcacccgcttctgtgaagcgctactcgcccgtcgcgtcgtcgttgttgaaggaaagacggagttcgtcgcatacagcgcagtctcccggcgcatcgcattccttgcgcccgatcagttcaagcggcttgactcgctcggctgggtgccattcgacgctggtggcgagaccaacgttgcctcattcgctgctttcttccgtcagctaggaaagacagtcgcaactatcttcgaccagcagttggcaggtgcacgcgcggcgatcgcggcgtcatgcgatcgggccttcgagcaaccctatgcgggtttcgagcatttgctaagagcggagattcaagtcgatatgcagagctggttcgtcaaatggctagtaggcaaccaagagtggccacatgcattggcaggcattgttcctcccgaaggcagtccgaatgaggcttatgtagagccattcatcacattgatgcgccataaaaagggagatgactacctgacactgttctttgatcaatgccaggttgggcatatgccagcctccatcgttcacacactacgcagcctgcgcgagatggtagaacgcccggctgcgcaccccgccctgcccctccccttcatcgtgccgcccgtggcgctataa

SEQ ID NO: 528214 - DNA, 1710 bp, Stenotrophomonas maltophilia
atggccattgttctctgcgaccaacggcggcgccttctcgcgactgaggggcatatcgcgctgcgagggggggccggctcaggcaaaaccaccattgcgctcgctaaggcgtgtgaagaactggcagcgggtcgacttggcagcacgggtaagtctctgttcatcagctttgcgcgcgccactgtagcgcgtgttgctgagcaagcaactgcatcgctgccgcgagatcaactgactcgcatcgaaatcaatacctaccacggcttcgcctggtcgatcttgcgaagtcatgcgtacctgcttggcgtacgccctggagtatcgctactccttccagctcacgagcgatcgcgtctagcgggtgtccccgaccagaaccgcgcatgcgagctacggcgcctgttcgaagaagaagggctggtcgcgtttgatctcttcccaacccttctcgctgagctactcgacctgctccccgtggttgcgcgcgccattggcgacgcctatccggtaatcattctcgatgagttccaagacacgaacgcagaggagtgggcaatgatccgtcgtttggggcggcatagcaccctgatcgcccttggtgaccccaagcagcgcatctatgatttcaagggtgccgatcccaggcgcttcgatgatttcatcgaattctttcagccttcggtctttgactttcaaggcgagaacaaccgtagcgcggggacagacatcacgctattcgccgatgcagtcatcagcggtaactaccgggctgaaccctatgccggagtttccattgtgcgctacggtggtcagagtctccacccgctgaaagaacgcgtccttcgcaccgcaggtagatatcgccgccgatctgaatggtcaatcgcggtgctcgttccgacaaacaagctcgcagtcaacgtctttgattacatgagaagggaggccaatggcctgccgagctatccggttgatatcgcagtatcgatggaggggccgatgcttgcgggcatggtcattgcgttgctgctggaaccacgggccccaaatggatccgtcggcgctgacgtcttggaagcaatggcacttctggaaacaggtcgcaaagaacgtgcgtctgcgacttcgatcgaaacagctcgaaagctccgggatcgagcctcaagagtccgcctacgcggtgatgccggctacggccgggcagttggagccggcgtccgccaactggttgctgaggttgaagctttcgcgttgagcggtgacccattcgctgactggctgtccattcgcaaccttatggcaggtaacgccaggacagaaattcaagcagtagccgcagaggcgcgacacatgaggttattgcgccgcggaacacagatcgagacccgcctggcggaggcgtggcgcgttcatggctcctacttcaatgcaagagaacttctgcgcgccgctctggtggaggatcagttcgctgctaactcacgaactcagcaaggtgtcattgtcatgacgatccacaaggccaagggaaaggagttcgacgaagtgcttgtattcgaggatttgtacaatcgataccttcgcactaatggtgttgacccagagcggtcagcacgtttcaatttgcatgttgctgcgacgcgcgcgcgctccgctgttgcgatcatgacgccatctagggacccttgccgcctactcccgctcatctaa

SEQ ID NO: 528215 - DNA, 939 bp, Stenotrophomonas maltophilia
atgagtacttcgaacttaaagccatcgaaagacgaacttgagtcgaatcttaaacagtatcgggtagaggcaggctcgcacttgagcgatctcgagtttgaggtcattcagacaatctgcaaggcggccgacagggccatgcgtttggctgcacgcaaggctctttctcaagttgcggagtccttgaaatataacttcatccccagactgaccgccgacagatcagcgctaccgatggctacccaggtcggcgatggcgaggcatatcgaatctcaattccaatatcttttattggcaggctgcttgagatcacgccgactcgaggaggtatgccgccgaaagaagcttccgactatctcctttcgtcgactatcgtcgccgtgctggctgcgtatggccatgagatcattcacgtctttgctggacacttgaagatgccatcctcgcttggccaagaaacgcatgcggcttacgttggcggaacacttctctgggcttggctcgatgatgaagagatcgcagcgttgtgtcagatcagagctgacgagaagccttccatgtgtgcctatggcttcttgcagttagtatcggtcttgagtgattcggatcacgaccaaagtctttacctccctcgctgtcttcgtctcattgttttcgcggccggtgctggattttgtgctgacggaacgcaaggttccggctctggcgacctagttcagcgagcttttgaggccctgccgatgggtccaagaagcgacttcgagtcgccggcaatccgtagccagcacgcgaccctgacgagccaactgaataatcctcaagttatttgtagactagggcaagcgtttgacgagataaaccaacagaagagtgggtggtacaactcgtcagaacacttgcgtccgatcaaaagagagctcagtcgcgcaatcaaatga

SEQ ID NO: 528216 - DNA, 888 bp, Stenotrophomonas maltophilia
atggcacgacgcaacttcaacgacctgctggcctttgtcaccgtcgcacgcgagggcagcttcacccgggcggctggggtgctgggcgttacccagtccgcgctgagccaggcgatcaagacgctggaagagagcctgggcatccgcctgctcacccgtaccacccgcagcgtctcacccacggcggccggggaacacctgctgcagtcgataggcaatcacttcgacgacattgacgccgagctggacgccctcacggcgctgcgcgacaccccgggcggcctggtcaagatcaccagcggtgaccacgtgctgcgcacggtactgctgcccaagctgatgccgctgctgcaccagtacccggacgtgcgcatcgagttcgacgtgagctacgcgctgcgcaacatcgtggccgatcgcttcgatgccggtgtccgcctgggggaatccatcgacaaggacatggtggccgtgccgattggcccgcgattgcgcatggccacggcggccacgccggcgtacttcgccgcgcatgggaagccgaaggtgccgggggatctcaccaggcaccgctgcatcaacatccgcctgcccaccagcggagggctgtatgtgtgggagtacgagaagaaggggcgcgagctcaacgtgcgcgtggacggaccgctggtgttcagcacgtcaccgcacatggtggatgccgcgctggatgggctgggtctggtgcatctacccgaggacgagctgcagccgcacctagaaggcgggcggctggtaagggtgctggaggactggtgcccgctattcccaggctatcacctttactacccgagccggaggcagccttcgccagctttcagcttggtgttagatgcgctgcgtctctga

SEQ ID NO: 528217 - DNA, 1230 bp, Stenotrophomonas maltophilia
atgagttcaatcacccctcccccgttcggggcggcactggcaacgcctgcccgttcggccaccgccaaggaatggggcgccgtgctggcgctgtcgctcggtgccttcgccctagtcgcttccgagttcatgccggtaagcctgctcacccccattgccgccgacctcagggtgaccgaaggccaggccggccaggccattgccgtctctggtgccttcgcgctggtgaccagcctgctggtctccccgctggccggtcagctggaccgcaagtggctgctgctcggcctcaccgccgcgatgatcgtctccggcacgctggcggcgctggccccgagctttctggtgttcatggtgggccgcgcgctcatcggcgtggccatcggtggcttctgggcgatgtcggcggccaccgcgatgcggttggtaccctcccaccaggtgccgcgggcactggccatcgtcaacggcggcaatgcgctggccactgtgatcgccgccccgatgggcagctacttcggcgcgatcatgggctggcgcggggcgttcttctcattggtgccggtggccatcgttgccctgctgtggaaagtggtagcactgccgccgatgaaggcgaccgccgggcgcggctcatggaatgtgttcgcgctgctgaagcggccgccggtggcctggggcatggtgggggtgagtctgttcttcatgggccagttctcgctgttcacctacctgcggccgtttgttgagacggcgctgcacgtgtcgccgtccaccctttcactgttgctactgctgatgggcgcgaccggcatggccgggacgctgttgatcgagccgttcgtacataaggcgatgttccgcacgctggtgctgctgccggcgctgatggcggtggtggctgtgtgcatgatcgccttcggcaagacgctgccggtggtggcggtactgttcgcgctgtggggcctactgggcacctccgcgccggtggcgtggtggtcatggctggcgcgcaccctgcccgacgacggcgaggcaggtggcgggttgatggtggccgtggtgcagatggccatcgccacgggtgccaccgtcggtggcctgttgctcgacagccacggctaccacgccacgttctcgctcagcgccgtgctgctgctgggctctgttgttacctcgtatatcgctgcgcgctcggcgcagcgtcatcacctgcccgttcacccctga

SEQ ID NO: 528218 - DNA, 987 bp, Stenotrophomonas maltophilia
atgcagtacacctctctgggccgctctggcctgaagatcagccggctgggccttggcaccatgaacttcggcgagctagccgacgaagcggagagcttcgcgatcatggatgcggccgtggatgccggcatcaacttcttcgacagcgccgacgtgtacggcgggccgcagtcgcccgacatggcacagggcttcggcctctccgaggagatcatcggtcgctggctcaagcacaccggcaagcgtgacgacctggtactggccaccaaggtgtaccagccaatggggctggggccgaatgatcggcggctctcggcataccacatccgccgcgcgtgcgaggccagcctgcgccgcctgcagaccgaccatatcgacctgtaccagatgcaccacgtggaccgggccacgccgtgggaagagatctggcaggcgatggagcagttggtccgcgaaggcaagatcacctacgtgggcagcagcaactttgccggctgggatgtcgccaccgcgcagggcgtggccaacgcccgaaacaccttcggcctggtctccgagcagagtctctacaacctcacccagcggacggtggagctggaagtcatcccgtcgctgcgctaccacggactgggcctgattccgtggagcccaatcggcatgggcctgctcggcggcgttctgagaaaggtcgccaatggccgacgtgcgaccccgcagctccaacagcgtatagaccgtctgcgtccgcagctcgaagcgtacgaggcgttctgcgatgagctgggcgaagcaccgtccgacgtggcgctggcctggttgctgcacaaccctgtggtgactaccgccttgagcggtccgcgcaccgtcaaccagcttctacagaacctgaaggcccctgccctggagctttcagtcgagtcgctagcccacctggatgccatctggccgggccccggtggcgaggctcccaacgcctacgcctggtaa

SEQ ID NO: 528219 - DNA, 471 bp, Stenotrophomonas maltophilia
atgtccctgcttctcagtgctttgatttccatgaccgcgacctccaccagcgagccggccaacgacgcgatcagcgttacccatgccggtgcttcgccgtccgttgccggcccggccgagtacttcaccggccgcgtgcgtatcgacggcggctttgagcgccctgccccggccagggtcggtggtgcgacggtcacctttgaaccgggtgcgcgcacggcatggcatacgcacccgctggggcagacgctgatcgtgacggccggcttgggctgggtgcagcagtggggtcagccgcgccagcagatccgtccaggcgacacggtgtggatcgccccgggcgtgaagcattggcacggggcgagtgccggtgccgcgatgacccacatcgccattacggaagccgtggacggtagtccggtgacgtggatggaacaggtgagcgacgcgcactacgagagcgggttgtga

SEQ ID NO: 528220 - DNA, 1221 bp, Stenotrophomonas maltophilia
atgtgcaattcctgcggtgacacgaacgaaacctacgagcagccgccgatgctggggcgccggcgcgcgcttgcccttgccggtgccggtctggtggcgggcccggcgcttgccgccctgtcttccggccgtgccgaggcggccgccgctgctccggcagatgcttcgaccgcgccgagcacggtgaaggcctacggcacccgcgccatgggtcagcgcatcgcgcccttggagattcagcgtcgtgcggtgggcccgcacgacgtactcattgacgtgctgtacgccgggatctgccattcggacgtgcacaccgtgcgcggtgattggggcaccccggcgttcccgtgcgtgcccggccacgaaatcatcggccgcgtgctggcggtcggttcgaaggtcaccaagttcaccgccggggagattgccggcgtgggctgcatggtggatgcatgcggcacgtgcgagaactgcctgtccgaccgcgaacagatctgcctcaacggcaccacgttcacctacaacgcgccggacaaggtgtccggaggttccacgctgggcggctactcggagaagatcgtggtgtctgagcgctttgcgatccgcattccgccgggcatggacctggcctcggctgcccctattctctgcgccggtatcaccaccttctcgccgatccggcattgggaggtgaggccgggccagcgtgtgggcgtggtcgggctcggcgggctgggccacatggcggtgaagttggccgtggcccagcgggcggaggtgaccatctttaccacctcgcctgggaagcttgccgatgccaaacgtctgggggcaaagcacgcggtgctgtggaacaacgctgccgcgctcaagccgctggcgaacagcatggacgtggtcatctccaccgtgccctacccgttcgaggtacaaccgttgctggacaccctgaagctggacgccacgctggtgaacgtagggctgggtgaaccgcgtgggctgaatccttcggcgatggcgtttgggcgcaagagtctagccgggtccatgatcggtgggatcgccgagacccaggaggtgatcgactattgcttcgcgcggagtatccggccggatgtggagttgattacgcctgatcagatcaacaacgcgtttgatcgggtggtggccaaggatattcgctatcgcttcgtcatagacttcgcaaaaaacaaggtttaa

SEQ ID NO: 528221 - DNA, 234 bp, Stenotrophomonas maltophilia
atgtcggaagactcgcttgagacaaaatacctgcgtaccttcggcgcggtcctgtccgcaagtcagaccgctaaaatcttgggctacaggagcaccgcaacgctagcaaaagcgcgcgcacgcggatcactccctttcaagatgttcatgctgcccaagcgccgtggctggttcgccgacactacggacgtcgcagcattcgtgaactcgatcaagagttccattgacttctaa

SEQ ID NO: 528222 - DNA, 1140 bp, Stenotrophomonas maltophilia
atggtcggccagacaggtgttgtcttcacatgggccggcacatgccgactcgcgggaaggttgcgccctggcccaacccgtcccttgcggtgtggtgccaccgtgcacctaatccggagaagaccatgccttcagcagcctgcccgggaacgttcgacactgcccggctcaatcaccccaagctgcgcctcaccgacacttccgataccgccttgcgtgaccggcgacgccgaatattcgccgcttttcgccacatcacccgccgccacctcgagaccactaccgcgaacggtcactgtgactgcagtgttgtgtgcgcggatcgcgactttcagtccatatcccatgccgttgtcgctcctgcggccgccgcggccgcagtcggtgaccggctacggactcaacgggagagaactcatggctagccttccccaatttccaagcaccgcattggacgccccgacctgctctggcacggaagcgtacacccctcggccactcacgccctctgaatccaccaggctggacacctactactaccagtcgccgaggaatgaccatcgcctggttgctgtcgtggagccgtgccgcttggctttggcactggatctggagttcgacccaagcgtggcggcctatgttgagcgccctcgaacactcatggtgcgcggccgaaaggttgagctctgcttctggatctcaaggaagtgtggcaccgagagcttcatcgtattccgcagacaggccgccgccactgttccagcgctccgcgccgaacagcaactctgcgccgagctggtagaagcctcgcagcgtgccggcctggacctcgccatccggaaggtgcagtccattcttgcagcacgggtggccaatgccacgcgacttgaactgcttccttacgtgcaggcagccagacggtcgcgaggaatcagtgtcttcattgaggctgtgatgacccacatgagaaagaaccccgtgagctctttccatggaatcgaaacgagcctgcgcccaatgttcgattggcgggacattcgaagtgccacctgcctccttgtgcatcgcggagaccttgcagtcaacttcaacgagaggcttcgggcctcgtcgtcggttgcgctgggagcaggccaatga

SEQ ID NO: 528223 - DNA, 798 bp, Stenotrophomonas maltophilia
atgtcagatcagacatccactgcattgatcgaccccgcgttggccgatgccgccgacggaccggtggtgtgggcggcccagttgcgcctgaacggtccgcgccgcacctcccgccaccaccatgtccgaggccagctgctgggcacgcatcagggcctgttgcggatcgacgttggccacctgcactggctgctgccggcgggtcatatcgcctggataccgccctcactgccccacgcactggtgagcgcggagcgtttcgatggctggagcctgtacttcagtgccgaggcctgcctgggcctgcccgtcacgccacgcattcttcagcccaacgcgcttctgaaggctgcgacggcgcgtgcgctgcaatggccccacccaccactggatgctgtgcaaacgcgactggccggtgtgatcgccgatgagatcgctgccagcacaccgctgccgctggccttggcccagccacgcgatcgtcgcctgcggcggatcgccgctgcattgacacgcgcgccatacgacaaccgcagcatcgaggcgtgggccatcgccagtggtttatccagccgcagcctcgcccgccggtggctggccgagaccggcatgacactgagcctctggcggcagcgcctgcgcgtcctgcttgcactgccgcacctgctggcgggtgagccggtgatcagcgtcgcgttgtcgatgggctacgacacgcccggcgcgttcatcagtgtgttcaagcgcgagatgggggtgacacccgcgcgctacggaaaaggggacggagggagttaa

SEQ ID NO: 528224 - DNA, 711 bp, Stenotrophomonas maltophilia
atgcctcgacaagcgcgcctgatgttggctggccagccgtaccacgtaacgcagcggggtgtgaacaagggcgccatcttcgttgacgatagtgaccgccaactgttcctgcacctgctgcacaacgccttcgtgaaacatcacgtcgcgctgcatgcgtacgtcctgatgggcaaccacgttcatctgctggccacgccatccacccatctgggcctggccaacgcaatgcgcatgcagggcaacagctatgtccaggcgttcaatcaacggcatgcgcgcagcggcccgctctggcaggggcgcttccactcttccatggttgacagcgacagctacctgctcagcgtgtatcgctatatcgagctcaatccggtccgcgccggcatgaccaccgatccggaagaccatccatggtcgagcgtgcacggaaacctgcaacgccgtgatgatccgatgctgacggagcatccggcattccacgcattggcatcggaaagaatacagcgcgcgaagctctatgcacgattcctgcacgacctggatgcaccggcggacctgccggccatccgtgcccacagcgcgggacaacatcctttgggagagaacgcgttcctgcggatggtggagcagacgctgggcagatccgtggtgctgcgcaagcgggggcgtccgcgcaaggcggggacgggagaggcagaaacgacttaa

SEQ ID NO: 528225 - DNA, 216 bp, Stenotrophomonas maltophilia
gtgagccaatcgaccgaccctcgcgatgcggacgagcgcgcgctggcacaggcgttgcgtgaacaggcgcagcaggaacagacgccggatgtgagcgaggcactgcagaagcgcatcggagccgaatcgcgcgatagcggtgtgctttacgtggtggtgcaggtgctgttgtttggcgcgctgctggctgccgcggcctggtatttctggcactga

SEQ ID NO: 528226 - DNA, 2376 bp, Stenotrophomonas maltophilia
gtgacgggcaacagccgcttccaggccggttcggacatcagccttgaccaggccggcaatcgcttcgatggcagcgtcgccctgcagggcggcaacattgccatcaccgcccgtgacggcctgctgctcgacagcgtgtccgcccgcggcaacctggatgcgcgcgcgggcctgggcggtgtctcccagcaggcggcgctcgaagtcggcggacgcagcgacgtgcgcacgcagggcgccattgcactggaccgtgccgacaaccgtttcacgggtgcggtcgggctggacggcaacggtgtcgatctacgcgcagcgggcgatctgcaggtcgatcgcctgaacaacggcggcccgtccgatgtgcgcctgcacgccgggggaggcctgcagctgccggccatcgatgccggtgccggcaacctgaccctgctcgccgatggcggtgcgttgcaggccaatgcgctgctggccggcaacaacgtgagcgtgttcggccgcgatggcgtgcgcctgggggccgatctgcgcagcagcggttcgctgaccctggccagcagcaacgcggacatcgtgcaggtcgccgtgcccaatggcgtgggtggcagcgtgcagtcggtcggcgcagtgcaggttgatgcaggcagcgggcgcatcgcgctgggcaatgccggcaaccgtttcggcggcgcgctcaacctgtccggcggtgacatcaacgtaactggcgatacgctgctgctgggcaatgtggccgcgagcggccagctgtcgctggccagtgccggcgacatccgccagcagggtgctgcgcaggtaggaggcacgacccggctgagcgctggcggtgacatcgacctgcaggccggtggcaaccgcttcggagatgctttggaagtgcagggccggcaggtggcactggccagcgatggcccgctgcacctgcagggcgtgacggcgaacagcctggttgcacgcagtgcgcaacgcctgaccctgtcggcggccgatgtcaccggcaatgtggtactgcagagccagcagctgcacttcggcacgacccgcgtgggcggtaacctgcaggcggtgggcagcaacggcatcgatcaggacggcacgctgcgcgtggatggcagcaccgacctgcgcagcaatgcatcgattgcactgggattggctggcaacgatctgcgcggtgcggtgtcgctggcgggcgcgggcatcgatctgaccagtgcgggcgacctgcgcatcggttcgctcgacagccacagcgcagcggttcgcctgcaggccgggggcgcactggatctgcccagcggcacaatcgataccggcaacggtgacctgcagctgcaggccggcggcgcattgcggttgccggcggcgctgcgcggcaacaacatcactctgcgcagcggccaggacctgcagctcggccaggatgtactggctgcgggggtactgcagctcgcaagtggtggcacgctgacccagaccgggggtgtgctggccgcacaacgcctgcagggcagtgccggcggcaaggccagcctgcgcggcgacaaccgtatcgccacgctcggtgacttcggcagccagggcctggagttgaaaaccatgcaggggctgcaggtgaccggcaacgtgcaggccggcgcacagggcctgctcgacgtgcgcggtggtgatctgctgctcgatggcagtgtgcaggcgggcgggctgcggctgcagtcgtccggtgcgatccgcgccggtgccggtggccgcctgctggctgaccagctcagtggacgcgcggccggcccgacgatgctgggcgatgcctcactgttcgtggccaatgccatcggcaccctcggtgatttccagtcgccggcaggcttcagcctgaccaacgccggtaccctgaccctcgcctcgctcaacggcagcgcattcagcgtcgatgccggcaacaacgggttccacctgaaggtgcagggcggtgacatccgccagctgggtaccacgccggtgctggccggtgacagccattggtggtccagcggtggcatcggcacccagcccctgccgatctatctgaccagcgccggcagaacgcacacgatcgatttcatcggacgcccgccggcctatttccatgccgtgggcacagatggccgacctctcgtggtgggcgatggacctgatcccgaagcgatgcgtcctggagtgctcgcacagggcgcggtgctgccgcgggctgtctatgtcgatgcggcggcagcagccgttgagcagcgtgcgatcggcatcacgtaccctggaatccggttgcctgcggggacggcgcgggcctgcgacggtgacgcggcgggttgcgtgcagtaa

SEQ ID NO: 528227 - DNA, 5196 bp, Stenotrophomonas maltophilia
atgaaccgtatctaccgactcgtcttcaatccttcgctgggccaggtgcaggtcgctgcggagctcgcgcgcgggccacgtcgttgcgtcccggagcgatcacgcactcccctttggctggcaccgttgaccgcggcgctgctgctgaccggcagcctgcaggccaccgcgcagacgctgccgcagaatggcagcatcgtcgcgggctcgggaacgatcaacgtcaatggcagcaccatgacggtcacccagttcacacagtctgcgctgttccagtggagcagcttcaacatcggctcaagcaacacggtcaggttcgatcaggcggcgggctcgaggtcgacggccatcaacctggtgaccggctcgtcggcgagcatcatcagtggccagctgctgtccaacgggcaggtattcctgctcaatccggcgggcatcaccttcaccggcactgccagcgtcaacgtgggcgggttgctggccagcaccctgacgcccggcgcacaggggattccgctggatggtggtgggttgccgcccagttttgaactgggcggcgcaggggccggtgccgcggtcagcaacctgggaggtacgctgacggcgacggccggcggcatcagcctggtcggtggctcggtgttcaacaacggttacatcgccgcaccgctcggcaacatcgatctggtggcggcaggtgcggtgaccgcggtgaccggtgtgtcatcggccggcatgccaagcctggcgttcgtcaccaccgcagcgagtggcatcgcaggaaccggcatcagcaacgtcggcaccctcagtgcacgcaacatcagcatgacggcattgatgggaccgggtctgtccgctaccggcatcaacgcgggcggcacgatcatcgccaacgccatcgatgccagcgacggcagcctgaccatccgcagttctgcaccggtggcgatcaacaacgccatcgttacggccacggcgatgtccacggtgggatcggctgtcatgggggggccggtcgccgtccagatgaccggcggcagcatcgacgccacgaccgtgaacttgaatggcggcatcaacggcgacgtggtgctgtcaggttcgatcaaggcagactcgatcggaatcgacgcgaacaacatcacccagaccgcgggttcgctggagggcgcgctgcaactggatacgcagggccgagtgaccctgggacaggcgagcaatgccatcagccgcgttggtggccatgtcggtaccgacctgaccctggccacctcgaccagcctggcgaacagcggggcgctttcggtaggtggcaataccacgctcgacgcagctacgggcaatatcaccctgacccatgccggcaacagtttcggcaaccgggtcagcgcgaaaggagccgatgtcagtctggtcggcatcggtgcactgaacctgggcgatatcgacgcgcgcagcctggatgcgcagggtggcagcattgcgctgaacggtgcgatcaccacgtccggtgaccaggcctatcggtccgcagtgacactccagggcaactcgacgctgcagggcggaacgatcctgttcgacggcaccgtcgatggcagctaccagctgggcgtcgacgccagcggaatggccacgttctccggtgccattggtggcagcaccgcgctgcagggtctcaatgtcagcgccggtagcggtgcgcgcctgttcggcgatgtcagcacgctgggcacgctcgggttctctggcccggtgcgcgtgtacggtgagcgcagcctgacctcgctcatcgggagcctcacactcggcggaacggtcgacggtgacggtggcggtctgaatctgagtgcacgccagctcacgatcggcggcgaggtgggaggagccggggcggtgggtcgcctgcacggtcgcgccgataccatcgtgctgggcagccgcctcaccagcaccggcgatatcctgctgcagggcaacgtggtgctggacggcaacacgcagctgatcagcactggcggcggcgccctcaccaccgacggcatctccagcaacaccgccggtggctacaacctggcaatgaaaaccgctggccagatccaggtctacggcaacatccaggccgccgatgtcagcatcacggggcatctcttcaacggtcaaggcatcgtcagcaagggaaacctcaacatcgattccggaatcagcctgacccagatgggcagtttccaggtcgatggccggacctcgctcagcagtgcgggcgacatcaccgtgaccgatgcaggcaatcgcttcggtggcgaggtcagcctgagcggcaggagcgcccggctacgcgcgggcgatctgctgctgggcagcagcacgctgtcggagaacctgcggctggatctcaccggcgggctgcagcaggcggtgggtagcatgctggacgtcggcggcaccacccatatcgatgccggcggcgccgtcaacctcgacaggacgggcggcatgggccggccggtaaaccggtttggcggcgcggtgtcactgaggggccgcggcagctacatctctgctgcgggcacgctggcgttctccgatttcgatgtggacagcctgtttgcgacggcggatgtcttgcagcttcccgccagtggcaggagcatcggcctgcagtacttccagggcgatgtggcgctgacccgcgacagcgtgctggacagccagcttggccagatcaattttcgggggcgcatcgatggtggatacgcactgacgctcacaagcgggctcaacgtagtgtttgccggtgacgtgggcggcaatcaggcgctcgccagcctcgacagccgtggtgcgggtccgctccagctcggcggcaacatcaccgccgacggcgcgatccgcctgggcaacgtcaacctggtggcgaacaccccccgggtgttcagcatccgcagcaacaacggcaacctgttggccggtcgtatcgacggcagcagcgatggccgcagcagcctggcgctcaatgcgcacggcgcgcttgaactgcagtccggtgtgggcaccacgcccggcgcggggctggccaatctcgaactcaagggggcaagcgtgatcgcgcaggcgatccgcaccagtggccggcttgacgtcaccagcggcaccgggttcacccagggcggtacgctcactgtcggcggcgatgccagcttcagtgccggcagcggtggcgacctgatgctggacacaatgaccaacaccttcgcgggcaaggtcgcgttgagcggcaaccaggtgcggatccgtgcgcagccgggcctggcactgcatggcgtgacggccgccgcgctggatgccagcagcacgggcgcgctgtcgttggccaatgccaatgttgcgggcgctgcgatcgttgacggtacgtccctgctgttcgaccaggtgagcattggcggcgcgctgctggctaccgcgagtgccggcgacatccgccagggaagtggcagcgtggcgatcggcaacaacagccagctgacggccggcaccgatatcgtgctgggcggaaccggcaatcaactgggcagtgccttgcaggtgcagggccgcgacatcaccctgtccagcagcacggccctggacctgcagaacctgcaggccacgcgtgacgtgctgctcagcggcaacggcgtgcggctcggtgcaacctcggtgcagggcgcattgcaggtcaacagcgccgctgcgatcacccagtccgacgcgctgcaggtgacgggcaacagccgcttccaggccggttcggacatcagccttgaccaggccggcaatcgcttcgatggcagcgtcgccctgcagggcggcaacattgccatcaccgcccgtgacggcctgctgctcgacagcgtgtccgcccgcggcaacctggatgcgcgcgcgggcctgggcggtgtctcccagcaggcggcgctcgaagtcggcggacgcagcgacgtgcgcacgcagggcgccattgcactggaccgtgccgacaaccgtttcacgggtgcggtcgggctggacggcaacggtgtcgatctacgcgcagcgggcgatctgcaggtcgatcgcctgaacaacggcggcccgtccgatgtgcgcctgcacgccgggggaggcctgcagctgccggccatcgatgccggtgccggcaacctgaccctgctcgccgatggcggtgcgttgcaggccaatgcgctgctggccggcaacaacgtgagcgtgttcggccgcgatggcgtgcgcctgggggccgatctgcgcagcagcggttcgctgaccctggccagcagcaacgcggacatcgtgcaggtcgccgtgcccaatggcgtgggtggcagcgtgcagtcggtcggcgcagtgcaggttgatgcaggcagcgggcgcatcgcgctgggcaatgccggcaaccgtttcggcggcgcgctcaacctgtccggcggtgacatcaacgtaactggcgatacgctgctgctgggcaatgtggccgcgagcggccagctgtcgctggccagtgccggcgacatccgccagcagggtgctgcgcaggtaggaggcacgacccggctgagcgctggcggtgacatcgacctgcaggccgcgggcaaccgtttcggtgatgccgtggccgtgcagggccggcaggtggcattggccagcaccgacccccttcagctgcacggggtgacggcggacagcctgatcgcgcgtagcggtggccacttgagcctgggtgccgccggcatcgcgggcaatgccacgatcgaaggggcctccctgctgctggatggagccagcatcggcggcacgctgttggcgaccgcacacgcgggtgcgatccgccagggaagtgggagcctggcgatcggcaacaacagccagctgacggccagcaccgatatcgtgctgggcggaaccggcaatcaactgggcagtgccttgcaggtgcagggccgtgacatcaccctgtccagcagcacggcactggatatccagcagctgcaggctgcgcgcgatgccgtgctggtccggcaacggcgtgcggctcggtgcaacctcggtgcagggcgcattgcaggtcaacagcgccgctgcgatcacccagtccgacgcgctgcaggtgacgggcaacagccgcttccaggccggttcggacatcagccttga

SEQ ID NO: 528228 - DNA, 312 bp, Stenotrophomonas maltophilia
atggtggcgggcgagctcgtcgatgacgcggatcaggggcacgtcctgcacctgcagtcggccatcctgccagtcgccacgcagcggatccgcatcgaccgtcgtcagtccgcccattggaccgatccgcatcgccccgcctgcgggtacgtcctgcgccgcgccgaacagcggcaggcagcgcaccgcgccctcgaacacatccaggcgactgccctgcggctcacggccgaccgcgaagcgggtgccgatcggctgcaggcgcgcgcccggtacatgcaccgacagcggcagatgggcaaatgcgggtag

SEQ ID NO: 528229 - DNA, 579 bp, Stenotrophomonas maltophilia
atgcccggtctgcagcagcagttcgccgcgcagcaggtgcaggttgcggcggccgttgccgatgtcgatcgacacttcactgtcggcgttgagccacagccggctgccatcggccagggtccagtggcctgtgtgtccggcggcggtgcgctgcgtctgcaggccgcgctgcagctgcacggcgtgcaggccgagcaacgagaaggcgccaaggccgagggcgccgccgaggccgcgcagtgcctgccggcggcgacggccagcagcatccagcgccctcgctgccgcgggagccgacaacggcgcgaacgactgccagaccgactcgacccgctgccaggcatcggcgtggccggcatcggcgtgcagccatgcgcgccagcgctgctggtcgccgtcactccagccctgctggcgcagcgcgaaccactccgcggcctgttccagcgccgggctggcgagcgcgctgctcatgccgtggcgtcgccggacaagcgcaggcaatgcagcatcgcctgcgccatgtacttcttgaccatccgctcggacacgcccagctgctggccgatctccgcatag

SEQ ID NO: 528230 - DNA, 828 bp, Stenotrophomonas maltophilia
gtgcacagatttgatccaaacgaaaatccattcgtggaggacctgcttcgcctgttgggccggcggaggcgcggattcctctattggcacccttcagatccagtggtgggccgattctccccgggccagtttcgtgcgattgcccggattttcctgtcgcggatgtacggcgtggatcagggcggctacttgaacaacgcacatgtatggcgtggtggccccgttcgctgcagtgttcgcgtggtgctggatgatgaaaatggattcctgctacgaacgctcgggtcgatacgccgtgaacagatgtctggtcttgtgccggatgacgcacgagtggttctggtccatgtgggtttaggtggtgtgaccgaactcttcagcggccggcgagacgtacttgtccgtggcgtcagtgaattgtctggcgacaacgatcccgatggtgacgttgatcgcggtctgtaccggtggcccctcgatgcgtggatgtacggtgcaatggattcactcgtggacccagaaggacgtgttcctccgctggatggccctgcggcgaggcacgcctattgggacgacgccgacgattgggaaggcggcgccttgtcggcctattcgtatgatccgccgcgtacccatgcagagggtcggcgcgaccgcggagattccggaggtggttccggagacggaggagacggtgaaggaccacgaggcccggatgatcgcgatgggccaggggcggggcggggcggcgtgatggaagtgcttggtcacccggttctgttttcagccgatccgcagttgttggccgatatcctggaggacctgtga

SEQ ID NO: 528231 - DNA, 624 bp, Stenotrophomonas maltophilia
atgcatttactccttctgtgtgtgaatttgcggattccgcgtgtccgcgcgatcacgttctccacatcaaaagtgcgcattgcgctgcgagtatttcgcaacagcgccctgaacatctgcaagcaagcaggcgcgcccggccgccacctccagccacatatctgccaaggaatcccctcgaaacttcaattcgatgctgcagatcaactggatacttcaacactggaagcccaggatgttggcgcaacatttcaatcaaggacgactggcgttggcactatcgagcatcgcctgataagggccaagcgccatctgcgatcgacgcttgtccagaccgtcaagatcggacgtaggttgcagcacgtacacgccgttctgaagggtcatctgcgtgccgtgcagttgcggctcgccttctgccaggggaaacccggtcagccagcattgcatactggcgtcgcgacatgccgcgtgactccatcaatggtttggccagctccaacgcacgcctctggaacgctggatcctcatccgcgtgctggaccaggaggaaggccctcgagacaccatcaatgcccgccatgtcccgcgtcggaaagcctacgccttcgaatacctgcttga

SEQ ID NO: 528232 - DNA, 474 bp, Stenotrophomonas maltophilia
gtgcttaccgcgccggtggatggaacggttgtcacgcaggtgctgaagccgggccagtcggtgaccatgggccaacctctgctgagtatcctgccgcaagacggccgtctggaagctggcctgctggtgcccagtcgtgtcatcggcttcattgatcccggcgatcgcgtactgctgcgttaccaggcgtacccctatcagaaattcggtcaccatgagggaacagtgcagcgcgtcagccgcagcgcgcttactgggacagagctggaaatgctgatgcccggctcgacgatccaaggcgaaccgatgtacagggtcaccgtcgcactctccagtcaggagatggacgcttacggtcgcatcgagcgactcaagcccggcatgacacttgaagctgacatccttggcgagcgcagcagcttggccgaatggatctttgcgccactggtcgcacgaagcaaacggatcttctag

SEQ ID NO: 528233 - DNA, 606 bp, Stenotrophomonas maltophilia
atgagaattagtcgcggaattttccgtggccccctggctgcggtcaagcggggggtatcggccgggctgcgcccggcacccgccgaggcaacgtcaacgtcaacgtcaaaagcgggctatccgtgggatggcggggtgggtccggttgcgggggacgccgtaaacccccctccggggtccggcccagccgctggcggctgtgcgttcgggcgcttgcgaagcagtgcttcgcaagcaaagcgccctcacccttgggggcttggccgcggcatccatgccgcggacacccccgcaaccggacccatcccgccttcgacaatttccggagatctgtcagatctcattcgattcatttcgatatctgacagatgtgtcgaccaaggtcgacacctaccaacagcacagggaatctgtcagaggcggggcggtgtcggagtgcggggtgtcagccgcatggatgcggctgccaagcctacacggacgtacttgcggcgtccccgcactccgacaccgccccgccacccctcggaatgccagcttttgacgttggcgttgattcggcgggtgcagggctgcaagccctgccgaaaccctccccaaccatga

SEQ ID NO: 528234 - DNA, 420 bp, Stenotrophomonas maltophilia
atgctgccgcgcgtgcttgccagcctcgcgctgtgcgccagcctgtgcggcgttgcccatgcgggcgaccgcagcgccgaaggcatcgactgcgcgcaggccaccggcggctacgagcgcgacatgtgcgattccgatcgtctggacgatgtcgaccgcgaattgaacgccgtctacgcgcaggcactcgacgaactgaaggcacaggcggccgatggcagctgcagccgctgcgcagcggctgaacaacagctggtgaaggcccagcgcatctggatcaccctgcgcgatgcagactgcgaggcggtgtatgccttcaacgcagacggcacctcgcgcaatcccgcgaagatgcaatgcctgatcacccagacgcgcgaccgtacgcggcagctgcgcgagttctacgaactgctttga

SEQ ID NO: 528235 - DNA, 708 bp, Stenotrophomonas maltophilia
atggcaaggcggccggaacgccgcaggagttcgaggtcaagtaagtcctgccgactctctcccggcaggactcacgatgggcgcagccgcgaggctgcgtccttttttattgggcgatgctcgctcgacatggatctcgggtaccctcagccgcatacggacaggtcgggggacaggatgctcagctggatggcactcaccctcgcaatcgcacccgctgatctgtggagctacagctgcgaccactttctatacggtgcctgtctgcgcgtgcctacgggcatgtccgtgacctacgaggcacctgtcgactttggtctgcaccgcgtcaggcgtggcgatagggaagtcgccttgatctacgagggcgatgcacctgaaaagcctgcgcccggaagcacgccggatctgcgcttcacggacagcggatatgccgtgtcggggtacgcaagcgcggacggaggttccacccggtacgacgtctacgttcgacccagcgtgtctgacgccggttcgctgcacatccgaggtgctgctgcgacggcagatgaagtcgccagcctggccgccgtcgttggaggattccgcgtctgcagcttccggcgaagcaaacgcgcacagacgttgacctgtccgatgggcgccgagtgggggcagcgattgtcggagtgggtcgtgcgtgcctccacgagcgagaagtcgaactag

SEQ ID NO: 528236 - DNA, 294 bp, Stenotrophomonas maltophilia
atgggcccttgtggcgcggggcgcgagatccaactcttcgtctacgaattgatcccgcccacgcctgtcgagcggggcaagatgctgatcagtagttgccttgagaccgtgtccctggccagccagaactcgggaagttccgaaagtgagtccgacttttcttccgtggtctggcagaacgacgggttcaccatcaagtggtggcgtgcagggcccgacggaaaggcctcaagccgctatgcactccgcaatggccgttttgtcccggctcaatcgagtgatagaagccgctga

SEQ ID NO: 528237 - DNA, 279 bp, Stenotrophomonas maltophilia
atggtcgacaacgtcggagggtgggagcagctggacgcgcacgacgcggggaagcgtctgcagctggacgctggcgtgtgcttcgagacggtggaaatggacgccaccccggtcattgccgcggtgctggacgcctgcgaggcgctgctgggtgcaggcgcccgcaaggtgctcgccggcgtgctgccggagatccgcaccatcccgttaagcgcgctgagagactgccattcgacgaaatggaacaggccaggttccaagagctgttcgacggcctga

SEQ ID NO: 528238 - DNA, 519 bp, Stenotrophomonas maltophilia
atggaagtgcccgagatttttgttgcgttgagggagtactgggcggacgtcgatcagctcactctgattgtggctctcttggcctgtttcgtagcatggcgaacttggcgcacgcagcatatgcacaatcgcctctccgtgatgccattgccccgcctcggcttaatcagttcgcccaagcagattttgattcgtgttgagaacaacggtactggccctctcagggtgatctcgttccgctatctggggccaaatggagagaatatggagaatcttttcagcgttctcgggccccgcggatttaactatgtgaccaagatggacggtcgtgctctgtccccaaacagtagctatgatgtgctcgatttccagccaacatcaggagatattggaggaagattgcgtcagatgtcgtcggtgctttcggcgttcaaagttcggcttgagtacaccgatgtctattccacaaagttcccgcccgtgatcgttgatttggattggttctcgaaagagggttga

SEQ ID NO: 528239 - DNA, 420 bp, Stenotrophomonas maltophilia
atgatcaacctgcaactgtcacgaatcatcacgctgactctgttgctcttgcctggagtcgcgataggcgatggttctaaaattcctgcacctacttattcgaacgtctgcaggcatcccgaatccggcgacctgttgggactggaattgtcgttcatcggcggcgcagaccgaggctacgtccttgtgcaaagatacgagggagaagttagtacccccgaggtcatgaagatcgaggttcgtggagatcaacttattttgctgaatgggaagacagagtccatcgcgctgttaagggagaaaagcggcatgcgtgcaacctatcttgatggggcgctaagccccgccggttctgccaatgagaagctagctccttcgcaggctgtatggcagggaagacaggttggggtgtgcaagtag

SEQ ID NO: 528240 - DNA, 3882 bp, Stenotrophomonas maltophilia
atgagcatcgcaggaaagcgagcgggcgtttcgtcgcgtcaatggttctatatgcttatggttgctttgagtctgttcgggctggctcctgccgtgcacgcgcaggcttgggtcaaactgaccgggccggcgcagaccacctataccgatccagcaaccgtaaccatgacattggaatatggaagcactaatggcggagcgaaatccgagtatatatcgaacgtgcgtctgacgcagaacggagtactgttaagtaatattgccaatgggccttacacggtgcatggccttccgccgggcacctaccaatatatgctgacggcacagggaattagaaacataaatggcgatgaggtggttaggtcgctgcaaagcggtcctgtgacgataacggttaatgcgccgccacagccgattgattcagctgaaaaggtttcgggctcgctgtcgaccaatcgtatcgtggcgggtcagccgttcgtcgcgaccattacaatgaagaacactggcgaaaccacgtggtctcctgaagggggctacgggctcagtatgccagacaacgggctagtgtcctggcaagcatcgagtgcgccggtttccggctatgtatatccggggcaaagcgcaactttcaacctgacgttgactcccagtactggcgctactaacggcggtgagtacggtgtgctgtttcagatgcagaagaatggcagctggttcgggttaagtagcgggcggataactttttttgtatggcaaccagtcaacggtgccgagtttgccgggcagacgatcgccgcggcaatgaaaaccgcagccggccagacagtcgtcgttcgaatgaaaaatactggcgatacaacctggcagccagggagccactggcttggctctcagagtccggccgactctaccctttgggggccggcgcgtacatcgttgccgcgtgcggttcctcctggtgacacggtggacatctctgtccccgttcaagcgcccagcgtgccggggcgctacaacttccagcgacagatgtgggctgatgggaagggttggtttggacccgcaactcccgttgcagctattgatgtcagtagtcccgtcaatgacgcgcggatcgatgagggaaacggctttccgctcggcatgcaggctggcaccaagagacagatgcacgtgcgcttccggaacacaggcgagactacatggtcggcgggtggaggctatgctctagccagcgagaatcctgctgacaatgtggtttgggcaccgtccaggatcccactgacccaacctgtgccaccgaacggggttgcagacttcacttttgatgtaacggcaccgtcggcggctgggcagtatccgatgcagtggcgcatgaaccaagagggcgttggaagattcggacaggcaacccctagtacaaccgtcagcgtgtcacttccgccattgaagggaacctggactgagtatgatgcgcttggtcgacctacgtcagtgtccgaagatacggacagcggcttggcgacaagtgtcatcagctatcaagccgggaaccgccgcctggcaaccaatgcaatgggctatgcggtgaatacccagtaccaggccttcggtacgccggagcaatccagcgcgatttccgtgagttctccagaatcagcaataactgatattccacgcgatcgttacggtaggcctacggcgatcattcgacgcagcaccgatggctctgcgcagctgcgccgtagttttgtctacgggcaaggaggcaagctctgcaaagcgattgaaccagaatcgggcagcactgttgtcgcatacgatggcgcgagcaatatgctgtggtcggccagcggtctgaatctgcccgattcgtccagatgcgatctggaggctgccaacgggtccggtcggcgtgtggacagatcctatagctcccgcaatcgtttgatttcactggcgttccctgacggtaatggaaatcaggtttggagctatgcttcaaatggtctgccgacgcagatcgtgaccgccaatgacggtggtgtatcaaagaccacaaatgtgtacacctacaacaagcgtggtctgttgactagtgagtcgacttctcagcaaggatggttctcatgggcaattgggtacgcttacgacgcaaatggctcaaggacgggcatccagtatccaagcgggctctatatcccgctggagcccaacgcgctcggccagcctactcgcgttggtagctatgtaagcggcgcgagctatcacccgaatggcgcgccaagatcattcacatatggtaatggcgtaggtttcgagcaggagctgaatggaaggcagctgccttcgcggattactgcatcgacgaatgttagtagtttgagctattcgtatgacgcgatcggtaatgtcatcgatattgttgatgcggtggatggttctcgcgatcggaagatgcagtatgacgggcagggtcgtctggtgcaggcggtatctccggcattcggcggggacggaattgtgcgctatacctacgatgctctggacaatattcgcagcgccaaggttgcagggcgtaaggatcacgcctacacatatgacgcgaacaatcgattgacgaacgttcgttcaaccgacggggcaaccacgattgggctggcctacgatgttcaaggcaatctctcaatgcgcaatgggcaggccttcgtctttgatctcgggaatcgactcagatctgctccaggtccggaaaactaccgctacgacgcccagggtcgccgggtcctagcttggcttcagggtagtggttccattctttcgatgtacgacagcgaaggtcggctgcgtcgccagcagagtgagcgcgacgggaaatcaagagagtatctgtatttgggtgggctgctcgtcgccacattggaaacggggggcgatggagtcacacgaccaaagtatcagcacctggacgtgatcggctctcctgttgctgtgacggatgcgtccggggcggttctggagcggagcttctatgacccatatggggaagtgctcaacaagcctgtcgccgacggggtcggctacgctgggcacatatcggatgcggttaatgggctttcgtatatgcagcagcgctactatgacccaaccctgggtgccttcttgagcgtggatccagtaaccgcgcacagcaatccactcggtgcattcaatcgttacagatacgccgcgaacaacccatatcgcttcacggatcctgacggcagatgcgcggtccagacgggttcccgtatttgtgggtccgctgtaggcaacttgacagtgatgcaggttgcgccaccaagcgttcgatcaggtgatgcaggagttgccagaggaactgccggtaccgtaacaggcggggttcctgctgaggctggggcttcaggactcgtgcacatgcaaagggtgacgctgtcgggactcggttcgtcatatcttgattcaggtatggcggcgcgcgttgatgaatgggtggactcagcttctggtcagggagttgagcttcgtttcaactctgcatatcgagatgcggcacggcaggcaggtctgagaggagatccgaacgctattacaccggcgcgcctgagtctccattcggctgggtttgctgtggatgtgaattattccagcttgcgaaacgttccgggaggccttagtggtgacgagcagcgcagtgtgattaggagtacggctgcggatgcaggattgtcttgggggggggctttcaggccgagtgatccgcctcacttctatttcgatcccgcgccaggtggagataggcagccacttatagatgaagcggcccgtcaagttcgcgcattaaggaatggagactaa

SEQ ID NO: 528241 - DNA, 2343 bp, Stenotrophomonas maltophilia
atgggatccagttggtggcgctttgtgacagcggtgctgtgtgtggcgagcttttcctcggtagctcaggaaacggtgcaaccggagaccgagtatgcaaataaggtcggcaaggcccagcaaatgggacggctgaacgatggaacctttggagagaagatctcgcttttcaacggccagctaagcttccggacaacggacgtatccataccaggaaacgtcggtcctccggtcgaacttgcacggaagcggagtatcagcgagcgctatcttcatcaaggcgcaaagcccggtgatctcgctggcttctatgactgggacattgatgttccttacatggaaggagtatttagtgagcgaggctgggttgtcggacctgatggcgacacatcgagatatcagcgttgttcgctccagaaaaaaccgtacatcggagagggggcctcctactttccggaaacattgatctggaatggatacggtatcaaccttcctggtcagggctccaaccaagtactggtagcatccgcgaacgttcccatgccgtcggacggccagtcgtatccttgggttacgaccggaaacgtgcgtatccggtgtctctcccagaccaagaacggcgctcctggtgaagcattccttgctatcacgccggatgggacccggtactacctcaactgggtcgtcagtcgggagatgcctcgcttcacctacaaagacaatccactggcgcccactcgaacactgacacgcagtcacgtatttttcttggcaagccgcgtcgaggacaggtttggaaactgggttgactatggttattcgggtgacaagctcacgtccattacgagtagcgacggccgcgcaatcagcctgacttactccggagaccgcatcgctactgcggctgcgaatggccggacttggacgtatcagtatcgtgagccgggtgcgctggggtccagggttgacggagggctttcagcggtggtgctgcctgatgggacgcgctggagctacaactcggtcggatcgctgcgcccgccggtattcggccccgcgcaggagggcagtgagtgcgatccgaatatggggacggtatatggcccctacagctacacggtcgggcacccggcaggcgcagcagctacttactcgcttgagtatcgatacttctatcgagcggtcgatattagtccgtgctcgtcgcccgaacaggttccttacactggcgtatggaacctgaaaacacgcactgtcatgggacccggcttgccgccgatgacgacgggctatgccttccaggatggcgtgcccgtaaccggtcgctggacaacggtaacccagccggacggcagcgtctcaagctatcgattcggagttcggccgcgggtagatgaggcaaagctattggaaatgcgaacggccaatgctgctggagcgatcctcgagagtatcacctatcagtatctaaccaaggaagaggccgttgggcagttcactgccctggttggacagtcgctgagtatcatcacgccaacggaaggccttctggagcctgagaagctaaaagtgaccacgcgcgaaggcacgcagtataccgagagggttgataggttcgactcgtttgccaggccggtcgagaaatacagcgggagcgaactggcggtcgcaaaggatcgagccgtcttctatgacaatctcggtacctggaccttggggggggtagctcgaatggaagatgctgataccggcgaggttcagagtcgtacggaattcaatgcccaggcgctgccacaatccacctgggagttcggcaagctcaaacagacttttgcgtacgatgcgcttggaaatatttcgcaggttgcggacggaaatggcaatgtaaccaagctgctcgattacaagcgcggcacgcctcgccgaattctatacgcggatggaacggctgtatccgccaccatcgacgacaacggttgggtgctgagtcgaactgacgagattggcgcgactacgggctactcttacgacagcatggggcgtctcgaattgattcactatccagctggcgatgttactggctggaatgacactatcatcagcaatcaacgaacatccggatcagagcgtggcttggctcccggccattggaaaaaggttgagtcgaccggtaatgcccggcgcgttacttatcacgatgcgttgatgcggcccgtgctgaccgaggaatacgatgcgacgaatcgaagttcgtcattgaggcaagtgattaatgcctacgattatgcgggccgaacgacttttcaatcctatcccggccgctatcgccttggagagccatga

SEQ ID NO: 528242 - DNA, 1497 bp, Stenotrophomonas maltophilia
atgtccaaattcagacatccagaggcgtttgccgcctctcaggcatatcagttgctgccgttccgcttccgacgcttgccttgggatccagatcgggcattcgtgtcctccatggcgggagactggctgctcatgcacatgcaagacctgcagcgcttcgccgcccacgagctaccgacaaattcggctctctttgctgatctggaagcccgccatctggcagtcgcaggcaccgaacgcagcagcctgtccccgttgctgagccagattcgcagccgcaagtcctatatcctgggcgggccggcgctgcacatctttgtggtctcgcttcgatgccaccacacctgcagctactgccaggtgtcgcggcaggagacaacagccacagccttcgacatggccagctcgcacgccgaacaggcggtagagcggctgtttgagtggccaagccgggaactgaccattgagttccaaggtggcgagccactgctcaacttcgagcaggtcatagccattactcggcgcattgtcgaacgtaaccgctctgctggccgtaaccttcgttttgttcttgcatccactctgcacgacctcactgaagcccaactggcattcctcgctgagcatcgcttcaagctatcgacatcgctcgacggccccgaatcgctccacaatgccaaccgcccccgcccgggccgcgacagctatcggcggaccgtggaaggcatagagctcggacgccgctggctgggtgatgacggcgtgtcggcgctgacgacgctgacccggcgcagccttgaggtgcccgaagccatcattgacgaataccagaagcttggtttccacagcatctcgctgcgccctctgagtccctatggattcgccaacaggactgcccaccgcacaggctattcgacggcggatttcctcgccttttaccggcgtgccttcgcgcatctgatggtggtcaatcgttctggctacgccatggaggagtcctacgcatctttgctgctctcccagcttttcacctcattcgggcatggctacgttgatcttcgctccccttcaggcgcgggtcttggtgcggtgatctatgaccatgacgggcgcgtctatccgtctgacgaggcgcggatgctggcggccatgggagatgacacattcgcgttgggcgatgtttcgcaaccggtagcgcactggcttggctcccctgccatgacccgactgcttgaagcgggcgtggctgaggcgcttccgacctgtgctgactgcgcgttcgtgccactgtgcggtgctgacccgatcgagcactacgcacgccagggtgacccgattggtcaccgaccgagcagcgatttctgcgcccggaacatggggctattcgatttcctgctggaacgctatgagcgggaagatctagtgggccgtcggatgatgcgttcctgggctgttccgaaagcgaacactgaggatctcattgatgctgccgcttga

SEQ ID NO: 528243 - DNA, 1170 bp, Stenotrophomonas maltophilia
atgctgccgcttgaaaccaaagcggttctgtcgccatcggcgaaggcatctttgctgaagatggtcgatcttggcgacttcccccaagcctccctgcccctgcagcgaatggcgctggatgtcagggaggtggcacccgaacagctcagcgatgcgttgttgcgcctcccttggggagctgtcctcacgccgcaaggcttcgacgttcctgacgatgttccacacgtgcgcctggatggcccgtcagccctctgcaagtccggtgatgtcgtcgagctcaatccccttcaacgcaaggtagccatccgctatcggcgcggggataccggcaacgttctgtttgccaccgaacgctgcaacagctactgcctgatgtgttcacagcccccgcgcgaggtggaggacgactggcgtgtacatcatctcctcgatttgatcgacctgatcgatgtcgcagagccatcactggcgatcagtggcggcgaacctacattgctgggcagcgggttggtcgacatcgtacgcaagtgcgctgagaaactaccgaatacccacatccatatcctttccaatggacggttgcgcgatcctgagctacacagccggtttgcggacctccatccgaatctgagctggggggtaccgctctatggggaccattacgcccttcacgattacgtcgtgcaaagcgaaggtgcgttctcccagacactacgcggcgtgtacgcactggatgcagcgcgccaacgggtggaaatccgagtcgttctggttcggcctaccgtcgagcgactggtgcagcttgcccgctacatctggcgaaacctgccattcgtcgagcatgtcgcactcatgggcattgagccgattggctttgccaaagcacaccaggctgatctatgggcagaccccattgactatgcccacaccctgactgaagcggttgagactctcgcagaagcgggcatcccggtttcgctctacaacctgcctctttgcgcactggaccgctcgctttggccttatgcggtccagagcatctctccatggaagaatgactaccttcccgcctgtgacgcgtgcgccgtacgatcgcgatgcggcgggttcttttcctggatcacccctgcctggaccagccgggcgatctcccctgtactggaaatctga

SEQ ID NO: 528244 - DNA, 237 bp, Stenotrophomonas maltophilia
atgagtgaatcactgaagtgtgccgatcgcatgcacgccataggttttggtaagttctatctgaaggtatatggcgctaacgcgagttggcctgaagtgagagaggcatttcaacactggaacattgatcgaaattcagtcttcgcaagcttgggggcggccgactttgatcccaagctgattgagggggtgctcgagcttttgaaaattgccaattcaaaggtggagaagaagtga

SEQ ID NO: 528245 - DNA, 2427 bp, Stenotrophomonas maltophilia
atgacgccgcgcatcaccaccctcacggccaccgacttccgcagccttcgagggaccgtcacgatccccatggatagccctgttgtgctgattcatggccgcaatggcgctggcaagaccagcctattaacggccatggaacttggcttgaccggcagcctcgcatcgctatctaggctcgatccgcagcttcgtaagcatctcgttcacaaggaagcggcttccaagaaggcatcggtatcgatcggcgtccacgggcttggtgtcgactatcccgctgggtacttcgacatccaaggcgacaagcttgccggcaagccagcgctgggtcccgtccttgtcaaacacttttcagagcgctgttatctggcacagtctacgttggctaggctgctggaattctacgaggacaagtcggtaaatggcaccgcgctgacacgattcgtaaaggaactgctggggctggatgcgctggatgcgcttattgacggcctgtacgatgcaggtgatgttcgccggcttcgcggccatgcggttagcttctgggacatgcgagagcagctcccgagtttggatgacgagttaagccgcgtagccaaagagctcgctgctgctgaggggcaggcgactcggctcgcagaggcagctgcgcagcgacttgcaccatactggccagaagttaccaatctccaggcgctggcgatccttgacctgttgaaggaccaatcgcaggagcccgaactgcaacgcctaacacagcttaggcgggagctcaacgacacggtctcccaaagccaggcgttggtatcagctgttgctgccgaccaacgcgaggccgtcgaaatcgccgccagtgctgccgacgtggcactgcgtcgctggctggagaccagtggcaagcgcatgtcggagctgttcgaggagctcggtggctacttctctgagctaccatcaccgattcacaatcgtcccgaatacgcccgttcctacgcccatcggaccattgccgctgaagtaactagatgccggcaagttcagggcaaggatcaagtgtcgcaaaaccaagtgttgtcccttcaaacggatcgacaaggtctcaccactcgcttggaagagattgacaaacagatcgtgaggcactcgcgcgaggcaggccagcttgcgcacgcactttctgccttagtgccacacgtgcacacggaagaatgtccggtctgcagtcggaacttcggtgaagtttcgtcgacaccattgctcaaccacctcaccgtccgaatcgcgtctctgacccagtcagctggccttctgtcggccttgtcgcaggaacgggcgaacacggtgagtgccattgcggccagagatcgagaaatcagtgtcgttcaggcgcaagtgctcacgcccgaagcgagagcagaatacgggcaaaggcttgcagcccttgaaaatggcctgcatgctttgtctgcgttggaagcggaagccaaagctggcgaagccctgttggggcaagctgccaatgcagcgcaagccctagcatcggctcgcgctggtgatcagcaatcagcagcaattcgtgactctgctggtcggtatgcctcggctctatccatggattccctcggtgcggatgagtctttacaagccgcactgcagcggttcctggctgaagtcactgctcggttggctcggtcgacggaaaaagaatcggcacgtcgcgacggagaggcagtactgagggaactgctgttgaaggagcagcaaattgaggccatcaagctgcggcagctggagcgtagaaccgcccggcgagctctgcatgcggcaaaggaggcaggggagcgcaccatggcgcaggctcgtgaacttctcaagcttgctcaggccgagcgttcccgtgttgtcggccaagtattcaacgactccctgaatactgcatggcgagacctcttcgtccgcctagcgccggatgaaccatttatccctgcctttgctttgccccaggcgaagggtggcatcgaagcgaatctagagacgctctaccgagacggcagtaagggcggaagtccaagggccatgctcagcgccggaaatctcaacacggcagcgctgacgctatttcttgcgctccacctgtccgtaaagccacagctgccttggttgatcatcgatgatccggtgcagagcatggacgaggttcacatctcgcagttcgctgcgctgttgcggacactggccaaagagcacggccgccaagtgatcattgctgtgcacgaaaggcccctcttcgactatctttgcctagagctcagtccggcgttcaaaggggaccgattgatcacagtggaattggggcgtacggctagcggagactcagttgcgaatactatagttcgagattggaaaaaagacttggcgattgcagcttag

SEQ ID NO: 528246 - DNA, 576 bp, Stenotrophomonas maltophilia
atgaccgattcaacgccagtcggccgggtcacaatggcgctcgagaatgctgggtaccagcggatagccaacggactccagatcggggagctgaagttccagttccctgccgtgtttgtgaaagcgaagaattcagccgaactgatcctcgtcgcggacatcgcaagcgagagcgagacgcaggtgatccgtaaagtcgacggcgtggcgcgcgcgctggacattgcatcctcaacgcggtcgctcaccctggtggtgaccggtccccgtcccagcgcagccgcactggattccctaggaagagtctgccgcgtccttcccaccggcgacatcagcggtgacgacggcgatgaagtcctcaacaactggcttgctgtgctgctacctctgtcgttgccacaggctgaatccgtggcgggcgactccttggcccgcatccacgccgccgcgcagaatctggacgaaaccgctagaaaactgatcgatgttgcgtcgcaaggtaagggtgctgtcagcaaagagctgtactcgatcatcgacgccgctgccgtccgagccaaggagaagaccgcatga

SEQ ID NO: 528247 - DNA, 1716 bp, Stenotrophomonas maltophilia
atggctgcatctgacatcagtgtgcgcgacacgcttaagctgcttgatggttcgttcgaacccttcgcggccggcgtgtctaacgggatttatgcattttggttggggtcaggaatttcattcgggcgcgcaccgagtctgcgaatcctcgtcggaagagtggttgagttcgtacgctcgcacattgaccatgcggatcccaactgcaagttcgctcgtactttgcaagagatcctaaaattggccagcgtctccgcagacgaacgcgcgcgctcgaaggtcgacgagccctttgttagttggccggatcaggatgccatcgcttggcgcttggtcaataactattccaagctgctcggcctcaccgtcgatggcgaggatatggattatctcttatggaacgtcatcgacgttggcgcgacgttctcggatcccgccttggtccccgatgtggagcatctctgcctcgccgcgttgagtctggagggcgcagcgcctgagatgctctctgccaactgggacccgctgatagaaagggccgtggatgccttaacggacagcaacgcagcgctgagtcccaccgttgtcgcacgccctgctgaccttcagctgcaccgcaataggacccgactcatcaagttccacggctgtgctgtcaaagctcagggtgaccctgaccaatatcgccaatggttggtggcgtcaaacgatcaagtcgcagccttctgcactcagccgaacaaccaaggactcgtaacagcactcacgcacatcgtcggaagcaagcgcacgctgatgctgggcctttcggcgcaggatgcaaatattcagggggtcttcaacaaggcggccaacgagttgacgtggaggcttggcgaacctcctccgagttacgtgttctcggagcaagaactgggtatagaccagcgatcactcctgaaaaatgtctatcgcgaccaaattaacccggggaatctgacggcggtatttgaggcggcgcgaatccaagcatacgcgaggcggttgcttaccgcgctgttgctggatgtatggtcgaggaagctgcaggcgctgatacttctcgcgccaggcctgctcccgccggcagagcgtcaacgcctgtgcgaaggcattacggcgcttcgcaaccgcctagcagatgcagcacttccggagctcgaatttataaatgcgctgttagaccgcttcggtcgcgcctgtaagttgctgcgcgacggtcaaatcgaacaccccaatgtcaggtttgagcccattacgactgatgtcgtgacggccctgccgggcaattccgctttgggtgcccttgggttgcgcgaggcggccgttgcgctcgggctggtggggatggggttgagccgcgctgattggatagtcgaatcggagcctttggaaggagaatcaggcgtgcttgcagtcaccggaaaaagtgcagcagcgactcgcaccaagttgtacctaaccgctagcgcggcaggcgcctcgctgcttcggagcgagggtcacctgatcgaagcacaaagccccctcctgattcagtctcagaagctggcagtgccaatggctcgatctccaaggggcgcatcggggcgaacagggctaccgagagtgcgcgaagtcagcatattggctctgctgcaaacctacgccactgcggacgagctatatgaagcattccgacaggagcttgcgctatga

SEQ ID NO: 528248 - DNA, 489 bp, Stenotrophomonas maltophilia
atgcagcgaatttcaacagggctgaagaccctgatggtctcaacggtcgtcgttgcctcggcagcgttcattgatccggcccaggccttcgacgggttcgtcaactacacgccggaatttggcgggcgcgttgcgtgctccggtaccgcttcggttgcgtgcttccgcttggatctctcttcggccgtgaatgacgacatggtcatgacccgccagtggatggatcgtggcgaggtcatctccggcatcgtcacgggaagccccgaaggcagcagtgagctgttgctgaccggccacggggagaattggcaggcaccgatcatctatgcacgatatggtgctgcagcgagtgagctggaccacgattgcgccgcgcctctgactgacgggtgcgcgatgccgttgattgagggcgaacagatccattattcgatcaaggtgcgcgtagtcggtaccgagctggttcacttctacgctttgggcttgtaa

SEQ ID NO: 528249 - DNA, 750 bp, Stenotrophomonas maltophilia
atgatccttgacgctcaagtaaatctacgcacatcgattgtctcccgtacaccggatgaggtgctgagcaaggccttggatctaacggaaagattgtcccgcctgcaccctttgatgaaacgctggtattcgttgccatcgcgaaggaaggaaaagtgtattgccttggaagattctgctgcaatcctgtacaggatggagcgggatatcgagaagacgcgtaggcaatttgggggtttcgagggatttggtgcctcactcttgttggccaaggtagacaatgaccgtgactggcgtgaacccgggttggttgtgctcaacgtgagtccgggccttgggctgcatagtgtaggcattgaggggcttgatccctttggagatgaaatctcctcaatcatgcttggcgcgatgatcgaatcggtcaaagtcatccaacctgatttcgcatgtactgatgtcaaggcaaaatcgcctgagagcgaattgatcaattaccagcttcacaggcgtctttatgggcatcgggagttccttggctggatggggtatgtcccggctcgggttgatcagacgcagctcccggatgcgcacgctgtccacgctgtggacggcttgggcacggtcatcgtctccgtgccaggtgtatttgatccctgcgatgacacgcaggtggagcgcgttcaccgcgtcgaaagggatctggccagccgcgacctgttgccggtgaccgatcctcacttcaagggttga

SEQ ID NO: 528250 - DNA, 264 bp, Stenotrophomonas maltophilia
gtggactatcaaatagaccgccgcctgtatcaacaccgggaattctttggctggatgggcttcgtgcctgcccagatcagccacgcgcagatccgcgacgcgcatgccgtccacccggtcgatggcctgggtacggtgatcgtctcggtgccgggcgtgtttgatcccaccgacgacgcgcaggtggataaggtgcaccgcgttgaaatggatctggccagctacgatctgttgccggtgacagatcctcacttaaagggctga

SEQ ID NO: 528251 - DNA, 933 bp, Stenotrophomonas maltophilia
atggcagagaagcaatccaacaagcgcggcgccaggccgctcgcccaggccgagccggtaggcacggaactggacacgggcaacctggccgagcgcaatcaggaactccaggttctggcgcaggctgaggcacaggtgaaggccctggccacgacccttggctatgccggcgccctggacactgactcgctgtggagcatggtcgagtaccgccagcgccgctcggtcgaggacatcctcgaaatgggccgcggcctactgctgatcaaagagcagaccccgcatggtgaattcgagggccaggtccagttgcgtggcattcatccgcgcgccgcacggcgtctgatgggcgtggcactcaaattcaccaaaacggacacgatgtccgttttgaaggccgccggcacccaagccaaggtgttggaactggcggtgctggacgatgatgatctcgaagcgttggaatccggcgattcggtggctggcatcaccttggacgatgtggagcggatgagtgccagtcagcttcggcaagcgctccgtgaaacgcgcgccgatgccgatgccaaggaccagcgcatcaccaagttgagcgacgatctcaacaaggcggaggagaagacagcaaaagcacagcggaagtggaagaaggccacgcccgacgagcagtcgcaggaattcctgacccagttggagcaggcggccgcccaggtgcgcatcgctattgccagtggcagtgaagaagccggcttcggtggtgcggtgatcgcgctgctgcggcacgccgaacagcacgacctcaatgtcgaagagcaggttgccggcctgatcgccagcctgatcaacgacctgcgccttgtccgcgaccaccaggaggtcggcgtgacggtgattcatgaccgccgcttggccgactggaagcgggagggctga

SEQ ID NO: 528252 - DNA, 141 bp, Stenotrophomonas maltophilia
atgttcaacgaggtcattgacacgttctgggcactttccgacgctagccgcgcgatagctttgacgatgcttgggggtctgttgctgaaagacgtcaaagccgaagcatctcgaagtgtgcgtaagcggacgaagacctaa

SEQ ID NO: 528253 - DNA, 708 bp, Stenotrophomonas maltophilia
atgactgcaaaggatgcgcaaatgaacagggttttgttcttggttactgccgcgcttgtcgttctctgtgctgggtgtgatcgccctgccattgatcgtccgctgcctcatgcagccgacacttcggccaacgcgcagccaagctatcgggatgccgtcgatattgcaggcatcgctctgggcacaaaaatacaggtcccggagtgcaagaaggaacgcaggcaggggataatcctttacgcaacggagaatcaggcatatccctgctttgaggacgttcgtggcgcaaggggaacaatgaagagccaagctggcttgcccgacgggccagactacgatggggtaaccagcattgaactaggctctgccgccgtccccgccggtgtttcgcctaaggccaacatcctgatgttgagtggtgtgcccgaggaagtttcgctttcgactgacggcgtcgaatctcaagacagactgtatgcactcttggtcgaaaagtacggcccacccagcgagaccaaagaggtgcagctgcagaacacatttggagcccggtatcgaagcatcgaggcgagctgggttctgaggcgaatcaacgttcacttcttcggagtgcttggtagcccatctgaagggagcatcatcgcgagaacggataaggctcgggagttcttccttacccggcgcaacgaggccgcgagctcattctga

SEQ ID NO: 528254 - DNA, 495 bp, Stenotrophomonas maltophilia
gtggccaagccccgcactgcgcagcccagcgcacccaagaccgtccaggacgaccagccggccgacgtgccagtcgtcacggaagacaagactgccgacgcaccgccggcgacggacggcttggtgccggagcaaggccgcaccgagctggagaccgccgcgtcgcctgcctccgcagccgagggtactgccgtcgacccgctgcaggctgaccatccggcagcggaccaggacgctgccatcgacgcgggtgctccgacgctggaggccgacacctccactggggttgccgctggtgggggcgattcgcccgatgcactggtttctgatgatctctggctgtctgcatgcttcgaagtactcagcccgttcaagcacgagggcgtggtcgtcaagccgccggcgtggatcgagatgggctgggaagaggcgaaggcctaccaggatgccggcgtcctcggtgacgaaccggcagacccgacggggctggagtaa

SEQ ID NO: 528255 - DNA, 975 bp, Stenotrophomonas maltophilia
atggcctgggcaaccgacaccgccgccaacatcaccgatctcatgacccgcctgcgggatttcctgaccagcaatgcggcgctcgtagcagcgaaccaacagtggcaggtggtgggcggcgtgggcagcggcgcgatcgcagccggcgacttcgtgtcactgaaaggccgggggcttgcgggcgaggatgagatctacctgtcgctgcaggcgtgggtcgtgccggccagcaactactacaacattcgtatgtgtggccacaccgcctacaacccggcgctgcccggcctgaatcaggccggtgccaattccaaatatgtcgccatccttggcgtcaattcgccgatcaagtactggttcatcgccaatggacgttgcttcaaggtgatcacccgcatcaacggccgctacgacgcgatgtatggcggcctgatcctgccggaacatctgccaggcgactggagctatccgctgttcatcggtggttcgttcctgggcagcaatggggcagcatcactggatacctacgagcattccaacttctggaatggcaacgccgatttccgggctaacacggcatccagccaggcttatctgttcacaccgatgcaagcctggctacccatccgcaaccgtttcgccggaacggtgatttcttccgggcgcgtcacgtatccctggaatccctatgtgggcaaccagaccgtacgcagttgcctggatggtcagcgctggctgcaacgaggacagctgatggccatcgggtgggcctccggcagtaccgatcgcggcgcgcgagtggacgaagtgcccgagggcggtcagttctacggcagttttgatggtgtcttctacacgccggccttcggtgccactgccgagcaggtcgccaccatcgccggtgtggactacctgctcattcccaacgtctaccgaactggcgacggcgaatacgccgccttggccttggagtaa

SEQ ID NO: 528256 - DNA, 975 bp, Stenotrophomonas maltophilia
atggcctacgccgaattcaccaacgttgccaatgtccagactctgattgatctcgtggttcagtttgcgcaggccaatggctggaccgtcgagcgcaacaccctttccggcgccaatcgcaccgccacgcttcggattccaggcgtgtccgactacgtgcacctgttcaacaccgagcagttgaccctgcgctcgcgcatttccattggctacgacgccggcgcgacaccggccgcccagccattggtgtctccgcgcgacgtgcactcctggcagctgcaggggcccttcccgcggctgaagctgttcgccaatgcctatgccatccatgtggccatcgcccaggccacggccggtgagtaccgtcaccatgcgttcggcgtactggagaaggccgggtcctacgtgggtggcacctacgtggatgggacgtactgggcgcccacgggcagcaccagcggcatggtcagtgcaagcggaaacaatgtggttctgttcggtcacaacaccaacaccactggctgtggccatgtccgcgccgattcgaccgaggatgggcgcaccaacagcttccacgcagtgggcaactactatggcggagccttggggaccgaagggcaggccggaagcggtgtcggcacgattgcccaaacaacctcctcagccacctacgacagcatgtggcttggctgggcgttgggtggcaccgacgagaacacgttctctggccgaagtgttcttcagcccatccaattgaccgtgcgccgtgcgggcacgaacccctacctgtctccaatcggccgggtgtcgggcctgcgcgcgtgctacctggagaagctcgagcccgagcaggagatcaccatcggcggagacacgtggatggtgtttccttggctgcgcaagctggccatgagcaacgtgaccaacgcgccgccggccagcggcaactatggctgggccgtgaaaaagtcctga

SEQ ID NO: 528257 - DNA, 231 bp, Stenotrophomonas maltophilia
atgtggtttaacgtcgccatgatggtggtatcgctggtcatcagcctggtgttcagggccaagccgccggtaccgaagccggccgccctggaggacttcaatgtccccaccgctgaggacggccgcgaatgcgcgatgatctttggcacgaactggatcgacgaccccaacgtgctgttctacggcgacctgcgtaccacgccgatcaaggccaagggcggcaagaagtga

SEQ ID NO: 528258 - DNA, 228 bp, Stenotrophomonas maltophilia
atggatcgccctgtcctggttaccgtcgaacatgcccgtgcggccaagctgggcgaacacagcggtgtgctgtgtgccgccggcatccgcacctggatggatcgtcatgggctgaatcttcgccagttcctggatgaaggcctgccggtgacgcagttcgaagtgctggacgacgcgttcgcccagcgcctggccgcgattgcccgccaggaggccagccgtgggtag

SEQ ID NO: 528259 - DNA, 2688 bp, Stenotrophomonas maltophilia
atgaactggttgaacgaggtgctgaacaacgacccgaatcctgtggaaacccaggagtggatcgagtcgttgaaggccgttattgatgtcgagggctccgagcgcgcgcatcagctgctggaaggcatggtggaactgacccgtcgttcgggcgcctacctgccgttctctcccaccaccgagtacgtcaacaccatcgagccgcagctcgaggccaagagcccgggcaatgccgagctggaatggcgcatccgttcgatcatccgctggaacgcgatggccaccgtggtgcgcgccaaccgcaagccgggtgacctgggcggccacatcgcctcgttcgcctccggcgccaccctgtacgacgtgggcttcaaccacttctggcgcgcccccagcgagaaccacccgggcgacctgctgttcatccagggccacagcgccccgggcatctacgcgcgttccttcctggaaggccgcatcagcgaagagcagctggacaagttccgcatggaagtggacggcggtggcctgtcctcgtacccgcacccgtggctgatgccggagtactggcagaccccgaccgtgtcgatgggcctgggcccgctggccgccatctaccaggcgcagttcatgcgctacctggaaaaccgtggcctgatcgagaagtccgaccgcaaggtgtggtgcttcatcggcgacggcgagagcgacgagccggaaaccctgggtgccatcgccctggctggccgtgaaggcctggacaacctgatcttcgtggtgaactgcaacctgcagcgcctggacggcccggtgcgcggcaacggcaagatcatccaggaactggaaggcgtgttccgtggcggcggctggaacgtgatcaagctgctgtggggcggttactgggatgccctgctggccaaggacagcgacggcgtcctgaagaagctgatgatggaaaccgtcgacggcgagtaccagaactgcaaggccttcggcggcgcgtatacccgcgagcatttcttcggcaagtacccggaaaccgctgcgatggtcgccggcctgtccgacgacgacatctggcgcctgaaccgtggtggccacgacccgcacaaggtgtacgccgcctaccaccaggccgtgaacaccaagggcatgccgaccgtcatcctggccaagaccgtgaagggttacggcatgggcagcgctggtgaagcgctgaacccgacgcaccagaccaagaagctggacgacgaagcggtgcgccacttccgcgaccgcttcaacattccggtgaccgacgcgcagctggccgacggccaggtgccgttctaccacccgggcccggattcgccggaagtgcagtacctgcaggaacgccgtgccgcgctgggcggttacctgccgcagcgccgccgcaaggccgacaagaccttcgtggcgccgaagctggaagcctacgaccgcctgctgaagagcagcggcgagcgcagctactccaccaccatggcgttcgtgcagagcctgaacatcaccctgcgtgacaaggaactgggcccgcatatcgtgccgatcgtggccgacgaagcccgtacctttggtatggaaggcctgttccgccagatcggcatctacgcgccgttcggccagaagtacaagccggtcgacgccgaccagctgatgttctaccgcgaagaccagagcggccaggtgctgcagcagggcatcagcgagccgggtgcgatcagctcgtggatggccgccggtaccagctactcggtcagcaacgtgccgatgctgccgttctacatctattactcgatgttcggcttccagcgcgtgggtgacatcgcctggcaggccgcggacatgcgtacccgtggcttcctgctgggtggcaccgccggccgcaccacgctgaacggtgaaggcctgcagcacgaagatggcttcagccatctggtggccggtggcatcccgaacgtgcgcagctacgacccgaccttcggcttcgaagtgaccgtggtactgcagcacggcaccaagcgcatgatggaagaccaggtggacgagtattactacgtcaccctgatgaacgagaactacacccacccggaaatgccggaaggcgcggccgaaggcatcgtcaagggcatgtacctgctgaccgacgctggcaagccgaagaagggcgagctgcgcgtgcagctgctgggctcgggcaccatcctgcgcgaagccattgccgcggccgagctgctggacaaggacttcggcgtgaccgccgacatctggagctgcccgagcttcaacgaactgcgtcgcgatggtttcgacgtggaacgtgccaaccgcctgcatccggaaggtgagcagcgcaaggcctacgtgaccgagctgctggaaggccgccagggcccggcgattgccgccaccgactacgtgcgtgcatatgcggaccagatccgcgcgttcgtgccgatgtcgtacaccgtgctgggtacggatggtttcggccgttcggatacgcgtgcgaacctgcgccggttctttgaggtggatcgctactacatcgcgcatgccgcgattgcggcgctggcgaaggaagggaagatgaccgcgaaggatgtggcccgggcgatcaagcagtacaagattgatccggagaaggctaatcctgttggggtttga

SEQ ID NO: 528260 - DNA, 795 bp, Stenotrophomonas maltophilia
atgagtacggtccagctagctgaaacggggatagcgctcgtcaatgtagaagggcatccaatagtagtctgggacttaaccgaacccacaccctctcagcttcgcgagtgggccaagagctttcgtcaaaactattgtgtcgacgacgagctggatgatttgatggaaggtactggactttcacgggctgattatctaaacagccttgtgttcccggacgcagctttgaagccagggccatcgattcgtgcaggtgattttgcggagctgctcatctctgaccacgtagagactcttggctactgggtccctagaggaaagtacgccgagaaagcatccagaaatgaatccgtgaagggtgtagacgtcctagggttcaagatggaagggggcgaacctgcacctggagacatacttctggccttcgaaataaaagccgagctaaccggcaaaaagtacaagaataagctgcaggttgccatcaacgactcgtccaaggattgtctccgacgggggaccagcctaaatgcgctgaaaaggcgcctcattgataaaaagcgcatggatgaagcgaagcgcgtctcgcgtttccaaaatccgaaagataatccttacgagtatctttccggcgccgccttggtcgcgagctcgcacttatacgatgaggttgcgatcgcggcatccacggtcaaggatcacaagaataaggggcgtttatccttaatggtggtcaggggcaaggatctgatggatttggtgcatcgcttatatgaggttgctgcgaatgaagcctga

SEQ ID NO: 528261 - DNA, 3111 bp, Stenotrophomonas maltophilia
atgaagcctgagtcgggaagcatacggctactggagcggactcgctccgttgtcaaggcgtatgaatttgggtttggtgaccgcatcaaagagcaccttggccatctactgccagagtctcccgacgatcttctggtatttgctgtggcggccttgggcgacgctgccgcgacaactaacgacggagacgtcgattcctatttcgagaacttggaggcattagagttttcagcaaagttcttcgactcttacctggaagcacgtctggccgaggacatcggtctggatgtagccgttcttgcgtcggctgcatatctgctcgcatcgcggcccggtagtagtctagtgctgattcggcgggctcaagatctaaattcaaataacccgataatgaaccttctgatctgggtacttcgcggggattggcgcaacgctccgaatgagactctagctggtcatgaatccatcggtcgtttcttggttcagatttcgtcagtagtcagtgaatttttcatgcggggcacagcggaacccgccattgaagagctttccagtgcgctgcggaagcgtgcatatgcggttgccgacgactacgacttgcttctgactgacttggtttgcgcatgcattatggtgagggtgaggcgctcttcatggaagcagcttcccgccctctctggcaagagggtatccctatggcgtacctacttggaaacagattccgctcctcgggagctatggccttcacagattaagatgggtgaggctggtgttttctctggtcgctctgctgttgtacagatgccaactagcgcaggaaagacaaaggctgtggagttgatcattcgctctgcgctgatcgcgcggcggactaatgctgctgttattgttgcccccttcagggctttgtcccgagagattgcagggtctcttagagagtcattttccgacgtggacgtgatagtcaacgagataaatgatgcgccgcaatctgacttcctcgaaggtctggataatgtaaatcccaaggtgttcagtttggtggtggtgacgcctgagaagtacctatacatgatgaggaatcatccagagctaatgcctgaagtgggtctggtgatctatgatgagggtcatcagtttgactctggtgcgagaggagtcacttacgaacttcttctcactgaaatcaagtccttgatccctgttaaggctcaagtcgtactaatctctgcggtactgaataattcaagggcactggccgattggctgattggtcgcgatgcgacagtcgttgatggtgcgggtattgctccgaccagtcgggttattgcattcgcaacttggctcgaagagcggggggcgctcgacttctatgacgtcggaaatattgcgcggattgcattcgacgttccaggcatcatcgagagttcggtgcttggacggcgcgagcgagagaggactgatagagttttccctgacaagaccatctccggggatgttgctctctatctggcgcttaaagtagcgccgaagggagccgtcgcggtgttctgtgggaagaaggatgcggcaggcaatgtcgctcagagattgattgaaatttatgagaggggggggagtgatattgagcctccctcagcgatctccgatgccaaagagcttgacgcaattgcatatctagctttcaagcactttggtccggacgcggtggaggggttggcagcgaggttgggcgtgctgcagcatcatgcaggtgtgccggaaggaatgaggcttgcagctgagtttgccattcggaccgggcgagccaaaatggttgtgtgtacttccacgctagcccagggagtcaacctgcccatccgctatttgatagtttcgtcagtctttcaagggaaaagcatcatgcggacccgcgatttccagaacctgatgggtcgcgcgggacgttctgggatgcatacagaggggacagtaatatttccagatgttgagatctatgattccaggaataaggattcttggaaattcaaccgatccattaatcttattgatcctcttaactctgaggaattgggaagttccttgcgagtattgattagcgaggttaaaggactctacgcattagttaacgtcacaagtccagagtatttttctgcgcttcttgagcgtgacggatctgagcaatgggtcagtgagttctgcaattcccatcgacgtgccgggcttagtcgtgaaatcgttgaaggtgagctgtcgcttcgccggaagctattgtccgcacttcagagctatttgatggcgcaaagtagagacctcgatggggcgtcccttaaggtccgggcaaagaacttagcagcaggtacgcttgcttattcgactgccagtgatccggagcgggttgcgctagtcgagcttttcgaagctgtagctgaagacctcgaagaaagggtcgcggaacctgaggtgcgttcggtaatgtctaggactctgttggggacgggcgattccgtatatatcagggattgggttgaagcccgggtagacgagatcagtgcatgcgaatcccaggagcagttgctttctctgatctggccggtgtttcaagatcgaagttccagtcagcttttcgagctggcgaagccggtcggcatcctttactcactggtggagaaatggattgagggagagagctactctgacttgatcacccatggtgctaccgctcataggtcgtgggggaagcagacgagaaagctaactaagtcggcaatcatgaaatttatcgagaattctgtttcatacgaattcgttcttctgcttggcgcagttcgaatattttcggagcgaggcggtgttcactcaacggttcttgagaaaattgatgttcttcaaaagcggatcaaatatggcgttccatcccagctcgcttcgtcaatatacgaggctggatactcggatcgtgtggtggcccaagcgttggagaagttgcttagggagaaggggtaccttgagcccacatttaatcgaggtactgtaaactcggccaatatcagagaggcgatggcgccatttccgtcattcttccaagcagtagtctatcgaaacaagtga

SEQ ID NO: 528262 - DNA, 876 bp, Stenotrophomonas maltophilia
atgagtatgagtcaccatttggacccggccgcacttcgggcagaagtgcaggctaggcttggcatcgagcttgatctggacgtcgtcacgctcgacggctgcaagtatcgagcgttaagacctcgcgacctagagcggggccacggcttctttgtggcagtggcccagacacctagacaaattctcgcaagcttgcactttgattcttatgcgggacgcctatttcggcttatggcggatgcagatgaggcaagcaaggcctcgctgtccaaattggtttcaagtgcacctcaatccgggctcaatgcttactgcgttgtagaacaaacccatactaccaatcagacgctaggggccccgtcatggaggtcgttggaagtggaggtttccacacgaattctgccaaagtatgatgttgccgatctccagagacttgcagcaaatgtttcgtcttacgctctcgccatggcgctatgccttgttcaggtcgaagaaactgttgatgcaacaagcacagttggagaaatggaaggcgcgttgacccaagtacttgtgaacaagtacgagcgaagcccagcaaacagagccgcgtgtctcgccttccacggaacttcctgcaagggatgcggtttcgactttggtgctgtatatggggagattggcataggcttcattgaagttcatcacactacccctgtctcgctcatgggccaaaattacgtcgtggacccgataagcgagcttgtaccactgtgtagcaactgccattctattattcataggcgctcgccgccgctgagcattgatgagctaatctcgcttatctcagactcagaaggaagggagatcgtgcgcgaccgattgagcgtcgattaa

SEQ ID NO: 528263 - DNA, 1599 bp, Stenotrophomonas maltophilia
atgaacaaaagtcaaatctcctacgtagatgttgccccggacgtccagaggatcagcgaaggactcagagacactggttatgacttcaatacggccattgccgatgtcgtagacaactcgattgcagctgacgcaaagaacatctcgatccagttagccatcgatttcgcgggcgagatcgtggttgcggtctgcgacgatggctcagggatggaccgcaatggattgatcaatgccatgcgctatggctcgtcccgccggccgagcgcgaagagcttgggcaagttcgggatgggtcttaaaacagcctctaccgcattcgcgcgtcgacttgctgtcatttcacgaatttcagggggatcgccgcaacgagcaacttgggacttggacaggatggcccaggaaaaatcgtggtcactcgaagtcgcgcctccgtccgatgaagaggtgactttgctggacgcgctcgctcacggtgatgcgggaactctggttctatggcagaaggtcgataggcttctcgacggctacaaagatccggcttccaaagcacgtcgtaaggcgcttgaaaagctaggtgagcgactgggagaccaccttgcattggtgtatcagcgattcctcgatccggaagacgaccgagagaggactgtttccatctcagtcaacggcaaggcaatccagcactgggacccattcctcgtgagcgtcaccaaagctccagtcatggagaagattttgaaggtggagtcacctgatggaacgacggccgagttcacagtcagggcattcatcctgccacgcaaggaagaatatccagatactgaaacgctagcacttgcgagaatatccaacgaaagacagggtgtctatgtctaccgggaaaatcgactaatccatggccccgactggatgggcatgtacaagcaggagccgcacctcagccttcttcgagtggagctctcgtttgaccacaggcttgacgcagccttccaagtggacatcaagaagagccgcattcttcttgaagagaatatgtacgactggctgcgggacaaattttttactgggccgcgtcgagaagcagaagcccgctaccgtagaggtgcggcagcagtggctactggtgccagcctgctgatccattctgcagcgagtaacgtcattgagcagaaatcgggatcgttgtcgaagccaagtgtctcagttattgacgaaagcaagggcgaaatccagaccgaatctgcgaccgctaagcttcgtattgtttcgcctcaggacgaaggaagtcttaacattattacctccagcactctagagcatggagttctttgggagccaacactgcgtagcggcgggtcgattgcggttgcattgaacacgggccacccctactactcaaaggcatacttgccaaacaaggagaatagtccggtcatccaggccttggactatcttctgtgggcgctcgcccaggccgaggtggatcagatgactgacgagactatcgaggcattcgaagagttcaggatcttggtgtctcgcaatctcaagaagctagtggcggatcttcctgacgcacccgaatctggcacatga

SEQ ID NO: 528264 - DNA, 417 bp, Stenotrophomonas maltophilia
atgaccattgtccgtaaaaccttaagcgcaaacgatttgggacttacaggcagccatcaggccggcatactggtgcccaaggataaggatgttttgtcctttttccctagccttgacaagacagtcaagaacccccgtgccagcttgaccctccgcgagcttggtgacggagcaaggcgagagttcaactttatttattacaacggcaagctgtttggtggaacgcgcaacgagtatcgattgacctgcatgaccgcctatcttagagagtgtggcgctcgagttggcgacgaaatagtgctgtcgcggaatgaagacgcaagctatctgatcgacctggctcgatcaaactcacaaagtttcgttgacggtgaagacacgattgtgctttccggcggctggaagattagcaaatag

SEQ ID NO: 528265 - DNA, 1893 bp, Stenotrophomonas maltophilia
atgaacgtgaccggcagttcttggttggtcaaagatggagttttgggaatcgaatcgttccctggtaatttcatggtgccaagcgccatggacatcttccgcgctcagttccatggcgcgaagcaggtcatgggcgaactgtgccgggagccgcaggccgatctcccccacctgtgcctctcaaaatttccggcagaacccgcgctgcgcctcctccgagagggcggcagcatccggggaacctacggggtggtcgctaatgggagatttgcggaactcgcccacgacaccgatcaagtaattgttgatcagacttggtatccgattgaccttgcgtccctggcggaaggacatcagttcgctaatgaatttggcgcactaagtgacaaagtaagcctcgggacgctcgttaagctgcgactcgcagagcagctaccatttcacttcgttgacgatctcacccacgacgacgggcaaaacgatctgtcagcgaacagcaaatcgctcgaacgcaagggcatccacgcgactctgtatccatatcaggcggacggtgtcgatttcctcaacttgattgcagatcagaggatcgggtgtgtgctagcagatgagatgggacttggaaagaccttgcaggtcatcggcatgcttgtccatctttcctcgacccaatcctatccaattctgattgtggctccagcaagtctacttgagaactggcgccgagaaatttctcagttcgcgccgtccctatccacccgagttcatgctggtgacgaacgcgcaggaactgtttccgcgctaggaactatcaatattttgatcacatcctacgagaccgtggtccgcgacgctccacttttaagctcatacaactggcacgccgtagtgctggatgaagcacaagcaatcaagaatcctgacgcacagcgcacacgagcagtcaaggatctgagtagaaaggtatcaatcgcagtctctggcacgccactcgagaacaagctcgatgacctttggagtgtttccgatttctgcctgcccgggctcttgggtgatcttgagcagtttcggagttcctacacggatgatgtaacagacgcccgacgcctgggcgacgcacttgctccactgatccttcgcagacgtgtagcggacgtagccgcggatcttcctgagaaaatcgagataaggcaaccggtcaatctcacggatggagaggcacgcgactacattgcagtgcgcgaccgggtaatttcagagcatggtgccgcaggggcacttgtggcgacgacggttctccggacattctgtgcggacccagcactaaccaagtacgccctccagtattcaacgtctccgggatcgaaatttcgccgcgtgatagaactactggaggagatctttgcaagcggggagaaagcacttattttctcctctttccatggaattgcagatctactttcgcgcgagcttccaaagctgtatccccgcgcgcacttcggcacgatagatggcagaactcccgttgaagatcgacagaatgtggtcgacgacttcttcctccaccaaggagtcggtgcgcttctcctcaatccaaaggcagcaggatcaggattgaatatcaccgctgccaatcacgtcatccactacaacccggagtggaatccagcccttacagcgcaggcgtccgcccgtgcgtttcgtcgcaagcagactcgtccagtaaccatccattacctttaccatccaaacactattgaagaggtgattgtggagaggtcacaattcaaacagcaattggccgacggcgccgtgaccggccatgatggatcaccatccgcatcagatctggcgaaggcgctggcaatctctccaatcgatcagcataggtag

SEQ ID NO: 528266 - DNA, 1251 bp, Stenotrophomonas maltophilia
atgaatacgtacgaattgatcgacctctgcctccagcgcttcactgtgaaggaggttgccagggcattggaagtcgatccgaaaactgtccgacgctggcagcttcgcgagaccgaacccaagccctacatcgccgacgcaattcgtcaacgtctgctgccccatggcgagcccccatccggcgagggcaaatttcgcttcattgatcttttcgccggcattggcggcatacgtacggccttcgagaagcaaggcggtcgctgtgtgttcaccagcgagtgggacccctacgcggtcaagacttacaaagccaacttccacgatggccccgatcatgttttcgcctcggacatcaccaaagtccatgagaacgacgtaccggatcacgacttgctgcttgccggcttcccctgccagccgttctcgatcgcaggtgtgtcaaaaaagaactcactcggtcggccacacggtttctccgataagacccagggaacactgttcttcgatgtagcgcgtatcatcgacgccaagcgtcctcgcgcttttctcttggagaatgtgaaaaacctagtgagccacgacaggggccgcacgttctcgacaatcatggacacccttagggacgagcttggttaccaggtggaagctcgtgtcatcaatggaaagcactttggcccccaacaccgggaacgcatcatcatcgtaggcttccgggagaagaatgacttcactttcgacgacttggagcttccggactttggcgtctcgcctcgcatgggttcggtcctgcatagacaggatggtagcgaaggagaaggccagcgctacattggaggagccaaaggcaaggtactcgataagtacacgctctcggacaagctttgggagtacctgcagaactatgctgtaaagcaccgggataggggcaacggctttggcttcggcttggtaacgcccgagagtacgtgccgcacgctgtcggcacgctactacaaggacggatcggagattcttgtctcccaaggcgcaaggaagaaccctcgcaggctgacacctcgcgaatgcgctcgcctgatggggttcgatgacaacttccgtattccagtttcagacacccgagcctacaaacagttcggcaattctgtggtcgttcctgtgattggagaggtcgcgcgaatcatggtgccccaccttgttcatgaagccgcttctgagcccacaattccggtgaagaagatggtgaaggcctga

SEQ ID NO: 528267 - DNA, 258 bp, Stenotrophomonas maltophilia
atgaccagcacaccggcacgccggttggcctgcatcgccttggtagccgtactggctgccagcggctgcgcgcggccgccatccactggtttggatgacaacaccgccgccacgctcaagagcaccaacagccccggcaccgtgggcggccgcacctacacggcacagccggtggaggccacctggcccgcaccatttcatgttcccgcccaatctctaaaattacctcctatcaaagaaataatccaaagaatttga

SEQ ID NO: 528268 - DNA, 1425 bp, Stenotrophomonas maltophilia
atggtctttcttcgccgcctcgccctgcatcgcttcgtacagacccatcctccatcacgacaggtttcgcctgctgcccgtgagctcgtttccgcctatgagggtgttcttcctgaaagccttctcgatctgtggcaccgaaaaggtctcggattctatggcgatctccaactcgccctgatcgatccccggccatggcaatccgtgctcgatcggtgggtcgtctcgccacccgacactgtacggcgcgttcccattgcgctgacgcccttcggcacacttctctactaccgaaaactgacggaaacggacgaggacgtggcctacatcgatcccgtgtcaaagaagacgggtgatctggcgtggagtctcgatgacttcttcaacacgttcctttgcgagcgagacgcactcgaatcgctcattccaacagccttggttcggtccgcaagagaagagtgcggagcacttgcccccggcgaggtctacgaagtcgatcagatgctgcttcccatgcagatgctacggattgcgaaagtcgatgcactcggcatgcatcgccgtcttcgcgacgccgttgatccgcccacgccaaaggccgaaaagccgacgacagtagccaacgcgctgccggtcgaacatcgctccatgttcgagggcattgcaacagggccgggactcgccggactgtatctgtcttcctacatcgactggcatcgcctgctggcgctgcaaccgaacggccagtaccgtttgctgttctggcgcattcatcacaagaccttcgagcgcactgagatacgcgcttacagcggttcctacgagatctccgtcaactccgcgggggatgacatcgtcgcgctcgacgtcaccctccgggaagattcgttaggcagtgacgcgaacgatgaagaactggtggtgatgcatgcggaggaaacgactttcctgctgcgcacccaagcgttggaggatatggcaactgccatcggcggtcgtgacgtaatggggcggagtgaacactatttccgccgcattacgttggatggccccttcatggaggagcctggcgatggacgcgcagcaccatcattcacgaatctgccacatgcgctgcaggtgctgattcatgtcgaccatctacttgcgaccattactcatgtaggcgatccagatcccgacgaagagcatgaaggcgagggtaccgtcatgtgcacgcttgatctgggcgaggacgacgggttgcgcatgaacatgccgctctattcgcctgaagatgccggtcgccaactccacggatgggtttgggatatggcaccgcgtgcctgcaaggcgggcatcgggtatcggcgcggagaagacggtgtcattgaatatgggcctgtggtcggggatgtgttgactacccgtgctccggacttatag

SEQ ID NO: 528269 - DNA, 258 bp, Stenotrophomonas maltophilia
atgcggacagcgccccaattgaccagtccccatcgggcatggcccaagctgctaggcaccggccagccgatcctctatcaagcgctcgtagcgctctccctggtgatggccgccggcgccatgctctatgtccccgagcagctgaaaggcatcgccatgatcgacggcgccgtctacgtggcggtgatggcgaggattctgcaggcgcagaaccagcaccgggccttcaagcgcctgctgtccgcgcgcgatcaatag

SEQ ID NO: 528270 - DNA, 402 bp, Stenotrophomonas maltophilia
atgtctgcatctcccctcgccatcatcgaagaattcttccgccgcgccggtacgggcgaacccgttgaaaagatcgccgacttggtcagcgaacaggtcgattggtttgtggcgggcgacatgaacgtcgtgccgtggatcggccgcaaggtcggcaaggcaggcgcggcggagttctacgcccagatcagggagcagatcgcatccgaagcgtttgaggtaagcgagatcctttcgcaaggcaatcgcgtgatcgcgctcggaaatctggcttcgcgagtagtgcgtaccggcaagctgatcgaatccgaattctgcttcgacttcaccgttgagaatggcgagatcatccggttccgtctgttcgaggacagttttgctgtggctcaagcagcggtgtaa

SEQ ID NO: 528271 - DNA, 603 bp, Stenotrophomonas maltophilia
atggcccaacgtggtcgcccacgccgcttcgaccgtgatgtcgcccttcaggcgatgatggaagtcttttgggcgcgcggctacgaaggcgcgcaacttgtcgatctgacgacggcggcgggcatcgcgccgccgagcttctatgcggccttcggctctaaggaggcggccttttgcgaagcggtggaccactacatcgcaacggtcggggcaaagccacggcaggcgctagacaacagcgttaccttgcgcgatggcgttgagggcatgcttcgcgccagcatcgaagtggccctatcggcacggcccgggggctgcctgttgattcttggcgtggtgaactgcctgccggggaacgaggcagcgcgggcgcacctcaaagcggcacgtgacaagacacgcgagctgattcgtgcgcgtctcgaacgcgcccgtactgccggtgagttgccttctgggatcgatacctcgcaatgtgccgcgtttcttcacggcgtcacacagatgatctcgttccacgccagggacggcgcgaagcgcgccgaactcgaagcgctgatcgcccccgcattgcgggcattgtgctttaacgtccaaggatga

SEQ ID NO: 528272 - DNA, 2202 bp, Stenotrophomonas maltophilia
atggcaaaaacaaagaagatcaagcccccgatgggccgaaagcttagcaatgaagctgaagttacgaactggctggtcgagctgattgagtctgataaattacatgagacaattttaggcaaagagagcattgaggaagtcactcttgcaattgacgacccctacgtaataccgaagttctcaattgactacgcaagccgactggcaagcgctagatcatcaaagtttgtgctggaacagctccgcaatttggaaatagtttcgatagacaggagcatttcactagacaagggtgaggtgcttcgacctgacatcattgcttacaaccccgagtcgagggtgatagttctcttcgaagtaaagcgtgacaaggggccggagcgccaagccatctcggagttggcaggttacgagcatgaacttcagaacttcttcccgttcttgtccaacatggatatctgctttgtcctagttgccaaggactggtcagatctcatgtcgcacgggctggcaggcctcacaacttgggcaggaaagcagtgcttagcgctcagtctcgactacgacgcagttcctagagaacttcgctgcaagattgtggaagcttggagtctcactggctccacaaccatccccgacgatgcgcttcaatgctacgacttagttctctatgacaaggacgagcaagaatcgctttcaaccgacatcgaagttccaagactcatccaaacagcaattgatatgatcgccagaagcggggaccgcatgcgatcccatggctttcttttactttggagagatatatccccattcccactgcaatgggtaataacactgtgcaccttcgactacggcgtcttcgcttcgagatcgtctgcgaatgaacgctcaaaggtttctaagatttcatcttatttcctcgaagataacgatctatcctatggatcaatgcccaaaggaggttatgaaatccctaagacctcaatagatctgctatccgaagaatatgatgtaaagattgagaatcacagcaactggaagcagaaagttagcgcacatagactacgatcccaaccagtgatttatgaattctggggcgcccccggggacttcgcaagagatttcatatctcagaaaagcgttcgcaatattcttcttacgttcttgccacaatccaaacttgattggcgcgacccgatagttgcagtcccgctcatcgaatatatgactgacaggccaccattcgccgaaggcaaggtattatctcgcgacctgctagaggcgggaatcacccttggatcgctggcgacgacctgcgtcaacatgaacgctatcctgcaagattcggaagaatctcgcaataaagaatcgttaacagtgtattcggcgcgctttaaatggatcctgcccgaagcagtagtgttgatggccgagctagcccagctttcactgtcctacgaggatcttgagccgccgccgccgctgaccaacgacttcaccaaagtcgaagatcacattgacaaaatcgtcgcatgggtccgcgaggacctaataggcgacgaccatgaaatacattcggactctttcatcctgggcctcagccttgggtttgcttacgagtatttctcacagtcgcagactacagcgggtgcgcccaaggagcttaaggaggccagcagtaacgcaattcatttctgtgaacagactgtactcgttctaatgaagcgtgcggaagataatgagataggagatcgggccaaggacgaggcgagagactatctgcaacagctggcagccctttatccgcgcgaattcgagaagagcagcactaggacaattctggagaagctttcttttccagttttgctccgcgcacttcgcctatgtgcggacgcagtcgactcattcctaaacccggttcaccatactctccgaccgttggcaatagcgaatgttgacatgaccgcgatcaagaacggaatcgcgactatatttaagcgcggcgacaagagaccttcggtaaatatcgactcttcaggccgcttcggaattggccaccttcctgaggaaggcagaatattccctgagttaacaaacacggacgatggggtctatctcgcggactacagccccggatttgcaatgataactaaggccacctgggcagaagtcgcagagaggctaacttccggtcataaatga

SEQ ID NO: 528273 - DNA, 249 bp, Stenotrophomonas maltophilia
atgggcgtggatgactcaaatacgacggcccctcggatcagccgatatgaacgcgggatgcacaagccggacttggagaccatcgagaagctcgcagagcttctagaccttcctgcggcttactttcttgctgcgtcggatgtggtggctgaagccatcctggtgctatctcagcttaatcccaagcgccaaaaagaagcactacagttcctgagaaagctttccgacaggaatgactcttctgaatga

SEQ ID NO: 528274 - DNA, 636 bp, Stenotrophomonas maltophilia
atgaacgcaccgacggatcgtcccgatatgcctgtcagcgcagatgagtggcacgatcttctcgtccagttcaatcgacaacaactctccacattggaagaaaggcttgccgcgcccgaaattgagatgggcctgctgcccttcgccgagcagtacccagagagcccgctcgcagaggttgctcgacacgcgctcaccgggaccatcgactggtgcggcgtaccgggtgccagcgagcaggccatcgtcgatgcggaagagcgcttgggcgtcaggctccccggaagctatcgggaattcttgaaggtcagcaatggcttcctgatgcctggacgcttcatcgacatcctgttgcccgtcgagttgatccgcccgttcgggcaggacaacgaggagatcgtgcagattcgccgggaactggttgtggacccggtggaggaggcgttccagtaccacctggaccgtgccatacaggtaagcggcacgccgcagatgggcgatgacttcatcctgctcgacacccatcgctccacagcaccgaatgaatgcgatgcgcatatctacagccgtgtcgatattgattggtacgcctcgtttgcacacctgatggcggagagagcaacgttcaatctgtga

SEQ ID NO: 528275 - DNA, 1071 bp, Stenotrophomonas maltophilia
atgaaactgacgccactggccctggccgcgacgctgtgcgcgttcaccgcacacgcgcagcaggacgatgactgccccagcgacgcgcagatgatcgccaccatgtccttcaccgagcttgatcggtacgaagcggacatgcgcaatgaagagccctcgttcgaggagctctgcaaggatgccaccgacaaggacgaggaggaggcggcagggtcgcggcggcactactgtgtcaagcgcaccgcgcgctacgtgtcctacaacaccgacatcggcgcagaggaatattcggacgtcacgatgtatgactacacctaccttccacgcacaggcaccacgtggacgcatcgtgtgcgcgtggtgatccaggacgttctgggcgaggcatccaaggggctgaccatggcccccttcctgtactgcggcagctgtaccgaaaagcagcagttccagatgatcgggctcggaggacagggtacgtacgacttcgccgtgacgctgggcatggacaccgaggacggacgcaccagccagaacacccagctgattctgaatcgcttcaacgtagaacagacgccgatcgagatgtcggcgccggaactgcgctgcgaaaggctggcgaacagcactccagcctgccggcatgcaggctatcccggtgttgcagaactcagcctttccgatccggatgtggacgaatccgctgcccacattcttgcagcgcaggccgcgctgcccggcaacatcgggcgctgggatccagatcccgcgctccgggggaaggcgatgacacgcatgcgaagcgaggcagcacgactggccaatcaacgcgcgagcaaggcgctttgcaagcagagatttcctggacaaccagatgcaggaaaggactgcgacgagtaccccttcgcatccacctatcagggcgcgagcctcgtgtcggaggatcagatgtccgtccgatatctggattcatcggacaaccgtcgtgttggtggaaagctcgagcaattttactgcggaactgaccgcatcatcgatggcgaggagttctggctgaggatcgtcccatga

SEQ ID NO: 528276 - DNA, 612 bp, Stenotrophomonas maltophilia
atggctgccgtgcttgcccgtacctgcctgtccacgctgtgctgcctggccctgcccgccgtggcccaggacgcctcgttccgcttcggcgaacagaccacccgcaccgaacagaccacacaatccagcagcacccagacccggaacagcgaagtgtccacctccggcgatatcgggagcctggccacacagtccaccacccgcgacacctcccagtccgaaatacgcagtgaaaacagggcggttgatgtagacgccggcgttggccgcaacgaccgtgacgatgattgggggcatgaccgccgtcgcagccgggatatccgcgacagtgacctgttcggacgctggacgctgggccaggagaatggcagcacctgcaccatcgaactgcgcaacagcgaatggttcggtggctatagcgcctatgtgcccgccggctgcccggacggcttcttctctgccaatcgctgggtgctgtccggtgaccagctgcttctgaccgacaccagcaacaccgtgttcgggcgcttcagcttctccggcggtggtcgctggtcagggtcgcgcgaatccgacggcgcgcgcttgtatctgaaccccgccgggcgctga

SEQ ID NO: 528277 - DNA, 1605 bp, Stenotrophomonas maltophilia
atggcgggctcagacgtagtgcatggccccgccaggcaggcggtggctgcgcgcctggacgacctgggccagctgcgccgccgattgctgtacggaggcggcgcgctgatctccgcactggtagtgctgaccgccctggtcagtgccatcgccgatgtcgaggagttccacgcgcgggagcggcattccttcaacgaggcgcgtgccgccgccgaatactacctgctgcagcgtgatcgcgcctatgccacctccatcaacggtaatgatgtgctgtggcgtgaccagcgggccggactggccgcttccggtgccggactggccgcccgcttccacgcgcagggcgaagaagtgctggttcgctccgaagggcgtactgcggtgccctggctggtgctggggctgaaggacaagccgctgccggaacaggaactggccgcgtacctgggcatggtggacatctattcggcctacaccgccgattcgatcacttcacagaatgcttccgggccattgctggtctatgcctacgagccgcagggacggctgctggcggtgtccaacatcagcggtgaatcccagttgctgcgcgcactgggtgtaacgacccgccagcaggccttcgcgcggctgctgggtgaggaaccgcggttccgccaggcaaccgtgcgtcccgggcccatccgtgaagccgcgcgcgaggggcgcctgatgtcgcgctatggcatcaatccgttcaccggtcagccgtcgctgatcggcatggtcaccctggccgaaggcaccactccgtacttccggcgcgtggtgtttgaatctgtcggcaacatcaaggctcagctggaagcgcgcgagcagggtcgctacctggtcagcacggcagagcggcaggtggtgctcagtaccggcggcctgtccaaccgggagcaggatctgttgatgaggctcgcgccaagcgacacggcgcgcgcagggagacagccgccgcgacggtacagccaggggtcgttcgtactggccagcgggctgccaggcgtcgagtggaccctgagccatgtgtacggctggtccgatatctggcgcagccagggcgcctacctgctggcccgtgcgctcagtgcgctgctgatcatcagtctgctgtggtggctgctgcggcgcatcgaccggcgtgtgttcaccccggcgctggccgatgcttcgcgggtgtacgagagtgaggcgctgagccgggtcatcatcgggacggcaccggtcggactggtcctgctggccagggacagcggtgagccgctgttgcagaacgacgcagcgcgtcaattggttgagactgtacgcacggccggcgaagtcgcgtcgccgccactgtacctgcgccttgccgaagtgggccgcaatgcgcgcatcgatgaagtactggaactgcagtggtctcccgccgaatcgggcaccgccacccagttgcagatcagcatggcgcaggccacctattacgaacagccggtgtgggtctgcgcactgcgcgacgtcaccgcccaggtggagctggaagaaaacctgcgccgcgctcgcgaggattccgaggcggcacgccaatccgcctaa

SEQ ID NO: 528278 - DNA, 1170 bp, Stenotrophomonas maltophilia
atgccgcctcttcgacccgtccttctgaaatcccttgtgccaacagcacttctgctgacggcgtgccaaggttcgaccgtcaaaacgccccagaagcactcacctgagctcacagcgcgcatcgaagcactgtcgcaaaagaccaaaaaagaccttgtggaggtggaaggcggcaccttcatcatgggtgatttcggccccatcgatccgcgtgcaaagatgccttacagcggtgagcgcgacgacgacgtactgcgtgaggtaacactgagcagctacgcgatcggtgcgaagaagatcacctacgccgacttcgacgtctataccgatgcgacggggcaacctcgtaccgcacagtatccgatggatctggagtaccggaacctaccggacgacctgcccgtcggcgtgagctgggaggccgcgcagcagtactgtggatgggtgggagaactgatcggacgcaagatggaacttccgacggaggcccagtgggagtacgcagcacgtaaccgaggccagttcgtgatctggcccaccgatgatggcagcgtcgacaatgggcggaatgttggggattacaaaaccataaaccgctacggatcccagcacggcttcacaaatgggccggcacctctgggccggtacccgcccaccccgctgggcttgtatgacatgatcgatcatggcttcgagtgggtctatgactggtaccaggatgcgtacgatatctctgacgtcaatgatccacgcggaccgatgcacggcgagcagaaggtgcaacggagtcacagtgatcgtggtggagattcgcttttcatcgtgtcgatgacgtttacgcgattccaagcgccgcctgatcctggccccgatctgtaccttccggaagatgcaaggcatgagttcaaccccaatcgggcaaacaaattccgctgcgcagcagacgcgtctccgcgtccttcgggaagcaccgcttcacgcccctcatccctgtcactagtgccccctgtatccaggcattgctacgctgattcagtccatccagaactgatcggtgcttctcatgccgcctcttcgacccgcccttctgaaatcccttgtaccaacggcctttctgctgaccgcgtgccaaggctcgaccgtcaaagcgccccagaagcactctgctga

SEQ ID NO: 528279 - DNA, 987 bp, Stenotrophomonas maltophilia
atgtatgtgtattacgcggacgggcgtttccggatcaaggtcagtgcgcgattgtgcatgggcattggctgcagaggggcgctggatttcgtggtaggggtggaagggatgctggagttcgccaagtgggtttactaccagttggcgcacgcggggttcaaggaacttatgttctttgcagatggagttctcgaatatctctcacaggtagtgttcttggtcttctcccgcaatggcacgatggcagagtatctcactggcggcattggtgacgctcaatatagagtgacggccatgcttcgcaggattagcgtggcggaacatagaattgagctggtgcggcgcatcaactatgccgcggcgagtccatccaacggtggaggcgcatggctcttgtatgccacacccatgactcgcgggatgcttctctacgcgatcactcgccacaactggatgacacacatgcagaatccagccgatgtcgagggggtgtttgatccccaggtgcactaccttcctgatcacaagaaggctgtgatccgtgtgatcaagggcatcactcttgccagtgagtggcaagccatgttccagcacatgaccgctgaaggcgaacccagcgatgaagagccgggaaagcttgagggtgatgtaattagatttctgaactacggtgcttcgctgtccggtgatctaaagggcaaagtgattgatccaatcaatgtagagggtgatgtgccttccggccaagtggggaatagctaccttgagcagttccttgcccatcgcaacagactgctgggtagcttccccaaggggtatgagctggcgcacctgcagaggatggatatcaacacacttctggcgcttgacggtagggacgcccctacctttgcaagcgtagatggaaaccatctcaatccattggaccatgaacgacgtggcatcgctacggccgctagagctggcacctccgaaagcacatcctaa

SEQ ID NO: 528280 - DNA, 495 bp, Stenotrophomonas maltophilia
atgtccttgaagatcatgaagctgagcgagttccagtttgagtgcgatatccaggctgatcgcaaggagtatcagtgctacagggatgacccggcatctggcgaaagcccggtgtacctgctggtcagcctcgcgcggctgcgggaggccctgcgcggggattccctttgggctgatacgaaggcgcatcgagacgacgaaacattcaaaccctggaagtacgaacgggccgtttctacgctggcggccggagaggaaatctataccccctggttgatcttccgggaggggcggatccgtgtgatggacggcagacatcgcctgtatgcgctgattgaccatggtttcacgcacgcaagggtggtgacagatccctggcacgctccggcggttcggacactggtcgagcgggaagatggcgggccgggtgacagcggtcgacaggagtacctggacacgagggcagcaggcaaggatcaaggcgttgcagaatga

SEQ ID NO: 528281 - DNA, 486 bp, Stenotrophomonas maltophilia
atgaacatcccggcgtcccccaacgacctggtgacgctgttgtccgcgttcccgaagacgacactgccatcgtcgctgccacttttccatggcggtgcattcgcgcccggcacgccactgtccgagatcgcgcacgggatgtggttttccacggattccgaccttgccaagcagtacgcgcgctatggcagcgcaggcactcccacgttcctgttggaagtgatggcccatcgcgaactttcagtcattgtgctcccgaacgcaccgctgacagtgctcagcaagcactacgtgccctatctgccgcgtcacgccgagatgcaccgggaccttgcggcgagcttcaaggcgatggccgtggatggcatggcatttacggacccgtcactgcacgctgccggcttcacagaggtattcctcgccgggatacagcacctcacctcagttgtttcgcatgatcgcgtcgaggcagcagatccattctga

SEQ ID NO: 528282 - DNA, 324 bp, Stenotrophomonas maltophilia
atgcagttcgtggaggttcggcgtgggcacggcttccagttcgtggaacggcatgaaggcgcctctttccagattcattgcaagggcgtgcccgtgttgtggctggggaggcggccgcagcatgtgctgttgcaggtctcgctggatgcgaatcagcgggcgcccgccgttgtgccgttgcgtgcgctgcttcaatggcagttgcaacctgtggactatctggagcaggtgctggctggggtgccagaacctgttctgatggatcgggtgtttctgatgctcgcgggcgaggtgcctgatggggtgcggtgtggcatgccgtag

SEQ ID NO: 528283 - DNA, 717 bp, Stenotrophomonas maltophilia
atggatcgtacgcagaagaagctgacgatggccgacgtcgcaggctggggttcggcgctggttacgttcggcttggttcaaggggccctctaccttaaggcgtactgggggcacttcggccttgatccctttcagtttgttgcggtaagcgagcttgcgctggcaggccttgcgggcatcggcgcggtgttgttcttcatgcttgttacagcattgcttggtggctggattgaggggagggtgacggccaatacaacggtccccagccccgtgatgtggctgatcatggtgctgtgccttgcaggattaggaacaattatctggtggtcgaatggatggccgcttctgataggcggagcattggtgggcgtatgtgccgtagccgtacgcctgtcaccggtactgcctgctgcggtaaaggactcaccatggctgatctatgcactgataatgcttgtctatgtctcgatttcttcaatctggattggatctgaccgcgccagggcgatcaccaccggcggaagcagttacaccgtgagtgtgacggttgatggcaagacgcaaggcggcgtgagcctggttggccggctgggtgattgctacgtgctgcgggatccggcgcagaggctcgcggcgcttgtacctgtggacgatgtggggaggctggagattgggcgaaaggcagcttcgcctgctaaggcgaagtggtctcgataa

SEQ ID NO: 528284 - DNA, 126 bp, Stenotrophomonas maltophilia
atgtcagacaacctgtacaccggaacctttgactggatagcgacgttcgcgttgttcaactacggcttcgccagaaagatcgaatgctacggcgaagacttgttccgagccacctccggcaggtag

SEQ ID NO: 528285 - DNA, 2073 bp, Stenotrophomonas maltophilia
atggaagacaaaaagggttccgacctcgagaaggcgatcggccgactggacgcgatcgccgtggctggattcgcccagccaagcggcagccgtactgtcgaagacgtggtggatgtactgtggaagagtgagtcgttgctcgacaagcatggcacaaagaacaactggccagcgcggcgaaagttgttcatagacagcgtagctgcgactctcgccagcctcgatgcagatgccgctgcatcgttgcaggtgctccctgacgtgttgaacaccgtcgataccaacttcgcaaagatcctcgaacagaccggaaagacagcaggagcggccctgccaccgctcacgcaggtggctgccgcgacgggcttcgcgtgtcaggtgctggagatgcttgagcaaggcgccaaacaggacatgggcgagggccccgagttgcgggtgaagaagaacttctcgattggaggtcgcatcataaatccggacacggaactgttcggtgtcctcaaggccatgggctcaacagtgctgcttctcggataccagcatggctggttgaacgcagccggtcaggttgtgctgccagacgcgctccaccgtccgtcgattactgagattgaggcagtgcaatcggtgctgagctttgcagcggcttggcacggctgggagcgggcacaggtccgcgcccgcttcgcccatcgcccgttcgagtatgtacgctcgccctttccgcccaatgtgccggccggactcacgtccatcctcgatgttgagcccaaccacgacgtggagctgcccgacttcattgctaatgatcggttgcttgcccgcaccaaccaacagtacttcgagatgctcgcaaagctgcgccaagacgccgagccaagtttggacgaacgcacgccgctggcaccggcagcctttgtttccttcgaggaaaagcacgggctctacacgctctacgagtactactcgtacaacgtccaggatgacacaaagcgatatgcgggcctaacgctcatggagtggctgcgcggctacgcgatcttgcgtcgactcgccaccgaactcgtgcctgcacctgcggaccacccgtgcccgcagctggcagaagctgagatcgttgcgtacctgacccggggtgggctgagcgacgccaccgctcgcaccttccttggtcactgttgcctaaccagtcgacgcagcgacatctacgaccgtccctttattcgcgtcggcgcggatcggtacttgttcgtctcgccgagccagcgcaatacaattcttggcccgatcattgtttcggcgctcaacggggttggcgccacggttcagcgcaaaggcaccgagttcgaaaagcgccttagaaaagaaatccagggaccagaccgcaagatcgcccacttcaccaagacgcgcgacaaggaacagtacgactacgacgcgttgatggtctgggggaacttctgctttttgttcgaatgcaagaatcacactctgtcaagcggcgtgattcaactggcctatcacgcgcagcaggaaagtgtcagccacgccagacaagttcgccggttggtcgacgggctattgaaacatccggacatgctcaatgatcacttgccggaggcccgcggcaaactgctggtgccttgcgtcgtcaacaaccttcaatattcggtgccagacggcatcgacggaatcttgtttgccgactcgtcgatgatcaagcggttcctcgaaaatccggtcattggccaagtcggaacccgcccgggacaagagccggttcgcatgcctgacggagagatcattcgtctatgggccggtgatgctccgaccccactggagtttctgcgccatcttcgatgccctgtgcagttcattctcacgcgggaacataccgagtgtccgcgtatcctcagcagcatttctgagcacgaagccttggccgggggggagtacacgacttcggatgtcgagcttgtatcgggccgcgcggccgctaaggcgtacgactcactcgttcctctctggagcgaagaagattgggcgcggcgactgacgcgggttccgtag

SEQ ID NO: 528286 - DNA, 1407 bp, Stenotrophomonas maltophilia
atgccctcggccctgccgggactctcggcgcagcgcgccacggagttgctgcagctgagcaaccgcatgatcaagaccgtacctgaagtggacaaggtgttcggcaaggcaggacgggccgaaactgcgaccgatccggcgccccttgagatgttcgagaccacggtgaagctcaagcccagggaacaatggcgtccaggcatgacgcccgagaagctcgtggaagagctggatcgtgccgtgaagatcccgggcctgtccaatatctggattccccctatccgcaatcgcatcgacatgctggctaccggcatcaagagcccgatcggggtgaaggtgaccggcaacgacctgggcgtgatcgatcgcatcgctgcagaggtcgagcaggtcgccaagggcattcccggcgtgacgtcatccctcgcggagcgcttgacgggcgggcgctacgtggatgttcagatcgaccgcgtagccgccggtcgctacggcctgaacatcgccgatgtccaggccgtcatcgccggcgcggtgggtggcgaaaacgtctcggaaacggtcgaggggcttgcccgctttccgatcaatctgcgctacgcgcgagaatggcgtgattcaccacaacggctggcagaactacccatcttcacgccgatgggtcagcagatcacgttggggaccgtggcacgcatcgcgatcaccgatgggccgcccatgctcaagagcgagaacgcacggccctccggttgggtctatgtcgatgtgcgcggccgtgatctagcctcggtggccaacgaactgcgcgatgccatcgggcagcaggtcaagctagagccgggtgtgagcatcacctactccgggcagttcgaatacatggagcgggccaatgcacgcctgaaggttgtggtgcctgccaccctgttgatcatcttcgttctgttgtacctgaccttcgcgcgtgtggacgaagcgggcttgatcatggcgaccttgcccttcgcgctcacggggggcatctggttcctgtacctgctgaactacaacctgtccatcgccaccggcgtgggattcatcgcgctggcaggtgtggcggcggagttcggcgtggtgatgctcatctatctgaagcaggccttggcggaacgttgccccgatggacgcgacccgacgcgagaagaactgctcgatgcgatccgggagggtgccgtgctgcgcgtgcggcccaaggcgatgaccgtcgccgtcatcctggcgggcctggtacccattgtctggagcagcggtacgggctcggaggtcatgagccgcatcgcagccccgatgcttggagggatggtgaccgctccgttgctgtcgctcttcgtgattccggctgcctacatgctgatgcgtaagccgcgctaa

SEQ ID NO: 528287 - DNA, 183 bp, Stenotrophomonas maltophilia
gtgaccgatcccgacttcttcgccgccatggccgtcggcatcccgcccatcaaacccccggtgccaccggccccggtctggatcggcgtcgacctggccgacggtcccgacacgcacatcgaagtcggcaaagccgccgacggcacgttctacgccatcccaaaggagcagagcaatggataa

SEQ ID NO: 528288 - DNA, 297 bp, Stenotrophomonas maltophilia
atgagcgccgccgcaccgagcctccccgtcatcgaagtgcctggctgtggcatgcgcttgcgagtgatgaaggatccggccggctggagcgtgtcgggctggcgccggacgaaaggcgcaacggccatggccgtgtacgtgtccaccgacaccgcgccgactttcatggagaccgccggccagcaccacgtcattgccggtcgcacttacatcgcactgccgcccacgagccagaagaagctacaggcgttcattgcctccactgagggcgcaagcacccaaggccgtgccgcatga

SEQ ID NO: 528289 - DNA, 165 bp, Stenotrophomonas maltophilia
atgcaaatgctgatcgatcaggcgtgcttcgggctaaccggcattgaagaactggaggacaaccagctcattgccctgcaccgcgacatggaacgaggaatggagtgcatacgcgacggcgtttcattcgaggatgcgggcctgctccgccccaggtacgaatag

SEQ ID NO: 528290 - DNA, 498 bp, Stenotrophomonas maltophilia
atggacgccagcaccctcagaaccatcaacatgcgccaacgcgtggccgccgctggcggcccggccgactgggcacgccagttcggcggaactcgctggcagcagccgcaggtcagtcagtggatctcagagacgaatccgaaaggaatcggccatcgcctggcgcgcgatctagaggcagcgatgggcctcccgaccgggactctcgaccgcgcttccggcgaatctcaatctatgggactcgacgttcctactcttcgctccgcaatacggctgctgcagttggtgtcagagatccgcggtggcggccctgtaccgaccatcgacgccaacgccctcgccatcgcttacgagacgattgcggcagaggcgcgaacgctcgatgacaacaacgtgttggatttcatgcgcgcatttgtcgagcggttggagcgaaaggggggtaaggatggcgttacgagaggaccagctgcaggaactggcgcagcggctggctag

SEQ ID NO: 528291 - DNA, 549 bp, Stenotrophomonas maltophilia
atgaccgaaacggtattgcgttcgcataaccgaaacggtaatgtgcggagtatgaaccttaccgactacgccatatcgaaggggggcaccgccaagatcgggtgcccggtgctgggcagcacggcgtctaacgccagatgcagcgccgccactctctacatgatcgccaggggccacaagacggtaagcgccagactggccgttcggatcgcggacgcgaccgacaatgcggttgcggctgctgaccttcgcccggacctgttccgggccgccactccagcggccatgagcggcgagtctgagcccatggtcgatgggaagtggacgaagcgcgcgctgcgcagctatctgcacatggcaaacgacgggcagctggccaaggttttgcagttgcctgccgagcaggtggctggctggcccgaagagggcacgctgccggcgctgccacaggtgatgaagctgctgggacacaccgagcagcgggagccggtcaaaccggcgaacgaagaccccgatgcagagcgtatcgccccaattgaggtggcttga

SEQ ID NO: 528292 - DNA, 894 bp, Stenotrophomonas maltophilia
atgtcgaccatcatcatgtcgcagtgctggccgctgcagggcctgagcgtcacgcagaaagctgtgcttatctcgcttgcggaccaggcaaatgacgagggcgtgtgctggccggccatcgctacgatcggcaagcgctgctgcatgtctgcgcgcgctgtgcgcacggccatggatcacctggaggtggttgggctgctgactcgcgagcgtaggttcaacagcagcaacgtctatgcggtcacaccggacaagttcaacgccgatgccgccgcacctaagggcaagcggaaagcggcgaagggtggggatgcaccgggcgcaggtgatgcgccccgtgcagggggtgcgcccgatgcacccgggggtgcgccccatgcaggagggggtgcaccgggcgcaggtctggaggtgcgccccgtgccgcctaaccgtcatataatcctcaatgaaccgtcaggagaaccgtcatttccggcgggcctgccggccacgccgccgatggtggagtcggaaaccgagttgcaggcagcttgccgtgccacctgggtggcctacgccactgcgtaccgcgaccgtcacggggtggcgccggtccgcaacgcgaaggtcaacgccaacgtgaagcagatcgtgcagcggctgggccgcgaggaggccccggcggtcgccgcgtggttcttgaccgtcaatgagcgctacgtggtgcagggcttgcacgacctcggccagctgctggcgcgctgcgaggcgtaccgcacccagtgggccaccggccgccagatgacccaggccagcgcgcagcagcaggaccagacacagtcgaacgccaatgcggccgacgaggcaaaggatctgctgcggaagatcaagggggccagcaatgctcagtga

SEQ ID NO: 528293 - DNA, 204 bp, Stenotrophomonas maltophilia
atgaagaaaatgaagaacctggcgccgaggctgaaccctcaagccgcgccacgcgagcgccgaatggatcacaacaccgtctcccggcccaagcgcgcgaagcccggaatcaccttctgcggcccggtcgagacggtggacgagttcaaggcacgcggcgggcaggtgcagcgcctgaaggctagctgggagcaagcagcatga

SEQ ID NO: 528294 - DNA, 357 bp, Stenotrophomonas maltophilia
atgagctcgtccaggttgaagccatgcccgttctgcggtggagctgcagaagtgatcggaaacgacgacatgggttggagcgctggctgcgagaacgacgtagatgattgcagcccggggccaatgactttcctcgcgaggtccccttcggcggctgtcgaggagtggaacaggcgagctgcaggaacggtgaactggcgccccattgacgaggcaccgcaggacggcacccggttgatgctgtgggactctgagacacagcggccggtgttcggcagctggcgcatcggcagcgcccagggccacggcccgatcacgcactatgcggccgagccggccggcccggaggtggggtga

SEQ ID NO: 528295 - DNA, 273 bp, Stenotrophomonas maltophilia
atggacgccatggagaaacgggcgctggatctgctggcgtcgcactacctcgcggcggggttcaaggctggcgacccactggcggcaagcgatgcgaattctgtggcgatcaaggccatcgccgcagcccttacgccgccctgtggctacgtgctggtgccggtggagccgactgacgaaatgcttctggctgcacatcgagcggacaccaccagggcgccaatcacgagccgttggagcgccatgctcgccgctcgcccggaggtgccgtga

SEQ ID NO: 528296 - DNA, 447 bp, Stenotrophomonas maltophilia
gtgaacgacaagaccatcgagcaggaaatccaggccaagggcctgaccgcgccgcgcgtgactccggacgctatcgaggcggagatcgacggcgagtactacttcaccgcgcaggacggtgtccagcaggcatttcacaagcaggacgagctgacccgcctgaccggagcgcatgacgcgctggcgctgctgaccttctgcgttctccacctgcgcaacggcttcaccgtcaccggtgaatcggcctgtgtcagcccggagaacttcgccgccgatatcggccgcaagatcgcgcgccagaacgccgtccagaagatctggccgctgctgggcttccggctgcgcgatgatctggcgcgctcggcgctcaccgatgccgattcgcaggctgacctggccggcaccccgcggccggatcatccgagtcgctgtcatgctgatccctga

SEQ ID NO: 528297 - DNA, 435 bp, Stenotrophomonas maltophilia
atgctgatccctgatcccctgcagccttacgcgaagctgatcactgctgccttatgggcggcagtggccgcagccttgatcctgatgggtgcgcgcctcgggtctgattacaggttcaagaaggaccagactttgatcgccgctgccgagcagcagcgcgacaaagcccaggcatccgccgacgagaacctgcgtgctgccaatgcctgcggccagctgctgcaggaggttaaccggcagacccagctggccatcgatgaatccgcgcgccagcagaaggcagcccaggaggccgcccgccaggccgaagcggcagctgcccagagccagcgccgcgccgcccaggccgagcaggccctgcaggcggccaagaaccagccgggatgccggcagcagttggagcagacgctatgcgacgccattccgttgctgtga

SEQ ID NO: 528298 - DNA, 216 bp, Stenotrophomonas maltophilia
atggacacgcgcgagcacattcactaccgggatgatggccgaggccggcgcagggtgctggtagacggccaggttgtggagcaggtgttctacgcggatacccgcaagggtgtggtgcgctactacgtgaagcccctgcgtgtgcacaagcacggcaagcgagccatcagcaggacccttcgcggaaaggtcgaagtggagttccctgatggctag

SEQ ID NO: 528299 - DNA, 336 bp, Stenotrophomonas maltophilia
atggccgacgtgttcacctggtgcgtgcgcaccgaaatcactggaaccggtgacttccaggtcaaggagactcggttcggcgacggctatcgccagacatcggcggacggcctcaacaacgagagccagcagtggccggtttcgatggtagggcgtgaatccaagatcggcccagcgctggcattcctccgggcgagaaaaggcgcggtgtcgttcctgtggacgcctccattgggcttgcagggctactacctctgcaagagctacgccctgaccccacacggcaacgacgtgttcacgctgaccgccactttcgaacaaacgttccagccttaa

SEQ ID NO: 528300 - DNA, 768 bp, Stenotrophomonas maltophilia
atggcacgccagatcattgatacatcgccgccgactggcgatcctgcgccgaccgcgttcaacaagatcaacgcgatgacggccgagctctatggagagtccatccagggcaaccggacgattagcggaactctcactgtagcgggtaacgcgagcatgtcctcaggatcggttcgcacaatgccaggaacagcagccaacgccggctatgttgcttttcaccgcttggacggcataaggcagggttactttggctggaacgcgggcggaaagatccaatactcggttgaaaacggctacacggggcacagcttcgtgggaacggtcgaatcttctggtgcgatgaccgctccagctttcaatccgacctcatccgccgatgtgaaagattacatcgagggatatcgcggcgacgcttgcgaggagctcgaccgcctcgctgtggtgacctatcgctatcggcctgagttttacgatagccagaagacctacgtagggatcattgcagagaacctcgcagacgtgcgtccggacgctgctactgaggaaacccatcttgaggagattcaggttccggtgggcaccgacgaggaaggtaacatcgtgaccgagactagaacccgaacgatccccatggcatacgacatggctcaactgctggcgctcaacaccaggtcacatcagcagaaatcgaggcgaattaaggagcttgagaaagtgctggcaagcgcgttggagcggctctcagtcctggaggccgcgacgtga

SEQ ID NO: 528301 - DNA, 741 bp, Stenotrophomonas maltophilia
atggaacagacgaccctgcaggccatccaggcgcatgccattgccgagtatccgcgcgagtgctgcggcctgatggtggccaccgccgccggcgaggcctacatgcgctgcagcaacaccgccgccaagcccacggatcagttccgcatgccggccgaggactacgccgccgccgaggacctgggcgaggtgctggcggtggtgcacagccacccgaacgcctcggccgccgcctctgacgccgaccgggtcatgtgcgaggccagcggcctgccgtggcacatcgtcagcgtgggccaggcggctggcgaggcgcctacctgccacgacatccagaccatagagccgtgcggctatgtggcgccgctggtgggacggcagttcgcccacggcaccttggactgctacaccctggtgtccgacttttacgcccgcaagctgggcatctatctcagccagtacgaccgcgacgacaactggtgggacaacggccaggacctctacagcctggaccggctgcgcgccgagggcttcgaactgttcgatggagagccgcagcgcggcgacatgatcctgatgcagattcgctcgccagtgccgaaccatgccggcgtctacctgggcgacgggaaaatgctgcaccacctgtacggtcgtctgtccgaaacggtggtgtacggcggcatgtgggccgagcgcacgcggtacatcgtgcggcaccgcgaggcacgccatgactga

SEQ ID NO: 528302 - DNA, 210 bp, Stenotrophomonas maltophilia
atgggcagcgtcgtaacgggcatcgtggatggattcattgatgttccgagcctggctcaggggacgccctggtacagtctcctagctgccgatttcggcaacatcgttccaaacgttgagatcagcgggactaggatcagctggagtttcttcaatgcaggtgggactgcgtatgcccgctctgcgaccattgtctatgggacctactga

SEQ ID NO: 528303 - DNA, 699 bp, Stenotrophomonas maltophilia
atgccagccgggataaccgtatacaacgacgccaacaccgtgcagatcggtgatgactacaacaacctgtgcttcatcagtaaggtgtcaggtcagtccacctccgacttcggatcaactgaatcttggggcacacggccgcacgccgacgtctcgttcactgtgaccggatcgaaccctccgatggttgcggtggacacaagccagatgcactttttgcagctcaggagcgtggttggtaacacttacaactaccgaatctgcttcggcgcaaacgctggtacttacgcatacacctgctacttcttcgacaagccgccgaactcatcaccgtcaacatacgggttgcaggtcttcggtgccgacgggtcacttaggtacgactcgctatttcgatatgcacgggtcgtggatttccttcgggtggcttacaactcaggatcggagctgtcctatcctgttccggcgggaagaacctacctgatggtgcatgcgcagcccggtatggttaccgcgaacgtgcccattccaggtggcccgaactcgtactacaacatcgtccaaatcagaggcagctataggcaagcctctgatctcaagacagccatctataccgtgcagaccggcccctcttcattccttaatcctatcgttaactacgacgccagatttctggtgctcgacgtaacgggattttga

SEQ ID NO: 528304 - DNA, 495 bp, Stenotrophomonas maltophilia
atgcgtgtgcccgtcatcgccgccatcattggccttgctgcatcctcacagggctctgcggccgacgccatcatcggccagccgcgaaccgtcagccttttccaggaaacatccttccagggtgagagcgtggaggcgttcgtgctgcgaattgcctaccggatctcgaaggagactgacaggatcaatgcagaggtctgtgcggtcattgtcaacgagaatggccggcatctggttgacgtgcgaaccagcagaagactgacgagctgcgacgtacccaaaggggattttgttacggtccacagccacccccgccttgccaccccagagttctcgccgagcgactacgaaacacccggctatctggttcatggaaggaacgtgtatttccaagatggaccaggaaccggccgcttcgttggtcgggcttcaaaatcccgttacgtcgagcaccagaaatctggcgtcgtagttaacgataggattaaggaatga

SEQ ID NO: 528305 - DNA, 429 bp, Stenotrophomonas maltophilia
atgcccaacagggctgttgtatttgtcagcgaagcggtgggcgacctgacctcggcccatctgtccaggatcatggcggacgcagagcgcttcaaccgtagggcaggagtgaccggggtgaccttgtttgatggaagccgattcctctcctacatggagggtccccaggacggtctggatgtggccttctctagggctacaggggcaaccagccattcaaacctgatcgagattgcgcgggggcgggtgggacagcgccggcttcccttctggtcgatgcgctgcatcccactggcaccgccagagctggtgcagttggtgcgagcagactggactggcttcctgcagcggggaggcgatcaagttgccccagccaccgcgatggagctgctggtggcactggttgaacccttcgccgaggctgcctga

SEQ ID NO: 528306 - DNA, 507 bp, Stenotrophomonas maltophilia
atgcttccctcgcacggctaccaaggcttccgcgccgcccctgttcccgctggctgggtccagatgggggagagctgggtgctgtggtggaacgggcgccagatcgccaatgtcagcctcagcaaggacggcggtgcgcgcgtccgcctcgacgccaggaagatgtggcaggtcaaggaagcacgggccgccagcatcgcccagggcaagcgctacgccgagcgctggtgcgcggccaggctctacccggagatgcgcctgcgcgcggctgttgcccgcctgctggacaccacgccggccgaaccgctcgaaccgctgcccggcctgccgccgacccgcgagcaacagcaacaggccctgcgcctagccgaggcgacggccaccgctacggcgcgggtcaaggaagcgttggagccgcgcaagccgccggcgacgaaaccccgcccgaaggacgcgcgcaaggcgtgggtgagggtagggctgcagcagctgcagcgcggcgtgtag

SEQ ID NO: 528307 - DNA, 717 bp, Stenotrophomonas maltophilia
atgcgcccgttcgcccttgctgcactgctgaccccgctgtccttcgccgtccacgcactggatcttccgccggtgcagttcccggcgctgccggcgcaggcggccgatgctgccggcttcgtgcccggtggctggatgctggagtcacaagtggaaggcgacctcgaccaggatgggcgcgcggacctggtgctggtgttgcgccagcaggacccgcgcaacgtcatcgagcacgagggattcggtccgtcgccgtatgacagcaacccccgcatcctcgccatcgcctggtcacgcccgtccggctatgtgctggccgcacaggaccatgcgctgatcccgcgcccggagaatccggtactcagcgatccgctcgaggacggcgggatcagcatccagcgtggcaccctgaaggtggcgctgttttcgttcgccagtgcaggcagttggtcaatgggcacgactgcattcactttcctctggcaggacggcgccttcaccctgatcggctacgaccgcgactcggtgatgcgcaattccgggcagaccgaatcattgagcgtcaacttctccacccgcaaggtgaaacaggttgaaggcagcatcgagtccgataccgaccgcgtgcgctggcaaccgttgcgcagcagtcggcgctggacgcttgaaacggttggcgatggctgggcattcgatccgctggccggcaccggttga

SEQ ID NO: 528308 - DNA, 936 bp, Stenotrophomonas maltophilia
atggaggaagacacgttggcatccatcctcacgccccagctggcaccggcattgcttgtgctgctgctggctgcaaccggcagcacccatgcggccggggccggttcgttctacgaggcactgcagcgctatcaggacgacgacgccaaaggctgtgccgatgccctcggcgcgatgtaccacaacggtgagcgcttcccggacggtggcgagctgttgctggtcgaatgcaccgccgccaccggtgaccacgccgcggcgatggcctacgtcatcgcgctgctgggccgggaccgccttcccctcgaggatctgctgcacaaggatcgcccaggcctgaatgccctgcgtgccggaccggagtggccacggatgctggcccgcgcggaagcgatgcagaaacaacgtgcgggactgatggacgaacccttgcgcagggaactgctcgaccgtgaagcccgcgaccaggccgcgcagcatgcagccatcgcggacggcggcggcgaggccttcaagggcgccgcacccgtagccaaggccaatgcggagtggctgaagaccgtgatcgccgagaagggatggccgacccgttcgaaggtcggccgtgatggcgccaaggcggcctggctgctggtgcagcacgccgaccaggaccctgatttccaggcccaggtgctgccgttgatcgaacacgccgcccaggcaggcgaggctgaccgtgccgacgtggccctgctcaccgaccgcgtgctggtggcgcagggcaaaccgcagcgctacggcagccagttcgtgcagggcgacgacggcgcgatgcagttgcgccctaccgaagacatgcccggcctggacgcgcggcgcagcgccatgggcctgccgtcactggccgagtacaaggccatcctcgccgaaagttacggcaagccggtgaactga

SEQ ID NO: 528309 - DNA, 1071 bp, Stenotrophomonas maltophilia
atgaagagactggcgtgcctgcttctgctgcttacgatgttgatgcttgcccagagcgcgaatgcggccccttccaccgtgggggtgaatgccgtcgggctggatgacttctttgatcaggtcgagaaaagcaactcgggcatcggtagcctgtcgatcttcaggaacgggcaggagatctacaacagaagcttcgggcagaagcacctgcgtcccaccgcgcacgacgccgacacccgctaccagatcgcctccgtgaccaagatggtcaccgccatcctggcgttcaagctgattgaagaaggacggttgagcctggacgatcacctgtcggacttcttccccgacatgccggcggcgcagcagatcaccgtcggccatctgctggcgcattccagtggcctgggcaacttcgcgataaaggatggcgcggtctgggtgctggacgaggtgagccaggcgcagattctggaagaaatcagaaggcaaggcgttgcgttcgagccgggcgcgcgcgtggcctattccaactctgcctacctgctgctgcggatgatcctggaacagcgctatggcacggactacccgcacatcgttgaacagcagattgcacaacctctgggcttgcggcactttgctgcagcggcctcgcacaccgccaacgccttcaagtcctacgtatacgcagggcagtggaacgagatcaaggacatcgcatacgccaacgtgatcggtgtgggcgacatcgccagcaccacacgggatctgaatgtgctgatcaacgcgctgttccacaaccagctgctgcgcagggaaaccgtcgagcagatgacgcccgccgccggcgcgggctggggcaaagggctagcagagttcccgtttggagagcggcgtttcctcggccacggtggcgacgcgctgggctctcattcgcgggtcatctacaaccccgctgatggccttgcgatcgcatacgccaccaatggcgaacgcattccgacatctgatttcctgcagaccatcgtcggcattgcctatggtggccgcttcacgctgccggcgatgaagtag

SEQ ID NO: 528310 - DNA, 1722 bp, Stenotrophomonas maltophilia
atggatctggttctggtccaggccttctcacccgcattggttgtgttgctggttctgctgtgtggagggatggcgctggcatcggtcatcacgttcgtacgcgaaaaccgacggctgtcatctttcctgctcccagtgttggcgattgcaacgagtggcacgctgctgtggcagttccttccagtggtgaaggcaggtgcttcagcgcgaagcgagcctgacatcatcatactgggcatagattcacttcgtcctgatttcgttcctgcctacgggcagtttccagctcgattgacgccggccattgatcgcgctctggagcaagcggtgatcctccgggacgtcaagactcctgtggcacgtacattcgtttcatactcgagcattcttaccgggaaaaatcctgtcaatagcggaattcgatttaatctacaccccaggtcggagttcaatcgcggcaatacagttgcttggagcctcaaggagcgcggataccagacgctgttcgcaatggacgagtccaggttcgcaaacttcgacgatagttttgggtttgatgtggtcgttggcccaaccgctggtgcgctggattttgtcgtgggtggcagttttgatttgtttgccaccaacctgattctgtcgattctcccggcaacggatgcgttgagtccggtcaaggggaatcgtgcggcttatcgcaactacaggttgaacgatcatccgcgacgcctgagcagtcagctgcgtgagctttcatccgagaagccattgttcatggtgggtcatttgtgtctgccccattggccctatctgccaagcgacgtgcacggtgatgatttgccaggctggattcagggagtcgaaggctacgcggatgctcccgctcagtatctgcgtgcgctgcagggagttgaccggcaattccagactatctggaatgagcttgaatcgcaggggcgactcgccaacgctgtggtgatcgtgctgtccgaccatggcgaagactttgcaatggaacgggaccggcttgccgcaacggatcccaatcagtcagatttcaaattcttcggtcacgggaattttgccctttccaaggcgcagaatcatgtggtgatggctattcagcgatatcgagatgggcgtccggtctggcgagcgcgcatgatggaaggcgccgcttccactatagatgtcgcaccgacgttgttggatttgttggacgctaaggtcgatcattttgaaggggagtcctggaggcaggctctcgatcaaggggggcatctgcgcagggatcgaattcgattcttcgagaatggaatccggtccgccggcgtggagcaagcgcagattgacgagaaggcggtcgccggcgaaatgtcctatctgtaccgaatcacatcggatatgcgttttgaggttcggcctgaacttcttcccgtcaagttggcggagaagcagcgaggggccacgagagggagtgttggcgtaatgactgatccggtaactggaatcgacgatcaggcgatggagccttgctggcaggtggttgactatgctgccgggacgatgggatgtaccggctacccgtctactgttcccggcatcagtgagctgcaggatgcagtctgtcagcactttcggggcgacatgggattcgaagcggcctggtgccatcgtccaatgacagatgccaagtccgggaggatcgtcagcgaaggatag

SEQ ID NO: 528311 - DNA, 633 bp, Stenotrophomonas maltophilia
atgggtgcctgtgatatgcgtcgactagcgcttttcatggccatgggattgagcagcgtcagcaacgcaaagagccgatccacggacagcaatcctgactttgaaatcactgccagctgcaaggggcagactccctgcatctttgatggcgacagaatcgccttcgatatcagcgtcaggaacgtcaaggacacgcccatcaatctgccattggaattcattcgctacggtggcccttacattgttcttcatgacaaccggacgcagcgccaactgacgcttccctcgcacatgctcgatggcgcccttatgtccgaattggccgcagtagcgccaggccagtcggtgtccgtatccggttccatcgatgcatcctatctggatgcatggggaggtgaggatgcagatgtgactgccatgataaagctcgccgcacctttggacggatccaaagagttccagtcgattggaacaacagcacttcgaatcgtcggaagaaaggcattcacaggcccggccctcaacagggcgcccagcaactacaaccccttggcggcctgggcgacggcgcggaacagcgcgcggcccttgttcatcgtctcgtcccattccttgtccgggtccgagtcgtag

SEQ ID NO: 528312 - DNA, 507 bp, Stenotrophomonas maltophilia
atgcgccatcagttgatcatccatgccgccatcctcttgagcagcagcgcaagcgccgagacccaacccatgagttcgaatcccgacttcgaggtaagtgcggcatgcgccggaagctctcgatgcatctttgagcgtgacgatgttgatttcatcgtcacagtaaagaatgtcagcaacaccacgatcaagttcccactggagttcattcgacgcggcggcccgtacatcacgctgcacgacaacaggcgcaattactcggaatccgtgccgtctggcatgcgggacgagaagctgctgaatgatttcactctgttagaggcaggacagtccgtttctgtgcctggatccatcaatgcctcacggcttgaggaatggggcggctcgtccgcggacgtcacagcgcagataaggatatccgcaccactggacggaaccttcacgttccgcctgattggtgaaacgacgcttcgcatcgttggcaaggatgtaaaagataactcttga

SEQ ID NO: 528313 - DNA, 1122 bp, Stenotrophomonas maltophilia
atggcgcgattgttcatcgtcgtgggcgatagactcagtagtggcggcagcgttctcaccggctcaccgttcaccgatatcgagggacggcccatggcccgagtaggtgaccgcacgatctgtgcggcgcatggccccggcacgatcattaccggcgatgccacgctgatcgtggatgggaacgccgctgcccggcatggcgaccggacaagttgtggatgctggctgattgcggggcggcagaacctggtttttgtggatcagggagaatccccaaccagaacggcgtacacacctccgcacgaaacaccgccccgaccaagcgccgcaaatcaacccgcgctagcgacctccacgacagggtcttcacttggccggcatcgtccggcgcgcgctgcctgctgggcagatgaccacagcatcaggatctccgcgaatgcgcacggccgctactatcaagtctatgggcccggaggcgcggctcgatccttcagctttgagcgtcgattcaggatctacgttccgctacgcagcggcggggatgttgaagtcatcgtaaagctcaagatcgcgccgcagcgcgacagacggccgccgagtgtcacggaagctgatgtcgcagcgttgaagacgcgcatggaagcgggtattgagcaactctggaatgagaagttcaggctggtagtgacagacccatcatgtggcgagagaagcttcccgataaggtacaaggtagcctgggtcacaagcggacacgactatatggtgaatattgctgctacctcagtgcacgagaacgttgcgagcctggaagtgaacgtctggaaagataccaacgcttggacccttgctcacgagtacgctcattgtgtcgggattgctgacgagtacgcctacgcagatgaggaatggacacttcgttactatgcaagcgacggcacgctggatgaagccgtcatccagctccctgcgatcaaaccagaatctgatccaacggccaccatcatgtcgacttcaggttccaccaccacagaatcaaggcacgcctggccgatcgctctggaagcacagacttcgctgagcctcgcgatagggagggcagtaacatgcgccatcagttga

SEQ ID NO: 528314 - DNA, 846 bp, Stenotrophomonas maltophilia
atggccgccacacagaagccgggacgcgatggcgtcaagtattggcgagccgtcgacgccattgaggcgttgggtagcgcgtcgctggccgaggtcgaggagtgggacttgtcgcaccaccctaacgacccgctgggcaacgcccgctccgacctggagctgttcactgtcaactcccccagtcgaatccactacaactactcccgcacgaactggcgaagtaatcaggatcacccgcacgaccgtttgttcaagctggtcgatccgggcccgccgcggcgcacccgctacgtgttgttcaacccagcggaccacggacacgtggacctgctaaagggcggcgacggaaagtggaaggtcatgcctctggtcatggacgaccaagcgcgggtggaggccgaagcgcaggcaggggcgttcgccgctcaagtggatagcgaccacgacgcccgcgtctgggcgatgcgcgctgtggcccagcgccgcggccagcctttgttccgcgccaagctgctggacgcctacggcggccgctgcgctgtcaccgggtgctccgcgctggaggtgctggaagccgcgcacgtgctgccttacaagggcgcgcatacgaaccgggtggacaacggcctgttgctgcgcgccgacctccacacgctcttcgattgccacctgctctggatcactcccgagcatacggtggctttggcaccatcgctgctcatcaccgactacgctgtcctgcagaacaaggcactggtcctgcctgcagcatcggttcaccaccccaacccggctcacctcgcccatcacgcggcgcggtgccaagctggccatccgagagcatga

SEQ ID NO: 528315 - DNA, 486 bp, Stenotrophomonas maltophilia
atgttcgacagtacacccgaaaagtccagccgcagcgacgtcatctttttcaacgggctgaagcgcgaatcggtagtcgatctgctgaaggcagccgccggcgccatccaagagaaccaagaacctgctgcctggtcctatctcgtccaagcatcggaacacttggggtacctcattggcatcaatgaagccgagtccctgactacgccagaacaggccatcaatgcgaagctagagcaatatggccgcaaaggcggattgaagaagggcgagaacgccaagcagcttcaagacgctgtcgcccgcaaactcattgccgcgacacccaagaacggatggaagagccgcccagaggtccatcggcagtttttcgaactggccgacgaggtctccggattcaatgcaactgactatcagtggcgcgcgttgctcaagcgccaggacatcaaaagaatcttgcctccgacgagcaggcgaacccgctga

SEQ ID NO: 528316 - DNA, 219 bp, Stenotrophomonas maltophilia
atgaattcgcagccactccaaatcatttccctgctcgagactacgaagcgcctgaaccttgcgcgctccacgctctacacgcgtctcgatcggaaatcaccctacttcgaccctgacctgccgaagcccgtgcgctacggctcaagcgtcggcttcatcgagcacgaaattgacgactacatccttggcctgatgcaggccagagggggtgtggactga

SEQ ID NO: 528317 - DNA, 399 bp, Stenotrophomonas maltophilia
atgcgcgactggttcgcgactgtcctgcggggcgttgttttaaacgctacctgccacaccccgccacacaacgtggcggaccacctcacaagactctgggtaaacaaaatgcagcacaacatcaacgatgaccttcagttcgaagccgacgacatcatgggagcgcttcgggaattgcaatccaaccctcagcaccggaagggccagctcttctcgctgctctatccggcgatcgtcgagatgctggaaaagaacgtcacacaaaaagcgatcctggccaccctcgcggaaaaggggctgaagctccatcctgcccgcttcaaggagatgatggcgatggaggcccagaagacccccagcatttcgggctcctgcgttgaagaggagggtaaggaatga

SEQ ID NO: 528318 - DNA, 1461 bp, Stenotrophomonas maltophilia
atgaacactccctatctgcctcgcgcctaccccatccacgctatgtacagcgccatccgggacgcgatcctggaagtccagcacaacctgaaagcgcctgacgcgctgatcgccggttcgttcctcacggcgatgtccatcgcgtcgcagggagatgtggatgtcgaactccccactggccagctccgcccggtttcgttggatgtcttggtcattgccgattccggcgaacgcaagtcggccaccgacagtattgttggcgcgcccatctacgagcacgacgagaaggtggcaagagatcacgccctggccctgctcgcctacaaggcagaccggcgcctttgggatgccaaggaggcgtccctgcaacgcagggtagccaaggcactggacagcggcacagacgacgacatcgaacaactgcgcgaagaactcatcagccatggcgcgtgcgagcccgccaagcctgtcctcagtcgcatcgtgcaccagaacatcaccgaacgccccctgatggaaagcatgcagggcgatggcaagtcgatcgcaatcctgagtgatgaaggcgaaatcgtgctcaagggaggtgccatgaacaagtttggcacgctcaacaaggcttgggacggcgccaaaacactgacgctggatcgcgcagacgacagcatcgtggtcaacaatcctcgcctgaccatcagcatgatggtgcaggaaagggtgttcagggagttcatgaacaagcggggtgaggtggctcgcgggtccggtcacctcgcgcgatacctcgtcgcgtggcccgcgtccacgcagggcttccgcttcatgtcccttgaggaacctgtctgggagcagctgccccgattccatcagcgtgtgagcgaacttctcacggccgcacaggcacgtcgtatcgccggtgataacacccgtaagacgctcacgttcacgcaagaggcgaaagagctttgggtgaacactcagaacgcgatcgaaccgcgcctgcgccaggatggcgatctgtccagtgttcgggacttcgcatcaaaatcgatggagatcacgggacgggttgccgcaatcctgcaccatttcagcgcacaggagggcaacctgatcactaaggaaactctgggccgagcgctggaagtcgtgggctggcacttccaagagttcctcgatgtatttggagacaggaatcacgagcctgagcaggccaaggatgtccgcactctggccatgtacctgtggaggcgctactggtgtgctggatatggggcggctgtgcgcaacgaagtacgaaagagcggcccgatccggaaccagggacgcttcgaagcggcactctatcaactgcagatggaggactctgtccgcgtgatgcatcaggacgccgcccgagggaaaggcaggctctggatccacttgaacggggcagtcttcagccagatcacgacccagtag

SEQ ID NO: 528319 - DNA, 3330 bp, Stenotrophomonas maltophilia
atgaacgcacggggggattacagcgaagaccggatgatccagaaggatgccgccgcaatcctcggtgagcttggttggtcgtcgatccatgcccaggccgagaccgaggacaggccgcatctcaccggacggaacaacttcaccgagacggtgctcaagcccgacctgcgcgccgcgctggagcgcctcaatcccggtctgcccgaagaggcctaccagcaggccatcgaccaggcgaccgcccacgatcacgccaagaccctggtcgccatcaaccaggacaagtacgagctgttgcgcaacggtgcgctggttcggttcaaggacggcgccgggcgagccgtggaacggcgcctgcggctggtcgattttgtcgatccggacaacaatagcttcaaggccgtgcgcgagctgtgggtgcgcgggaggaactacctgcgtcgcgccgacctggtgggcttcgtcaacggcctgccgctgttgttcgtcgagcttaagcgcttcgacgtcgactaccacgacgcctacaagaagaactaccgcgactatcgcggcaccgacgaatccggcaagcaggccgccatcgagggcagcgtcgagcagttgttccattggaaccagttcgtggtgttctccaatggccacatcgccaagtacgccagcatcacggccacgcccgagcatcactaccagtggaagcggctggacgaggacgatccggagccgggcaagagcacgatgcagcttccgctgctgctgcgcgggatgatggacagggcgcgactgctggacatcgtcgagaactttatcctgttcgacaccagcgaaggcggcgctgccaagatcgtggcccgcaatcaccagtatctgggcgtgaatcgcgtcattgcgcgcctgcagtcggacgatgacaaggtgaaagcagagctggcgaagggccagctcggcgtgttctggcatacccaagggtcgggcaagtcgtactccatcgtgttcctgagcgagaagatccggcgcagggtgtcggcgggctacacctttgtcgtcgtcaccgatcgcagtgagttggatgaccagatcgccggcacctacacccattgcgggcgcgcaaatgccaaggatgaccaagcccagagcggcgccagcctgcgggccatgctccgcgacagcaaccgcggccatgtgttcaccctgatccagaagtaccgcgagcgcgtgaccgagccctactcggagcgcgacgacatcatcgtcatcagcgacgaggcgcatcgcagccagtacggacgcctggccctgaacatgcgcaagggattgccgaatgccaagttcatcggcttcaccggcacgccgctgatcgaagcggcggagaagcagctgacccgcgaagtgtttggcgactacgtctctgtctacgacttccagcgtgcggtcgctgatggcgcgaccctgccgctgaagtatgagaaccacggtgagaagctgaagatcgttgatgaggatctgaacgagaagatcacccgctacatcgaggaagccaggctcgactccacggcggaagacccgtggacggacgagaaggaagacaagctctaccggaagctggccagggaatacaccatcttcacctcgcccacgcgcctggacgcggtggcggaggattttgtcaagcactactcgcagcgccgcaatgccgtttttggtggcaacagcaaggcgctgatggtctgcatcgacaagatcacctgcgtgaagatgtacgacctgatcgccgacaagtggaaggcgctgggcgacacgctggaagcggagctgcttgccgatgagtctgccttcggcgccaagtatccggagcgccccttgcccaggatcatgcagcaaaagcgcgaacgcctggagtggatgcgcgaaacagaattctgcgtggtggtgtccagcgagcagggcgaggtggaggagttcaggaagtggaccaaccaccgaggtgagccgctcgacatcgcgccacatcgggcgaaaatgacgtcgcgcaatctggaacaggagttcaagaaggccgagaacccgttgcgggtcgccatcgtctgcgcgatgtggctgaccggcttcgacgtgaagtcactggccaccctttacctggacaagccaatgcggggtcacaccctgatgcaggccattgcccgggtgaaccgcgttgggggaggtaaggccaacggcctgatcattgactacaacggcatgatcaagagcctgcgcaaggcgttggcgacgttcgcccagggcgaccgcgacggcaaggtggaagttggcgaaggcgaggaccccggctatctggaagacgacgccgaagggattgccgagtacgccgagagcatcgagcatgcggccgagttcctggcggacatgggcttcgagctgcagggcgtgattgacgcccagggcatggacaaaggcgagaagatcctggaggcctgcgatctgctggcggccagcaatgagcggcgcaagacctttatggtgatcgtggaggacgttgcggccaagtatcgcggcctgttcccgaatcccggtctgtttgcctatgacgagcaggagagcgccctcaacgccatctacaacaagctgcaggctgcgcgcacgtcgccggatatcaccaggctgctgcagggcttctatgacgtggtggaccttggcattggcctggagcagggggccagcaaggcgcctgcgcagttcgacctgagcaccatcgacttcgaccggttgcgggcggagttccagaacatcaagcagaagaatctggtcgcgctgaacctcatggagaagatcgaggaagggctgaaggctatggtgctggagaacccgacgcggatcgacctgtacgagaagttccagcgcatcgttgccgagtacaacaccgacaaggacgaggctgagatccagaaagtgatgggagagctgttcgctacccatgacgagatggacgaggaagccaggcgcttccagcgggaaggcctggagaccgagcagcagctcgccgtgttcgacctgttgcggaagaagtcacttagccggaaggaccgggaggcggtcaagaaggcggccgtcgagctgctggcgaggctggaggagcgcaatctgctgatgggccacctgcgcgacatggcagcgaagcaggcgcagttgcgtcacgagatcgagaaccatctgtgggacagcggaatggccgacatgggctattccgaagacgaggtggtgagcaagggcgatgccgtgttcgcctatctgtttgccggtgctgccggcggcagtgcgcggatgcttcattga

SEQ ID NO: 528320 - DNA, 357 bp, Stenotrophomonas maltophilia
atgcaggtcgtcctgggtgcggcctacgagcgcagactggacgaggccgtggcgcacctgatcggcgttggcgcggatgccgcggcgcaggagctgctggacgacgcctatgacgccttgcccaagcgtttggctcaggcgccgcgcatcgggcgcgaattcatcgcccacaatcctgaagcgcccgaagtgctcgctgcctggacagccgtgcgcgacctgctgggcgatgacatcgaactgcgcgagtacattctggaagaatacctggcgctgtatgccatccatcaggactgcatccatctgctgacgctgcgccatcgccgccagtgcggcttcgacttcagcgaggcgtaa

SEQ ID NO: 528321 - DNA, 336 bp, Stenotrophomonas maltophilia
atgcccatcacctcacaggacatcgtgcccttcaacaaggctcgcgccgacctgacccggctggccgatgaagtccgcgccggccacgaaaagatcatcacccgcaacggcgagagctatgtggcgctggtggatgcccgcaagctggactactaccatcgtctggagcgtgaaacgttggcacgagccaacttccagcttggcctgctgaacgacgtgaccgccggtttgcaggacattcgcgcgggcaagccgggcatcccggtggaggaggccagggcgcggtcgcagagccggctggacgcggccagggccgcacgcaagacggacgcctga

SEQ ID NO: 528322 - DNA, 978 bp, Stenotrophomonas maltophilia
gtgacgccgcaggcgaatgacatcgttttcacctatgaagcaactttgaataggtacgccatcatccccgacggcatgagtttcacgttgggtcgtagaacagcattgatacgcccggatccagaaaagatcgactatcgctatctgttctactacttcttcgcgccgagatggcgggcgcagattgaagcaaaaacgatgacgggcgcgacggttgatcggattccgttgacgaattttccaggcttcgagatttttgttccttcgttgggagagcagcgaagaatatctgcagtactgttcgcttacgacgatctcatcgccactaatcagcgccgcatcgcccttctggaagacgccgcccgtcgcctatatcgagaatggttcgtgcatctacgctttcccggccatgagaccgtcacggtggtggatggcgtgccggagggttgggcacgcaagaccttgggtcaaatcgcgacgctcaagtacggcaaggcgcttaaagctacggaacgcaaggatggacaggtgcctgtatatggctcaagtggggttgtcggtaaccatgatcgtgcgctcgtggatgggggcgccatcgtagtcgggcgcaaaggcaatgtgggcagcctgtacttttcgcccgagccctgctttccgatcgatacggtgttcttcattgatcccgaagcgtcgacgttctatttattgcaagccctgagcaacctgaacttcatcagcagcgatgccgctgtgcctggtttaaatcgaaactacgcacattcgctgtcattgcttgtgccagccggtgaagttgctgcttccttcgaaacattagtcgcaccgctgtattcgcaagcattccaattggaaaggcaaaaaaagaaactcgccagagcccgcgacgccctgctgcccaagctgatgagcggacaactggacgtctccggcatcccgctaccgcagccggaagcggcgtag

SEQ ID NO: 528323 - DNA, 2181 bp, Stenotrophomonas maltophilia
atgaacatcctgcaactcgaaagcgacttgtggcaatccgcagacgacctgcgcgccaactccaagctcaccgcaagcgagtactcgatgccggtcctggggctgatcttcctgcgccacgccagcaaccgcttcaacgcctacctgcccgagatcaccgccggaatcggcccgaaggttccggcgtcacggcgcgaggccctcatcaagctgggcttccagggcaaggccgcgatctacctgccagaagctgcgcgcttcgagcacatcgctgccctgccggccggtcccggggtgggagaagccatcgatgcggccatggacagcatcgaagccgagcatgaagtcctgcgaggcgcgctgccgcgtggcttccccgcgttcgaaccggacctgctggcgcggctcatcaaggtcttcgacggggaggcgatccgcaacgcgaccggcgacgtgttcgggcgcatctacgagtacttcctcaacaagttcgccatgactggcgcccaggagggcggtgagttcttcaccccgccatcgcttgtgcggatgatcgtcaacgtcatcgaacccgaccacggcctcgtgctggatccggcctgtgggtcggcgggcatgttcgtgcagtccggccatttcatcgagagccgcgggcaggatccgctggactccggcgtggtgttccacgggcaggaaaagagcgacaccaacaccaagctggcgcgcatgaacctggcggtgcatggcctggatgccagcaacatccgccagggcaataccttctacgaccagattgaaccgctgattggtgagtgcgacttcgtcatggccaatccaccgttcaacgtggatggcgtggagaccaagaaggtcgaaggccaggtcgcgcccgatggtcgcttgccgttcggtctgcccggcctgaacgccaagaccggggcgatttccaatgccaacagcctgtggatccagtacttccactcctatctgaacccgaccggccgcgccgggttcgtgatggcgtccagcgcatcggacgccggcaacaaggacaaggagatccgcgagaagctggtcaggaccggcgatgtggacgtgatggtcgccatcggcaacaagttcttctacacccgcagcctgccgtgcacgctgtggttcttcgacaagggcaagccggagtcgcgcagggacacggtgctgatgctggatgcacgcaacgtctatacggtcgtctccgcgcgttcgcatgtcttcaccgaggagcagctcgccaacctcaacgcggtggtgtggctgtatcggggggagggcgacaggtttgcggcgctggtggccagccatcagcagcaagcggatggctggttggcgcagctgccgcagcggctggccgacgacacggcggcaatcgaggtgctggctcggcatctgaccgtgttcgcaaagggcgcgacgcaggccgagctcaatgacggcgtggacgacgaggcccggctcgatgaagcgacgctagcggccttcaaagcagagcttgacgcggctcgggaggacggcaaggacaccgggcaagccgtcgcagaccttgaggcggcgatgacgcttgcacggaaggtcgttgcgaaggcccggccggacaagcttgacagcgtgaaggtcgcgcaggccgcgctggaagaccttgcgccgcaactgaaggccacggcccggcagcttgaggcccggcacaagcaatggctgaagttgctggacaaggccgagaaagagctgcgtgggcgcaagagcgacgccttcgatgccaaggccatccgagaggccagacgcgccttgttggccgcagaccggaatcggaatgaagaggccacgattcgcgacctggcgctggaggcgctgaagcaatccggctacttcatcgcccaggggcactggttgctatcgcggtttcccgacggcgtgttcctggatgtgccgggtctgtgcgctgccgtcccccttgagcgcatcgggcagaacgactggtcgctcacgccggggcgctatgtcggcgtagcggtggtcactgaagatgacgaagaagggtttgccgagcggatgcgggccatccatgacgagctggcagagttggatgagaaggcatccgagcttgcggcgaccatcagcgagaacttcgaggagttgttcgcgtga

SEQ ID NO: 528324 - DNA, 1884 bp, Stenotrophomonas maltophilia
atgtccaaggacaatgccggacaggtcctgttccaggtggcggagcactttcgcagcacctctctcagcgtcgacgaatccaagttgctggcgttccagttgctcacgtgggcgcatctgtcggcgaagggcaggcttgaggccagtgtcacgcttgataccgccctggctcagggaggcgtcgagggactgttgagcgttctgaagaaactgttctggcaacccggcgcgctcggaatggcgtttttcaacgccactcgatacgtcgagcaggcaaatgatgcggtcttcgctgcgctgagaacggtgaagtatctggtcgacggcggtgtattcgagaggttctcgccagtcgatgtcgccggtgatctggtcggtggcactttcgagggtttcgatgtgcccgtcgagctggcacgtctgatgaaagacatagcggtcggtgagactgcgcggggggcctacttgccttgggagaccagcggtcagcttgtcggagtgctgatggatcagcctgacctgcgcgtccacgctgaagcacatctgggatcgcaagttgccgcattgctggccctgtttcgtgaagcatctacagacgttgcgccaaacgatccgctgcgtgcccctgcagcagttcatggcggacacctggaaagatttgacgcaactctttcgattccaccgatgggcatggccggcggcgtcgatgacgtggtgatgcaggacatctacagccgctttcctgtggtcaaggccagcgtgataggtctgatggtgcagcacattgcagcgcagacgcgtggcattgccgccatcgttgtacctaatggctttctctttagctcaggcaaggaccgggacgttcgcgagtacctgttgaagcaaggctgggtcgaggcggtcattgcgctgcccaatggcatcttccaatccagcgggctgggaacatccatgctggtgttgaatatgcaggcacgccaccgtcgcgttggattcgtcgatgcatcgttgccgcacttccgtgtgtcgatgggcaaggggcgggttgcgctgcagaacaccggcctcgttgtggacttctgcaggcagttacgcgtcgaatctgacatccaggcggcggctggacgtcaagaagaggactcgtatacgcaagtcgtcagtctggacgccattttcgacaacgatgccacgctgaatgtcggtcgctacgtcattccagaccagcagcgtgaagcgcaagcgcggttggaaaccctgccaaccgaaacactggaagatgtggtccgcatcctcattccaatacccaacagggaccgcggagtggatgtgtcagcaggagtcgatgttctcgaggtcggggctgtcgatcttcccagcgcaggctacatccggacccccgagaagagtgtcagagtgcaacttgccgccaagcgttccggcgatgtaatggatatcttcctgcggccgcatgatctgctgttggtcgtgaaaggcaccgttggaaagattggaatcgtgcccgacaacgtgccgccacccggggatggtggctggattgccggacagtcgttcgtggtcctgcggggggcaaagcccggcgtggacctccgtggtctgggtttgtggttgcggtcgaagatgggccagcaggtgctggacggcatcaagaccggcgcgaccattcccatgatgtccatcagtacgctgcgcaagctcaaggtctttgcgctgaacgcggcattgactgaggccgcagtcgaaatcctcgaacaagaaaaagagctgcaatggcagatcgagagcttgcaggatgagcaagccgggattgcagaggacttctggaaagaactttttgccgaagcgcaatcggcggacaaggaatga

SEQ ID NO: 528325 - DNA, 246 bp, Stenotrophomonas maltophilia
atgcacaagacgaagcactttcagcagcggatgggccagcggggcatcagccaggcgatgatcgatctggttttggggtacggcgacaacgagggcagcaaggtggtcctgagccgcaagaagtcggagcagcttcgcgaagcgcttcgcaccctgatgaagatcgtggacaagggcggcttggtggtcgttgccgagggcgatgcccagatcaccacgtacaactatgcgggtaggagccagtga

SEQ ID NO: 528326 - DNA, 363 bp, Stenotrophomonas maltophilia
gtggcacagcgggctcccggtgatcgcttcaaccagaaggatgttgccgcctgggtgcgcaggagcttccatccggagcgggcgctgtacagactcttcgtcacccagtacgccaaccgagccgaggcacaacgcgcgggatttcccaagaggcagctggcctactgggtgtttaccgacgaggaaaatgatcggattccgaacttctactccgccgtcaacgacttcattgaccggctggagagcgcccgggtcatccggaaactgcccgccccgattggggaatgcgaggtcctgccgctgccgccgtcgggcttcacgcctgcggcggcagtagcaatcgggccgcttccgcgcgcttag

SEQ ID NO: 528327 - DNA, 1029 bp, Stenotrophomonas maltophilia
atggacaccatcccagagcggttcacgcttcgcaatccatcaggcaatccacgggctctgcgcggcgggtttcgcgtcccatttggtctgaaagagggccgagtctgggcaccgaacgaggtgcccaagggcaaggcctgcggctgcatctgcccggggtgccatgcccccttgtccgccaaggcccaggagagccggcgcaagcgtccgcacttcgcccacctgacagacactggctgccacaccggtcgcgagaccggcatccacgagcgggccaagcagctgatcgccgaccatcagcggctgacgatcccgccctggctcggtgacctgatcgacatgcctaacccgccgcatgcgcgtgacgacgatgggcggctccactggggacgccacgtcgaccacccggcccacagcacgcagctgcgcgatgtcgagatcgagcgatcgtttggaagctacaagcccgacgtcgttgcccgggatgagcttggcgagctcctgattgaaatccgtgtgacccatgccgttggcgacgtcaaggcggcgcgggtccaggcgcacggtcggaggatgatcgagatagacctttcccagctgcaccgggacattccccacgacctgacggccttcgaggatgccgtgctggatgacgccgccaatcgcagctggatctcctgccccgaggcggttgcggagtggcaggcctccaagcaggagctggacgagcaggttgcggcgaggaaccgtgagatcgcccaactacggaacgacatgatcaacgctgcccaggcacgccaggagcgcgaggctcaagagataaaggataaggcgggccggaaggcctatgtgcgccggctgaagcgtgcaaagcacgccgaagatctggagcatctcctcgagctaacctcgcccgagcgaatcgaccggatcctgcgcgagtatcagatcagcgcggaagggcgggtcagcgaactcttggaatccgtgccggcggcggtccgctccgccgcctgcgcgcccatgtag

SEQ ID NO: 528328 - DNA, 1041 bp, Stenotrophomonas maltophilia
atggacgcaaacagatccaaacccgcccaaacgggtaatccacaggttgaatccctccaattggcgcttgagtggctggatcgggaggggggccaacagcgcaacgcccgggtcctccgggaggtcatggacacgaccctgaccgccatctcgcgtggtgaatcgccccctgagacagacaccacgacgcttcgagcgctctttcagcgactcgaaggggcgggagatggcgctgccaaggtgattcgtgcaaccgagctggggaactggtgggactcgcggcaggagcagctccgacagcggtgcgcccgggctggctgcgccctgactccctacctcgtggtcaagaagggcggcggccgtggcctaccctcccggctgtccttcgagtttcgcccgacgtttgaggctgagccggaggaggacatcgcgacgccgcagctcgatccgaccttggtccgttaccagatggatccagtcaggcctgcgttgtggctcaggctggtagtgggcagccggccgtttccggttcagtcctggcgcggctacctgctcatcggcagcgccgccatgaacatggtgctgattggactcgcctggttctggctattttcctcatggagccgcggcgcccccgtaaccaccgcaaccctggctcagctcggtttggcgatgctggtgacggccggactctggtggctgtcgcggccggtgttccatctgcccacacagcgggtcaccatggcagggccgtcattcctcgctctgagcgagctctacggccagcttcgcaccatgccggcaccaggccgaaagctgaaatcccgagagttcgccgtcgtgcgccactggggcacctgcacgatctgctcagccgaggtggatctcgaccatgggcgagccgcctttccagaccgtctggttggtcgctgccatgatgcgccgctggaacatgtgttctcgttcgacccggtgcgcctggtagggaagtcgctagtcgcaacaacgcacgacgaggctggcacaccttcacacggttaa

SEQ ID NO: 528329 - DNA, 894 bp, Stenotrophomonas maltophilia
atgctgaaaggcttggcgatcaccccgcccgtgatcgggcggatctcaatcggccgcgtggtcgagcgcaacggcaagcgcctgccggagaaggacgatcaattcacacttaccagtcaggttcagaaccgggaaggctgggtcctgcacccgctggatgaggacttgcgcaaggagtcaggaggcaagctccgctcaatcccggtgcggctgctgttcaacgaccctggacttaacctccgggccgactactcgctgttcgaccgctccactggcaggcctgtttgtgtgggcaacggtgaaacgagtcggcgtgtcggcaaggacggtgtgacccaggagtcctgcccggggccggatggctgtgccttcgccatgggcgaatgcaaggcgtatgcccggctgaacgtacgggtgggaaatgacgacgagctgggcagcttcgtgttgaggacaacgtcctacaacaccatccggaccctcgcggcccggctggcgtacttcgacgctgtctctggtggccgactgtcctgcatgccgttggagctcaagctccgtggcaagtcgacaacaatgagcttcaggtcggccatctactacgtcgacctggtggtgcgggctggcttgacgcttgagcaggtaatcggcgaggcgagaagcctcgaccaggcacgcaaggacgcgggcttcgaccaggcggccttggacgaggcagcgaggcaggggttcgccaatgggtctttcgaggatctcgccgaggacgtgccggcggtggttgaagagttctatccgggcgacgcgtcacgagaggacagctccgtcgcgaacgggcgtgcaggagccaacttgcacacccgcttggagagcaaggtcgccagcttgggcgccagctaa

SEQ ID NO: 528330 - DNA, 969 bp, Stenotrophomonas maltophilia
atgagcagatcagcggcgattcgcctggtcgacacgcgctctctggagcgtgagcagtggttggaagttcgcaagcagggcatcggcagctcggacgctgcggcagcggtgggcttgtgcccgtacaagagccagctggagctttggatggagaagaccggcagggccatccggggcgaggagcccggtcaggacagccccatgtactggggcaccctgttggagccgcttgtcgccgcggcctacaccgagcggaccgagcggaaggtgcgccgggtcaatgcggtgcttcagcatccgacctacagcttcatgctggccaacatcgatcgggaagtggtcggtgtggcggatgtccagatcctggagtgcaagacggccggggagttcggctcacggctctggcgggacggcgtgccggagtacgtccagctccaggtccagcaccagctggccgtcactggcaaggcggcggcagacgtggctgtcctcctgtgcggccagaagcttgaggtgcaccggatcgagcgcgacgaggatgtgatctcgcgcctgatcgtgctggaggccaggttctgggagcacgtaacccaggacaccccgcccccggcggatggaagcgagtcggccgctcgggcgctgcgcagcctgtacaccggcaacgacaccagcatcgacttcagcgatgacgccgagctgtcggccaccttcgatggattggtgctgctgcgcgacgagatcgcccagatggacaagcgggcagagcaggtgcgccagcagctggagcagtccatgggggatgcctccagggcgctcttcccgacgggtgagatcacctaccggcgctccaaagacgccaccagcgtcgatctcaaaaagctggccgaggcccatccggacctcgtggcccagttcaccgtcgagcgtcccggatcccggcggttccggatcgttcccaatcccgactaa

SEQ ID NO: 528331 - DNA, 1371 bp, Stenotrophomonas maltophilia
atgcatccgatgagccgcgcacgcttcgaggccctggctgcctactgccgcgtcgggccggcgatgaacctggtcgacgagcacgcctggtacgaatcggacgatggtcggctgctcggcgtcgtgctgcgtgagctcgtcgacggcgagtaccaagccatctttctcgcacgcgatctggtcgagcgctttcgctggatttacggcacgaagttcttcgacaacccggaggccgctgcagccgcgatgaccgagaaggcgcctgggctgctggctgggctggacgaggcgcgggggcagggcgacgagccgcgccacgcggtggacttcttcgccccgcgcgtgcccgaggcgcgcaccgatccgagcttcgtgaatttgcgcgacctcgaaggctacagcccggcacgcgagctcatcagcgcgatgatgcgctggcacgaggacatcgacggcaactacgttgagcagtttcagtccgctgccttcgatgcccggctaatggaactgtacgtgttcgcgctattggtcgagaacggcttcgtcgttcgccacgagggtgccgcgccggattaccttgccgacgatggcaacggcgaacttgcaatcgaggtgaccacagtcaaccccacactggatgcgcagggccaacgcgtgccacctccgccggtcgacaccgaggaggagatcgcggcgtctctgaagcagtggatgccgatcaagttcggcggtccgctaacggcgaaactgagtaagcgttattggaccttgccgcacgtcgcgggtaagcccctagttttcgcgatccaggacttccacgcgccacagtcgatgatccgggcccgcgcgggcttgggcatctacctctatggctacgaacacgcctggcagtacgacgccgaaggtcgcctgattattgagccgcaacgcgtcaccgaccatcggtggggagagaaggtcattccgaccggcctcttcgaccagcccgaggccgagaatgttagcgccgtgctgttcaacaacagcgcgaccttgtccaagttcaaccgcatgggttacgtcgctggcttcggatcgcggcacgtgcaaatgatccgaaacggcttcgccttgaacccggaccccaatgctgccgcgccaacgcctttcgtgcataacgttgacgaggagtattgggaaacgtggtcggagggtttggatatcttccacaacccgcgcgcactgcatccgctcgatccccgccacttcccctcggcggtacaccacactctgcaggccgacgggcaggtcagcacgctgcggctgaccgacgagttccacccgctagcatcgatcacccacattctggtccccgaccacgcggcgcactga

SEQ ID NO: 528332 - DNA, 801 bp, Stenotrophomonas maltophilia
atgtcaaaaagtgaatttgaagcaccatccgagcggcgcatagttctctttctagattttttagggttcaaggaaataacgcgcgccactgaaagtgatccgcagatgctttctcgcgtcatcgaagcaatcgaaacattgcgctcgattggccggcagcaggagttcttcaagacccagcaggtcacacagttttctgattgcgtggtggtttcctaccggtgcgatgagcgatctgcggtgttcgacctcatcagcgaactcggatttgcactcaccagactggtagaactcggattcctcgttcgaggcgcggtcaccgtcgggaacttgatccataccgatcggtatctccttggggcggcgatggtcgaagcctatgagctagaaagcaagtgcgccatctacccgcgcgtgctcgtcagcaacagcgtgctcgatgttgcacacgctgctccagccgagcatcacgatggcgaggacgagtgcgcgtatgtcgagggctacctgtcaacagatactgacggctgccgctatctcgagtacgtctcttggaaagccgtaatcgaagtgattggcggcgataacgacatgtatggcagctacctcggctccgttgcgaaaatcctgaagaagggcatcgcggctaaagcgccagatgtccggctcaagtacgaatggctgcggcagaagtacgtgcgtgcgattgatgcgatcgccgcacttccgccagatcatgcttgggtacgcgccaattctgagatgcacgaggctattatcgacttgcctcgacggttctag

SEQ ID NO: 528333 - DNA, 420 bp, Stenotrophomonas maltophilia
atgcggggcaagctcgcgacctgggcgaaggcccacctcaagcgcgcagataatctggcgggcttgtgccactttttggcgtcgcccttcggtgccccgctccgatctgacggcctgctgtggatcaaagccgcacttgaagcaccaaatgccgccattggatttcatcgcaacggcagcggcgacgcgctcgtcgacctgatactcacgatcttgcagaacgatgtggctgccatgcgaaaacgcgtggacgcacgcaccgcgctgctcgacattgctgcggccttggcgtccgcgggccgcccggacgcgctcaccatccaagaccggttgcgcgcagcactgatgagtcagcaaggcgtttggtccttaacgaccgccgctgtgcgcagcggccatagatcgtgccgcccagaatga

SEQ ID NO: 528334 - DNA, 372 bp, Stenotrophomonas maltophilia
atgatgacgatcccgtggggggcaatcccggccttttcggcggcgggcggcgaatggttgcgggcggtggccaggcatctggacgccgacgtcgccgtggcccccacgaccggctacttgttcgcgctggacattccctggcggcggtgttcgggcaacatccagcggttgatcgcgcagcacgcgctcaccaccagcctcatttctgcgcgcttggaccgcacccgctatcgcatggcctcgggcctcgactgcgtggacatctgctccgatgtcccggcctccgctattgcggccttcgccgaaaccgacgggctggcaggccgcccgatccggcccgacgaactacgttggacaccctggcgaccctag

SEQ ID NO: 528335 - DNA, 840 bp, Stenotrophomonas maltophilia
atgggggcgttggaccgcaaagacttcgaactcgaattgccggaatcgtggccggaagacgtgcgtcgtgtggtcgaggatgggcgcgacgctgcggtggcctaccaccacgaacgtcagcgcatcgatcgtctcggcagcaccgatgtccgagtgcgcatcggcccgcccgctaacgcgtaccgaccggcatacgacgccctggtcgagcgcatcgagacgctgctgcgtggccatcggctggtgggctaccactgcacgcgcctcacaccgcctgaagcgcttcaaattcgcaccgacggcttgcgtgccttgtcgccgggcttggtgcaggcgcgactggaagcggtggtgcaggccgggctcatgacgccggcgcagtaccggttttttgtggacagccccatggttcaggcgcacctcgccaatcgccatggccaccgaactggcaaggtgtggctgtgcccgaaccggtcgagcctgcgctacgcctcggccgtctacaggctctttcgctcttggggcggcgaagtgctgtacgccggcttcggagacgacgcggccgtcaccgacgtgttcgggggactgggtcagccggcgatcgtcaaatgtgccgttcccctacctgtcgacgacttgtacggatgccgtaccgccgagttgctgtccaatgcggtacgtgcgcagatcgcgcaccccgagccgtcgccgtcgttcgattggaaggtgccgcgcgacttggacccgtccgaagtgattgacgtgatcgcgttcgaagatccgcgcttcgaagaactcaccggccatctaaaatggccggtggactatcgccttggctga

SEQ ID NO: 528336 - DNA, 840 bp, Stenotrophomonas maltophilia
atgaacgccttgggattcggggcccgcccgaacgacttccaggacatcaccacggaaaagggccttcgatcgatcgcaccatggttggtgcttggtagttccaaccgatcggcgcacccggcgttttcgttgtatttttcgcgcgtgagttcggtgtggcaccaacatcgcgacgtgatcgaggaagtccagcgccagcacgatgtctccaagcatcgctcgtccatctaccgcggcggacaatcgcgcatggatcctcctcccggcttctatgcacggctcggtttatccgatgaccatccccggcgattcgatttcgcaccgatggctgaagtcatcttggatcccgatcccaaacgtcccggaagttttccccggccccaggtcaaacacgaagacctgcagacactggaaggcctttgcgtggagttcgcaacgctggtcgaggcgtcctgccgggccttgctcgacgacgccaagcagctcgtgcagctgacccatacggcaattctggatcggtttgtcgtagtggggcaagccggcattgccttgttctcggacgaacaatgccgggtgccgatcggcggaattcagggcattcgaatggattttggccatggtggctatcccgccgaaccggggcgcgtgacgcccgcctgcgctggcatcgagtatcgcgtcggcgaccaattaccgctgcgtggcggacacgacatgagtcgacgcgtcggacaggcgtggtttcgtcatcccgacagcggcgacatcgtacgggcctggtggtcctcgtcggccgtctatgtagcgcagccgctgccaccgcaggccgctgacccgtag

SEQ ID NO: 528337 - DNA, 303 bp, Stenotrophomonas maltophilia
atgaagtatggattgatttcccttctccccctccagctggcacgactgttccggctcgtgcacagcgtcgagccagtcctgctggacgagtccccgcgaaagtcctgggtcctgctggtccgcggccgggggttcacccggatcctgcgcgacgagccgctggtgtcccccagcctgctccgcaccgccgatccgcacctgccccgtcccatgtgttttccatcaagccgtggcgcggtggggtatgcgcaaagcgtggggctgataccgcaccaagcctcctggcgggtgcgcgagtcctga

SEQ ID NO: 528338 - DNA, 489 bp, Stenotrophomonas maltophilia
atgcacaccttttcgaccttggtgctttacgaacgccatgggcgggcagccatcggctaccgtgccgagatgatcgaccagatcgcccgcggcgacatcgccgaaggaagccgcggtgcctgggagttgcgttgctggacaccggccaatgaatcacctcgccatggtgtgactgcggacgaactcaccgccctcgtaaacgccgttttccggacgaccagctactgcgttggaaatagccgtccatcgaatgttgtccagcgattccattgcggccatagcgggttcgtcgtcgatcttcctgacagcctcccccttgccgagcatttggcgctttggagcaatgaggcaaagttgaatgatgcgttcctgcaggctcgccacctcgacactgaccagctttttgctgtccggcacgagctacagcaagagatcgaggcgatggtgagcgtcaaagacgagttgtgcgggcaattcccaacccgctag

SEQ ID NO: 528339 - DNA, 540 bp, Stenotrophomonas maltophilia
atgctgtggcggatcttccgtgagcgagaggtcgttgcccgtttctggacgatgccggcgtccgcgcgccaccaccacgcgcttccgggaggtctcgccgtccacagcctcgaggttgcacgcaaccttgcagggcaagcagcagccgtaggtggccacgaacgcgacctctgcattgcagccggcttgctgcacgacatcggcaaggtgtggtcctacacgccggacatgttcctcaacaccgcggcacgcgcgatgggacatgaacttgtcggcctgtcgcggctcgagcgggaactgaagattctcgaaggcgagtggccggacggtgcctatgccatgcgcgtcctgctcagcggctgcggtcgcatgcggcaggacggctcgatgccctcggcactcgtcgcgaggctgaaggcggctgaccagcgcagctgcgagctggaacgcaacggcagggatcccaagcaggcgtggaaaccaaaccggtggctgccgcctccgccgccagacatcgatccggcaattcggactgactaa

SEQ ID NO: 528340 - DNA, 228 bp, Stenotrophomonas maltophilia
atgaccgagaccctcccccatcgcctgggcaaggccttccgcaagcgccgggaggcgctgggcttcagccaggaaagctatgccgacgagatcggcatgcaccgcacgtactacagcgcgatcgagcgtggggagaagaacctgcagctggacaccctgcagaaggtctgtgagggactgcagacgtcgatctgggaggtcttcagggacgcggaaacaggacgttag

SEQ ID NO: 528341 - DNA, 426 bp, Stenotrophomonas maltophilia
atgagtgcgctgtataccgccaaggccaccgcgatcggtggacgcaatggaaccgtgcgtagcgacgacggcctgatcgacctgcagctcgccctgcccgccggcctcggcggcaagggcgatgcgaccaatcccgagcaactgttcgccgccggctacgcggcctgcttcggcaatgccgtcatccatgcgacccgcaacaaggaaacgaagatcagcgacaatgacgtggaagtgaccgctaccgtcggcatcgggccgggggctaccggcggcttcgggctgacggtcaccctggacgtgaccctggccggcgtcgaccaggccaaggccgaggaaatcgttgccgaggcgcacaaggtgtgcccgtactccaacgcgacgcgcggcaacgtcgacgtaacgctgtcgactcacacgcgctga

SEQ ID NO: 528342 - DNA, 483 bp, Stenotrophomonas maltophilia
atgaaggcatcgacacactcaaggaagtccgcgatacgcggcgcgggaaacgatccgctgctgctggatcggcaggtctgcttcccgctctatgccgcatccaacctgttgacgcggctctatcgcccggtgctggagccgctcggcctcacctacccgcagtacctggtcatgctggtgctgtgggaacgatcgccggccagtgtcggcgatctcggtgaacgcctgcacctggattcgggcacgctgacgcccttgctcaagcgcatggaacaggccgggttcatcagccgacgacgggatcccgaggacgagcggcgggtgctcgtcaccctgacggcgcatggatgcaacctgcgcacggctgccctggccgttccagaaatgctttcccttcgactgggcctcgaaccgactgccgtcgatgaactgcgcgattcggtgaaagcgttggtgcagatcctgggcagcgacgcaaagtga

SEQ ID NO: 528343 - DNA, 1017 bp, Stenotrophomonas maltophilia
atgtgcctgttggccggacccgtgtccgcggaggacggctgtcgttcggatacgacccggctctccacccgggcgaccgtcaatgttcgcatcgacaacgacatgttcggcggcatgggccaggaccagggctactccaacggcttcctggtcagcgcggtttcgcccaacctggccgactacaccgacgacccctgcctgccgcgcccggcacgtcgcctgaaccgccacctggcgtggctgcagccggacggcttcgacgagcagaacatgatcttcggcgtcggccagctcctgtacaccccgaccgacaggaaccgcacggacctgatcgccgacgaccgcccctacgccgccgcgctgctgctgagcttcggctacaacgcgcgcaagggcgaccggctgcgcaccacccaactgcggctggggatggtcgggccttcggcgttcggtgaacaggtccagaaccggtggcacgacgtgatcggctccgaccgattcgatggatgggatcatcaactgcgcgacgagccggtgctgcagctgatccacgaacgccgcaagcggctcggccggcgcgagacccccggcggctggggctgggatcttacccgacactggggcgggagcctgggcaacttcgccacctatgccaatgtcggcggcgaatggcgcttcggcgcgcgcctgcctgacgatttcggcacggcgccgctgcgcccggccggcgagaacacgtcgccggtgaaggaggtcgccgatagacgctggcacggccacgtcttcgtcgccgtcgacgcacgctgggtgctgcacgacatcactctggacggcaacaccttcaagtccagccacagcgtcgacaagcggcccatggtggccgacatcggttacggtgtcgcgctgcaccgggggcactggcggttcgcgctggcgcgctaccaccggacgcgggaattcgacggccaggaggacatcccggtctacggtacgttcaccatcggcaggcacttctga

SEQ ID NO: 528344 - DNA, 195 bp, Stenotrophomonas maltophilia
atgttgctgggactcgatgcatcgatctggaaactgctgctggtggtgctgctgtttccggtgatcacggtggcgctgctcaacgtggttcttcgcaagcgcggcggcatcggcgccggctggggcggcgcgctggtggtggcattggccggagtgatggcggtgctggtgatcttcgacaaggtccgcctctga

SEQ ID NO: 528345 - DNA, 1221 bp, Stenotrophomonas maltophilia
atgtccacgccgtccccgaaccgcttgatcctcgtcctcaactgcggttcgtccagcatcaagttcgcgctgttcgacgcggatgccgccccgttgccgcgcacgccgctgtggaacggcaaggtgcagggcatcggtgggccgatgccggatctcggagaaaccggcgtgcggccgttcgcggtgcaactcgatcccgagcatccgcataccgatgcgctggcgctgatcctcgggcgcgtgcgggcgcggctggacggtcgcgaactcgcggcggtcgcgcaccgggtcgtgcacggcggcagcaagtacttcgcgccgacccgggtcgatgccgcactgattgccgagttgcgcgaactgatcccgctcgcgcccttgcaccagccgttcccgctcaaggccatgtcgttgctgctggagcaatacccgcacatggtgcaggtggcctgcttcgacaccggcttccaccacaccttgcccgaggtcgagcaggtcctgccgttgcccaccgaatggcgccagcgcggcctgcgccgctatggctttcacggcctgtcctacgactacatggccaccgccttgcccgagcgccacggcgatgccgcgcgcgggcgcaccatcgtcgcccacctgggcagcggcgccagcctgtgcgcgatgcgggatctggagagcgttgccaccacgatgggcttctcggcgctggatggcttgatgatgggcacccgcaccggcgcgctcgaccccggtgcggtgctgtacctgatggagatcgagaagctgtcgctggacgaggtcgggcagctcctctaccaccgttccggcctgctgggcgtgtccgggatctcgccggagccgcgacggatcgtcgagcacgaagccgacgaaggcgaagccggcgaacgcgcgcgcctcgcgctggaactgtacgtgcgccgcatcgtgcgcgaaatcggcgcgctcgtggcggtgctcggcggcctcgacatgctggtgttcaccgccggcgtcggcgagcacaacgacttcatccgggagcgggtctgcgccgggctggcgttcctcggcgtgcgcctggatgccgccgccaacgccggcgatgcgccaatcgtgtcggttgccgacagccgggtgctggtgggcgtcgaaccgaccaacgaggaatgggtggccgcgcgcgacacgtgcgcgctgcttgccacgtgtaccgcagcctga

SEQ ID NO: 528346 - DNA, 753 bp, Stenotrophomonas maltophilia
atgaaatactccttccccggccagtccgccctcgtcaccggcgccgcctccggcatcggcgaagccaccgcccgcctgctggccgccaacggcgcatcggtggtggtgtccgacctccaggccgatgccgtgcagcgtgtcgtcgacgcgatcgtcgccgacggcggcaaggcggtggccaacgtctgcgacgtcgccgacgccgcccaggtggaagccgcggtcgcctgcgccgtcacccatttcggcgcgctgcacctggcggtcaacaatgccggcatcggcggcgattccggtcccgccggcgaactgtcgctggaggcctggcagcgcctcatcgacgtcaacctcagcggcgtggcgtacggcctgcgctaccagatcccggccatcctcgccgccggcggcggcgccatcgtcaacatgtcctccatcctcggcctggtcggcgacgccggcagcccggcctacgtcgcctccaagcacggggtcaccggactgagccgttccgcggcgctggcctactcggcccggggcatccgcatcaactcgatccatcccggctacgtggaaacgccgatcctcgacaacctcgacgccgaagcgcgcgcggcatcggtcggcctgcacccgatcggccggctcgggcgcccggaggaaatcgcccacgccatcgccttcctgctgtccgacgccgccagcttcgtcaccggcaccgcgctgacggccgatggcggctacaccgcgcgctag

SEQ ID NO: 528347 - DNA, 1419 bp, Stenotrophomonas maltophilia
atgaccgcacccgaacccgacctgcacatcctgcgcaaccgcaccttcgacgagctcgcgcccggcgacagtgccagcatcgaacgcgtgctggggatacaggacatccagttgttcgccctgctgtcgggcgacatcgaccccgcccacgttgacccggaatttgccgcgtcgagccggttcgagggcgtgatcgcccacggcatgtggggcggtgcgttgatctcgggcgtgctcggtacgcgcctgcccggcgcgggcacgatctaccgcagccagaccctgcgcttcctggcgccggtgcggatcggcgaccggctggcgatccaggtcacggtggtcgccacggacccggcgacccgtggcgtgacgctggcctgcacctgcaccaaccaggacggcgacgtggtgatcgagggcgaggccgaggtgatcgcccctgacgagcgcatcgagtgcagccgcgccaccctgccggaaatccgcctggacgtggccggcaacgacggcctggaacgcctgctcgcgcgggtcgcgccgatgcaggcgatccgggtggcggtggtccacccatgcgacgaggccagcctgtcggcggcgctggacgcacgcgatgcggggctgatcgagccggtattggtggcgccacgcgacaagctcgaagcgacggccaccgaggccgggctcgacctgtccgggctcgccgtcgaggacgtgccgcacagccacgccgccgccacgcgtgcggccgagctcgcccgcgacggcaaggtcgaggcgctgatgaagggcagcctgcacaccgacgagctgatggccgcggtggtcgcgcgcgacgccggcctgcgcaccaagcgtcgcgtcagccactgcttcgtgctgcagaccccgtactatccgcgtccgttcatcgtcaccgacgcggcgatcaacctcgccccggacctggaacagaaggccgacatcgtgcgcaatgccatcgaccttgcccacgcgatcggcgtggagatgccgaaggtcgcgatcctcgccgcggtggagacggtcagcccgacgatgccggccacgctcgacgccgctgcactgtgcaagatggccgatcgcggccagatcgcaggcggcgtgctcgacggcccgctggccttcgacaacgcggtgtccatagccgccgcgcgcaccaagggcatcgcctccgacgtggccgggcaggccgacgtcctggtcgtgcccgacctggaaagcggcaacatgctggccaagcagctcatgtacatgggcgaggcggcgagcgcgggcatcgtgctcggggcgaaggtgccgatcgtactgaccagccgcgccgacagccgccaatcgcgcatcgcctcctgcgccatcgcgctgatgctggcgcaccgctaccgcgccgcgccgccatga

SEQ ID NO: 528348 - DNA, 2394 bp, Stenotrophomonas maltophilia
atggccaagcactctggaacacccggccaggactggagtcgctggctgtccgacccggccgcgctgggcgccgcagccgtcgactacggcgtcgacgcctggcagcgcacactgctgtacgccgacgtgcgccgcgaacgcggcaaccagtaccgcgcgcatctgcggcaacaggtgcccaacgtgctggacttcccggccgagccggtcctgtccggcctggacctgccgcgcccggtgaactacggcctggtgcgcatcctgccgccggccgatacaccgaccgatccggccaggcgccccttcatcgtggtcgatccgcgcgccggccacggccccggcatcggcggcttcaagcccgacagcgagatcggctcggcgctggccgccggccatccctgctacttcgtcggcttcctgcccgacccggtgcccgggcagacggtcgaggacgtgatgcgcgccgaggccgagttcgtgcgcaaggtcgggcagttgcacccggacggcgccggcaagccggtcgtgatcggcaactgccaggccggctggcagatcctgatggcggccgcggtctggccggagctgttcgggccgatcatcgtcgccggcgcgccgctgtcgtactgggccggcgacaacccgatgcgctacggcggcggcctcaccggcggcagctggctgaccgcgctcaccggcgatctcggcgacggtcgcttcgatggcgcctggctggtacagaacttcgagaacctggatccggccaacaccctgtggtccaagcagtacaacctctacgccaacgtcgataccgagggcccgcgctatctcggcttcgagaagtactggggcggccacgtcttcctcaacgacggcgagatgcagtacatcgtcgacaacctgttcatcggcaacaagctggccaccgccgagctggtcacctccgacggcgtgcgcatcgacctgcgcaacatccgttcgccgatcgtggtgttctgttcctacggcgacaacatcaccccgcccgggcaggccctgggctggatcaccgacctctaccgcgacgacaacgacctgctctcgcacgaccagaccatcgtctacgccacccacgacaacatcggccacctgggcatcttcgtatccggcagcgtgggccgcaaggaacaccgcaagttcgccagcaacatcgacatcatcgacatgctgccggcgggcgtgttccaggccgtggtcggcgagaccccgtcgggcaccggaggcgaactgggcgaagatcccttcctgctgtcgatccgcccgcgcggcatcgacgacgtgcgcgccatcgtgaagccggaccaggcctcggaacgccgtttcgccgcggctgcacgggcctcggagatcaacctcgcgctgtatcgcaacctcatgcaaccgtgggtgcgtgcggtctccacgccgtggtcggcgcactggctgcaaacactgcacccgatgcgcaccggctacgaatactggtcggacgggcatccgctggcggagacggtggccacgctggcgcagcaggtgcgcgggcaccgcgacccggtcgttgcggacaaccccttcctgcaggcccagggcgcactgtcggatgcgatcacggacgccctggatcgctaccgcgaccaccgcgacgagatctaccggatcgccttcgagacgatctacggctcgccgtggatgcaggcgctggccgggcagggcatggacgacgacgcgccgccgcgcccgcacccgggcgattcgcccgagcaccgcgctttcgtcgagcacagtctcgcgcagcagcgtgcggcgatcgcgcagggtgggctggtcgaggccggcctgcgcgcgctgctgttcgtgctggcggcgcgtggcgaggctgacgagcgcctgttcctgtatgcccgcaatctggtccgcagccgtggcggcagcggtatccatcgcggacaggcgcgcgcgctggtacgcacccaggcattgctgatgcgcctggataccgaagcggccatcgctgccctgccacggttgcttgatggcgtggcggcgacgcagatccgcgccgtcgccaccagcctgcgcgagattgccgggagcgcaggcgcgctgtcggccgacgaacgcaagcgcctggaccggatgcttggcgtgttcgcggccgcgtgccgggaagcggcggatgcggacaacgatgcgaagtccgggaccaccccggtgaaggcgccgtctgcgccgaacagggccgccgccaggaaggccgccagcaaagccgtgaaaaagaccgccgggaacgtcgcgaaaaaagccgcgacgaagaaggccgcggccggccgtcgcagcacgacgggcgcggccaggccgcgccgcccggaatcgtga

SEQ ID NO: 528349 - DNA, 1179 bp, Stenotrophomonas maltophilia
atgcgcgacatcgccatcctcgccgccacccgcaccgccatcggtgcgttccagggcggcctgtccagcctgcccgcccaagccctgggcgcccacctgatcggcgcgatcctgcgcgacaccggcgtggcgccggagcagatcgacgaggtgatcctgggccagatcctcgccgccggcagcggccagaacccggcccggcaggcggcggtgcaggcaggcctgccctacgacgtgccgtcgatggccatcaacaagctgtgcggctccggcctcaaggccgtgcacctggctgcacaggcgatcgcactgggcgatgccgacctggtcctggccggcggccaggaaagcatgagcctggccccctacgtgctgccgaaggcgcgcaccggcctgcgcctgggccatgcgcaactggaggacagcctgatccgcgacggcctgaccgacgccttccacgactaccacatgggcatcaccgccgaaaacctggcggagaagtacgccatcacccgcgagcaacaggacgccttcgccgccgcctcgcaggagaaggcgatcgacgcggtggccaccggccgcttccgcgacgagatcacccccatcgagatcccgcagcgcaagggcgacccggtggtggtcgataccgacgagcagccgcgcgccggcaccaccgccgatgcgctggccaagctcaaacccgcgttcaggaaggacggcaccgtcaccgccggcaatgcctcgaccatcaacgacggcgccgccgtgctgctgctggccagcgccgacaaggccaaggcgctcggcctgccggtgctggcctgggtgaaatcctgggccagtgccggcgtcgatccggcgatcatgggcatcggcccggtgccggccacccgcaagaccctggagaaggccggctggaccctggccgacctcgacctgatcgaggccaacgaggccttcgccgcgcagtcgctggcagtggcgaaagacctgcagtgggacatggacaaggtcaacgtcaacggcggcgcgatcgcgctggggcacccgatcggcgcgtccggcgcgcgcgtgctggtgacgctgatccatgagttgatccggcgcgacgcgcacaagggcctggccacgctgtgcatcggcggcggccagggcgtgggcatcgccatcgaacgctga

SEQ ID NO: 528350 - DNA, 750 bp, Stenotrophomonas maltophilia
atggctgcgaacccgaaacgcaccgccctggtcacgggcggcatgggggggctgggcgaggcgatcgcccgggtcctgcatgacgcaggccacaccgtcctggtcacccactcgcgcagcgacgaggccgcctccacctggctgaagcagcaggccgacgccggctacacgttcgcctcctacgacgtggacgtgggcgactacgcctcctgccagcgcatggccgaacgcatcgccgccgacggccatgccgtggaaatcctggtcaacaacgccggcatcacccgcgacgccagcttccgcaagctgaccaaggacaactgggacgcggtgctgcgggtcaacctggactcgatgttcaacgtcaccaagccgttcatcgacggcatgctcgaacgcggctggggacgggtcgtcaacatctcgtcgatcaacggggacaagggacagttcgggcaaaccaactactcggccgccaaggccggcatccacggcttcaccaaggcgctggcccaggaggtcgcgcgcaagggggtgacggtgaacaccgtgtcgccgggctacctggccacgcagatggtgatggccgtgcccgaggaggtgcgcaaccagatcatcgccgggattccggtcggccggctcggccgcccggaggaaatcgccgcgctggtcggcttcgtcgccagcgatgcggccggcttcctgaccggcagcaacatctcgatgaacggcggccagcacatgcgttga

SEQ ID NO: 528351 - DNA, 486 bp, Stenotrophomonas maltophilia
atgagcaacgcaaacaccctcccgctggacctgtacaaggccaacctggaattgcaggtcaggatcggcaagctgttccaggaaggcggcaagcaatggctggactacggctaccgcctggccagcgacggcatcgccgagtccgatgccgagatcgcgcaactgctgcagtccgaggactggcagaagctggcgacgctgccggccgaagcgttctggcgacagctgcaacagcgcttcggcgacagccaggcggccgcgcagatcgccatcaccgcgcagaccgggtttgcccacggcctgcaggaagccgtccaggcatggcagcagcagactgccggggtcctgggcgaggtggccccggccgcactgtccggcggcgattcgccgtgggccaacctgttcaagccatggcagcagctgctgcaggccgccgccacggacacgccggcagccgtcgggccggccgcgaaagggcgcaagtaa

SEQ ID NO: 528352 - DNA, 1146 bp, Stenotrophomonas maltophilia
gtgaacaagcagcgcacaagagcccgtcatctcgccaacatctaccggctgggtgtcaaggagctgtggagcctgtggcgcgacccgatgatgatattgctgatcgtctacgtgttcacggcagcggtgtacaccgccgccacggcgatgcccgagaccctgcacaaggcgccgatcgcgatcgtcgacgaggacgactcaccgttgtcgcagcgcatcgtctcggccttctatccgccgcagttcatcatgccgcagatgatctcgatgtcggagatggacgaaggcatggacgatggccgtttcaccttcgcgctgtacatcccgcagggcttccagcgcgacgtgctggccgggcgcgcgccggacctgcagctcaacgtcgatgccacccgcatgagccaggccttttccggcagcggcgcggtgcagcagatcgtcatcggcgaggtcaacgaattcgtccagcgccagcgtggtggcagcgcattgccggtggacctggcgctgcgcgcgcgcttcaacccggcgctggaaaagagctggttcggcggggtgatgcagatcgtcaactacatcgcgatgctgtcgatcgtcctgaccggcgcggcgctgatccgggagcgcgagcacggcaccatcgaacacctgctggtgatgccggtcacgcccaccgagatcatgctgtccaagatctggtcgatgggcctggtggtgctgctggcctcggcgctgtcggtgaacctggtggtgcgcggcctgatcggcgtgccgatcgagggctcgctgccgctgttcttcgccggtgccgcgctgtgcctgttcgccaccacctcgatgggtatcttcatggccaccgtggcgcgcaacatgccgcagttcggcatgttgatgatgctgaccatcatgccgctgatgatgctgtccggcggcatgaccccgcgcgagagcatgcccgcgctggtgcagaacatcatgctcgccgcgcccaccacccacttcgtcgagatcggccaggcgatcctgtatcgcggcgccggcatcgaggtggtgtggaaaccgttcctgtggctggcggtgatcggcggcgtgctgttcgcgctgtcgctggcccgcttccgcaagaccatcagccagatggcctga

SEQ ID NO: 528353 - DNA, 2850 bp, Stenotrophomonas maltophilia
atgtcgccggattccaatgccctgccgtcggtggtgcgcctgtcgggcgtgcgcctgcactacaagaaggtcgaggcgctggccggcatcgacctggacattcccgcaggtcgcatgatcggcatgatcggtcccgacggcgtcggcaagtccagcctgctgtcgctggtagccggcgcgcgggtgatccaggaaggcacggtcgaggtgcttggcggcgacatgcgcgagcgcaggcaccgcaaccgggtctgtccgcgcatcgcctacatgccgcaggggctgggcaagaacctgtatccgaccctgagcgtggaggagaacctgcagttcttcgcccgcctgttcggccacggcccggacgagcgccgccgccgcatcgacgagctgaccactgccaccggcctgcatccgttcctgtcgcgccctgccggcaagctttcgggcggcatgaagcagaagctgggcctgtgctgcgcgctgatccacgaccccgacctgctgatcctcgacgagccgaccaccggcgtcgatccgctggcgcgtgcgcagttctgggagctgatcgacgacatccgcgccgaccgcccgggcatgagcgtgatcgtcgccaccgcctacatggacgaggcccagggcttcgactggctggtggcgatggacgagggccgggtgctggccaccgggacgcccgccgaactgctcgaacgcaccggcgccgattcgctggaggcggccttcgtcggcctgctgcccgaggaaaagacccgcgatcatgccgaggtggtgatcccgccgctggaagcggatcaggacgacatcgccatcgaggcgaaagacctgaccatgcgcttcggcgatttcgtcgccgtggacagcgtcagcttccgcatccgccgcggcgagatcttcggcttcctcggctccaacggctgcggcaagtcgaccacgatgaagatgctgaccggcctgctggaggccagcgagggccaggcctggctgttcgggcatgaagtggatcccaaggacatcgacacgcgcaggcgcgtgggctacatgtcgcaggcgttctcgctgtacggcgagttgaccgtcagtcagaacctgatcctgcacgcgcagctgttcaacgtaccggaagacgggatcccgggacgggtggacgggatggtcgaacgcttcggactgcgcgaggtgctggacagcctgcccgagagcctgccgctgggcatgcgccagcgcctgtcgctggcggtggcgatggtgcacgaaccggagctgctgatcctcgacgagccgacctcgggcgtggatccggtggcgcgcgacgccttctggcggctgctggtggaactgtcgcgccgcgacaaggtgacgatcttcatctccacccatttcatgaacgaggccgggcgctgcgaccgcatgtcgatgatgcacgccggcaaggtgctcgacagcgacgcgcccgcgaagctggtggaaaagcgcggggcaaaggatctggaagatgccttcatcggctatctgatcgaggcgtcgggcgaaaccaccacgacaacgcccaccgacacgtctccgtcattcccgcgaaggcgggaatccagtgccgttgccgttgcttctgcgtcatcggaacgaaagacactggattcccgccttcgcagggcttccaacggacgcacgtccggtcatgacgagcaaaaacagaagtggaatcggctgaagggcttcagcccgcagcgcatggtcgcctacctgtggcgcgaggcgctggagctgcaacgcgatccgatccgcgccgcgctggcactgggtggatcgatcctgctgatgttcgtgatgggcttcggcatcaccatggacgtcgaggacctgcgcttcgcggtgctcgaccgcgaccagtccacgctcagtcgcgactatgcattgcagctgtcggggtcgcgctacttcgtcgagcgcccggcgatcagcgattacgaccagctcgatacccgcatgcgcagcggcgaattgtcgctggcgatcgagatcccgcacggcttcatgcgtgacgtgctggccgggcgcaacgtgcagatcggtgcctgggtcgatggcgcgatgccgacgcgcgccgaaaccgtcaacggttacgtgcagggcatgcaccagacctggctggtgcagcagctggccgagcgcggcatcgccatgcctgccagcgccagcgtacagacccggttccgctacaacccggacgtgaagagcctgccggcgatggtgccggcggtgatcccgatcctgctgctgatgctgccggcgatgctgaccgcgctggcggtggtacgcgaaaaggaaaccggctcgatcaacaacttctacgtcaccccggtcacccgcagcgagttcctgctcggcaagcagctgccttacgtgggcctggcgatggtcaacttcgggctgatgagcctgctggcggtgaccgtgttcggcgtgtcggtgaccggcagcttcctgaccctggcgctggccgcgctggtattcagcttcgcctccaccggcatgggtctgctggcctcgaccgtgacccgcagccagatcgcggcgatgttcatcgcgatgatcggtaccgtcgtcccggccacccagttctccggcctgatcgatccggtgtcctcgctggaaggcagtggcaagctgatcggccagatctacccggccacccacttcgtcaccatcagccgtggcgtgttcagcaaggcgctgggcttcggcgacgtcaccgccgcgttctggccgatgctgctgtcggtgccggtgatcctgggcgtcgccatcgcgctgctgaagaagcaggagaagtga
